United States Patent Application Publication US 2007/0010469 A1 - sequence listing, part 2

SEQ ID NO: 4607 - DNA, 2787 bp, Homo sapiens
agagcggaggccgcactccagcactgcgcagggaccgccttggaccgcagttgccggccaggaatcccagtgtcacggtggacacgcctccctcgcgcccttgccgcccacctgctcacccagctcaggggctttggaattctgtggccacactgcgaggagatcggttctgggtcggaggctacaggaagactcccactccctgaaatctggagtgaagaacgccgccatccagccaccattccaaggaggtgcaggagaacagctctgtgataccatttaacttgttgacattacttttatttgaaggaacgtatattagagcttactttgcaaagaaggaagatggttgtttccgaagtggacatcgcaaaagctgatccagctgctgcatcccaccctctattactgaatggagatgctactgtggcccagaaaaatccaggctcggtggctgagaacaacctgtgcagccagtatgaggagaaggtgcgcccctgcatcgacctcattgactccctgcgggctctaggtgtggagcaggacctggccctgccagccatcgccgtcatcggggaccagagctcgggcaagagctccgtgttggaggcactgtcaggagttgcccttcccagaggcagcgggatcgtgaccagatgcccgctggtgctgaaactgaagaaacttgtgaacgaagataagtggagaggcaaggtcagttaccaggactacgagattgagatttcggatgcttcagaggtagaaaaggaaattaataaagcccagaatgccatcgccggggaaggaatgggaatcagtcatgagctaatcaccctggagatcagctcccgagatgtcccggatctgactctaatagaccttcctggcataaccagagtggctgtgggcaatcagcctgctgacattgggtataagatcaagacactcatcaagaagtacatccagaggcaggagacaatcagcctggtggtggtccccagtaatgtggacatcgccaccacagaggctctcagcatggcccaggaggtggaccccgagggagacaggaccatcggaatcttgacgaagcctgatctggtggacaaaggaactgaagacaaggttgtggacgtggtgcggaacctcgtgttccacctgaagaagggttacatgattgtcaagtgccggggccagcaggagatccaggaccagctgagcctgtccgaagccctgcagagagagaagatcttctttgagaaccacccatatttcagggatctgctggaggaaggaaaggccacggttccctgcctggcagaaaaacttaccagcgagctcatcacacatatctgtaaatctctgcccctgttagaaaatcaaatcaaggagactcaccagagaataacagaggagctacaaaagtatggtgtcgacataccggaagacgaaaatgaaaaaatgttcttcctgatagataaaattaatgcctttaatcaggacatcactgctctcatgcaaggagaggaaactgtaggggaggaagacattcggctgtttaccagactccgacacgagttccacaaatggagtacaataattgaaaacaattttcaagaaggccataaaattttgagtagaaaaatccagaaatttgaaaatcagtatcgtggtagagagctgccaggctttgtgaattacaggacatttgagacaatcgtgaaacagcaaatcaaggcactggaagagccggctgtggatatgctacacaccgtgacggatatggtccggcttgctttcacagatgtttcgataaaaaattttgaagagttttttaacctccacagaaccgccaagtccaaaattgaagacattagagcagaacaagagagagaaggtgagaagctgatccgcctccacttccagatggaacagattgtctactgccaggaccaggtatacaggggtgcattgcagaaggtcagagagaaggagctggaagaagaaaagaagaagaaatcctgggattttggggctttccagtccagctcggcaacagactcttccatggaggagatctttcagcacctgatggcctatcaccaggaggccagcaagcgcatctccagccacatccctttgatcatccagttcttcatgctccagacgtacggccagcagcttcagaaggccatgctgcagctcctgcaggacaaggacacctacagctggctcctgaaggagcggagcgacaccagcgacaagcggaagttcctgaaggagcggcttgcacggctgacgcaggctcggcgccggcttgcccagttccccggttaaccacactctgtccagccccgtagacgtgcacgcacactgtctgcccccgttcccgggtagccactggactgacgacttgagtgctcagtagtcagactggatagtccgtctctgcttatccgttagccgtggtgatttagcaggaagctgtgagagcagtttggtttctagcatgaagacagagccccaccctcagatgcacatgagctggcgggattgaaggatgctgtcttcgtactgggaaagggattttcagccctcagaatcgctccaccttgcagctctccccttctctgtattcctagaaactgacacatgctgaacatcacagcttatttcctcatttttataatgtcccttcacaaacccagtgttttaggagcatgagtgccgtgtgtgtgcgtcctgcggagccctgtctcctctctctgtaataaactcatttctagcccg

SEQ ID NO: 4608 - DNA, 576 bp, Homo sapiens; identical to SEQ ID NO: 3461

SEQ ID NO: 4609 - DNA, 238 bp, Homo sapiens; identical to SEQ ID NO: 3463

SEQ ID NO: 4610 - DNA, 493 bp, Homo sapiens
tcggctcgaggggaaactggtgaatctttaacattacctggtgtgttccctaacattcaaactgtgcattggccatacccttaggagtggtttgagtagtacagacctcgaagccttgctgctaacactgaggtagctctcttcatcttatttgcaagcggtcctgtagatggcagtaacttgatcatcactgagatgtatttatgcatgctgaccgtgtgtccaagtgagccagtgtcttcatcacaagatgatgctgccataatagaaagctgaagaacactagaagtagctttttgaaaaccacttcaacctgttatgctttatgctctaaaaagtatttttttattttcctttttaagatgatacttttgaaatgcaggatatgatgagtgggatgattttaaaaacgcctctttaataaactacctctaacactatttctgcggtaatagatattagcagattaattgggttatttgcattatttaat

SEQ ID NO: 4611 - DNA, 536 bp, Homo sapiens; identical to SEQ ID NO: 684

SEQ ID NO: 4612 - DNA, 247 bp, Homo sapiens; identical to SEQ ID NO: 685

SEQ ID NO: 4613 - DNA, 462 bp, Homo sapiens; identical to SEQ ID NO: 3466

SEQ ID NO: 4614 - DNA, 534 bp, Homo sapiens; identical to SEQ ID NO: 686

SEQ ID NO: 4615 - DNA, 282 bp, Homo sapiens
cactgattacttgattcccttcttcactgtaatatacaaagtgtgtattgtattcagagcaccatggtgttctggttattggttaactctctgtcttctctactagagtgggaactccttaatgataggaatcttattttatacatctctttatttccagagcctcaaaaactgtcaggcaatgaaatgtggatttcggtaatgtctgaaagatgtgttgaaaatgcaagtgatcacattaagcatcagttggatggtaacataagtactaccttcagagtt

SEQ ID NO: 4616 - DNA, 279 bp, Homo sapiens
ctgtgcacacataaaatactaagaagctaaacttaatatctgcaggtagaagttttaaattcaagattttaaccaaataacagagttaatgctaaaatctcacttttgaagtttatgttgaatattagcattctaatatttaatatttttctatttttgaaataggaaatggaaaagatgcagtaggtttttcaaaagggtatcataggtgagcacttcttatagaagaagaaaactaagaggtagtgctatttacctcttcagcactaagtttatctt

SEQ ID NO: 4617 - DNA, 542 bp, Homo sapiens
aaaaagaagaagaaagaaaagcataagaaaaggaagaaagaaaagaaaaagaagaaaaaacggaagcacaaatcttccaagtcaaatgagggttctgactcagagtgacaaggatgtgacttgttcaacattctcttctcaaacactgaccaaggaacagaggaagatgcagtcagagaaagcagcaggatagagacgccgagagaggagtatatgtgggtcacagcagtgagctcccacccgccttgcagtgaagatgtgaccccaggagagggagtgtctccttccaggtgctagctctggacagcagctgattttaggcaggaaagtttcttcatcgttgtcctccctgctggtcacatgagtttacgattcctttgaagtgtctcccacagggtggcaggactgggagaatctctgaggcgtgtcttccaggccctcccacagcttgtgccctccacagtgtggactcaggtcccatagacatcaggctggagtcttctctgttgttgagaataataaaagctcattatttatttttt

SEQ ID NO: 4618 - DNA, 402 bp, Homo sapiens; identical to SEQ ID NO: 3467

SEQ ID NO: 4619 - DNA, 445 bp, Homo sapiens
gtgggagacatcactgcatctgtccccccagcttctgtgaagggaagctgtggcctcttttgaatgtggggaacaactgaagactcaggggtcacccagaggtctggtggaaagcaacttcaggtttcatcttgctctattcctcaaaggtctggtctgtgggcctctgaggagaaaacaggtctagccaagacagggacaaaatggggaagggggtgtgccaggcctgaactgagctaagcacctgccccgggctccacacttccatctttcttttgtcttcatttcacctctgtgtttaaagcactgtgtgacatagctccttagagatataacctattgtctgctcattgtcacgtgtgtgtgtgtcatctttgtattcttgcagtggtttcacatttccttacccagtcaagccagtatcccatccttcctcataatgcac

SEQ ID NO: 4620 - DNA, 370 bp, Homo sapiens
aatatttggtccctggtcagtttctgctttgcttatggtgctgctatctggagtaatagctttcatggtgaacttatcaatttattggatcattgggaacacttcacctgtcacctataacatgttcggacacttcaagttctgcattactttattcggaggatatgttttatttaaggatccactgtccattaatcaggcccttggcattttatgtacattatttggcattctcgcctatacccactttaagctcagtgaacaggaaggaagtaggagtaaactggcacaacgtccttaattgggtttttgtggagaaaagaatgttgtcccaagaagataaaaaatattgttaagtgtgcaagttatt

SEQ ID NO: 4621 - DNA, 214 bp, Homo sapiens
tacatacgagtaggcagcagactttaaaaataaaaaaaacctaggcatgttgatgttgcaaaatgctgtataaagctgaaacctgttcattcagtgccattgtagttgacatgaagcgattgtaaaactgtctccgatttttctctggtttattaaaatgctaactataacattttttgtgaatactttgaatgtttcctaacagttgtgatgt

SEQ ID NO: 4622 - DNA, 252 bp, Homo sapiens
cacatccaggaaagaggccagtagagaattctgcccactttttataaaaacttacagcgatggccccaccaaggcctagacacggcactggcctcccaggagggcaggggcattgggaatgggtgggtgccctccagagaggggctgctacctcccagcaggcatgggaagagcactggtgtgggggttccaccgagaaggggacctcatctagaaaagaggttacaaacctaccattaaactatttttcct

SEQ ID NO: 4623 - DNA, 322 bp, Homo sapiens; identical to SEQ ID NO: 3469

SEQ ID NO: 4624 - DNA, 204 bp, Homo sapiens
cccaagggagcagagacactggtcacgagatgtctgcacagcctcacagacaaagtcccaccctccccagagctggtgaagcgggtccgggatctctaccacaagcgactgccagacgtccgcttcctcatcccggtgctcaatgggctggagaagaaagaggtgatccaggccctgcctaaactcatcaaactcaaccccatc

SEQ ID NO: 4625 - DNA, 520 bp, Homo sapiens; identical to SEQ ID NO: 3470

SEQ ID NO: 4626 - DNA, 264 bp, Homo sapiens
  misc_feature 135, 137, 180, 209: n = A,T,C or G
gtgctggccagatggactgatgggctgctatacttgggtaccatcaaaaaggtggacagtgctagggaggtgtgtctggtccagtttgaggatgattcgcagtttctggttctatggaaagacattagccctgcngncctccctggagaggaactcctctgttgtgtctgtcgctctganactgtggtccctgggaaccggctggtcanctgtgagaagtgtcgccatgcttatcaccaggactgccatgttcccagggctcca

SEQ ID NO: 4627 - DNA, 556 bp, Homo sapiens
cctaatcctccctttgggcagtataggtgtttgcttttttgttttctttttttaagaaaaaccttgaaacctttgacactgacagatgtgtttgcaaggatacggcttcagtattactaatttccatgtgtatctggaagtatttttaaatggcataccaaaatccagaagtttaaagatgcctataaaagtaaacaacatttatttaaaaagaactctgaatatgccttcttttttaattagaaatatcttcgagacttgggtgtttgttaataactaataactggagtaagctacaggatctaaagcagccctttttacagtctagttaggagagagaaaataattgcaaatatccacttagaggcaaagaacaattttttattatcaaaaaggtttctgcacattgttgtggcaatattgtatctgtttagaaaatgggcttttccaaaagcaaacaaagataggttcctcaggtgaccaaaactgaaaatcaatatttccatgtttcattaatcaaggcataaaatacaattaaagcaaaatattttacatt

SEQ ID NO: 4628 - DNA, 260 bp, Homo sapiens; identical to SEQ ID NO: 10

SEQ ID NO: 4629 - DNA, 636 bp, Homo sapiens
aagctcgggaattcgctcgaggtgcgcggcctacacgcttgggggacagccctttaagacgacatctccgcgaacgccggcctcttgagccagggggacgctcttttgaaagtcagtcccaaaacagttaaggttttattttattttgttttatttccaagtcacagcccccgaatctcgtacaactctccctggaccacttccggttgccggcccgcgcctcataacttcggttcgagtgacctcggcccgggatgcccctcggctcaccccgggctcacgtcgcgatcctggcttgagtggcccagggtgggagacctggaagttttagcctagctgttctcaaggcggattaattagcccaagaaacattatattcatttttctggatatgccgcagaaggatccgtgccagaagcaagcctgtgagatacagaaatgtttacaagccaacagctacatggaatcaaagtgtcaggctgtcatccaagaactgcgtaagtgttgtgctcagtatcccaagggaagatctgtcgtctgttcaggatttgaaaaagaagaggaagaaaacctaacacggaagtctgcatcaaagtaaagttcttctgaagtgctgctccatgtttccaccaaatg

SEQ ID NO: 4630 - DNA, 336 bp, Homo sapiens; identical to SEQ ID NO: 3471

SEQ ID NO: 4631 - DNA, 251 bp, Homo sapiens
tttcttcctatggcaataacttaattgcatatggtatataaagaaccagttccagcagggagatttctttaagtggactgttttctttcttctcaaaattttctttccttttattttttagtaatcaagaaaggctggaaaactactgaaaaactgatcaagctggacttgtgcatttatgtttgttttaagacactgcattaaagaaagatttgaaaagtatacacaaaaatcagatttagtaactaaag

SEQ ID NO: 4632 - DNA, 428 bp, Homo sapiens
ccagctctctacagaaagtggcctttgttttctaaagcactgggattatttctgtagctaatatataattgtacagtttctttttagagatagagagtatctctgtgttcttatgaagacattttttatcagttttctgaaaatagatgaataaaatattatagtcacctagggtcactatggaataaagaaatcctagtttaaagaggaaatagtggcccttgatcaaactatttaatatggccttagtagaattagctgtatttagacaaagttagactttagtgtgaaatgtaataggtggctacattctcatcgttttaattaatgaaacttaaatggcttctcttcttccacatgtcctgtccttgacaagatgggcagtatcacaaaaggtcctggcattctaccatctaacactaggaact

SEQ ID NO: 4633 - DNA, 266 bp, Homo sapiens; identical to SEQ ID NO: 696
  misc_feature 161, 163, 168, 179, 182, 191, 199, 203, 207, 208, 211, 218,219, 224, 226, 227, 234, 236, 245, 246, 248, 252: n = A,T,C or G

SEQ ID NO: 4634 - DNA, 239 bp, Homo sapiens
ctgcagcaggagaacttgaagcctcaagagcagctgaccctggagccctatgagcgggaccacgctgtggtggtcggggtctaccgacctcttcccaagagcagcagcaaatagcacccagctcaggctcgcctgccatctccccaaggctgcattgtgtttgctattattttctgtgtgttttctttgtgagtgttttgttttgttgtttttctattaaactgcataaagaaacggct

SEQ ID NO: 4635 - DNA, 261 bp, Homo sapiens
cctgttcctctgctggacctggggtaggctgcaggggtgggcagtagcccctcttaaattgtggttgccatggtaccgagggactcattcctggggctcgctgggacctccctaaacccttcctggaagaaaactggaaccaactctgccctacctccctgcactaaccagctttgaggatggcactgaagaacccttggagcaaacatacctcccttgtgactcccacatcaaccattaaagttatttaacagcagcctt

SEQ ID NO: 4636 - DNA, 112 bp, Homo sapiens
tatgctgtgactttagacaagttaggaaagtacctagcagagtacctgggacataagtaggttttctgtaaatgtttgtgacctttggctccgttgtgaggagagactgagc

SEQ ID NO: 4637 - DNA, 263 bp, Homo sapiens; identical to SEQ ID NO: 699

SEQ ID NO: 4638 - DNA, 215 bp, Homo sapiens; identical to SEQ ID NO: 701
  misc_feature 105, 168: n = A,T,C or G

SEQ ID NO: 4639 - DNA, 282 bp, Homo sapiens
taaactgtcaactagtggcttgctgttggactgtacttctctgagtgaggtgctgtgaggacccctggaaggacacaagggcagaatagtgaaggccgacgctgacttccagaagcaatgagtgggagacatcttcctgccacaccctgagcaacacagttgtgaagagtaaatagacactagtagcttctagactttttccgaattctcatcacataaaatatctccttgtgaaattctggcttattgaggacaaagaagattctggaacacaaaccccaa

SEQ ID NO: 4640 - DNA, 535 bp, Homo sapiens
gtaagctcggaattcggctcgagattgaatgatatcctggtgcgggctgagttcagttcaacttctttaccacaattttggctgtcatctgctgtgaattcttcaagcactgaccctgaaaggctggctgtgaccacggcatggaccactgatagtaagattttgcccccaggaggagaggctggggtcactgagatccacggaaagtgtgaaaatatgactataacccctagaggtacaactgtgacccctacaaaggaaactgtatcccttggaaagcacactgtagctctaggagagaagactgagatcactggggcaatgaccatgacttctgtgggtcatcagtccatgacccctggagagaaggccctgacccctgtgggtcatcaatctgtgaccactggacagaagaccctgacctctgtgggttatcagtctgtgacccctgaggaaaagaccctgacccctgtgggtcatcagtctgtgacccctgtgagtcatcagtctgtgagccctggaggaacgactatga

SEQ ID NO: 4641 - DNA, 541 bp, Homo sapiens
agctcggaattcggctcgagtgattggtgtggggaagctgttgcgtgtctatgacctgggaaagaagaagttactccgaaaatgtgagaataagcatattgccaattatatctctgggatccagactatcggacatagggtaattgtatctgatgtccaagaaagtttcatctgggttcgctacaagcgtaatgaaaaccagcttatcatctttgctgatgatacctacccccgatgggtcactacagccagcctcctggactatgacactgtggctggggcagacaagtttggcaacatatgtgtggtgaggctcccacctaacaccaatgatgaagtagatgaggatcctacaggaaacaaagccctgtgggaccgtggcttgctcaatggggcctcccagaaggcagaggtgatcatgaactaccatgtcggggagacggtgctgtccttgcagaagaccacgctgatccctggaggctcagaatcacttgtctataccaccttgtctggaggaattggcatccttgtgccattcacg

SEQ ID NO: 4642 - DNA, 609 bp, Homo sapiens; identical to SEQ ID NO: 3474

SEQ ID NO: 4643 - DNA, 344 bp, Homo sapiens
tgcggcaggagtgggaagccaagcaggagaagatcaagagtgaggagatcgagatcaccttcagctactgggatggctctgggcaccggcggacagtcaagatgagaaagggcaacaccatgcagcagttcctgcagaaggcgctcgagatccttcggaaagacttcagtgagctgaggtccgcaggggtggagcagctcatgtacatcaaggaggacttgatcatccctcaccatcacagcttctacgacttcatcgtcaccaaggcacgggggaagagtggaccactcttcaactttgatgttcatgacgatgtgcggttgctcagtgacgccactgtggag

SEQ ID NO: 4644 - DNA, 539 bp, Homo sapiens
  misc_feature 37: n = A,T,C or G
aatccatctacaatgagtttctcgagagaaccgtggnagaaagcaaagcagaggaaagtggggaacccctttgagctggacacccagcaggggcctcaggtggacaaggagcagtttgaacgagtcctaggctacatccagcttggccagaaggagggcgcaaaactcctctgtggcggagagcgtttcggggagcgtggtttcttcatcaagcctactgtctttggtggcgtgcaggatgacatgagaattgccaaagaggagatctttgggcctgtgcagcccctgttcaagttcaagaagattgaggaggtggttgagagggccaacaacaccaggtatggcctggctgcggctgtgttcacccgggatctggacaaggccatgtacttcacccaggcactccaggccgggaccgtgtgggtaaacacctacaacatcgtcacctgccacacgccatttggagggtttaaggaatctggaaacgggagggagctgggtgaggatgggcttaaggcctacacagaggtaaagacggt

SEQ ID NO: 4645 - DNA, 302 bp, Homo sapiens
tgacggttatgctgcggcgtggacacttggcattcagggacgtggccatagaattccctcaggaggagtggaaatgtctggaccctgctcagaggactttatacagggaagtgatggtggagaactacaggaacctggtctttctgggaatctgtcttcctgacctgagtgttatctccatgttggagcaaaggagagatccccggaatctgcagagtgaagtgaaaatagcaaacaatccaggtggcagggagtgcatcaaaggtgtgaacgcagcgtcttgctctgtcgcccaggctgga

SEQ ID NO: 4646 - DNA, 588 bp, Homo sapiens; identical to SEQ ID NO: 703

SEQ ID NO: 4647 - DNA, 242 bp, Homo sapiens
  misc_feature 181: n = A,T,C or G
cccccaacaatagggggctcgttgccctatagacgccctccttccattacttcacaaacaagccttcagaatcagatgaatggaggacctttttatagccagaatccagtttcagatacaccacctccaccgccacctgtggaagaaccagtctttgatgagtctcccccacctcctcctnctccagaagattacgaacaggaggaagctgctgtggttgagtatagtgatccttatgctga

SEQ ID NO: 4648 - DNA, 238 bp, Homo sapiens
tttatatctttggaagttttacataaatcaaaggaagaaagcacatttaaaatgagaaactaagaccaatttctgtttttaagaggaaaaagaatgattgatgtatcctaagtattgttatttgttgtctttttttgctgccttgcttgagttgcttgtgactgatcttttgaggctgtcatcatggctagggttcttttatgtatgttaaattaaaacctgaattcagaggtaacgt

SEQ ID NO: 4649 - DNA, 568 bp, Homo sapiens
gtacgtaagctcggaattcggctcgaggctgcccttgtagcttccccaaaccccaactcactgcagttcatctgaacaacctgagctcctgggccggggtggaaggagggggataaacctaaggccctgatccaaagcagcctgttgagctggttctccagggctgcagtctctccaggtgtacagctgctgtccctgccctgtcctgtccttgcacagtctcctatgtctgagccccagtgccttctgttcgggccctcctttggtgggaaggcagagccctgacccttgaatggttgtccttgactctgtgctgctgccttctgcagagaggcacctaagctgtttaaagagcccagtgattgtggctgctcctcctagaggtgggagggggcaagaggcctccttggtcagtgtccatgctttctgggcagggacttggttttttgttccaacagtggccttctccgggcttcatagttctttgtaatatgttgaagttaatttgaattgactgattttgttgaactgtgtgtttaagctgttgcattaaaaagctttcttctac

SEQ ID NO: 4650 - DNA, 59 bp, Homo sapiens
cctgaatataacaacctttaaaaaaaaaaaaaaaaaaaaaaaaaaaaaggggggggccc

SEQ ID NO: 4651 - DNA, 450 bp, Homo sapiens
  misc_feature 2, 253, 386, 397, 413: n = A,T,C or G
antccccaacttttaatttatcaaagagtttcctttaaaccttctctcttaagactttcattgctcaagttttacaaaagacataaggtcagcagttttgaataatataaatactccaaaatcaatgtctactgctaaatgcagaaaattctccttggttaaagttttacaaacatttcaagtcttaaaaattaggatctatgttttaaatattactttgagttaatacagatgtccaaattaatcataaganatatgctgggtcctcgggccgggcgcggtgggctcacacctgtaatcccaggcactttggggagggccgtaatcccaggctactcggggagggctgagggcagggagaaggcactcggaaccgggggagggtnggagggttgcnggtgaggccgaggatncgtggccactgcatggccagcccggggtgacagagca

SEQ ID NO: 4652 - DNA, 417 bp, Homo sapiens
tacttttaactaataaaataagtggattttgtattttaagatccagaaatacttacacgtgaatattttgctaaaaaagcatatataactattttaaatatccattcatcttttgtatatctaagactcatcctgatttttactatcacacatgaataaagcctttgtatctttctttctctaatgtaggatcatactctcctaaaacttgagtggctgtcttaaaagatctagcgggaaagataatattgtctgtctctatattgcttagtaagtatttccatagtcaatgatggtttaataggtaaaccaaaccctataaacctgacctcctttatggttaatactattaagcaagaatgcagtacagaattggatacagtacggatttgtccaaataaattcaataaaaacctt

SEQ ID NO: 4653 - DNA, 652 bp, Homo sapiens; identical to SEQ ID NO: 706

SEQ ID NO: 4654 - DNA, 625 bp, Homo sapiens
tcagtgtcaagggcatcagcatttcggtcaacctcctgttgggcagcgagtcctccgggaggcccacagttactgcctccagctgcagcagtgacatcgctgacgtggaggtggacatgtcgggagacttggggtggctgttgaacctcttccacaaccagattgagtccaagttccagaaagtactggagagcaggatttgcgaaatgatccagaaatcggtgtcctccgatctacagccttatctccaaactctgccagttacaacagagattgacagtttcgccgacattgattatagcttagtggaagcccctcgggcaacagcccagatgctggaggtgatgtttaagggtgaaatctttcatcgtaaccaccgttctccagttaccctccttgctgcagtcatgagccttcctgaggaacacaacaaaatggtctactttgccatctcggattatgtcttcaacacggccagcctggtttatcatgaggaaggatatctgaacttctccatcacagatgacatgataccgcctgactctaatatccgactgaccaccaagtccttccgacccttcgtcccacggttagccaggctctaccccaacatgaacctggaact

SEQ ID NO: 4655 - DNA, 446 bp, Homo sapiens; identical to SEQ ID NO: 709

SEQ ID NO: 4656 - DNA, 320 bp, Homo sapiens
gtgtggccagtggtgaagagatggctgctcctgtcccgtgggcctgctgtgctgtgcttgccgccgccgccgcagttgtctacgcccagagacacagtccacaggaggcaccccatgtgcagtacgagcgcctgggctctgacgtgacactgccatgtgggacagcaaactgggatgctgcggtgacgtggcgggtaaatgggacagacctggcccctgacctgctcaacggctctcagctggtgctccatggcctggaactgggccacagtggcctctacgcctgcttcaccgtgatcttggcactgcgccacaagtct

SEQ ID NO: 4657 - DNA, 405 bp, Homo sapiens
ctggtccacttcatcaacccggaaacggtgcccaagccctgctgtgcgcccacgcagctcaatgccatctccgtcctctacttcgatgacagctccaacgtcatcctgaagaaatacagaaacatggtggtccgggcctgtggctgccactagctcctccgagaattcagaccctttggggccaagtttttctggatcctccattgctcgccttggccaggaaccagcagaccaactgccttttgtgagaccttcccctccctatccccaactttaaaggtgtgagagtattaggaaacatgagcagcatatggcttttgatcagtttttcagtggcagcatccaatgaacaagatcctacaagctgtgcaggcaaaacctagcaggaaaaaaaaaacacccctt

SEQ ID NO: 4658 - DNA, 507 bp, Homo sapiens; identical to SEQ ID NO: 3480

SEQ ID NO: 4659 - DNA, 256 bp, Homo sapiens
ttcctgatcgtccagcaggcattggagtatattcagctatatggcagttatgcctggcactcatatttaaaatcataatgacagtattcacttttggcatcaaggttccatcaggcttgttcatccccagcatggccattggagcgatcgcaggaaggattgtggggattgcggtggagcagcttgcctactatcaccacgactggtttatctttaaggagtggtgtgaggtcggggctgattgcattacacctgg

SEQ ID NO: 4660 - DNA, 566 bp, Homo sapiens; identical to SEQ ID NO: 3481

SEQ ID NO: 4661 - DNA, 511 bp, Homo sapiens; identical to SEQ ID NO: 711

SEQ ID NO: 4662 - DNA, 2689 bp, Homo sapiens
ggctggggcctgaggcctggggctcacccacgcccccgccgacgcctgccgcgccgccgccacccccgccacccggagccccgggtggctcgcaggacacctgtacgtcgtgcggcggcttccggcggccagaggagctcggccgagtggacggcgacttcctggaggcggtgaagcggcacatcttgagccgcctgcagatgcggggccggcccaacatcacgcacgccgtgcctaaggccgccatggtcacggccctgcgcaagctgcacgcgggcaaggtgcgcgaggacggccgcgtggagatcccgcacctcgacggccacgccagcccgggcgccgacggccaggagcgcgtttccgaaatcatcagcttcgccgagacagatggcctcgcctcctcccgggtccgcctatacttcttcatctccaacgaaggcaaccagaacctgtttgtggtccaggccagcctgtggctttacctgaaactcctgccctacgtcctggagaagggcagccggcggaaggtgcgggtcaaagtgtacttccaggagcagggccacggtgacaggtggaacatggtggagaagagggtggacctcaagcgcagcggctggcataccttcccactcacggaggccatccaggccttgtttgagcggggcgagcggcgactcaacctagacgtgcagtgtgacagctgccaggagctggccgtggtgccggtgttcgtggacccaggcgaagagtcgcaccgaccctttgtggtggtgcaggctcggctgggcgacagcaggcaccgcattcgcaagcgaggcctggagtgcgatggccggaccaacctctgttgcaggcaacagttcttcattgacttccgcctcatcggctggaacgactggatcatagcacccaccggctactacggcaactactgtgagggcagctgcccagcctacctggcaggggtccccggctctgcctcctccttccacacggctgtggtgaaccagtaccgcatgcggggtctgaaccccggcacggtgaactcctgctgcattcccaccaagctgagcaccatgtccatgctgtacttcgatgatgagtacaacatcgtcaagcgggacgtgcccaacatgattgtggaggagtgcggctgcgcctgacagtgcaaggcaggggcacggtggtggggcacggagggcagtcccgggtgggcttcttccagccccccgcgggaacggggtacacggtgggctgagtacagtcattctgttgggctgtggagatagtgccagggtgcggcctgagatatttttctacagcttcatagagcaaccagtcaaaaccagagcgagaaccctcaactgacatgaaatactttaaaatgcacacgtagccacgcacagccagacgcatcctgccacccacacagcagcctccaggataccagcaaatggatgcggtgacaaatggcagcttagctacaaatgcctgtcagtcggagagaatggggtgagcagccaccattccaccagctggcccggccacgtctcgaagttgcgccttcccgagcacacataaaagcacaaagacagagacgcagagagagagagagagccacggagaggaaaagcagatgcaggggtggggagcgcagctcggcggaggctgcgtgtgccccgtggcttttaccaggcctgctctgcctggctcgatgtctgcttcttcccagcctgggatccttcgtgcttcaaggcctggggagcctgtccttccatgcccttgtcgagggaaagagacccagaaaggacacaacccgtcagagacctgggagcaggggcaatgaccgtttgactgtttgtggcttgggcctctgacatgacttatgtgtgtgtgtgtttttggggtggggagggagggagagaagagggggctaaatttgatgctttaactgatctccaacagttgacaggtcatccttgccagttgtataactgaaaaaggacttttctaccaggtatgaccttttaagtgaaaatctgaattgttctaaatggaaagaaaaaaagttgcaatctgtgcccttcattggggacattcctctaggactggtttggggacgggtgggaatgacccctaggcaaggggatgagaccgcaggaggaaatggcggggaggtggcattcttgaactgctgaggatggggggtgtcccctcagcggaggccaagggaggggagcagcctagttggtcttggagagatggggaaggctttcagctgatttgcagaagttgcccatgtgggcccaaccatcagggctggccgtggacgtggcccctgcccactcacctgcccgcctgcccgcccgcccgcatagcacttgcagacctgcctgaacgcacatgacatagcacttgccgatctgcgtgtgcccagaagtggcccttggccgagcgccgaactcgctcgccctctagatgtccaagtgccacgtgaactatgcaatttaaagggttgacccacactagacgaaactggactcgtacgactctttttatattttttatacttgaaatgaaatcctttgcttcttttttaagcgaatgattgcttttaatgtttgcactgatttagttgcatgattagtcagaaactgccatttgaaaaaaaagttatttttatagcagc

SEQ ID NO: 4663 - DNA, 526 bp, Homo sapiens; identical to SEQ ID NO: 3483

SEQ ID NO: 4664 - DNA, 282 bp, Homo sapiens
  misc_feature 142: n = A,T,C or G
catgacaccgggcacccagtctcctttcttcctgctgctgctcctcacagtgcttacagttgttacaggttctggtcatgcaagctctaccccaggtggagaaaaggagacttcggctacccagagaagttcagtgcccagntctactgagaagaatgcttttaattcctctctggaagatcccagcaccgactactaccaagagctgcagagagacatttctgaaatggctgtctgtcagtgccgccgaaagaactacgggcagctggacatctttccagc

SEQ ID NO: 4665 - DNA, 937 bp, Homo sapiens
gttcttgcctggtgtcggtggttagtttctgcgacttgtgttgggactgctgataggaagatgtcttcaggaaatgctaaaattgggcaccctgcccccaacttcaaagccacagctgttatgccagatggtcagtttaaagatatcagcctgtctgactacaaaggaaaatatgttgtgttcttcttttaccctcttgacttcacctttgtgtgccccacggagatcattgctttcagtgatagggcagaagaatttaagaaactcaactgccaagtgattggtgcttctgtggattctcacttctgtcatctagcatgggtcaatacacctaagaaacaaggaggactgggacccatgaacattcctttggtatcagacccgaagcgcaccattgctcaggattatggggtcttaaaggctgatgaaggcatctcgttcaggggcctttttatcattgatgataagggtattcttcggcagatcactgtaaatgacctccctgttggccgctctgtggatgagactttgagactagttcaggccttccagttcactgacaaacatggggaagtgtgcccagctggctggaaacctggcagtgataccatcaagcctgatgtccaaaagagcaaagaatatttctccaagcagaagtgagcgctgggctgttttagtgccaggctgcggtgggcagccatgagaacaaaacctcttctgtattttttttttccattagtaaaacacaagacttcagattcagccgaattgtggtgtcttacaaggcaggcctttcctacagggggtggagagaccagcctttcttcctttggtaggaatggcctgagttggcgttgtgggcaggctactggtttgtatgatgtattagtagagcaacccattaatcttttgtagtttgtattaaacttgaactgag

SEQ ID NO: 4666 - DNA, 291 bp, Homo sapiens
gttaaaagatagggaatgaagaatgcaaaatggtttatcgttcaaactgtccactctgatccaaccctgtactgatagtacttcccagtatgatattgtgatgtttcatacaatgcagtgaacataaccaacttgttacctaaataaagaattgataaaaacagtgtgacatattactatttggtatgattcagtttttaatgttattttaaacttcttatatggttggcatatttctgaaaatttaattccaaagaggaattaaccaaactgtacaggacaatattaacc

SEQ ID NO: 4667 - DNA, 882 bp, Homo sapiens
ctctctcctcccgccgcccaagatgccgaaaggaaagaaggccaagggaaagaaggtggctccggccccagctgtcgtgaagaagcaggaggctaagaaagtggtgaatcccctgtttgagaaaaggcctaagaattttggcattggacaggacatccagcccaaaagagacctcacccgctttgtgaaatggccccgctatatcaggttgcagcggcagagagccatcctctataagcggctgaaagtgcctcctgcgattaaccagttcacccaggccctggaccgccaaacagctactcagctgcttaagctggcccacaagtacagaccagagacaaagcaagagaagaagcagagactgttggcccgggccgagaagaaggctgctggcaaaggggacgtcccaacgaagagaccacctgtccttcgagcaggagttaacaccgtcaccaccttggtggagaacaagaaagctcagctggtggtgattgcacacgacgtggatcccatcgagctggttgtcttcttgcctgccctgtgtcgtaaaatgggggtcccttactgcattatcaagggaaaggcaagactgggacgtctagtccacaggaagacctgcaccactgtcgccttcacacaggtgaactcggaagacaaaggcgctttggctaagctggtggaagctatcaggaccaattacaatgacagatacgatgagatccgccgtcactggggtggcaatgtcctgggtcctaagtctgtggctcgtatcgccaagctcgaaaaggcaaaggctaaagaacttgccactaaactgggttaaatgtacactgttgagttttctgtacataaaaataattgaaataatacaaattttccttc

SEQ ID NO: 4668 - DNA, 256 bp, Homo sapiens
  misc_feature 62: n = A,T,C or G
aatgggctaggccttttttatattgaagcaataattccatttttaccctttgaaattttgtntttttgatttttgatgtttggtacaaatagaactatatatatttaggtaaaatagatctatcgtgtttaaaaccaaagaaatcaatggaacccttgcacaaaaaagtgtgataaatatttttaaataaaaacttaatacaaatgtaatttgttaatattgtttcatgttttatgtgtagatctaatagctgact

SEQ ID NO: 4669 - DNA, 2481 bp, Homo sapiens
cgaacttggggggagtgcacagaagaacttcgggagcgcacgcgggaccagggaccaggctgagactcggggcgccagtccgggcaggggcagcgggagccggccggagatgccctgtatccaagcccaatatgggacaccagcaccgagtccgggaccccgtgaccacctggcaagcgaccccctgacccctgagttcatcaagcccaccatggacctggccagccccgaggcagcccccgctgcccccactgccctgcccagcttcagcaccttcatggacggctacacaggagagtttgacaccttcctctaccagctgccaggaacagtccagccatgctcctcagcctcctcctcggcctcctccacatcctcgtcctcagccacctcccctgcctctgcttccttcaagttcgaggacttccaggtgtacggctgctaccccggccccctgagcggcccagtggatgaggccctgtcctccagtggctctgactactatggcagcccctgctcggccccgtcgccctccacgcccagcttccagccgccccagctctctccctgggatggctccttcggccacttctcgcccagccagacttacgaaggcctgcgggcatggacagagcagctgcccaaagcctctgggcccccacagcctccagccttcttttccttcagtcctcccaccggccccagccccagcctggcccagagccccctgaagttgttcccctcacaggccacccaccagctgggggagggagagagctattccatgcctacggccttcccaggtttggcacccacttctccacaccttgagggctcggggatactggatacacccgtgacctcaaccaaggcccggagcggggccccaggtggaagtgaaggccgctgtgctgtgtgtggggacaacgcttcatgccagcattatggtgtccgcacatgtgagggctgcaagggcttcttcaagcgcacagtgcagaaaaacgccaagtacatctgcctggctaacaaggactgccctgtggacaagaggcggcgaaaccgctgccagttctgccgcttccagaagtgcctggcggtgggcatggtgaaggaagttgtccgaacagacagcctgaaggggcggcggggccggctaccttcaaaacccaagcagcccccagatgcctcccctgccaatctcctcacttccctggtccgtgcacacctggactcagggcccagcactgccaaactggactactccaagttccaggagctggtgctgccccactttgggaaggaagatgctggggatgtacagcagttctacgacctgctctccggttctctggaggtcatccgcaagtgggcggagaagatccctggctttgctgagctgtcaccggctgaccaggacctgttgctggagtcggccttcctggagctcttcatcctccgcctggcgtacaggtctaagccaggcgagggcaagctcatcttctgctcaggcctggtgctacaccggctgcagtgtgcccgtggcttcggggactggattgacagtatcctggccttctcaaggtccctgcacagcttgcttgtcgatgtccctgccttcgcctgcctctctgcccttgtcctcatcaccgaccggcatgggctgcaggagccgcggcgggtggaggagctgcagaaccgcatcgccagctgcctgaaggagcacgtggcagctgtggcgggcgagccccagccagccagctgcctgtcacgtctgttgggcaaactgcccgagctgcggaccctgtgcacccagggcctgcagcgcatcttctacctcaagctggaggacttggtgccccctccacccatcattgacaagatcttcatggacacgctgcccttctgacccctgcctgcctgggaacacgtgtgcacatgcgcactctctcatatgccaccccatgtgcctttagtccacggaccccagagcacccccaagcctgggcttagctgcagaacagagggacctgctcacctgcccaaaggggatgaagggagggaggctcaaggcccttgggggagggggatgccttcatgggggtgacccacgatgtgttcttatcccccccgcctggccaccggcctttatgttttttgtaagataaaccgtttttaacacatagcgccgtgctgtaaataagcccagtactgctgtaaatacaggaagaaagagcttgaggtgggagcgggctgggaggaagggatgggccccggccttcctgggcagcctttccagcctcctgctgggctctctcttcctaccctccttccacatgtacatgtacataaactgtcactctaggaagaagacaaatgacagattctgaccatttatatttgtgtattttccaggatttatagtatgtgacttttctgattaatatatttaatatattgaataaaaaatagacatgtagttgg

SEQ ID NO: 4670 - DNA, 256 bp, Homo sapiens
gtagatatatgccttcccccactaccgtaaatgtccatttatatcattttttatatattcttataaaaatgtaaaaaagaaaaacaccgcttctgccttttcactgtgttggagttttctggagtgagcactcacgccctaagcgcacattcatgtgggcatttcttgcgagcctcgcagcctccggaagctgtcgacttcatgacaagcattttgtgaactagggaagctcaggggggttactggcttctcttga

SEQ ID NO: 4671 - DNA, 10884 bp, Homo sapiens
ctgcagacctgggacctcaagaattgcatttgatgccgaacccagctctaatttcagagtcaaggtctctgcgagtatttaaggaacggatgtaaacctgggggattcgttttgtttccttcaattttccaatgaaatcagagatcctgttcttgggtgtcaacgcagatactagaaggaggtgatacaagagaaaggaaacagcaagcgacgattatggcacggtttcctgtaaacaaggttgagtgtagccacagcctgagcactgtgggagaagagctcataagaaaatgacggtgctgggccttcgtcaccccggggccctccattgttcttgtctttggtctctttttatttgtagaggtccaattatttatttatttagtacaagagggaacgaaattgatctttccattctaaaaggagagtatatatgtataaaaggaagctgtatagatatgggggaagaggtggacagggggaaaaggggagaggacgagagagagaaagggagggagagggacaaggagagacactgggcgagagatcgattaggagagacagaaatgatgaatgaagattaacttcacccaaggcttcgtcgctggaggggaatggaggagctcctgatttgctattactactccaaactgcaaagggctccttcaagtcacctatccacctcctaaggcaagcgtccaatttcaacagcgttcaggaaagtctcctcccgcggaggtctcaccgcttcccactccacccccacaaactctttggaaaagtgccttgaaaaatttaatcctcaatccaatcctggaccaccagcgtcctctgttggtcaccgaaggagggggtgcgcagacaaaactgaagaaactcgagtgccagagaaggccgacaggagttacagcgacctcagcgcgcaattgcgccccgaactttactgaaaagtgtttagattgcagagataagctagaatcccaacgcatcgagaatacagtaatacgaagtcgccttcaaaaaatgacaatgaaaattgcctattaaaggactatttggttaattacgtttcagcagtgcccagtttattgtctttattattcttttgtcgtgggtgtaaactccatttgaaaacataatcagggagaatacccaagacaagaagaacagttgtcatttaaaatatttgaaaagccctgccttaaggagcattcgcttgccggtccactcttaattggggacttgcggtgtagcaacacgtgagagtcttcttgcgttgagaagtaagcctggaaaggcgaaggccccggggcatcttcagatgcgtatttgtgggcccctggggatataaacagcccagcgggtgtaaattaaaccccgcagtgccttggctccctgagacccaaatgtaagtcagaaatgtcccaagacttcgcctgccaacggaattaaattttagaaagctccacgaggtacacacgaatgcggagcgctgtatgccagtttccccgacaccggctcgccgcagggagacctcaccccgagagcggaaggggtaagggcggcggggtcaaggagatcgggggtgctgagttggccaggagtgactggggtgaccgggggtgctgaggtggcctggagtgccggggtggccgggcacaccttggttcttgtagacgacaaggtgacgggctccgggcgtgagcacgaggagcaggtgcccgggcgagtctcgagctgcacgcccccgagctcggccccggctgctcagggcgaagcacgggccccgcagccgtgcctgcgccgacccgcccccctcccaacccccactcctgggcgcgcgttccggggcgtgtcctgggccaccccggcttctatatacgggccggcgcgcccgggccgcccagatgcgagcactgcggctgggcgctgaggatcagccgcttcctgcctggattccacagcttcgcgccgtgtactgtcgccccatccctgcgcgcccagcctgccaagcagcgtgccccggttgcaggcgtcatgcagcgggcgcgacccacgctctgggccgctgcgctgactctgctggtgctgctccgcgggccgccggtggcgcgggctggcgcgagctcggggggcttgggtcccgtggtgcgctgcgagccgtgcgacgcgcgtgcactggcccagtgcgcgcctccgcccgccgtgtgcgcggagctggtgcgcgagccgggctgcggctgctgcctgacgtgcgcactgagcgagggccagccgtgcggcatctacaccgagcgctgtggctccggccttcgctgccagccgtcgcccgacgaggcgcgaccgctgcaggcgctgctggacggccgcgggctctgcgtcaacgctagtgccgtcagccgcctgcgcgcctacctgctgccagcgccgccagctccaggtgagccgcccgccaggtgcgctgcgtgcagcaccgccactggcgccgaagggcctgggggttgctgggtgccgctgcgggagactccgcttttcttctcactggagataatatgtggggaaactgaaggcgctccgggaaaggtgaaggcggtcgccgagggaccctccccagccggccctctacttgctcgattctctaagtgcagagtacttgtaaattgcaaagcgctttcagtgaaaatgggtaaaggtttccggagctgaggggagcggtaccgatgtttagctgttggaaagatcctggacacaggagattctcctcgccccgcacgggtgcacacggactgcaatcccagggatgcttggggatggggggatataggcggatttggaccaaggaaggtgggtaggcacgttgtaggaaatagtacctctcttttaaaatactgactttgcacagccttttggtttgcaaagcaatgtctagtcccggtatgtccaaaaacaagtaaagtggattcgggttttgatatcttctgcggttggaaaacctgaagctgaaaaagaagtaacttcttaaggttacccagcggccacaacagagtgtaggtttgaactccgcgtgccactttcagtaccataccattcttacaactcgggccacccctgcacctgcgccgacctcaaacaaacttccaggtgcgtggtgggtgcgggcaatgtggactaagtcaatttcaatgacacggcaagggaattggaatcagtcctaggctgtctcccttcttaatctgaaatggggggggggaatgagatgttgttaaggggagccccagaagaggaaaaatgcaaacatttggcagagttaccctcttgcttagccactatcagtatcaggcagacagcgactctggtaagggcatcacattgttcccttaaaaaaaggagcgggggttgtttaaatggatttggcagctgttctttcaagcattcttagccagcctcacctagttatatgagaaataaagttcctgccttgcacagctgaaggctgggagaattctccccatcctaattcccccaactccccaacgatcacgttggacagatgtcactgggcaggcccccatctagggctagcaggatgaacagtccctttataatttatgtagctgtagagttccacgcccgggtgaagttattttctggctcggcaaggctggctctgttcacccctgagaaatgctggattcatggaaaggcaagatgcctgaaacatacactggctctggtcagctgttaaagctgctggaggcatttgtctctcggggcaaagttatgtcatttgccaagtgtcgtacattattgtgcattttggggtattcaaaaagtgatcttagaaatactgatacacatcgtcattcttgggctttagcaatcatcatgattaccaccttagtagcactgtagtataggttgatgtgagttataagattataaaaagatctaagtgacttctagaatctatttgacaaaaaaaggtaaattttcgacagtcaaaagtcacaattatctgttgcttaaatagaactgttttgtcttcatgccctagtctgcagcccaggcattaagaagaaaccaaggaaatttaagaaattactcaaggttcttagaaaagaagtataaatacgtttatttacatgttcttagagtatttacattcttagtatctcttttatctcagtatttccttgaaaaagaaagcaagctaagattaaaagaaattgaaaccaaatcctcgcaggtagggacctcctctgtgaggctctgtgctggaccctgggaatgtgtgcttcccaaggtatgaaaccccttggggaactttacagcaggacctcagtgagctgtttggcaggtgaggaaactaagacccagagaggagagggactttcctaaggccctggtgagtgacctgccagtagccacttccaggggagagcagagcatctgcagccaaatcattgcagccccaggtagctttctagatagactgtggaccagatgggccacctgagctccctgctagggttacacattatagccctgtttgtgtagtagagaaatttcatgactctcaattgtggacttaagccgatgcctccagaccttggcatggtccacaggccctgggagcatgggctctgaatgtagcctttgatccccatagcggtcttacagcccctccaagttcattctgaagaaggaatggagtgagaatcctggctgcagatccagtcttgaatttagtcatatacttaaaattccaattcaactgttaacattccagcatccattttaagcatcagactttcttcatttagcactttttattataaaagggagatctgctggagggggatttctcctaccccacccccacccagggaaggaaaagctctttggcacttagaagtctgagccgtgagtgggactttggcattgtctgcatccatgtgctgctgtgttcacccggggtgaaaaggactcacttaggcaggcaccagcaagatgcacagggtctgtgtagaccttgagttttagagatgtaacggggacctagaaaacaagccaccaacatgcttgcatgattctgagcccctgaggcaaaacgctttgcaggtaataattcagttttcccatctgagctggacaccaagctcttataagcgtgtttacctggtagcattgaggacggtactggtcaaccttggaattcccataagggcttgttacaactcagactcgtgccgccactccagcgtttccggagtggagaatgtgcatttcttccaagtccccgggctgccgctgctcccgcgggtgggaggaccacacttggagttgactgcaaaatttctgagccggcgctgcagcagcctcccgtggctcaggtctgccccctgccggtggaagatgaagcatactgccttcacctactgaggggcactgaagcgtttgtctgccttctttagttgcagctacttaggaagagcacctgtcagattgactttcaaacagataacttcttgaggtagagcaaccaccatgtagtgagtagtatgatggaataatacttcatcgaggtatttaaaaaaaaaacctcacttggattgccaactaatattgtcatttacatgtgacctggttgcaacgttaagatttttacaagactgtgatagatattgatgactctcatgtgtttgtctctcttgggcgttttaaggaaatgctagtgagtcggaggaagaccgcagcgccggcagtgtggagagcccgtccgtctccagcacgcaccgggtgtctgatcccaagttccaccccctccattcaaagataatcatcatcaagaaagggcatgctaaagacagccagcgctacaaagttgactacgagtctcagagcacagatacccagaacttctcctccgagtccaagcgggagacagaatatgtgagagcttttcctcttgttaaaggaggagggcaagacctgccaagcctgggtactcagagcctcttgagggcaattcttactcaacaaaccccagcgcctggctgatgggtgggcaacccctagcccctctgtgccctacctctctcctctccttacataaagaatattgacccttttggagaatcttatgaggatcaagctgaaataacactcttaaaagcatatgggatgtcataaagacctctgcagataatgaaaatattctcataaagatagttttatttacttcatcctctatgcttgttgacctgctattggttccatgccagcttctgtgccttactctgggaagagcaaaaaggagacagggagtgatggttagcttattcgggggactttcgtgctacatcagacataaggtatctgaggagcaaattacaggtcccacttttggtagttgtgcagcatcgtaagatttttaaagcacacattctagagtaaaaactgtgactctgttgctctggtccttcctgatccccagggtccctgccgtagagaaatggaagacacactgaatcacctgaagttcctcaatgtgctgagtcccaggggtgtacacattcccaactgtgacaagaagggattttataagaaaaagcaggtgagtgaggtcctcagtgtgttttcttcctcttctgttgacacagaggagaaacccatgtcaccagcgcccaggctcttgtggccatagctctaactctgagcctgtgcagcaccagtgcccaggacttggtgccagtctcaggaggtcagaccaagggctgctttgacttgttgctctgagtgctgctatattggccataatcctcaaccctagtgcctttccaccacccgcttcccactcctgtcctttcaatggttcacccacaggcggacaagatgctgcccagtggcaccctttataaactgcaagtggacatgttaacacatttgttaatgctgcgtcagggagtgacatttcaaacaactattatagtcagtttccaagaagtgtgacatgaggtcataccacaaaaaagcttaccctgaaatcccacaatcgtcccctttcctactgatgccttcccgatagtgagcaggttgcaatattaagattttgaaaaggctgttgctagatgttggtgactcgtgtgtctctgtctcccttgggcttttcaaggaaatgctagtgagtggggggatgactgcagcatggccagcttggagagcccagccatccccagcacataccaggtgtctgtcttggcgtggaggggatggaacttgaaatcagacactcggtccatgctggggatggccagtctctccaaactggcatgtggtcttcctccgagtcactggcatttccctagaaagtccaagtgagaagaaggcatgagagtcatcaacatcaaacaacagtcttttcaaaatctttatattgcaacatagtcccattcctggaaaaggaatggagtgagaatcctggctacacatcagccccaaatgtagtcattgcctaaaatcccaattaacctgaaaatgatcaaacaaatttaagatatagtaatattaagctgtaataaatatgcttctataggctttgtgttatgtgatggcactatttcaattggctttctaattggacaattgatactatgctatctacagaattggcctttggagacctaagtgagccacagtggcctcagggtgaccatatactaggattcatagcagtggccacagtcagaagcctaagctttcctccattgccattgctcgtttataccacgtttctgtcaaagtcatattcattcaacaaagtcatactgagaaggtgtcatgtgaggctggatgtgggctccaaagtcatagctgtgacattcgcaggcagcgggatgttctcagttccacatttggcagagaagtcagtcaagaggttctacaagggctggtgtccaccttatactcctagaaacacaaaactgcccccacccccgctttcttggagcaggaagttacacccacacgcatgcacaggcgcacactcagcgggcctaggcagcgtggctcttgtgttgccttagctgaaatttctgttgtgctttctcagcatagcagagtcacgctggcaaaccatcatgcgccctggccaccgacctgacaccagacccaggagcattcacttctctgtcttctgtttctctcccacagtgtcgcccttccaaaggcaggaagcggggcttctgctggtgtgtggataagtatgggcagcctctcccaggctacaccaccaaggggaaggaggacgtgcactgctacagcatgcagagcaagtagacgcctgccgcaagggtgagtactcaggaggggcagcctgggctccagggcctcactgtccttggaccagcctcaggggctgggcgtggccactggccttccccaggcttacagacccaggagctgcagctcagggccagaaagagcaaagcaaataggacagagccctcagaagggtgcagggagagggagaccccatcaacccaaccaaacaagtgtggggaaggaggccggccagtgcacctcagggacactctgctttatctcagatacctcacagcacctaagctatcattcatccacacacaaagtgaagattttcaaagttaggctttacccgtgagtctggaggtcatttatcttcacagagaacgtttatcgcagactgctaagatacatgttctaattaagatgtgatgtgagaacgctgaatgctcgttggagactcagttgaagtgcagctttttttctgtcaaatatataatgaatattctgttagtctgtggctaatataattttaataaagttaatttaaatctgatagaaaaatgaaattttaaacgataattttagagaatgctattatatccagtcttcttttttcttttaataaatgagggaactattgggggaaaggaataaatacattttctttcattttattaagacaaatttagtaagcagaagaaatttgcatgtttagttataagggtttcttttttccttacaagttggaaaaaataattctaatttaagggtaactctttgacaatgaacactgtgagcagcatctggtactcgttgctttgtttgaaaacatgagttgagaccccagccgcacttgcagcctagtgccattagcctgcaggctgtgctggatatctcagggcaagagtcgagcccttttgattttggggggattatttcaatatatttgctttttctttttgttttagttaatgtggagctcaaatatgccttattttgcacaaaagactgccaaggacatgaccagcagctggctacagcctcgatttatatttctgtttgtggtgaactgattttttttaaaccaaagtttagaaagaggtttttgaaatgcctatggtttctttgaatggtaaacttgagcatcttttcactttccagtagtcagcaaagagcagtttgaattttcttgtcgcttcctatcaaaatattcagagactcgagcacagcacccagacttcatgcgcccgtggaatgctcaccacatgttggtcgaagcggccgaccactgactttgtgacttaggcggctgtgttgcctatgtagagaacacgcttcacccccactccccgtacagtgcgcacaggctttatcgagaataggaaaacctttaaaccccggtcatccggacatcccaacgcatgctcctggagctcacagccttctgtggtgtcatttctgaaacaagggcgtggatccctcaaccaagaagaatgtttatgtcttcaagtgacctgtactgcttggggactattggagaaaataaggtggagtcctacttgtttaaaaaatatgtatctaagaatgttctagggcactctgggaacctataaaggcaggtatttcgggccctcctcttcaggaatcttcctgaagacatggcccagtcgaaggcccaggatggcttttgctgcggccccgtggggtaggagggacagagagacgggagagtcagcctccacattcagaggcatcacaagtaatggcacaattcttcggatgactgcagaaaatagtgttttgtagttcaacaactcaagacgaagcttatttctgaggataagctctttaaaggcaaagctttattttcatctctcatcttttgtcctccttagcacaatgtaaaaaagaatagtaatatcagaacaggaaggaggaatggcttgctggggagcccatccaggacactgggagcacatagagattcacccatgtttgttgaacttagagtcattctcatgcttttctttataattcacacatatatgcagagaagatatgttcttgttaacattgtatacaacatagccccaaatatagtaagatctatactagataatcctagatgaaatgttagagatgctatatgatacaactgtggccatgactgaggaaaggagctcacgcccagagactgggctgctctcccggaggccaaacccaagaaggtctggcaaagtcaggctcagggagactctgccctgctgcagacctcggtgtggacacacgctgcatagagctctccttgaaaacagaggggtctcaagacattctgcctacctattagcttttctttatttttttaactttttggggggaaaagtatttttgagaagtttgtcttgcaatgtatttataaatagtaaataaagtttttaccattaaaaaaatatctttccctttgttattgaccatctctgggctttgtatcactaattattttattttattatataataattattttattaaaatgttccctgctttcccttttagcaa

SEQ ID NO: 4672 - DNA, 310 bp, Homo sapiens; identical to SEQ ID NO: 720

SEQ ID NO: 4673 - DNA, 258 bp, Homo sapiens; identical to SEQ ID NO: 3489

SEQ ID NO: 4674 - DNA, 553 bp, Homo sapiens
aaaacaaagctcctgtgaggttagcctactactctctgaagacgggaccacgcccaaatccaagaagactcaagctggcctttccccttatccccagaaacccagttcctcaaaggacagtgaggacaccagcaaagagcccagcctttctacccagacgttacctgtgatcaagtgctctgggcagacttcaagactttctgcttcctccactttccagtcaatcagtgactccctcctggctgtgagcccataactggcctctctccaaaagcctctgcccaggagcatgggcatcagctacctcacgggaaccagcctgctgttcagaccagtctgaccccctacccctttcaccctgtccctcctcagagtattttttgaagtggttgcattatagagatgggtatttgtagggccggagggatggtagtgatggggagaaggtgaggaagggtcaccctctgtcacctgtctgcctggctggcacctcatatctcagcagagaagccagtggtggccacgcagccttataaagcaggttttggtttct

SEQ ID NO: 4675 - DNA, 665 bp, Homo sapiens; identical to SEQ ID NO: 3490

SEQ ID NO: 4676 - DNA, 206 bp, Homo sapiens
aatttcttttctttcatgtaatcttgtcagtagacaaatgatggtgactatattctgtaataagtacatatattatgattaaaaaaaaaagcgtgtactatctgcccaaagagatcataagcactttggagctataaacttcttgtctatttctacttccatggtactgatattctcttctcagataaccaaacaaaaacagctga

SEQ ID NO: 4677 - DNA, 124 bp, Homo sapiens; identical to SEQ ID NO: 3491
  misc_feature 28, 47, 87, 90: n = A,T,C or G

SEQ ID NO: 4678 - DNA, 209 bp, Homo sapiens
caaactttggtttaagtaaacatatgttcaaaatcagattaacagatacaggtttcatagagaacaaaggtgatcatttgaagggcatgctgtaatttcacacaattttccagttcaaaaatggagaatacttcgcctaaaatactgttaagtgggttaattgatacaagtttctgtggtggaaaatttatgcaggttttcacgaatcc

SEQ ID NO: 4679 - DNA, 575 bp, Homo sapiens
tcggctcgagcgggcatgtgccacattgcccggctaatttttgtatttttagtagagatggggtttcaccacgttgtccagtctggtctcgaactcctgacctcaagtgctccacctgcctcagccttccaaagtgctgggattacaggcgtgagccactgcacccggctagaactcactttctccaaatccctctgcttcgaatttcaccgtcttcagctctttctagttctgggcctcaccagcctctcattctgcctgttttcaaaccttacgatccccaaaaattgtctggttctgggcctctaactccctctggctctatagtctatgactaccagattcttttggttctagaattcactaacttcctctggttctagacctcttcctataaattaatccctcttgttttagatctcacaccctccaacgccctccggttccagatcttatattcagtgatttcctctggttctggaccccacaactccaagcttcctattggttccagttctcctgatcggtaatacatttggttccaaacccagacctcttaatctctctcttttttt

SEQ ID NO: 4680 - DNA, 57 bp, Homo sapiens
acctttactcccacgcccagtttggcgactacaactaccctgggggtgtggactgtg

SEQ ID NO: 4681 - DNA, 486 bp, Homo sapiens
attcgaattcctggaaagagcccttgggtttgtccgtctttttgtgttggcttcttcccagcctccatccgtccagtgtgccccacttccacattctggctataatttcctttttctccttgttcattgggatttgaggacctatttctaaatcttaatttatagcacaaatatgtgggagcaatgagagttgaaccgttgtttttgttggagatgcagattgtgtcttgaaaatgatgattatatatgcaaattctgccctaccctcaccctcttccaagtttccccccaaaaaggtcacacagtgcggcttcctgtgggaaacaggagcagagctggcctgcagagcccctggggctgtgatgaagctcatatcttatctctgttctattaacaaaatgggagtttgtgggttttaaaaaattccgtttctaaatggaggaatagatgactttctttcttttggtgggggttgggacttgtggc

SEQ ID NO: 4682 - DNA, 563 bp, Homo sapiens
cgagtaaaaatatgagatcctttaaatccttccatgaaacgttttgtgtggtggcacctcctacgtcaaacatgaagtgtgtttccttcagtgcatctgggaagatttctacctgaccaacagttccttcagcttccatttcgcccctcatttatccctcaacccccagcccacaggtgtttatacagctcagctttttgtcttttctgaggagaaacaaataagaccataaagggaaaggattcatgtggaatataaagatggctgactttgctctttcttgactcttgttttcagtttcaattcagtgctgtacttgatgacagacacttctaaatgaagtgcaaatttgatacatatgtgaatatggactcagttttcttgcagatcaaatttcacgtcgtcttctgtatactgtggaggtacactcttatagaaagttcaaaaagtctacgctctcctttctttctaactccagtgaagtaatggggtcctgctcaagttgaaagagtcctatttgcactgtagcctcgccgtctgtgaattggaccatcctatttaac

SEQ ID NO: 4683 - DNA, 580 bp, Homo sapiens
  misc_feature 513: n = A,T,C or G
taatggaagcatctagcatgtcgtcaaactgaaaggacttttgtacatagtgaggagctttgaaacgaggattgggaaaaagtaattccgtaggttattttcagttattatatttacaaatgggaaacaaaaggataatgaatactttataaaggattaatgtcaattcttgccaaatataaataaaaataatcctcagtttttgtgaaaagctccatttttagtgaaatattattttatagctactaattttaaaatgtcttgcttgattgtatggtgggaagttggctggtgtcccttgtctttgccaagttctccactagctatggtgtcataggctcttttgggatttttgaagctgtatactgtgtgctaaaacaagcactaaacaaagagtgaaggatttatgtttaattctgaaagcaaccttcttgcctagtgttctgatattggacagtaaaatccacagaccaacctggagttgaaaatcttataatttaaaatatgctctanacatgtttatcgtatttgatgctacaggatttgaaattgtattacaaatccaatgaaatgagttttt

SEQ ID NO: 4684 - DNA, 542 bp, Homo sapiens
gcctggggctcatgtacttcatccactactacctgcctgaaggcctgcggcgccgcttcctgcaggccttcttcatcagtcactgtctgcctcgagcactgcagcctggccagcctggcactaccccaccacaggacgcagcccaggacccaaacctgagccccggcccttccccagcagtggctcggtgagccatgtgcacctatggcccagccactgcagcacaggaggctccgtgagcccttggttcctccccgaaaacccccagcattacgatcccccaagtgtcctggaccctggcctaaagaatcccacccccacttcatgcccactgccgatgcccaatccaggcccggtgaggccaaggtttcccagtgagcctctgcgcctctccactgtttcatgagcccaaacaccctcctggcacaacgctctaccctgcagcttggagaactccgctggatggggagtctcatgcaagacttcactgcagcctttcacaggactctgcagatagtgcctctgcaaactaaggagtgact

SEQ ID NO: 4685 - DNA, 570 bp, Homo sapiens
accctcactacctcagttctcaataacttagtgaatcactgccctcctcaaagccatttccactcagctctttccagagaattctcagttttatgagacgggaaactttatttcacgagaaagcctcattgtcagaagtatcttcattcaatgggcacaatatgctgtgtatctcaccaggtagctgtcaggggccaccgagagtgtcgttaaaaatgggcatcgttgtaataaaggaggaaagtgcgacttttgaaatgtttggaaggtttatttctcatgcacattccagggaaaagcagagagtaaattagagacgggataggaaggccgtgggagaactcgatcctagcctgtgtcagctggatgtgtttacgtggagaggcgtggccactttttaggtcacctgaagcagtttagcctttggatagaggaacctgcctgaatttatggcattagtggtggcatttttttgtgtacaagatgtgggtgatggaggggctgtttctttttccgtgtgggtggttaataatcgtcagtctcggagggcgatgctcgtaggatatttca

SEQ ID NO: 4686 - DNA, 568 bp, Homo sapiens
ccgtttagagttatttaggctttgtaacgattgggggataaaaagatgttcagtcatttttgtttctacctcccagatcggatctgttgcaaactcagcctcaataagccttgtcgttgactttagggactcaatttctccccagggtggatgggggaaatggtgccttcaagaccttcaccaaacatactagaagggcattggccattctattgtggcaaggctgagtagaagatcctaccccaattccttgtaggagtataggccggtctaaagtgagctctatgggcagatctaccccttacttattattccagatctgcagtcacttcgtgggatctgcccctccctgcttcaatacccaaatcctctccagctataacagtagggatgagtacccaaaagctcagccagccccatcaggactcttgtgaaaagagaggatatgttcacacctagcgtcagtattttccctgctaggggttttaggtctcttcccctctcagagctacttgggccatagctcctgctccacagccatcccagccttggcatctagagcttgatg

SEQ ID NO: 4687 - DNA, 541 bp, Homo sapiens
ggatcctgattccactgtgcgagtctggcacttgtaccctccgggaagccatcattgtgggtagcatcatcaccaagtgctccatccctgtgttgcactccagtgcggccatgctgaaaattgctgagatggaatacagcggtgccaacagcatcttcctgcgactgctgctggataagaagtatgcactgccttaccgggtgctggatgccctagtcttccacttcctggggttccggacagagaagcgtgaactgcctgtgctgtggcaccagtgcctcctgactttggtccagcgctacaaggccgacttggccacagaccagaaagaggccctcttagaactgctccggctgcagccccatccacagctatcgcccgaaatcaggcgtgagcttcagagtgcagtcccccgcgatgtggaagatgttcccatcaccgtggagtgaggaaaacagtcagctgtcctggccaaaggggtttggaaggacaccaagacccccgttggtgactgaagatgacactgagctttaatggctga

SEQ ID NO: 4688 - DNA, 534 bp, Homo sapiens
tgctcagccctgtacagggtagggagagggtataacaggaagagctttgacttgtccctgtctatacattctctgtatcttttgggggtaacttcttggcagtttttcagtgttcagccatgtcagttgaaactagatttttctgtagattttttacttacccatgtgagcctaacactatcctgtaattcattttctcaggctatgtgtaaatgtagaaccctaatttttctataaaaaaacaaactaactaactgtgtaaagaaagaaaaagggaagtaccaatgggtttttccaccttatttttacctttgatctacccttgcagatttaacctgtcttcttccctcccattattctcattttccttttacctttctccaccatccagagccacaaaagcaaaccttctacctcctacctacttttctctgggacaaggataaaggaatatgattttccagagccccagagccagctcatcttccaggtgctgaaaccactttccaaataaactaaagcctggatttgata

SEQ ID NO: 4689 - DNA, 1862 bp, Homo sapiens
gtggtgggactcgcgtcgcggccgcggagacgtgaagctctcgaggctcctcccgctgcgggtcggcgctcgccctcgctctcctcgccctccgccccggccccggccccggccccgcgcccgccatggagaagactgagctgatccagaaggccaagctggccgagcaggccgagcgctacgacgacatggccacctgcatgaaggcagtgaccgagcagggcgccgagctgtccaacgaggagcgcaacctgctctccgtggcctacaagaacgtggtcgggggccgcaggtccgcctggagggtcatctctagcatcgagcagaagaccgacacctccgacaagaagttgcagctgattaaggactatcgggagaaagtggagtccgagctgagatccatctgcaccacggtgctggaattgttggataaatatttaatagccaatgcaactaatccagagagtaaggtcttctatctgaaaatgaagggtgattacttccggtaccttgctgaagttgcgtgtggtgatgatcgaaaacaaacgatagataattcccaaggagcttaccaagaggcatttgatataagcaagaaagagatgcaacccacacacccaatccgcctggggcttgctcttaacttttctgtattttactatgagattcttaataacccagagcttgcctgcacgctggctaaaacggcttttgatgaggccattgctgaacttgatacactgaatgaagactcatacaaagacagcaccctcatcatgcagttgcttagagacaacctaacactttggacatcagacagtgcaggagaagaatgtgatgcggcagaaggggctgaaaactaaatccatacagggtgtcatccttctttccttcaagaaacctttttacacatctccattccttattccacttggatttcctatagcaaagaaacccattcatgtgtatggaatcaactgtttatagtcttttcacactgcagctttgggaaaacttcattccttgatttgtgtttgtcttggccttcctggtgtgcagtactgctgtagaaaagtattaatagcttcatttcatataaacataagtaactcccaaacacttatgtagaggactaaaaatgtatctggtatttaagtaatctgaaccagttctgcaagtgactgtgttttgtattactgtgaaaataagaaaatgtagttaattacaatttaaagagtattccacataacttcttaatttctacattccctcccttactcttcgggggtttcctttcagtaagcaacttttccatgctcttaatgtattcctttttagtaggaatccggaagtattagattgaatggaaaagcacttgccatctctgtctaggggtcacaaattgaaatggctcctgtatcacataccggaggtcttgtgtatctgtggccaacagggagtttccttattcactctttatttgctgctgtttaagttgccaacctcccctcccaataaaaattcacttacacctcctgcctttgtagttctggtattcactttactatgtgatagaagtagcatgttgctgccagaatacaagcattgcttttggcaaattaaagtgcatgtcatttcttaatacactagaaaggggaaataaattaaagtacacaagtccaagtctaaaactttagtacttttcccatgcagatttgtgcacatgtgagagggtgtccagtttgtctagtgattgttatttagagagttggaccactattgtgtgttgctaatcattgactgtagtcccaaaaaagccttgtgaaaatgttatgccctatgtaacagcagagtaacataaa

SEQ ID NO: 4690 - DNA, 565 bp, Homo sapiens; identical to SEQ ID NO: 725

SEQ ID NO: 4691 - DNA, 555 bp, Homo sapiens; identical to SEQ ID NO: 727

SEQ ID NO: 4692 - DNA, 616 bp, Homo sapiens; identical to SEQ ID NO: 3496

SEQ ID NO: 4693 - DNA, 441 bp, Homo sapiens
  misc_feature 286: n = A,T,C or G
taagctcggaattcggctcgagctggcggcttttcctggaggcgctggttgacagtgtggcccagggcatccctttccaacagcaccagtttgacaaaaatgtcttccaactggagcaggccttcgttctcagcaagcagaggtaccccagccagccgcgaggagacactgtggacctggccaagaagatcttcctcaaatattaccccggctgggtggccggctcttggtgatagattcgccaccactgggccttgttttccgctaattccagggcagattccanggcccagagctggacagacatcacaggaatacccaggcctgggaggaggccccacggcctgctggtggggtctgacctggggggattggagggaaatgacctgccctccaccaccacccaaagtgtgggattaaagtactggtttctttccactt

SEQ ID NO: 4694 - DNA, 265 bp, Homo sapiens
gcggagtgtggaggagcggattcaggacgaggctcagtgtctgatagaggaacttcggaaatccaagggagccctcgtggaccccaccttcctcttccattccattaccgccaacatcatctgctccatcatctttggaaaacgcttccactaccaagatcaagagttcctgaagacgctgaacttgttctgccagagtttcttactcatcagctctatatccagccagctgtttgagctcttctctggcttcttgaaatacttt

SEQ ID NO: 4695 - DNA, 251 bp, Homo sapiens
gccagccctcgtgctgcctctggtccctgaagtgtcacctctctcaggacctctcctctggcctgtggggttataagtgatggatagcagaaagggagaactgactcctgtcccaaatagctcctctgccacctgtcctgcagtgggcctgtgtgggttatgattctagatcctagacagaggctgggtcagctgtggatggggtggtgccttggtctctcttgactacctcgtccaaagagagcactgcc

SEQ ID NO: 4696 - DNA, 96 bp, Homo sapiens; identical to SEQ ID NO: 3499

SEQ ID NO: 4697 - DNA, 459 bp, Homo sapiens; identical to SEQ ID NO: 3500

SEQ ID NO: 4698 - DNA, 360 bp, Homo sapiens; identical to SEQ ID NO: 3501
  misc_feature 360: n = A,T,C or G

SEQ ID NO: 4699 - DNA, 271 bp, Homo sapiens; identical to SEQ ID NO: 41

SEQ ID NO: 4700 - DNA, 392 bp, Homo sapiens; identical to SEQ ID NO: 3502
  misc_feature 390: n = A,T,C or G

SEQ ID NO: 4701 - DNA, 302 bp, Homo sapiens; identical to SEQ ID NO: 731

SEQ ID NO: 4702 - DNA, 297 bp, Homo sapiens; identical to SEQ ID NO: 3505

SEQ ID NO: 4703 - DNA, 534 bp, Homo sapiens; identical to SEQ ID NO: 3506

SEQ ID NO: 4704 - DNA, 443 bp, Homo sapiens
gggtactcaacactgagcagatctgttctttgagctaaaaaccatgtgctgtaccaagagtttgctcctggctgctttgatgtcagtgctgctactccacctctgcggcgaatcagaagcagcaagcaactttgactgctgtcttggatacacagaccgtattcttcatcctaaatttattgtgggcttcacacggcagctggccaatgaaggctgtgacatcaatgctatcatctttcacacaaagaaaaagttgtctgtgtgcgcaaatccaaaacagacttgggtgaaatatattgtgcgtctcctcagtaaaaaagtcaagaacatgtaaaaactgtggcttttctggaatggaattggacatagcccaagaacagaaagaaccttgctggggttggaggtttcacttgcacatcatggagggtttaatgcttatctaa

SEQ ID NO: 4705 - DNA, 93 bp, Homo sapiens; identical to SEQ ID NO: 734
  misc_feature 11: n = A,T,C or G

SEQ ID NO: 4706 - DNA, 415 bp, Homo sapiens
aagctcgggaattcgctcgagggaggttgaggcaggagaattgcttgaacccgggagacagaggttgcagtgagccgagattgcaccactgcactccagcctgggtgacagagcaagacttcgactcaaaaaataaaataagcgtatctggatttttcttttgaattcttgactgataagtttgagaatgtatgtttttggaattttacagttgactcaagtgtgaaagtatacacaagtaatttttcttttctagctatgtgaatgtaaaatacttgcagataatgtatatattgtgtaatatatgtatatttggtcataaaagcagataattggaaacattgtaaaattaagcactttaattcctattaaatattaaacatttgtatcttgtaaataaacacatccttaaatt

SEQ ID NO: 4707 - DNA, 319 bp, Homo sapiens
taaattcgcggccgcgtcgaccaacatcacttagcaactaggcaagggagacagaaatgaggggtaaacagcactcttcaacacaagtgaactgctgggattacatcatctgaagatggggctggtgcaaaatagttcttgctaaagattcatacctcagaggtaacctctacatcggtatcatcacttaaggacttagagtcctccaggtcatcattttttcccacttcaatcacctgtgaaggcaaaaacatctcattagtaatgtttacttgttttagatgaggctaattaactgaaagcaaaaaaaaagtcgacg

SEQ ID NO: 4708 - DNA, 386 bp, Homo sapiens
atggggtcctgtcccaagagctgggaacttggtgttgccccctcaatttccagcaccagaaagagagattgtgtgggggtagaagctgtctggaggcccggccagagaatttgtggggttgtggaggttgtgggggcggtggggaggtcccagaggtgggaggctggcatccaggtcttggctctgccctgagaccttggacaaacccttccccctctctgggcacccttctgcccacaccagtttccagtgcggagtctgagaccctttccacctcccctacaagtgccctcgggtctgtcctccccgtctggaccctcccagccactatcccttgctggaaggctcagctctttggggggtctggggtgacctccccacctcct

SEQ ID NO: 4709 - DNA, 299 bp, Homo sapiens
tgctgatgtttagaaataaatagcagtgtgactgggaaagaggaattgcagttgtgggggtgtgagcctggcagcagccagccagcagcctctcccaggcgggagtctaccatccgagacggcgatgacaaagagcttcattccacattctttgttatctctacttcccaccctcttggcaactacagagcagtgtgggcagccccaagtgtggtccccagagagcgtttggctttcctgtctgtctatcctgagcgggtggagtctcagttgtgtgcccctaaatcaagatttgcttc

SEQ ID NO: 4710 - DNA, 214 bp, Homo sapiens
ctcgagccgcacagaaaggattggaatcctgcagaaacaagagactttattgatgcttaccttaaagaaatgtcaaagcacacaggcaatcctacttcaagtttccatgaagaaaacctcatctgcagcaccctggacctcttctttgccggaaccgagacaacttccacaactctgcgatgggctctgctttatatggccctctacccagaaa

SEQ ID NO: 4711 - DNA, 358 bp, Homo sapiens; identical to SEQ ID NO: 3511

SEQ ID NO: 4712 - DNA, 373 bp, Homo sapiens; identical to SEQ ID NO: 3512

SEQ ID NO: 4713 - DNA, 545 bp, Homo sapiens; identical to SEQ ID NO: 737

SEQ ID NO: 4714 - DNA, 290 bp, Homo sapiens; identical to SEQ ID NO: 341

SEQ ID NO: 4715 - DNA, 586 bp, Homo sapiens; identical to SEQ ID NO: 738

SEQ ID NO: 4716 - DNA, 580 bp, Homo sapiens; identical to SEQ ID NO: 3516

SEQ ID NO: 4717 - DNA, 541 bp, Homo sapiens; identical to SEQ ID NO: 3517

SEQ ID NO: 4718 - DNA, 351 bp, Homo sapiens
cgtgttctgctagtaaatagttgaaggttgatcattgatctcctgcgttttcagtctggcatggaaaagcccccgtgcaactggtaaagatatcaataagcaccaggaggtatctaaatccaccaggagccataggcatcacattgacgtccatttaccagtcttccctggcaagattcttctgaattgtgctgccttgaccaaaagaggtatgggaggggctgggcgcagtggcttgtgcctgtaatcccaacattttgggaaaccaattcaggtggatcattagaggtcaggggttcaagaccatcctggccagcatggtgacatcccgtctctactaaaaatacaata

SEQ ID NO: 4719 - DNA, 251 bp, Homo sapiens
ggtttccccttttgcttggctctcattctctcttgtctgctgccatgtaagatgtgccttttgccttccaccatgattgtgaggcctcccagccacatggaactgtgagttcattaaacctctttttcttcataaattacccagtctcgggtatgtctttatcagcagtgtaaaaacagactaatacaccactcctctaccttctttattttctcagtgtggaaaatgcctgatgaaagctttggggccct

SEQ ID NO: 4720 - DNA, 94 bp, Homo sapiens
ggacataggaggtgctgtgtcccatgccctcttgccctgacagtgtcccatgggcccccttctgctccctgccccctccctgctactgctgatg

SEQ ID NO: 4721 - DNA, 378 bp, Homo sapiens
cgagttcagctctgcaaacactgtcacatcctttcctggaagggcactgaccatccgtgcactgccaataacccagagagctgctccgtttcactttcaccccaggactttatcaacttgttcaagttctgaatcccagcacatgacaacacttcagaagggtccccctgctgactggagagctgggaatatggcatttggacacttcatttgtaaatagtgtacattttaaacattggctcgaaacttcagagataagtcatggagaggacattggaggggagaaatgcagttgctgactgggaatttaagaatgtgaacttctcactagaattggtatggaaaagcaaaatactgtaaataaactttttttctaac

SEQ ID NO: 4722 - DNA, 482 bp, Homo sapiens
gctgaaaagcaaccagcagctggtggacattattgagaaagtgaaacctgagatccggctgttgattgagaaatgtaacacggtcaaaatgtgggtacagctcctgattcccaggatagaagatggaaacaactttggggtgtccattcaggaggaaacagttgcagagctaagaactgttgagagtgaagctgcatcttatctggaccagatttctagatattatattacaagagccaaattggtttctaaaatagctaaatatccccatgtggaggactatcgccgcaccgtgacagagattgatgagaaagaatatatcagccttcggctcatcatatcagagctgaggaatcaatatgtcactctacatgacatgatcctgaaaaatatcgagaagatcaaacggccccggagcagcaatgcagagactctgtactgaggccagggccagggccaggggactctgtgagtctggctca

SEQ ID NO: 4723 - DNA, 528 bp, Homo sapiens
ttcactcagaacccaggatgttcagaatcaaaggtgaacaaggcgccccaggtcttcaaggtcacaagggggccatgggcatgcctggtgcccctggcccgccgggaccacctgctgagaagggagccaagggggctatgggacgagatggagcaacaggcccctcgggaccccaaggcccaccgggagtcaagggagaggcgggcctccaaggaccccagggtgctccagggaagcaaggagccactggcaccccaggaccccaaggagagaagggcagcaaaggcgatgggggtctcattggcccaaaaggggaaactggaactaagggagagaaaggagacctgggtctcccaggaagcaaaggggacaggggcatgaaaggagatgcaggggtcatggggcctcctggagcccaggggagtaaaggtgacttcgggaggccaggcccaccaggtttggctggttttcctggagctaaaggagatcaaggacaacctggactgcagggtgttccgggccctcctg

SEQ ID NO: 4724 - DNA, 542 bp, Homo sapiens; identical to SEQ ID NO: 3518

SEQ ID NO: 4725 - DNA, 633 bp, Homo sapiens; identical to SEQ ID NO: 3519

SEQ ID NO: 4726 - DNA, 519 bp, Homo sapiens; identical to SEQ ID NO: 3520

SEQ ID NO: 4727 - DNA, 271 bp, Homo sapiens; identical to SEQ ID NO: 743

SEQ ID NO: 4728 - DNA, 610 bp, Homo sapiens; identical to SEQ ID NO: 3521

SEQ ID NO: 4729 - DNA, 320 bp, Homo sapiens
taaactgacagtccttcgataatatgaaacattaatttacaaggacccgttagggcttcaatgatgctgagtctggaaaaggggaggagacccttgggaggactccaggcagctgtgctcccagggctcatgttctctactggattagggataggcacctctgaaatctccaccctgatgattggaatgaaacggagtgaacatgagcccagctgagagaggagcaggaatgtgtgaaaaacagctgctctccttgtcccagctttgtgattgagccctctgtcttgctctctctgccttccctgtgtctttcttctctt

SEQ ID NO: 4730 - DNA, 260 bp, Homo sapiens
gttaaaccattcagaaaaagcttaagaaatgcgatatgacttccttttgtaatgctgctgatcccagtagactatgacttttgataattagcagaatttaactactgagtagttgattattttcacattttaattgctaatcactggctatataagtgtttttaagcaaaggtatttttgaagtggtgtagaacccttccaagctttcctgctcagtgttctaccagacttaccctggggcctggcttaaaagcaggatt

SEQ ID NO: 4731 - DNA, 629 bp, Homo sapiens; identical to SEQ ID NO: 3524

SEQ ID NO: 4732 - DNA, 133 bp, Homo sapiens
agcctacaaacagctattgattttattagcagcaaattatcaccattaaagccagtggtttttttgtttgttttttttttggtttttttttgggaaaaaaaactttttgcccccaagggggaaaaaaaagggg

SEQ ID NO: 4733 - DNA, 168 bp, Homo sapiens
taaatggaaggtgaccaatgtcactgcttctaaaatactgtcctaaacaacccagaagattttatttcagctcatgaatagctgttctaaatctgttgtatgttagacatactatgaactacctcttcacttattatggggaagtttccttaataaaagtgtgacgat

SEQ ID NO: 4734 - DNA, 458 bp, Homo sapiens
gcgcggcgatcaagaagctgtccgggcctctgatctccgatttcttcgccaagcgcaagagatcagcgcctgagaagtcgtcgggcgatgtccccgcgccgtgtccctctccaagcgccgcccctggcgtgggctcggtggagcagaccccgcgcaagaggctgcggtgagccaatttagagcccaaagagccccgagggaacctgccggggcagcggacgttggaagggcgctgggcctcggctgggaccgttcatgtagcagcaaccggcggcggctgccgcagagcagcgttcggttttgtttttaaattttgaaaactgtgcaatgtattaataacgtctttttatatctaaatgtattctgcacgagaaggtacactggtcccaaggtgtaaagctttaagagtcatttatataaaatgtttaatctctgctgaaactcagtgcaaaaaaaag

SEQ ID NO: 4735 - DNA, 337 bp, Homo sapiens
ataaaatacttctacgcaaaaggcaaaagagcgttacatgaaaatgcacttggccgggaagacagagcaagccaaggctgacctggcccggctggccatcatccggaaacagcgggaggaggctgcccggaagaaggaagaggaaaggaaagcaaaagacgatgccacattgtcaggaaaacgaatgcagtcactctccctgaataagtaactgcgacccgtgggaggagatgccggggacctgggccgcgctgccaggacctctgctgtgtctcgcccaccctgtgccctggcgccgctgcaacagcccctcatggccaggagccccccatggcct

SEQ ID NO: 4736 - DNA, 561 bp, Homo sapiens
agcccctggtcccagagaagaagcaaagggccaggtagaggccagaagggagtctttggatcctgtccaggagcctgggggccaggcagaggctgatggagatgttccagggcccagaggggaagctgagggccaggcagaggctaaaggagatgcccctgggcccagaggggaagctgggggccaggcagaggctgaaggagatgcccccgggcccagaggggaagctgggggccaggcagaggccagggagaatggagaggaggccaaggaacttccaggggaaacactggagtctaagaacacccaaaatgactttgaggtgcacattgttcaagtggagaatgatgagatctagatcttgaagatacaggtaccccacgaagtctcagtgccagaacataagccctgaagtgggcaggggaaatgtacgctgggacaaggaccatctctgtgccccctgcctggtcccagtaggtatcaggtctttctgtgcagctcagggagaccctaagttaaggggcagattaccaataaagaactgaatgaattcatcccccc

SEQ ID NO: 4737 - DNA, 392 bp, Homo sapiens
ctactgagcccctgccagccatggtccaaactctgcccctgggtgccaactctgtcctaactaataatcccacaataaccatcaccccaactcccaacacagctatcctgcagtccagcctagtcatgggagaacagaacttacaatggatattaaatggtgccaccagttctccacaaaaccaagaacaaattcagcaagcatctaaagttgagaaggtgttttttaccactgcagtaccagtagccagtagcccagggagctctgtccagcagattggcctcagtgttcctgtgatcatcatcaaacaagaagaggcatgtcagtgtcagtgtgcatgccgggactctgcaaaggagcgggcatccagcaggagaaagggctgctcctcc

SEQ ID NO: 4738 - DNA, 491 bp, Homo sapiens
acattggcctacagctgaacttttcaaacacgactataagtctaacctccccttctttggctctggctgtgatcagagtgaatgccagtagtttcaacacaactacctttgtggcccaagaccctgcaaatcttcaggtttctctggaaacccaagctcctgagaacagtattggcacaattactcttccttcatcgctgatgaataatttaccagctcatgacatggagctagcttccagggttcagttcaatttttttgaaacacctgctttgtttcaggtaaaactgctgctcactgcttttggcttgggctttatttggagatgagggcatttcatttcttttagtgctcgaatattcttaaggctgccgtaagtcaaatgaattgccgaaatgctgcagttcatttttaaatgcagcctaatgatactggtgatgataaataacagtaactgacagttacatagtatttatatttaccaattgcca

SEQ ID NO: 4739 - DNA, 427 bp, Homo sapiens; identical to SEQ ID NO: 3528

SEQ ID NO: 4740 - DNA, 404 bp, Homo sapiens; identical to SEQ ID NO: 3531

SEQ ID NO: 4741 - DNA, 396 bp, Homo sapiens; identical to SEQ ID NO: 749

SEQ ID NO: 4742 - DNA, 505 bp, Homo sapiens; identical to SEQ ID NO: 3533

SEQ ID NO: 4743 - DNA, 314 bp, Homo sapiens; identical to SEQ ID NO: 750

SEQ ID NO: 4744 - DNA, 563 bp, Homo sapiens; identical to SEQ ID NO: 3535

SEQ ID NO: 4745 - DNA, 303 bp, Homo sapiens; identical to SEQ ID NO: 3537
  misc_feature 37: n = A,T,C or G

SEQ ID NO: 4746 - DNA, 440 bp, Homo sapiens
cgagacaaccccagtacgtgaagatgtatgagaaccagcagctgggcaagctggagccacacgtcttcgcgctggccgacgtggcctactacaccatgctcaggaagcgcgtgaaccagtgcatcgtgatctcgggtgagagcggctccggcaagacccagagcaccaacttcctcatccactgcctcaccgccctcagccagaagggctacgccagcggcgtcgagaggaccatcctgggtgctggccctgtgctggaggtgagcggggaagctggtcggtctgtgggagggggcatttgtttggaaaatgcgggtttcaggccaagctcggtggcccacatctataatcccaatgctttggaaggctgagggaggaggattgcttgagcccaggagttcaagatcagcctgggcaacatagcaagaccttttctctac

SEQ ID NO: 4747 - DNA, 552 bp, Homo sapiens; identical to SEQ ID NO: 753

SEQ ID NO: 4748 - DNA, 589 bp, Homo sapiens
cactttgaatctatctgcaccgtttattagccagttctacaaggaatcattgatgaaagttatgccttatgttgatatactttttggaaatgagacagaagctgccacttttgctagagagcaaggctttgagactaaagacattaaagagatagccaaaaagacacaagccctgccaaagatgaactcaaagaggcagcgaatcgtgatcttcacccaagggagagatgacactataatggctacagaaagtgaagtcactgcttttgctgtcttggatcaagaccagaaagaaattattgataccaatggagctggagatgcatttgttggaggttttctgtctcaactggtctctgacaagcctctgactgaatgtatccgtgctggccactatgcagcaagcatcataattagacggactggctgcacctttcctgagaagccagacttccactgatggaagagctgaaaacacaagcccaggagtgcagacactgccctaattgcttcctgagaattcccatattaataaagaagaaaattatctgccattttttcctactataataatgctgaatcttaattt

SEQ ID NO: 4749 - DNA, 330 bp, Homo sapiens
taagctcgggattcggctcgggggccgtggcactgaggccgaagtgcctgccagacggcacggtctgggtgcgggtgttccctgtgagcccgagtccgcttcaggaggggagcctgcaggtgccggctggtgaggggatgacccgctgtgggtgggaggaggcaccgcccatctcagcagcaccaggactgcctgggactccctggcaacccagcaccggggaagccgtcagctgctgtgacaataaaacctgccccgtgtctggagaaaaaaaagggtttaggggaagggtttttttttttttaaaaaaacccccaccccgccccccct

SEQ ID NO: 4750 - DNA, 2056 bp, Homo sapiens
caaatatagagactctccaagggcccactgagccccaaaggatttggatcaaatatggtgatattatggaaatatgtagtaatatcttaaaaatgtgtaagatatagtctctttttttttttttttaagagaaggggtctcactatgtttttaggctggtatcgaactcctggtctccagtgatcctcccacctcagcctgtcaaatagctagaaatataggcatgtaccaccatgctggcttaagatgcattctttgacacagcaattctatttctataagtttatccatataggtaagagaacatatatacaagataatcactgtaactttacttattactgcaaaagtttaaaaataaccaaattgtaataattttataatattttatcagtacaaaaaataagtgatggcatatacaaaccctgggatagtataaggctattaaaattataatagcattccatgtattttgatatacaaagtgccaatgttacaggtgaaaaaagcgaagtgcagaatactatgtgtaactgttaatagtgatggtttgctgggtcagaactgaaggcctgggggtagaaatgagagctcatgacttctaccttttgaatgttgttccttgtgcatgatttacaattttctaaaactaaaaaaaaaatctcagaaaggggctgtacgcacctaaattactttgatattccccaaagtggagagaagtacccgctacacattttatgtgatgcattcagatcacaccaactccttgaactaaatccgaatttttattttaatctgataaacttggcctactattttactgaactcatttcccctatagcctgataaggtcattgacctctccatactggcaccagcgggagactactcacctcgagatctcaaaagcctcctacatgaggttagtaatatccctgaatcctgcaatgaattaactctctactccactgggtcccaggtctgcccccagagagtcatccagagagtaccagggaccatcttcagaaaacaagaggcatttgatccccaaacttcttgaatgaaagcgctgttgtttttcttttttgaatatataaaagtaaatactcaagcagatgggaaacagaacaggatagtaatacccttatcatcattaacaccttggatcaagaagaggcattaagcatacagactcacgctttgatgaaagctgggagaaagaggagcatcaaagggatcttgagaacaaaggcagtccttcccctcccaatcacatgcccacctcctctcactgcagcttctgtctcaggtcttctcccagcagagctataaatccaggctgactcctcactccccacatatccactcctgctctccctcctgcaggtgaccccagccatgaggaccatcgccatccttgctgccattctcctggtggccctgcaggcccaggctgagtcactccaggaaagagctgatgaggctacaacccagaagcagtctggggaagacaaccaggaccttgctatctcctttgcaggaaatggactctctgctcttagaacctcaggtaggagacatcaatcttgcacatctgcaaaatctagaaaaaaaggattggagaaaggatctggagtcaagtgtggaaaggtctacctcacttgagtgactttacttaatcttcctggaccttgattttctcatctataaattaatcagtgagaaccaaataaatctaaaagattttcttttttctaagactttcagctccaagatatttctgtgaaatttgctacttttaagatagaaagagctacactgactagttctttgtagatctaaatgggcagacttagttatatagagagtgttttactttgtccattggaaaagcttttagaacctagagaggaacctataggtgtgttttgatgtaggctaataggcttgattaaatctttctacaatacatccttagatcaaaacatcatattgtgtctcatacatatacacaattattgtttgtcaattaaaacaagtaaatatgtaaaatgtt

SEQ ID NO: 4751 - DNA, 142 bp, Homo sapiens
  misc_feature 13, 61, 67: n = A,T,C or G
accctactctgtnatcccaagtgctcttattctggtgagaagaaccttacttccataattngggaangaatggaagatggacaccaccggacaccaccagacactaggatgggatggatggttttttgggggatgggctagg

SEQ ID NO: 4752 - DNA, 240 bp, Homo sapiens
gtggctgtcattctaatgcgtgtgcttcggaatgacctggctcggtacaacttagatgaggagaccacctctgcaggttctggtgatgactttgaccagggtgacaatggctggaaaattatccatacagatgtcttccgcttccccccataccgtggtctgctctgtgctgtgcttggcgtgggtgcccagttcctggcccttggcactggcattattgtcatggcactgctgggcatg

SEQ ID NO: 4753 - DNA, 142 bp, Homo sapiens
agaaactcaagattgactcatgaggacctgaagggtgacatcccaggaggggcctctgaaatttcccacaccccagcgcctgtgctgaggactccctccatgtggccccaggtgccaccaataaaaatcctacagaaaattc

SEQ ID NO: 4754 - DNA, 377 bp, Homo sapiens; identical to SEQ ID NO: 3539

SEQ ID NO: 4755 - DNA, 262 bp, Homo sapiens; identical to SEQ ID NO: 63

SEQ ID NO: 4756 - DNA, 394 bp, Homo sapiens; identical to SEQ ID NO: 755

SEQ ID NO: 4757 - DNA, 280 bp, Homo sapiens
tcagcacctacttttgtcaaatcttaacattttgccacttcgagatcacattgccattcctcccctccagaggtaacaattatccacaatttgatgtttatcattcctgtgttgttgtactttcactgtgtataacctaaaccatctactctttagtactgttttatatatttttaagcctcatacttgctcattctacagcttttttcactcattattgtataattatatctgaagctctcgttcattaattttagtcctgtgtagcagaattcaatta

SEQ ID NO: 4758 - DNA, 560 bp, Homo sapiens
cagttgtttagatcttaggcatgtgctggtatccacagttaattccctgctaaatgccatgtttatcaccctaattaatagaatggaggggactccaaagctggaactgaagtccaaattgtttgtacagtaatatgtttaatgttcattttctctgtatgaatgtgattggtaactaggatatgtatattttaatagaatttttaacaaaacttcttagaaaattaaaataggcatattactaggtgacatgtctactttttaatttttaagagcatccggccaaatgcaaaattagtacctcaaagtaaaaattgaactgtaaactctatcagcattgtttcaaaatagtcatttttagcactggggaaaaataaacaataagacatgcttactttttaatttttatttttttgagactgagtctctctctgttgcccaggctggagtacaatggcgtgatctcggctcactgcaaatctccgcctcccaggttcaagcgattctcctgcctcagcctcctgagtagctgggattacaggcaactgccaccatgcccg

SEQ ID NO: 4759 - DNA, 547 bp, Homo sapiens; identical to SEQ ID NO: 757
  misc_feature 461: n = A,T,C or G

SEQ ID NO: 4760 - DNA, 521 bp, Homo sapiens; identical to SEQ ID NO: 3541

SEQ ID NO: 4761 - DNA, 417 bp, Homo sapiens; identical to SEQ ID NO: 3543

SEQ ID NO: 4762 - DNA, 212 bp, Homo sapiens
cggctcgaggcccctttgctatctagaatgtgtatgccatagaaatactggatagaggtaggatcagcagctaatctatgagaaattttgtatgattagacacaaaaaattgaatgcttatcctaccgtccagtaaaaaatatttttcggtgtccccaaaaatagcaatttattaatggaaaaatataattttatcactaccactttttaat

SEQ ID NO: 4763 - DNA, 410 bp, Homo sapiens
gcctcctcatccggcatccccaccaccgctgctgctgccacggtcccacagcgacccaggcatcacgacctccagtgacactgctgacttcagggacctttataccaaagtgcttgaggaagaagctgcttctgtttcctctgcagatacagggctctgctctgaagcctgcctcttccgcctagcccgctgcccttcccccaagttgctacgtgcccggtcagccgagaaacggcgccctgtgcccaccttccaaaaagttcccctgccctcgggccctgcacctgcccactccctgggggacctaaagggcagctggccaggtcggggcctggtcactcgtttcctccagatatccaggaaagccccagaccccagtgggactggagctcatggacataagcaggtgc

SEQ ID NO: 4764 - DNA, 529 bp, Homo sapiens
agacgggtcgcggcgagcgcgcctatgacatctactcgcggctgctgcgggagcgcatcgtgtgcgtcatgggcccgatcgatgacagcgttgccagccttgttatcgcacagctcctcttcctgcaatccgagagcaacaagaagcccatccacatgtacatcaacagccctggtggtgtggtgaccgcgggcctggccatctacgacacgatgcagtacatcctcaacccgatctgcacctggtgcgtgggccaggccgccagcatgggctccctgcttctcgccgccggcaccccaggcatgcgccactcgctccccaactcccgtatcatgatccaccagccctcaggaggcgcccggggccaagccacagacattgccatccaggcagaggagatcatgaagctcaagaagcagctctataacatctacgccaagcacaccaaacagagcctgcaggtgatcgagtccgccatggagagggaccgctacatgagccccatggaggcccaggagtttggcatctt

SEQ ID NO: 4765 - DNA, 547 bp, Homo sapiens
cccaccacccgcgtagcaccggcagccgctgtcccggcagtctccagccgtcccgcccgcttgtggccaactggctccagtcactccccgaaatgccagtcgacttcactgggtactggaagatgttggtcaacgagaatttcgaggagtacctgcgcgccctcgacgtcaatgtggccttgcgcaaaatcgccaacttgctgaagccagacaaagagatcgtgcaggacggtgaccatatgatcatccgcacgctgagcacttttaggaactacatcatggacttccaggttgggaaggagtttgaggaggatctgacaggcatagatgaccgcaagtgcatgacaacagtgagctgggacggagacaagctccagtgtgtgcagaagggtgagaaggaggggcgtggctggacccagtggatcgagggtgatgagctgcacctggagatgagagtggaaggtgtggtctgcaagcaagtattcaagaaggtgcagtgaggcccaggcagacaaccttgtcccaaggaatcagcaggatgtgtggg

SEQ ID NO: 4766 - DNA, 569 bp, Homo sapiens
gaattgtctacaagtcctgaatcctgaaaccaggacgtggaccacgccagaagtgaccagccccccaccatccccaagaacattccacacatcatcggcagccattggaaaccagctatatgtctttgggggcggagagagaggtgcccagcccgtgcaggacacgaagctgcatgtgtttgacgcaaacactctgacctggtcacagccagagacacttggaaatcctccatctccccggcatggtcatctgatggtggcagcagggacaaagctcttcatccacggaggcttggcgggggacagattctatgatgacctccactgcattgatataagtgacatgaaatggcagaagctaaatcccactggggctgctccagcaggctgtgctgcccactcagctgtggccatgggaaaacatgtgtacatctttggtggaatgactcctgcaggagcactggacacaatgtaccagtatcacacagaagagcagcattggaccttgcttaaatttgatactcttctaccccctggacgattggaccattccatgtgtatcattccat

SEQ ID NO: 4767 - DNA, 371 bp, Homo sapiens
gatgtgggccggccccagcctggacgcgagaacttccagaactggctcaaggatggcacggtgctatgtgagctcattaatgcactgtaccccgaggggcaggccccagtaaagaagatccaggcctccaccatggccttcaagcagatggagcagatctctcagttcctgcaagcagctgagcgctatggcattaacaccactgacatcttccaaactgtggacctctgggaaggaaagaacatggcctgtgtgcagcggacgctgatgaatctgggtgggctggcagtagcccgagatgatgggctcttctctggggatcccaactggttccctaagaatccaggagaatcctcggaacttctcggata

SEQ ID NO: 4768 - DNA, 175 bp, Homo sapiens
  misc_feature 47, 74: n = A,T,C or G
ctcaaaggccaggaattccgttgacttgttggctgccagtaggggcnggaggaaaggcggaggcgagccctggnggagggaggccacaactccgagctgcccacctggtgctgagctggggccccgcctcctttctgttttatttttgaggaaataaaataaccaagtgctaaaa

SEQ ID NO: 4769 - DNA, 631 bp, Homo sapiens; identical to SEQ ID NO: 3544

SEQ ID NO: 4770 - DNA, 620 bp, Homo sapiens; identical to SEQ ID NO: 3545

SEQ ID NO: 4771 - DNA, 601 bp, Homo sapiens
tctgtctcaagtgttagcagcaaaagagaagcatctagcagagatcaagcggaaacttggaatcaattctctacaggaactaaaacagaacattgccaaagggtggcaagacgtgacagcaacatctgcttacaagaagacatctgaaaccttatcccaggctggacagaaggcctcagctgctttttcgtctgttggctcagtcatcaccaaaaagctggaagatgtaaaaaactccccaacttttaaatcatttgaagaaaaggtcgaaaacttaaagtctaaagtagggggaaccaagcctgctggtggtgattttggagaagtcttgaattcggctgcaaatgctagtgccaccaccacggagcctcttccagaaaagacacaggagagcctgtgagattcctacctttgttctgctacccactgccagatgctgcaagcgaggtccaagcacatcttgtcaacatgcattgccatgaatttctaccagatgtgcttttatttagctttacatattcctttgaccaaatagtttgtgggttaaacaaaatgaaaatatcttcacctctattcttgggaaacaccctttagtgtacat

SEQ ID NO: 4772 - DNA, 464 bp, Homo sapiens
gtaagctcgggaattcgctcgaaaaatggactttctgctctagatcatataaggcacttcacagatagcctcaaatgaggaaaatggaagataatcaatattctgaagctgagctgtcttcttttagtacttcccatgtgccagaggaacttaagcagccgttacacagaaagtccaaatcgcaggcatatgctatgatgctgtcactgtctgacaaggagtccctccattctacatcccacagttcttccaacgtgtggcacagtatggccagggctgcggcggaatccagtgctatccagtccataagccacgtatgacgttatcaaggttgaccagagtgggaccaagtccaacagtagcatggctctttcatataggactatttacaagactgctgagcagaatgccttataaacctgcagggtcactcatctaaagtctagtgaccttaaactgaatga

SEQ ID NO: 4773 - DNA, 319 bp, Homo sapiens
aagctcgggaattcggctcgaggaaaagaacatctcagccgggcgtggtggttcacgcctggaatcccagcacttgaggccaggagttccagagcagcctgggcaacgcagtgagagaccccatctctacaaaaaaaaaaaaaaaaaaaaaaaattggaatttccggtttaaaaatttgttaacccccaaagggaaaccattcccttttgaaccccactaaaaccaccaattggcttttaaccccaattcttaaatttttcagaaaaaattttaggttcccgggttttttttttttaaaaaaattaaaaaaatttttgg

SEQ ID NO: 4774 - DNA, 513 bp, Homo sapiens
  misc_feature 477: n = A,T,C or G
actctgttctcttagcaaccgtctgtagcaaagaagtgcttccagcatcactccagcaacacgcccatgcgtcttctctcagcgtatttgggtcttctttgcccaaaagaacacaaaagcctttttccattgtatggaagatagtttttaagacatttgaaactttctactatagtttacagaacaaattattttatttttattgtaaatcttagtgtggaagagctgatttctaaaatatgattaaagtaaatatatacctatgaatatcaagagtcgtctccctgagcctgtagttggaagtgacgactgtaatggaatgatgtcttgtatagaaatgcccttctctgaaataaagagaactcctgggctttctaaagaggctgcgggaagccatcctccactcccactgtgtgtgagagcagtgcttctgatcctgctgtcaccccgacctctggcaggagccggcgccagtangaaagacctccttcctaaataaaagaagtgtctccc

SEQ ID NO: 4775 - DNA, 411 bp, Homo sapiens; identical to SEQ ID NO: 3552

SEQ ID NO: 4776 - DNA, 626 bp, Homo sapiens
aactgggctctggtaattttggaactgtgaaaaaggctactaccaaatgaaaaagttgtgaaaaccgtggctgtgaaaatactgaaaaacgaggccaatgaccccgctcttaaagatgagttattagcagaagcaaatgtcatgcagcagctggacaacccgtacatcgtgcggatgatcgggatatgcgaggccgagtcctggatgctggttatggagatggcagaacttggtcccctcaataagtatttgcagcagaacagacatgtcaaggataagaacatcatagaactggttcatcaggtttccatgggcatgaagtacttggaggagagcaattttgtgcacagagatctggctgcaagaaatgtgttgctagttacccaacattacgccaagatcagtgatttcggactttccaaagcactgcgtgctgatgaaaactactacaaggcccagacccatggaaagtggcctgtcaagtggtacgctccggaatgcatcaactactacaagttctccagcaaaagcgatgtctggagctttggagtgttgatgtgggaagcattctcctatgggcagaagccatatcgagggatgaaaggaagtgaagtcaccgctatgtt

SEQ ID NO: 4777 - DNA, 586 bp, Homo sapiens; identical to SEQ ID NO: 3553

SEQ ID NO: 4778 - DNA, 516 bp, Homo sapiens
aaagacattttatcattaaaaattacctttaattttaatgctgtttctaagaaaagtagttagctccataaagtacaaatgaagaaagtcaaaaaattatttgctatggcaggataagaaagcctaaaattgagtttgtggaactttattaagtaaaatccccttcgctgaaattgcttatttttggtgttggatagaggatagggagaatatttactaactaaataccattcactactcatgcgtgagatgggtgtacaaactcatcctcttttaatggcatttctctttaaactatgttcctaacaaaatgagatgataggatagatcctggttaccactcttttactgagcacatatgggctctgactggttttaatagtcaccttcatgattatagcaactaatgcttgaacaaagctcaaagtatgcaatgcttcattattcaagaatgagaaatatactgttgataatatatattaagtgtgccaaatcagtttgactactctctgtttt

SEQ ID NO: 4779 - DNA, 554 bp, Homo sapiens
aacttctgcaacgagcgcttcactcatttgccagaggctgggggcccggaagtcacgtacgagccacccccgacagcccccaccctgctcacggtgctggcctactcactgctgcccatcgggggcctttccctcatcgtcctgctggccttttggatgtaccggcatcgcaagcccccctacggtcatgtggacatccatgaggaccctgggcctccaccaccatcccctctggtgggcctgaagccactgcagctgctggagatcaaggctcgggggcgctttggctgtgtctggaaggcccagctcatgaatgactttgtagctgtcaagatcttcccactccaggacaagcagtcgtggcagagtgaacgggagatcttcagcacacctggcatgaagcacgagaacctgctacagttcattgctgccgagaagcgaggctccaacctcgaagtagagctgtggctcatcacggccttccatgacaagggctccctcacggattacctcaaggggaacatcatcacatggaacgaactgtgtcatgtagc

SEQ ID NO: 4780 - DNA, 551 bp, Homo sapiens
tcgaaataatgatgtgtggcagaaccatgaagcagttcctggaagagcagaagacacaaaactctatgctcccacccataaggaggcagaatttcaggctcccccagagccaatccaacaagaagtggaacgcagagaacctgaggagcatcaggtggaagaggagcacagaaaggccctggaggaggaagaaatggagcaggtcgggcaagcagaacatcttgaggaggaacacgatccatcaccagaggagcaggatcgggagtggaaagagcagcatgagcaacgagaagcagccaacctcctggaagggcacgcgcgtgctgaggtgtacccttcagccaagccaatgatcaaattccaatcaccctatgaggaacagttggaacagcagagactggcagtgcagcaggtggaggaggcccagcagctgcgggaacaccaggaagctttgcaccagcagaggctgcaggggcacttactacggcagcaggaacagcagcagcagcaggtggcaagagagatggccctgcagaggcaggctgagcttg

SEQ ID NO: 4781 - DNA, 565 bp, Homo sapiens; identical to SEQ ID NO: 762

SEQ ID NO: 4782 - DNA, 468 bp, Homo sapiens
acccggcgctccattaaatagccgtagacggaacttcgcctttctctcggccttagcgccatttttttggaaacctctgcgccatgagagccaagtggaggaagaagcgaatgcgcaggctgaagcgcaaaagaagaaagatgaggcagaggtccaagtaaaccgctagcttgttgcaccgtggaggccacaggagcagaaacatggaatgccagacgctggggatgctggtacaagttgtgggactgcatgctactgtctagagcttgtctcaatggatctagaacttcatcgccctctgatcgccgatcacctctgagacccaccttgctcataaacaaaatgcccatgttggtcctctgccctggacctgtgacattctggactatttctgtgtttatttgtggccgagtgtaacaaccatataataaatcacctcttccgctgttttagctgaagaattaaatc

SEQ ID NO: 4783 - DNA, 261 bp, Homo sapiens; identical to SEQ ID NO: 763

SEQ ID NO: 4784 - DNA, 560 bp, Homo sapiens
aagctcggaattcggctcgagcgcagtgtgggccgcatcagcaagcagtgggggggcctggtccgagaagccctcacagatgcagatgactttggcctacagttcccgctggacctggatgtgagggtgaaggctgtgctgctgggagccacattcctcattgactacatgttctttgagaagcgaggaggcgctgggccctctgccatcaccagttagaggccaccatggtgtgaggagaccatcacctcgaccagaactccagatggtcacctgccctggcccctcctctgggcagcccctttcctccatgtacactgcaggggacagaaggggggccccatccctaccctactccctggccgcctgcccctgtggttcccaaggaggggtatgtatgagagccgctctcctgctacctcccaccactgtcccagcagtccctcggcacacaggcatatcagctttcacactttccccatgcactctctcccacccccttccaggggcctctgctccaaaggaggcctctggaacccaggactctggggttttacaag

SEQ ID NO: 4785 - DNA, 332 bp, Homo sapiens
gggccgccctttttttttttttttttaaaaacaaaaaaaatttttttttcccgtaaaagtgaacccgttttaaaaaccccccaaatcccccgggggggaaaattggccaaaaaccctacaaccttttaattaaaaaaagggggccccaaaattttttggtaaaaatttgaggccctttttttccgggaaaggtaaaaaaaaaaaccttttttggcccaggccggggggttccccctttaatccccacctttttaaaagcccagggggggggtttcccctgggggcaggatttcaaaaccccccggcccaattgggaaaacccttttttttat

SEQ ID NO: 4786 - DNA, 530 bp, Homo sapiens; identical to SEQ ID NO: 765

SEQ ID NO: 4787 - DNA, 471 bp, Homo sapiens
ctcacgggcctggttttctgctccttggtcctgggtgtcagcagccgaagcttcttttcgttccttggcgaggcttttgatggggctcgggacatgtggagagcctactctgacatgagagaagccaattacatcggctcagacaaatacttccatgctcgggggaactatgatgctgccaaaaggggacctgggggtgtctgggctgcagaagcgatcagcgatgccagagagaatatccagagattctttggccatggtgcggaggactcgctggccgatcaggctgccaatgaatggggcaggagtggcaaagaccccaatcacttccgacctgctggcctgcctgagaaatactgagcttcctcttcactctgctctcaggagatctggctgtgaggccctcagggcagggatacaaagcggggaagagggtacacaatgggtatctaataaatacttaagaggtgg

SEQ ID NO: 4788 - DNA, 253 bp, Homo sapiens
catcgctgctgcctgctgatccgcgcctagagtttgaccagccactctccagctcggctttcgcggcgccgagatgctgtcctgccgcctccagtgcgcgctggctgcgctgtccatcgtcctggccctgggctgtgtcaccggcgctccctcggaccccagactccgtcagtttctgcagaagtccctggctgctgccgcggggaagcaggaactggccaagtacttcttggcagagctgctgtctgaaccc

SEQ ID NO: 4789 - DNA, 244 bp, Homo sapiens; identical to SEQ ID NO: 2694
  misc_feature 210: n = A,T,C or G

SEQ ID NO: 4790 - DNA, 271 bp, Homo sapiens
caaggtctcagaggggaagtaccgtgtgggggactcgagcctgctcatctttgtgcgggtgctgaggagccacgtgatggtgcgagtgggtggtggctgggacacgctggagcattacctggacaagcacgacccgtgccgctgctcctccactgctcatcgcccaccccagccgagggtctgcaccttttctccacagagggtgtcgcccaccaccagtccccgccctgctagcccagtccctgggagtgagcgccggggctcccggcct

SEQ ID NO: 4791 - DNA, 250 bp, Homo sapiens; identical to SEQ ID NO: 3560

SEQ ID NO: 4792 - DNA, 485 bp, Homo sapiens; identical to SEQ ID NO: 3561

SEQ ID NO: 4793 - DNA, 505 bp, Homo sapiens; identical to SEQ ID NO: 3562

SEQ ID NO: 4794 - DNA, 499 bp, Homo sapiens; identical to SEQ ID NO: 3563

SEQ ID NO: 4795 - DNA, 430 bp, Homo sapiens; identical to SEQ ID NO: 769

SEQ ID NO: 4796 - DNA, 478 bp, Homo sapiens; identical to SEQ ID NO: 3565

SEQ ID NO: 4797 - DNA, 395 bp, Homo sapiens
attccaggttgagccttaatcatgtaacaaaatattttgtagattacatattgatttttcaaaaattaaaaatgtatttcaaagtattcttactgtgctgtgaatttatatcttcttctgcaagacctggggctatttttttttcttaaggtatgaaatcaatttcaataaccttaaacaattgaccctctgtcaggcatatgtcaggctccactcttaaggagtcagtgaccatgacctctttgcatatcctggaaaaatgacatcatcaaagtatagttgataatgttataaaggatgattttaaaaatagggtataatcatgactcacaaagatatgaggctgggtgtggtggctcacgcctgtaatcccagctctttgggaggccgaagcg

SEQ ID NO: 4798 - DNA, 291 bp, Homo sapiens
atatcatataacaaaatttgctattgtaactatttttaagtataaagttcagtgaggtaggccagcttttatgacgcacctgaagataactttggttttaatcctaccctaaatgaagcatatgcctctatttttcctgtccccagtgctgggcttcttcacataccaacatttctgtgcttttaccaacagcattttagctcagaaggctcgcttactttgggcatttgctgtattttggttttgaaatacttgtaatttgacttattcttgggataatattttagtttt

SEQ ID NO: 4799 - DNA, 376 bp, Homo sapiens
cacaatctactgcaatgatcgtgaacagttatcactggatatagtgctccaagagtcaaattgtatccgttaagggttttctaacttttgctatcccccccgcgaccaaaaaaaggggggtttataatttaaagaaaaggaaaagaggcgtgggttggtacttgcgtccttaacatttaggaatgacatagcctctggagtctacaaactgaagaaactttcatctgatcagccttggaaatccaaagttaaagagcctatgtgtctcttgaggcgggggttagaggattcaaatttgggatgatgctcattgattcctgaccatagcagtgagaggccattttttgtgcaagaaatgtgcttaggactcagtctt

SEQ ID NO: 4800 - DNA, 1179 bp, Homo sapiens
taccgccaccgccgccgccgattccggagccggggtagtcgccgccgccgccgccgccgctgcagccactgcaggcaccgctgccgccgcctgagtagtgtaccgccaccgccgccgccgattccggagccggggtagtcgccgccgccgccgccgccgctgcagccactgcaggcaccgctgccgccgcctgagtagtgggcttaggaaggaagaggtcatctcgctcggagcttcgctcggaagggtctttgttccctgcagccctcccacggcagagtctccagagatttgggccgctacaaaaagtgcattttgcccattcggctgtggatagagaagcaggaagagcactggacttggagtcagggaatgacaatggataaaagtgagctggtacagaaagccaaactcgctgagcaggctgagcgctatgatgatatggctgcagccatgaaggcagtcacagaacaggggcatgaactctccaacgaagagagaaatctgctctctgttgcctacaagaatgtggtaggcgcccgccgctcttcctggcgtgtcatctccagcattgagcagaaaacagagaggaatgagaagaagcagcagatgggcaaagagtaccgtgagaagatagaggcagaactgcaggacatctgcaatgatgttctggagctgttggacaaatatcttattcccaatgctacacaaccagaaagtaaggtgttctacttgaaaatgaaaggagattattttaggtatctttctgaagtggcatctggagacaacaaacaaaccactgtgtcgaactcccagcaggcttaccaggaagcatttgaaattagtaagaaagaaatgcagcctacacacccaattcgtcttggtctggcactaaatttctcagtcttttactatgagattctaaactctcctgaaaaggcctgtagcctggcaaaaacggcatttgatgaagcaattgctgaattggatacgctgaatgaagagtcttataaagacagcactctgatcatgcagttacttagggacaatctcactctgtggacatcggaaaaccagggagacgaaggagacgctggggagggagagaactaatgtttctcgtgctttgtgatctgtccagtgtcactctgtaccctcaacatatatcccttgtgcgat

SEQ ID NO: 4801 - DNA, 657 bp, Homo sapiens
cgttcctcctggacaattgccttggcacatctcagtggcccccaaggcgacgacgcaagcagctgttcaccctgcagacggtgaactccaatgggaccagcgaccgcacaacctcccctgaagaagtccatgcccagccgtacattgctatcgactgggagccagagatgaagaagcgttactatgacgaggtagaggctgagggctacgtgaagcatgactgcgtcgggtacgtgatgaagaaggctcccgtgcggctgcaggagtgcattgagctcttcaccactgtggagaccctggagaaggaaaacccctggtactgcccttcctgcaagcagcaccagctggcaaccaagaagctggacctgtggatgctgccggagattctcatcatccacctgaaacgcttttcctacaccaagttctcccgagagaagctggacaccctcgtggagtttcctatccgggacctggacttctctgagtttgtcatccagccacagaatgagtcgaatccggagctgtacaaatatgacctcatcgcggtttccaaccattatgggggcatgcgtgatggacactacacaacatttgcctgcaacaggacagcggccagtggcactactttgatgacaacagcgtctcccctgtcaatga

SEQ ID NO: 4802 - DNA, 223 bp, Homo sapiens; identical to SEQ ID NO: 773

SEQ ID NO: 4803 - DNA, 557 bp, Homo sapiens; identical to SEQ ID NO: 3569

SEQ ID NO: 4804 - DNA, 409 bp, Homo sapiens; identical to SEQ ID NO: 3571

SEQ ID NO: 4805 - DNA, 450 bp, Homo sapiens
gcagtggtgcctaaattagttgtacctccaaaggtttcagaacaggaactggaatcctgagaatcttgtgaaaatatcctcttatgcctcatcacaaatacaccaaatcatctctagtgataggacctggaaatctgtactttcttaaaaggttcttcaggtaaggtttgctgaggtttattacaaatgtacccttgatttgatgctaatgctgtatttagggctgaaggaagcacacactaaatatctgagtgcttttcagattccatctatgctgaaaaagaatctaggagaataaacgcatttcaattagcccttaacatcttgcttcagaactttagcccactaaagcccagtagggcataggagagaacactgcaccaggattcagatctggattctaatttttgttctgaaaaatagcaagtgacactggcatgccatttaacc

SEQ ID NO: 4806 - DNA, 350 bp, Homo sapiens
ctcttaatgaaatacagaaaaaccatctcagaaaaaggaaaatgggcaatcgtcatgctaaagcgagcagtcctcagggttttgatgtggatcgagatgccaaaaagctgaacaaagcctgcaaaggaatggggaccaatgaagcagccatcattgaaatcttatcgggcaggacatcagatgagaggcaacaaatcaagcaaaagtacaaggcaacgtacggcaaggagctggaggaagtactcaagagtgagctgagtggaaacttcgagaagacagcgttggcccttctggaccatcccagcgagtacgccgcccggcagctgcagaaggtatgaagggtctgggcc

SEQ ID NO: 4807 - DNA, 373 bp, Homo sapiens
aattcacttctatatcttgcctaggaactccaggcttgtcttggctccaaatggatcccaactgctcctgcaccacaggtggctcctgtgcctgcgccggctcctgcaagtgcaaagagtgcaaatgtacctcctgcaagaagtgctgctgctcttgctgccccgtgggctgtgccaagtgtgcccagggctgtgtctgcaaaggctcatcagagaagtgccgctgctgtgcctgatgttgggagagccctgctcccagacataaatagagcaaccagtactaacctggattttttttttaactaccctgaccggtttgctacattcttttttctattcaatatgtgaaaaacaataaaacacttttgacttg

SEQ ID NO: 4808 - DNA, 385 bp, Homo sapiens
ccgctgcgtgttttccttttgatcgggaactcctgcttctccttgcctcgaaatggaccccaactgctcctgctcgcctgttggctcctgtgcctgtgccggctcctgcaaatgcaaagagtgcaaatgcacctcctgcaagaagagctgctgctcctgctgccctgtgggctgtgccaagtgtgcccagggctgcatctgcaaagggacgtcagacaagtgcagctgctgtgcctgatgccaggacagctgtgctctcagatgtaaatagagcaacctatataaacctggatttttttttttttttttttggaaaaaccccaaccccgttggttaaattttttttttttaaaaatttggaaggggaaaaaattttttttaatct

SEQ ID NO: 4809 - DNA, 584 bp, Homo sapiens
  misc_feature 519: n = A,T,C or G
caccctctccctggtattagcagagcattttctgcctgtttggaaggtttgatgtcctgtttctcattgaagactatttacatgatcattaggacattgcaggagaagtctgagaggtaaaaatacagatattctgggagagtcgtggtccttcagttctgctgaaatcagcatagtgcccttgtcatgaggaagagtttctgttcagccaagagtggtggcacgcttgggtggtagttttggaagcagtcagttgtgctaggacttatttaatatgttgtgaagagaagagtgtcttcttgaaagccttatgtgtccatcagctactaaatgtagaacttaaataagttgctcacatctgttcttttagtgttttgtggtatttgaggttttggcaaaaattgggatttttttatcaggcagccagagcctgggaggtggtagggtgtctgaaatgctggccatgttcagagaggcaggagaagggggttgctttcatttgaatattaaaagtgaatntttgtaaactctggtttttacctttttttcatccccacgttgagttggaggaatagtctcttctc

SEQ ID NO: 4810 - DNA, 260 bp, Homo sapiens
  misc_feature 92: n = A,T,C or G
cttttggaaaatgttaaaggttttgaagtatcttctacaagagacctcttgatacaaacaatagaaaattgtggctttcagtaccaagagtntctattatctccaacctctcttggcattccaaattcaaggctacgatattttcttattgcaaagcttcagtcagagccattaccctttcaagcccctggtcaggtactgatggagttccccaaaattgaatctgtacatccacaaaaatatgcaatggatgtagaaaa

SEQ ID NO: 4811 - DNA, 595 bp, Homo sapiens; identical to SEQ ID NO: 3574

SEQ ID NO: 4812 - DNA, 360 bp, Homo sapiens
ctcacaaagcgaaagccgatcatgatcatcacagaatttatggagaatggagccctggatgccttcctgagggagcgggaggaccagctggtccctgggcagctagtggccatgctgcagggcatagcatctggcatgaactacctcagtaatcacaattatgtccaccgggacctggctgccagaaacatcttggtgaatcaaaacctgtgctgcaaggtgtctgactttggcctgactcgcctcctggatgactttgatggcacatacgaaacccagggaggaaagatccctatccgttggacagcccctgaagccattgcccatcggatcttcaccacagccagcgatgtgtggagc

SEQ ID NO: 4813 - DNA, 204 bp, Homo sapiens; identical to SEQ ID NO: 3575

SEQ ID NO: 4814 - DNA, 283 bp, Homo sapiens; identical to SEQ ID NO: 780
  misc_feature 11, 35, 42, 49, 60, 61, 62, 64, 78, 84, 93, 94, 100, 125,137, 142, 143, 167, 207, 210, 217, 257, 265, 269: n = A,T,C or G

SEQ ID NO: 4815 - DNA, 51 bp, Homo sapiens
ctgccacattgagatgatccttacggaaaaggaacagattgttcctaaacc

SEQ ID NO: 4816 - DNA, 563 bp, Homo sapiens; identical to SEQ ID NO: 781

SEQ ID NO: 4817 - DNA, 411 bp, Homo sapiens
ttcggctcgagcttgcggcttgctcatatggaaccagtagtggcagcccatgttggggataattacctctgcgattaccaggggcctcgggctgtgggcatgcacagcttcctggtggttggcccacaggcactggaccccgtggtcagggattctgtacctaaagaacacatcctcccctctctggcccatctcctgcctgcccttgactgcctagagggctcaactccagggctttgaggccagtgagggaagtggctgggccctaggccatggagaaaaccttaaacaaaccctggagacagggagccccttctttctccacagctctggacctttccccctctccctgcggcctttgtcacctactgtgataataaagcagtgagtgctgagctctcacccttcccc

SEQ ID NO: 4818 - DNA, 489 bp, Homo sapiens; identical to SEQ ID NO: 3738

SEQ ID NO: 4819 - DNA, 312 bp, Homo sapiens
gctttctggtctcggccgcagaagcgagatgacgaagggaacgtcatcgtttggaaagcgtcgcaataagacgcacacgttgtgccgccgctgtggctctaaggcctaccaccttcagaagtcgacctgtggcaaatgtggctaccctgccaagcgcaagagaaagtataactggagtgccaaggctaaaagacgaaataccaccggaactggtcgaatgaggcacctaaaaattgtataccgcagattcaggcatggattccgtgaaggaacaacacctaaacccaagagggcagctgttgcagcatccag

SEQ ID NO: 4820 - DNA, 420 bp, Homo sapiens; identical to SEQ ID NO: 3739

SEQ ID NO: 4821 - DNA, 351 bp, Homo sapiens
cctgagacctgtcaacacccttgagagtgagcctggaagtggaccttctgctcttgaaccttgaggtgactatagagctggctgacacctttactgctgtccctgagctggggggcccagctgatctactcccacagtcccccctactaaaacagtgatataatctaatgctcatgtggttcaagctggtaactttctggaatgcattcactgataaaaattagaatatcaaactataaaccgtttacttagtcaacttttgggggaactaatatggccataaatatcaaacctcctacaatttagcacattctttgactttgaacacctacatctataaacttctcttac

SEQ ID NO: 4822 - DNA, 476 bp, Homo sapiens
agaagggattaatcccctggcccaacccgtcatctactctaccatctttgcaggcacactcatcacagcgctaagctcgcactgattttttacctgagtaggcctagaaataaacatgctagcttttattccagttctaaccaaaaaaataaaccctcgttccacagaagctgccatcaagtatttactcacgcaagcaaccgcatccataatccttctaatagctatcctcttcaacaatatactctccggacaatgaaccataaccaatactaccaatcaatactcatcattaataatcataatggctatagcaataaaactaggaatagccccctttcacttgtgagtcccagaggttacccaaggcacccctctgacatccgggctgcttcttctcacatgacaaacactagcccccatctcaatcatataccaaatctctccctcactaaacgtaagccttctcctcactc

SEQ ID NO: 4823 - DNA, 143 bp, Homo sapiens
gagaagacgacagaagggaagggacccacaggaagttacagtggtgcccacggatgtgtcagcctccagccacggggacgcgggattcaagaatgaagttgatacaggctcagtcaagaccttaaataaaaatttgtacaaag

SEQ ID NO: 4824 - DNA, 212 bp, Homo sapiens
gagaagacgacagaagggtgtaagcacagagaggggaaaataattgttcactgttctggggtggaaagggactgaagatacaatcaagaaaaatgtgcacaaaactcatcaggaaacattggctaactgtattttctgataccgtggagttgtatttcccatgggaagtatttgaggatctactgagtcactgaagctggaactggccgcac

SEQ ID NO: 4825 - DNA, 343 bp, Homo sapiens
gtctcttttccggttagcgcggcgtgagaagccatgagcagcaaagtctctcgcgacaccctgtacgaggcggtgcgggaagtcctgcacgggaaccagcgcaagcgccgcaagttcctggagacggtggagttgcagatcagcttgaagaactatgatccccagaaggacaagcgcttctcgggcaccgtcaggcttaagtccactccccgccctaagttctctgtgtgtgtcctgggggaccagcagcactgtgacgaggctaaggccgtggatatcccccacatggacatcgaggcgctgaaaaaactcaacaagaataaaaaactgggcaagaagctgg

SEQ ID NO: 4826 - DNA, 451 bp, Homo sapiens
agccagcctgacattacacagaataccctttgtaatacattggaaatttttactcatgcctttttgtttaggataaataggtaagcacaaagagctcttcaaaatcagaaaaaacaataggagtccttccttgtcttttctgtgatctctgtccttgtttctgagactttctctaccattaagctctattttagctttcagttattctagtttgtttcccatggaatctgtcctaaactggtgtttttgtcagtgacagtcttgccagtcagcaatttctaacagcattttaaatgagtttgatgtacagtaaatattgatgacaatgacagcttttaactcttcaagtcacctaaagctattatgcaggaggatttataagtcacattcataaaacccaagggctatgggtgtattattcatgatagctggcccacaggtcatgaattga

SEQ ID NO: 4827 - DNA, 333 bp, Homo sapiens; identical to SEQ ID NO: 3746

SEQ ID NO: 4828 - DNA, 467 bp, Homo sapiens; identical to SEQ ID NO: 3747

SEQ ID NO: 4829 - DNA, 491 bp, Homo sapiens; identical to SEQ ID NO: 3754

SEQ ID NO: 4830 - DNA, 493 bp, Homo sapiens
cagtttcaaatctccccaagctgcctaaattgaaaaagcttgaactcagtgaaaatagaatctttggaggtctggacatgttagctgaaaaacttccaaatctcacacatctaaacttaagtggaaataaactgaaagatatcagcaccttggaacctttgaaaaagttagaatgtctgaaaagcctggacctctttaactgtgaggttaccaacctgaatgactaccgagagagtgtcttcaagctcctgccccagcttacctacttggatggctatgaccgagaggaccaggaagcacctgactcacatgccgaggtggatggtgtggatgaagaggaggaggacgaataaggagaagatgaggaagacgaggacgatgaggatggtgaagaacaggagtttgatgaagaagatgatgaagatgaagatgtagaaggggatgaggacgacgatgaagtcagtgaggaggaagaagaatttggacttgatga

SEQ ID NO: 4831 - DNA, 497 bp, Homo sapiens; identical to SEQ ID NO: 3756

SEQ ID NO: 4832 - DNA, 523 bp, Homo sapiens; identical to SEQ ID NO: 959

SEQ ID NO: 4833 - DNA, 343 bp, Homo sapiens; identical to SEQ ID NO: 2517

SEQ ID NO: 4834 - DNA, 243 bp, Homo sapiens
  misc_feature 243: n = A,T,C or G
gaattgcgaagaacctgctctccgcgcctctcggtgctccaaatggacatcacgaagccagtgcagataaaagatgcttacagcaaggttgcagcaatgctgcaggacagaggactgtgggctgtgatcaacaatgctggggtgcttggctttccaactgatggggagcttcttcttatgactgactacaaacaatgcatggccgtgaacttctttggaactgtggaggtcacaaagacgttn

SEQ ID NO: 4835 - DNA, 380 bp, Homo sapiens
  misc_feature 380: n = A,T,C or G
catgtctggctaattctttggatttgtcgtagagatggagtttcaccatgttggtcaggctggtctcaaactactgactatgggagatccacccgcctcaacctcccaaagtgctagagctgaacaagaatccaagcctgcaactgcagagaccagagatctttctgctgtctatactcttggaaagcacatcctaagatctttgcagattatcctgtggaaggaaaatgcctaaagtcaaaagaagccggaaagcacccccagatggctgggagttgattgagccaacactggatgaattagatcaaaagatgagagaagctgaaacagaaccgcatgagggaaagaggaaagtggaatctctgtggcccatctttagn

SEQ ID NO: 4836 - DNA, 401 bp, Homo sapiens; identical to SEQ ID NO: 3765

SEQ ID NO: 4837 - DNA, 322 bp, Homo sapiens
ggctttcccaagcctggaagaactcgtcatgctctttgtagcgtggtgcttctgttgctcacaggacaacttgcctttgatgattttcaagagagttgtgctatgatgtggcaaaagtatgcaggaagcaggcggtcaatgcctctgggagcaaggatccttttccacggtgtgttctatgccgggggctttgccattgtgtattacctcattcaaaagtttcattccagggctttatattacaagttggcagtggagcagctgcagagccatcccgaggcacaggaagctctgggccctcctctcaacatccattatctca

SEQ ID NO: 4838 - DNA, 370 bp, Homo sapiens
gaaaagatcaaaggctggtccctagcgaagaaagcgctttaatgtgctcctcccgctcccgggtgcgagattcctgcccagctactaggccacgactggctggtacaggacgagaacgtgcgcggggtgatcaccatgaacgaggagtacgagacgaggttcctgtgcaactcttcacaggagtggaagagactaggagtcgagcagctgcggctcagcacagtagacatgactgggatcccaccttggacaacctccagaagggagtccaatttgctctcaagtaccagtcgctgggccagtgtgtttacgtgcattgtaaggctgggcgctccaggagtgccactatggtggcagcatacctgattca

SEQ ID NO: 4839 - DNA, 353 bp, Homo sapiens
gagtcagtctcagtcaggacacagcatggacatgggggtccccgctcagctcctggggctcctgctactctggctccgaggttccagatgtgacatccagatgacccagtctccctcctccctgtctgcatctgtgggagacagagtcatcatgacttgccggacaagtcactatataagcagttatttaaattggtatcagcagataccagggacagcccctaagctcctgatctatgctgcatccagtttgcaaagtggggtcccatcaaggttcagtggcagtggatctgggacaaatttcactctcaccatcagcagtctgcaacctgaagattttgcaacttattact

SEQ ID NO: 4840 - DNA, 462 bp, Homo sapiens; identical to SEQ ID NO: 3769

SEQ ID NO: 4841 - DNA, 456 bp, Homo sapiens; identical to SEQ ID NO: 3770

SEQ ID NO: 4842 - DNA, 328 bp, Homo sapiens
  misc_feature 290, 292, 293, 294, 295, 296, 297, 298, 299, 300, 307, 319: n = A,T,C or G
ccgcatcctatggctctactttgagacgggtacctgggtgtatcctgtgtttgccaaactcagcctcttgggtctagcagctttcttctctctcagctacgtcttcatcgccagcatctacctacttggagagaagctcaaccactggaaatggggtgacatgaggcagccacggaagaagaggaagtaattgcacaccattttccaagaaccaagaaagaagaaaacacaagagatttttctcatcttttttttttttttttcggggggggggggggggggggggaacntnnnnnnnnnggagggncggggggggganccttacctt

SEQ ID NO: 4843 - DNA, 375 bp, Homo sapiens; identical to SEQ ID NO: 3772

SEQ ID NO: 4844 - DNA, 409 bp, Homo sapiens
agaccattttcttttcttgggagccagtggatttttccagcagtgaagggacattctctacactcagatgactctaccagtggccttttaaccaagaagtagtacttgattggtcatttgaaaacactgcaacagtgaacttttgcatctcaagaaaacattgaaaaattctatgaattgttgtagccggtgaattgagtcgtattctgtcacataatattttgaagaaaacttggctgtcgaaacatttttctctctgactgctgcttgaatgttcttggaggctgtttcttatgtatgggttttttttaatgtgatcccttcatttgaatattaatggctttttccattaaagaataaaatattttggacaatgccgataaatgtatgaagttagtatccacatcat

SEQ ID NO: 4845 - DNA, 335 bp, Homo sapiens
ggagtgttcgggacgccggcctgcaggcgccatggtcttcctcaccgcgcagctctggctgcggaatcgcgtcaccgaccgctactttcggatccaggaggtgctgaagcacgccaggcacttccggggaaggaaaaatcgctgctacaggttggcggtcagaaccgtgattcgagcctttgtgaaatgcaccaaagcccgatacctgaagaaaaagaacatgaggaccctctggattaatcgaattacagctgctagccaggaacatggactgaagtatccagcgctcattgggaatttaggtaagtgccaggtggagctcaacaggaaagtct

SEQ ID NO: 4846 - DNA, 382 bp, Homo sapiens; identical to SEQ ID NO: 3775

SEQ ID NO: 4847 - DNA, 336 bp, Homo sapiens; identical to SEQ ID NO: 961

SEQ ID NO: 4848 - DNA, 374 bp, Homo sapiens; identical to SEQ ID NO: 3777

SEQ ID NO: 4849 - DNA, 463 bp, Homo sapiens; identical to SEQ ID NO: 3778

SEQ ID NO: 4850 - DNA, 187 bp, Homo sapiens
acagaagggggctgtgacaggtggggaagaggccaaattaaagaagcggaagcctcgggtaaagaaggaaaacaaagtgcccaggctgaaagaggagcatggaattgagctttcatctcctaggcattcagataatccatcagaagagggagaagtgaaagatgatggcttggaaaaaagtccaatg

SEQ ID NO: 4851 - DNA, 520 bp, Homo sapiens; identical to SEQ ID NO: 3779

SEQ ID NO: 4852 - DNA, 462 bp, Homo sapiens
agggggctggcctccggggcaccgaccgctataaggccagtcggactgcgacagcccatcccctcgaccgctcgcgtcgcatttggccgcctccctaccgctccaagcccagccctcagccatggcatgccccctggatcaggccattggcctcctcgtggccatcttccacaagtactccggcagggagggtgacaagcacaccctgagcaagaaggagctgaaggagctgatccagaaggagctcaccattggctcgaagctgcaggatgctgaaattgcaaggctgatggaagacttggaccggaacaaggaccaggaggtgaacttccaggagtatgtcaccttcctgggggccttggctttgatctacaatgaagccctcaagggctgaaaataaatagggaagatggagacaccctctgggggtcctctctgagtcaaatccagtggtgggtaatt

SEQ ID NO: 4853 - DNA, 480 bp, Homo sapiens
ttcatgaatctgtgacgtcagcaagcctttgggctcctttgcggtgggctggaggattgtgtgggtggaatccccctcccctttatttttccaattctgcaaggcttttaaaattcaccttacatcttttcaaagcaagaaaatggaacagcatgtgtaggaattcttcgttgttgttttggagccctctcttaagtcagaactctgtcccaaaaatcttctgagtgtcatctcaggactttggttatactcatggcacgatggccaactttcaggagcacctgagctgctcctcttctccacacttacccttcagtgaaagcaaaaccttcaatggactacaagatgagctcacagctatggggaaccacccttctcccaagctgctcgaggaccagcaggaaaaggggatggtacgaacagagctaatcgagagcgtgcacagccccgtcaccacaacagtgttgacgagcgtaagtg

SEQ ID NO: 4854 - DNA, 570 bp, Homo sapiens; identical to SEQ ID NO: 3783

SEQ ID NO: 4855 - DNA, 558 bp, Homo sapiens
agaattgctaaccagtttaatatttaatacttgaaaatgctatttctgttaagaacccacaatttcagctgcacttaacagcccaacctgtaaaaatgcagcctctataagaactttgataccacagcaatttcatcgcctaatacattccacagaagcgctatgcatttagctgaattcaaaacaaagcttattactgcttttcattatgtcttttagtaagatttgatattttatatttatacatacattacttttatttaaaaaattaatttttaaaaaaagcaggaaactgataaatgtataagaatgttctttacctccacagggaaatatgtttaaatccattttcttgaaacatggcccttttggtatagcttttgttctctcccttttgatttaaaaaaaaataggcataagaaatattttacttttctcttttgggttctactgtacctgcatccaagtgtgttccattcctgtccctaatgctgtgaagtttgggcactttctcccgtgcttttgcaaaattgtgattgttgatgatcagacagtatc

SEQ ID NO: 4856 - DNA, 623 bp, Homo sapiens; identical to SEQ ID NO: 3784

SEQ ID NO: 4857 - DNA, 592 bp, Homo sapiens; identical to SEQ ID NO: 3785

SEQ ID NO: 4858 - DNA, 588 bp, Homo sapiens
acatcaagcctgccaacgtgttcatcacagccacgggcgtcgtgaagctcggtgaccttggtctgggccgcttcttcagctctgagaccaccgcagcccactccctagtgggacgccctactacatgtcaccggagaggatccatgagaacggctacaacttcaagtccgacatctggtccttgggctgtctgctgtacgagatggcagccctccagagccccttctatggagataagatgaatctcttctccctgtgccagaagatcgagcagtgtgactaccccccactccccggggagcactactccgagaagttacgagaactggtcagcatgtgcatctgccctgacccccaccagagacctgacatcggatacgtgcaccaggtggccaagcagatgcacatctggatgtccagcacctgagcgtggatgcaccgtgccttatcaaagccagcaccactttgccttacttgagtcgtcttctcttcgagtggccacctggtagcctagaacagctaagaccacagggttcagcaggttccccaaaaggctgcccagccttacagcagatgctgaaggcagag

SEQ ID NO: 4859 - DNA, 506 bp, Homo sapiens
gggactctattgccaagacaagagatgctggctgtaggcatacatggacctgaaagaatagacccaagcgcatcacgacaaggatatgatgtccgctctgatgtctggagtttggggatcacattgtatgagttggccacaggcgagtttccttatccaaagtggaatagtgtatttgatcaactaacacaagtcgtgaaaggagatcctccgcagctgagtaattctgaggaaagggaattctccccgagtttcatcaactttgtcaacttgtgccttacgaaggatgaatccaaaaggccaaagtataaagagcttctgaaacatccctttattttgatgtatgaagaacgtgccgttgaggtcgcatgcaatgtttgtaaaatcctggatcaaatgccagctactcccagctctcccatgtatgtcgattgatatcgctgctacatcagactctagaaaaaagggctgagaggaagcaagacgtaaagaattttcatcccgta

SEQ ID NO: 4860 - DNA, 86 bp, Homo sapiens; identical to SEQ ID NO: 3788

SEQ ID NO: 4861 - DNA, 331 bp, Homo sapiens
ggtactcgtcttggtgagagcgtgagctgctgagatttgggagtctgcgctaggcccgcttggagttctgagccgatggaagagttcactcatgtttgcacccgcggtgatgcgtgcttttcgcaagaacaagactctcggctatggagtccccatgttgttgctgattgttggaggttcttttggtcttcgtgagttttctcaaatccgatatgatgctgtgaagagtaaaatggatcctgagcttgaaaaaaaactgaaagagaataaaatatctttagagtcggaatatgagaaaatcaaagactccaagtttgatgactggaagaat

SEQ ID NO: 4862 - DNA, 474 bp, Homo sapiens; identical to SEQ ID NO: 3790

SEQ ID NO: 4863 - DNA, 273 bp, Homo sapiens; identical to SEQ ID NO: 2930

SEQ ID NO: 4864 - DNA, 411 bp, Homo sapiens
aggcaagtggggcatgagccggaagatctggcgaagcttaggcaaaaacaccaccaatcacgtggaagttaattttataaaaaaatttacgtcagaaagagattttcacccatccatcagctgctccatcacctggttcttgtcctggagtccctgctgggaatgctcccaggctattagagagtttctgagtcggcaccctggtgtgactctagtgatctacgtagctcggcttttttggcacatggatcaacaaaatcggcaaggtctcagggaccttgttaacagtggagtaactattcagattatgagagcatcagagtattatcactgctggaggaattttgtcaactacccacctggggatgaagctcactggccacaatacccacctctgtggatgatgttgta

SEQ ID NO: 4865 - DNA, 409 bp, Homo sapiens
atgtcagaagaaagtgccaacatgattgcatcagcccttgcccagatcccacaaaaggttctatggagatttgatggcaagaagccaaatactttaggttccaatactcgactgtataagtggttaccccagaatgaccttcttggtcatcccaaaaccaaagcttttataactcatggtggaaccaatggcatctatgaggcgatctaccatgggatccctatggtgggcattcccttgtttgcggatcaacatgataacattgctcacatgaaagccaagggagcagccctcagtgtggacatcaggaccatgtcaagtagagatttgctcaatgcattgaagtcagtcattaatgaccctatctataaagagaatatcatgaaattatcaagaattcatcatgatc

SEQ ID NO: 4866 - DNA, 153 bp, Homo sapiens
cgagaagacgacagaagggctaagcggcggatgcagtacaaccggcgctttgtcaacgttgtgcccacctttggcaagaagaagggccccaatgccaactcttaagtcttttgtaattctggctttctctaataaaaaagccacttagttcag

SEQ ID NO: 4867 - DNA, 142 bp, Homo sapiens
gaactgacaattaacagcccaatatctacaatcaaccaacaagtcattattaccctcactgtcaacccaacacaggcatgctcataaggaaaggttaaaaaaagtaaaaggaactcggcaaatcttaccccgcctggttacc

SEQ ID NO: 4868 - DNA, 235 bp, Homo sapiens
gagaagacgacagaaggggtggagaatgtgtatttactcactgtgaaaacagcaaagcctcattaactagaaactagccccgggagagggcttgatttgtttaaaaagtccccatgatgcccagagctgtgcaaacatttttaagtgggagaggaggaccactaacatttactgagaggtcactctgggccagccactgttctaactgctttacatgtattatttaactttagtt

SEQ ID NO: 4869 - DNA, 157 bp, Homo sapiens
gagaagacgacagaagggcagtgtatggaggaatggtaagtactttacagctgttgtacagggcagcatgtcctgaaaggggctgcaagaaatgctgattccaagggatgtgtgccagttctctgggggaggaagaaaggctctgtagcagaaagac

SEQ ID NO: 4870 - DNA, 148 bp, Homo sapiens
taagcctgcgtcagattaaaacactgaactgacaattaacagcccaatatctacaatcaaccaacaagtcattattaccctcactgtcaacccaacacaggcatgctcaaaaaaaaaaaaaaaaaaaaacttttggggggcctttttt

SEQ ID NO: 4871 - DNA, 382 bp, Homo sapiens
ggggagtgcaatagcataatctcggctcaccgcaacctccacctcccgggttcaagcgattctcctgcctcagccacctgagtagctgggattacaggagctgccaccacccctcagctaatttttgtatttttagtagacagggtttcaccatgttggccaggctggtctcaaactcctgacctgaggggatctgcctgcctcaacctcccaaagtgctgggattacaggagtgagccaccgtgcccagcctcctccacttctttccttcctttctctctttctctctttctctctctctttctctctttctccttccttccttccttcctctttctgagacagagtacagtggcgcagtcatgtctcactgcaatcttga

SEQ ID NO: 4872 - DNA, 222 bp, Homo sapiens; identical to SEQ ID NO: 3798

SEQ ID NO: 4873 - DNA, 442 bp, Homo sapiens; identical to SEQ ID NO: 968

SEQ ID NO: 4874 - DNA, 516 bp, Homo sapiens
agcgccacaaagaatgacataggaccctatgaatgtgaaatacagaacccagtgggtgccagccgcagtgacccagtcaccctgaatgtccgctatgagtcagtacaagcaagttcacctgacctctcagctgggaccgctgtcagcatcatgattggagtactggctgggatggctctgatatagcagccttggtgtagtttctgcatttcgggaagagtgactggactggattcttctagctccttcaatcccattttctcctgtggcatcactaagtataagacctgctctcttcctgaagacctataagctggaggtggacaactcaatgtaaatttcaaggaaaaaccctcatgcctgagatgtgggccactcagagctaaccaaaatgttcaacaccataactagagacactcaaattgccaaccaggacaagaagttgatgacttcatgctgtggacagtttttcccaagatgtcccaagcctcatcgtgacgaggatcttatcccact

SEQ ID NO: 4875 - DNA, 295 bp, Homo sapiens
aagaagggtgctgccatcccagccaagggggcaaagaatggcaagaatgccaggaaggaagacagtgatgaagaggaggatgatgacagtgaagaggatgaggaggatgacgaggacgaggatgaggatgaagatgaaattgaaccagcagcgatgaaagcagcagctgctgcccctgcctcagaggatgaggactatgaggatgacgaagatgatgaggatgacgatgactatgaggaagatgactctgaagaagaagctatggagactacaccagccaaaggaaagaaagctg

SEQ ID NO: 4876 - DNA, 405 bp, Homo sapiens; identical to SEQ ID NO: 970

SEQ ID NO: 4877 - DNA, 524 bp, Homo sapiens; identical to SEQ ID NO: 3805

SEQ ID NO: 4878 - DNA, 338 bp, Homo sapiens
ggacaactcaatgaaaatttaaagggaaaaccctcaggcctgaggtgtgtgccactcagagacttcacctaactagagacagtcaaactgcaaaccatggtgagaaattgacgacttcacactatggacagcttttcccaagatgtcaaaacaagactcctcatcatgataaggctcttacccccttttaatttgtccttgcttatgcctgcctctttcgcttggcaggatgatgctgtcattagtatttcacaagaagtagcttcagagggtaacttaacagagtgtcagatctatcttgtcaatcccaacgttttacataaaataagagatccttg

SEQ ID NO: 4879 - DNA, 327 bp, Homo sapiens
gagagcttccgggctgcgctcttcgttgcccagtttccgctcagtggtcgcgtctccgccccccacccaccagtcccgctgcattctcggccgggctctaggcgccatggctccccgcgggaggaagcgtaaggctgaggccgcggtggtcgccgtagccgagaagcgagagaagctggcgaacggcggggagggaatggaggaggcgaccgttgttatcgagcattgcactagctgacgcgtctatgggcgcaacgccgcggccctgagccaggcgctgcgcctggaggccccagagcttccagtaaaggtgaacccgacgaagcc

SEQ ID NO: 4880 - DNA, 350 bp, Homo sapiens
atactcaattgatccaataacttgaccaacggaacaagttaccctagggataacagcgcactcctattctagagtccatatcaacaatagggtttacgacctcgatgttggatcacgacatcccgatggtgcagccgctattaaaggttcgtttgttcaacgattaaagtcctacgtgatctgagttcagaccggagtaatccaggtcggtttctatctacttcaaattcctccctgtacgaaaggacaagagatataaggcctacttcacaaagcgccttccgccgtaaatgatatcatctcaacttagtattatacccacacccacccaagaacagggtttgttgcaa

SEQ ID NO: 4881 - DNA, 79 bp, Homo sapiens; identical to SEQ ID NO: 3808

SEQ ID NO: 4882 - DNA, 509 bp, Homo sapiens; identical to SEQ ID NO: 3809

SEQ ID NO: 4883 - DNA, 424 bp, Homo sapiens
agacgacacaagggggactttcccgatcgccaggcacgagtttctctcggtgactactatcgctgtcatgtctggtcgtggcaagcaaggaggcaaggcccgcgccaaggccaagtcgcgctcgtcccgcgctggccttcagttcccggtagggcgagtgcatcgcttgctgcgcaaaggctactacgctgagcgagtgggggccggcgcgcccgtctacatggctgcggtcctcgagtatctgaccgctgagatcctgtagctggcgggcaacgctgctcgtgacaacaagaagacgctcatcatccctcgtcacctccagctggccatccgcaacgacgaggaactgaacaagctgctgggcaaagtcaccatcgcccagggcggcgtcttgcctaacatccaggccgtactgctccctaag

SEQ ID NO: 4884 - DNA, 358 bp, Homo sapiens
accatttgaagagtcacctagatcttcccttatggaagttcttacataaaaagaatcacctcattgaggagataaactgatgaaatgaggcgttgtcactgtgagctcacgtggtcccaactcaatgataaagttaccatcagaccatcagccaccttagtcaataaaggaagaccgagaatcactacctggcatgcagatacttccacaacactctctagcatcaggtctaaatattaagtcaacccaattaaagtggatccaacaatgtgcgacaccatataaaatgatgtgaaagatgacaggatcttgattgagtttgatacacttaaggagatggtaatcttaccagggaaat

SEQ ID NO: 4885 - DNA, 466 bp, Homo sapiens; identical to SEQ ID NO: 3811

SEQ ID NO: 4886 - DNA, 342 bp, Homo sapiens
cacagcagaagttttcaagaagcatggagtgtacaaccccaacaaaatcttcggcgtgacgaccctggacatcgtcagagccaacacctttgttgcagagctgaagggtttggatccagctcgagtcaacgtccctgtcattggtggccatgctgggaagaccatcatccccctgatctctcagtgcacccccaaggtggactttccccaggaccagctgacagcactcactgggcggatccaggaggccggcacggaggtggtcaaggctaaagccggagcaggctctgccaccctctccatggcgtatgccggcgcccgctttgtcttctcccttgtgga

SEQ ID NO: 4887 - DNA, 463 bp, Homo sapiens; identical to SEQ ID NO: 3814

SEQ ID NO: 4888 - DNA, 541 bp, Homo sapiens
gagggacccgcagctcagctacagcacagatcagcaccatgaagcttctcacgggcctggttttctgctccttggtcctgagtgtcagcagccgaagcttcttttcgttccttggcgaggcttttgatggggctcgggacatgtggagagcctactctgacatgagagaagccaattacatcggctcagacaaatacttccatgctcgggggaactatgatgctgccaaaaggggacctgggggtgcctgggccgcagaagtgatcggcaatgccagagagaatatccagagactcacaggccatggtgcggaggactcgctggccgatcaggctgccaataaatggggcaggagtggcagagaccccaatcacttccgacctgctggcctgcctgagaatactgagcttcctcttcactctgctctcaggagacctggctatgaggccctcggggcagggatacaaagttagtgaggtctatgtccagagaagctgagatatggcatataataggcatctaataaatgcttaagaggtgg

SEQ ID NO: 4889 - DNA, 300 bp, Homo sapiens
agatcatgaggtcaggagatcgagaccatcctggctaacacggtgaaatcccgtctctactaaaaatatttttaaaaaattagccgggcgtggtggcgggcgcctgtaatcccagctactcgggaggctgaggcaggagaatggcataaacccaggaggcggaggttgcagtgagccgagatcgcgccactgcgctccaacctgggcaatagagtaagactctgtctcaaaaaaaaaaataagttttttatgaaaaaattttttggtttgggccagtcgcgggggctcacacctgtaatg

SEQ ID NO: 4890 - DNA, 371 bp, Homo sapiens
atctttgaatcgctgtactacaggaagatgtacggagacatggcatgaagccagagagtgagagacattaactcattagactggaacttgaactgattcacatctcatttttccgtaaaaatgatttcagtagcacaagttatttaaatctgtttttctaactgggggaaaagattcccacccaattcaaaacattgtgccatgtcaaacaaatagtctatcaaccccagacactggtttgaagaatgttaagacttgacagtggaactacattagtacacagcaccagaatgtatattaaggtgtggctttaggagcagtgggagggtaccagcagaaagggtagtatcatcagatagcatcttatacca

SEQ ID NO: 4891 - DNA, 120 bp, Homo sapiens
gaggagacactgtgcagatggatgcagaaactggaattttgcctccacaagttaagtaatactaatagctctcggaagctgaaaaaggcaaaaaaaaaaaaaaaaaaaaagtcgtatcga

SEQ ID NO: 4892 - DNA, 158 bp, Homo sapiens; identical to SEQ ID NO: 1646
  misc_feature 134: n = A,T,C or G

SEQ ID NO: 4893 - DNA, 434 bp, Homo sapiens; identical to SEQ ID NO: 978

SEQ ID NO: 4894 - DNA, 130 bp, Homo sapiens
gagggcgaggaagaggaggattaggggagtccccgggggactgctcaatacagatacggtggacgcaaaaaaaaaaaaaaaaaaaaaaaatttttttttttttccccctttttttttttttttttccccc

SEQ ID NO: 4895 - DNA, 500 bp, Homo sapiens; identical to SEQ ID NO: 3824

SEQ ID NO: 4896 - DNA, 597 bp, Homo sapiens
  misc_feature 512: n = A,T,C or G
tagggcgaattgggtaccgggccccccctcgaggcccgtcgaggttccactaacagtcttctcaaggccattccagcctttgcctgatgcccagtcccaaagacaataccatatgttttgggttgggttttttttgttttgttttgttttttaggcaagatctcattctgctgcccaagctagagtgcagtggtgtgatcatggctacctatagtctcaacctcctgggttcaagcaaacctcccatctcagcctcctcagtagctaggaacacagcatgcaccaccatgctggctgatgtttttagttttatagagatgggggtctcactgtgttgcctaggcaagtctcaaactcctgggctcaagcagtccactaaccttggcctcccaaagtgttgggattacaggcgtgagtcaccatgcccagcctccagctgttattgtattgcaatctatcactgtccttagcactaataatgtttggtttatagatctgcatgctggcagtgnttgggtacatatatatttacaattgctatatcctcttgctgagttgacccctttatcattatatagtgatgttgtctctttttat

SEQ ID NO: 4897 - DNA, 502 bp, Homo sapiens
attgggtaccgggccccccctcgagacgtaaattatggctgaatcatccgctaccttcacgccaatggcgcctcaatattctttatctgcctcttcctacacatcgggcgaggcctatattacggatcatttctctactcagaaaccggaaacatcggcattatcctcctgcttgcaactatagcaacagccttcataggctatgtcctcccgtgaggccaaatatcattctgaggagccacagtaattacaaacttactatccgccatcccatacattgggacagacctagttcaatgaatctgaggaggctactcagtagacagtcccaccctcacacgattctttacctttcacttcatcttgcccttcattattgcagccctagcagcactccacctcctattcttgcacgaaacgggatcaaacaaccccctaggaatcacctcccattccgataaaatcaccttccacccttactacacaatcaaagacgccctcg

SEQ ID NO: 4898 - DNA, 471 bp, Homo sapiens
gcgcccgccgccatgtcggtgctgggcgagtacgagcgacactgcgattccatcaactcggactttgggagcgagtccgggggttgcggggactcgagtccggggcctagcgcagtcaggggccgcgagccgggggacgcgggaaagcaggagggaactgcactacatccccatccgcgtcctgggccgcgcgccttcggggaagccacgctgtaccgccgcaccgaggatgactcactggttgtgtggaaggaagtcgatttgacccggctgtctgagaaggaacgtcgtgatgccttgaatgagatagttattctggcactgctgcagcacgacaacattattgcctactacaatcacttcatggacaataccacgctgctggttgagctgggatgttgggatggaggcgacgtgtgtggcgagatcttcggtcggagggacaagttgtttgagggagagatggtggtg

SEQ ID NO: 4899 - DNA, 1017 bp, Homo sapiens
attccattgtatagatacaacttagtttttcttcttatgaatgaggtggaggattttttcataccgaaagcccttatttttctgtggactgtcagatcatgtcctttgcctatttatgtgttgcactgttggcacttttcttaactcaaacctacaataaatgtgtaggttcactggaaaagaatcaggtctgagaggaaagactttgagcttgtcttgggcacaattatgtttgaagcgcttttgagtcatcttaagaggtaatgtgggccaggcatggtggctcacgcctgtaattccaacattctgggaggctgaggcagtaggatcacttgaggtgaggagttcgagaccagcctgagcaacacaataagaccagtctctacaaaaaattttaaaaattatgccgcggtggtgggttgtgcttgtagtctcagcttcttgagagactgagacaggaggatggtttgaacccaggagtttgaggtcacagtgtgtaatgatcatggccactgtactccagtctaggcacggaacaaaccctgtctcaaaagaattataaacacaaataaaaagattaacaaattaagctgggtggctgtgtagatacctgtaattcccgcctactcggtgggcgatgcaggaggatttgcttgagcccggggttggagtacagtactgggcaacatagaagacccattctctaaaattaaaagaagatttttaaaattggtaaacgccagcaggacttttcaggaaaaaaagagaattgccatggtctgttatcaggatttaaaggggggcgctcttccattccccagaattggaaagataaggaatgtttggggcaattattccaatacttttgtggtgttggtggaaatggccaatcacctgggccagcctgggtcacagcgagattggtagtgtcctctttccggataaaattgagatcccactgaaaagttcccttagagaagaccccgcggagggttgtctcgcaagatgtttcgctga

SEQ ID NO: 4900 - DNA, 621 bp, Homo sapiens
gcagagaaaggtttgttttattgcaattatttagagcgcgtcccaaggggccggggaggggggctttgaaggggggggtctctggtattaagtggaaacatgtgtggagctggagatctttttggaaaaaaagcaaaaacacaaattcctttcagtcagcaggccccagcagagcagcaaaggccctcgccccgcggctgccggcgcgtcgctcgctctctctctgtctctctctgtgtctctctctctctctctctgtctctgtctctgactctctctcacatctctgggtctctctccccctatcttgctgccacaggcccccagtacctggtgggcaggggcaggatgggggctcacggggctggggctgatttctgggcaatggcaggaccaccctccagtccactgaggctgggggagctcggggcaggctgagggccaaggtccgtgcgggaggggtcccagggtcccgagacaggcaggaaggggctcagaagttgctgaagatttcacgcttcctgttccagtccatctgtggcgcgcgcttgttgactcgcatggctcgagcttttccttgggctcggcggccgtggggctcaggtggaggccgctctcctg

SEQ ID NO: 4901 - DNA, 608 bp, Homo sapiens
attgggtaccgggccccccctcgcgcgggtgctagctagtcctttctcgtcgctgctcggctcgcggcccgtggggtcggccccgccaccgttgccgccatgcccatgaagggccgcttccccatccgccgcaccctgcaatatctgagccaggggaacgtggtgttcaaggactccgtgaaggtcatgacagtgaattacaacacgcatggggagctgggcgagggcgccaggaagtttgtgtttttcaacatacctcagattcaatacaaaaacccttgggtgcagatcatgatgtttaagaacatgacgccgtcacccttcctgcgattctacttagattctggggagcaggtcctggtggatgtggagaccaagagcaataaggagatcatggagcacatcagaaaaatcttggggaagaatgaggaaaccctcagggaagaggaggaggagaaaaagcagctttctcacccagccaacttcggccctcgaaagtactgcctgcgggagtgcatctgtgaagtggaagggcaggtgccctgccccagcctggtgccattacccaaggagatgaggggggaagtacaaagccgctctgaaagccg

SEQ ID NO: 4902 - DNA, 515 bp, Homo sapiens
acaaaaagcttcagcctttattaaacaaaggaggaggtagaaaacagataagggaacagttagggatcccttctttcccctatacatacacagacatacaaacacacgcacccgagtgaatgacagggaccatcaggcgacagattgaagggcagagggaggcagcaccctccgagagttggcccggacccaagggtgggctgagacctgggccaggggcagccgttccgaggggttatgcctgagcagtttggagatgaggtcctgggctcccgtgggcacagaagcggggaactttaggtccaccttgacgatgcggcgataggtctcgttgtgtgatgcactctcaaagggtgggttccccacagcagctcatagcaaagcactccaatgcaccacagatccaccttctcattgtgaatgcgcccctcaatcatctctgggggcaggtagtccagggtgccacacattgtcttcctcctcagggagggcgcatgcacagaccagccgaagtc

SEQ ID NO: 4903 - DNA, 519 bp, Homo sapiens
gacagaaggggtggtatcatcctaggtaagcttatttcagaacaagtctaatatttcagattctttcttttcgactttatactctgagttattacttactgtaagtggtgtatatgaaacctccatgcattttccagtatggatctgctaatatgcacagtaaatccatgtctttgtttgtttttctattaaaaagcaatcaagaaagataatgtgaaaaagaaaggaatttagaggtagggaaaagatgaatgtcagacatttgaagaactatagtaaaatgataaacactaaatatacttgagaaaactttcttaatatgccaatgaggtaggcctgatctttgaaatagtgaataggaatacaatgcatttcctcagtgatcactgattagaatgagttggtgggatccttgggaagccaaacggagcggagttctggatcatgtcccatccagtccagtgaatccacgacccgcagacctgtccccccgcaacagcttataccatggaatgagga

SEQ ID NO: 4904 - DNA, 230 bp, Homo sapiens
ttaagaggagcattttctggctgagagcagtggctcacgcctgtaatcccagcactttgggaggctgaggtgggtggatcacctgaggtcaggagttcaagaccagcctggccaacatggtgaaaccccatctctactaaaaatacaaaaatttcctgtaatcccagcactttggaaggctgaggtgggtggatcacctgaggtcaggagttcaagaccagcctggccaa

SEQ ID NO: 4905 - DNA, 357 bp, Homo sapiens
gggggagagacagaaattaacattataaggtctggcgtggtggctcatgcctgtaatcccagcacgttgggaggctgaggtaggtggatcacttgaggttgggagctaaagaccaccctggccaacatgatgaaaccccatctctactaaaaatgtaaaaatttgccgggcgtggtggcaggtgcctgtaatcccagctacttgggaggctgaggcaggaagatcacttgaacccaggaggcaaaggttgcagtgagctgagattgcaccgctgcactccagcctgggtgacaaagtgagactctgtcctccatctcaaaaaaaaagaaggaaaggaaaaaagaaggaacctacctt

SEQ ID NO: 4906 - DNA, 489 bp, Homo sapiens
gagtcgtacgtgggtttgccgccagccgcagtcttggaccataatcatggtggacatgatggacttgcccaggtcgcgcatcaacgccggcatgctagctcaattcatcgacaagcctgtctgcttcgtagggaggctggaaaagattcatcccaccggaaaaatgtttattctttcagatggagaaggaaaaaatggaaccatcgagttgatggaaccccttgatgaagaaatctctggaattgtggaagtggttggaagagtaaccgccaaggccaccatcttgtgtacatcttatgtccagtttaaagaagatagccatccttttgatcttggactttacaatgaagctgtgacaattatccatgacttccctcagttttatcctttagggattgtgcaacatgattgatcttgatggattttcatacgattgtaaatgagctatattaaagtctattaaaggaagcccttcttgtttgagggaga

SEQ ID NO: 4907 - DNA, 320 bp, Homo sapiens
  misc_feature 210: n = A,T,C or G
atatctgccatgaggaacataaattcatgtaaagccattttctcttaaacaaaacaaaactttctaagtacagtcattctctaggatttgggaagctccttgcacttggaacagggctcaggtgggtggagcagtaaggcactacccagagagcttgctgctgcggccctgtcctgcggcctcaaagttcttctttactatatataacgngcggtcatacctttcttcgttgtggtggggatggaagagcagagggagcatggcccaggggtgttgaggccagcggtgagagccgtgttagccaagacatggaactgtgt

SEQ ID NO: 4908 - DNA, 475 bp, Homo sapiens
ggttgcttggaggttggcggcgcggggctgaaggctagcaaaccgagcgatcatgtcgcacaaacaaatttactattcggacaaatacgacgacgaggagtttgagtatcgacatgtcatgctgcccaaggacatagccaagctggtccctaaaacccatctgatgtctgaatctgaatggaggaatcttggcgttcagcagagtcagggatgggtccattatatgatccatgaaccagaacctcacatcttgctgttccggcgcccactacccaagaaaccaaagaaatgaagctggcaagctacttttcagcctcaagctttacacagctgtccttacttcctaacatctttctgataacattattatgttgccttcttgtttctcactttgatatttaaaagatgttcaatacactgtttgaatgtgctggtaactgctttgcttcttgagtagagccaccaccaccatagc

SEQ ID NO: 4909 - DNA, 420 bp, Homo sapiens
gcagcagcagtagctatggcagtggcagaagattttaattaggaaacaaagtttagcaggagaggagagccagagaagtgacagggaagctacaggttacaacagatttgtgaactcagccaagcacagtggtggcagggcctagctgctacaaagaagacatgttttagacaaatactcatgtgtatgggcaaaaaactcgaggactgtatttgtgactaattgtataacaggttattttagtttctgttctgtggaaagtgtaaagcattccaacaaagggttttaatgtagatttttttttgcaccccatgctgttgattgctaaatgtaacagtctgatcgtgacgctgaataaatgtcttttttttaatgtgctgtgtaaagttagtctactcttaagccatcttggtaaatttc

SEQ ID NO: 4910 - DNA, 509 bp, Homo sapiens; identical to SEQ ID NO: 3833

SEQ ID NO: 4911 - DNA, 396 bp, Homo sapiens
gctctttccagccagcgccgagcgatgggcatctctcgggacaactggcacaagcgccgcaaaaccgggggcaagagaaagccctaccacaagaagcggaagtatgagttggggcgcccagctgccaacaccaagattggcccccgccgcatccacacagtccgtgtgcggggaggtaacaagaaataccgtgccctgaggttggacgtggggaatttctcctggggctcagagtgttgtactcgtaaaacaaggatcatcgatgttgtctacaatgcatctaataacgagctgggtcgtaccaagaccctggtgaagaattgcatcgtgctcatcgacagcacaccgtaccgacagtggtacgagtcccactatgcgctgcccctgggccgcaag

SEQ ID NO: 4912 - DNA, 375 bp, Homo sapiens
atataccaatgatggcgcgatgtaacacgagaaagcacataccaaggccaccacacaccacctgtgcaaaaaggccttcgatacgggataatgctatttattacctcagaagtttttttcttcgcaggatttttctgagccttttaccactccagcctagcccctaccccccaattaggagggcactggcccccaacaggcatcaccccgctaaatccgctagaagtcccactactaaacacatgcgtattactcgcatcaggagtatcaatcacctgagctcaccatagtctaatagaaaacaaccgaaaccaaataattcaagcactgcttattacaattttactgggtctctattttaccctcctacaagcc

SEQ ID NO: 4913 - DNA, 484 bp, Homo sapiens; identical to SEQ ID NO: 3840

SEQ ID NO: 4914 - DNA, 494 bp, Homo sapiens
ggtccgcgcgttgctgcgttgtgaggggtgtcagctcagtgcatcccaggcagctcttagtgtggagcagtgaactgtgtgtggttccttctacttggggatcatgcagagagcttcacgtctgaagagagagctgcacatgttagccacagagccacccccaggcatcacatgttggcaagataaagaccaaatggatgacctgcgagctcaaatattaggtggagccaacacaccttatgagaaaggtgtttttaagctagaagttatcattcctgagaggtacccatttgaacctcctcagatccgatttctcactccaatttatcatccaaacattgattctgctggaaggatttgtctggatgttctcaaattgccaccaaaaggtgcttggagaccatccctcaacatcgcaactgtgttgacctctattcagctgctcatgtcagaacccaaccctgatgacccgctcatggctgacatatcctcag

SEQ ID NO: 4915 - DNA, 442 bp, Homo sapiens
actattagaaaataaaatgttgctttttctttctcatatatttcccagtaacattttctgtcttaggatgatcatttttcatagtcttaggaagagcttgttaaataatggactgtctttatataaacacaactaggccgggcgtggtggctcatgcctataatcccagcactttgggaggtcgaggcaggtggatcacctgagggtcgggagtttgagaccagcctgaccaacatggagaaaccctgtctctactaaaaatacaaaattagccaggtgtggtggcacatgcctataatcccagctactccggaggctgaggcaggagaatcacttgaacccgaaaggcagaggttgtggtgagctgagagtgctctattgcactctagcctgggcaacaagagcgagactccatctcaaaaataaaaaataaaaacagctg

SEQ ID NO: 4916 - DNA, 418 bp, Homo sapiens
actattagaaaataaaatgttgctttttctttctcatatatttcccagtaacattttctgtcttaggatgatcatttttcatagtcttaggaagagcttgttaaataatggactgtctttatataaacacaactaggccgggcgtggtggctcatgcctataatcccagcactttgggaggtcgaggcaggtggatcacctgagggtcgggagtttgagaccagcctgaccaacatggagaaaccctgtctctactaaaaatacaaaattagccaggtgtggcggcacatgcctataatcccagctactcgggaggctgaggcaggagaatcacttgaacccgaaaggcagaggttgtggtgagctgagagtgctctattgcactctagcctgggcaacaagagcgagactccatctc

SEQ ID NO: 4917 - DNA, 139 bp, Homo sapiens
acctttagcaataaacgaaagtttaactaagctatactaaccccagggttggtcaatttcgtgccagccaccgcggtcacacgattaacccaagtcaatagaagccggcgtaaagagtgttttagatcaccccctcccc

SEQ ID NO: 4918 - DNA, 430 bp, Homo sapiens; identical to SEQ ID NO: 2507

SEQ ID NO: 4919 - DNA, 468 bp, Homo sapiens; identical to SEQ ID NO: 3843

SEQ ID NO: 4920 - DNA, 125 bp, Homo sapiens
ctgggctcttcaccactgtatttctctcatttacaaaccatcagctgcttttaaaataagatctctttgtagccatcctgttaaatttgtaaacaatctaattaaatggcatcagcactttaacc

SEQ ID NO: 4921 - DNA, 639 bp, Homo sapiens
ggctcaataccccaagcaatacctgcaactgaggattcttcccggggagaccgcagcccatcggcatggctcaagagtttgtgaactgcaaaatccagcctgggaaggtggttgtgttcatcaagcccacctgcccgtactgcaggagggcccaagagatcctcagtcaattgcccatcaaacaagggcttctggaatttgtcgatatcacagccaccaaccacactaacgagattcaagattatttgcaacagctcacgggagcaagaacggtgcctcgagtctttattggtaaagattgtataggcggatgcagtgatctagtctctttgcaacagagtggggaactgctgacgcggctaaagcagattggagctctgcagtaaccacagatctcataggaaatgttcaacaattctgtgaaaggtcacaggacccaattggagaaatcatatgaaaagcatagttggtcttggtgtcatatggatcagaggcacaagtgcagaggctgtggtcatgcggaacactctgttatttaagatggctatccagataatcctgaacactgtgtatttattttatttagactaccagcaaagattaaagcatgaaatgtaaaacatctgataaaacttacag

SEQ ID NO: 4922 - DNA, 416 bp, Homo sapiens; identical to SEQ ID NO: 3845

SEQ ID NO: 4923 - DNA, 501 bp, Homo sapiens
gcagcaatctgtcaatcaccttgttaaagagattgatatgctgctgaaagaatatttactctctggagacatatctgaagctgaacattgccttaaggaactggaagtacctcattttcaccatgagcttgtatatgaagctattataatggttttagagtcaactggagaaagtacatttaagatgattttggatttattaaagtccctttggaagtcttctaccattactgtagaccaaatgaaaagaggttatgagagaatttacaatgaaattccggacattaatctggatgtcccacattcatactctgtgctggagcggtttgtagaagaatgttttcaggctggaataatttccaaacaactcagagatctttgtccttcaaggggcagaaagcgttttgtaagcgaaggagatggaggtcgtcttaaaccagagagctactgaatataagaactcttgcagtcttagatgttataaaaatatatatctgaatt

SEQ ID NO: 4924 - DNA, 254 bp, Homo sapiens; identical to SEQ ID NO: 3848

SEQ ID NO: 4925 - DNA, 444 bp, Homo sapiens; identical to SEQ ID NO: 3849

SEQ ID NO: 4926 - DNA, 448 bp, Homo sapiens; identical to SEQ ID NO: 3851

SEQ ID NO: 4927 - DNA, 340 bp, Homo sapiens
  misc_feature 287: n = A,T,C or G
atccgattgttcttggcccaaacaataccaatctgcccaaaatatttagtataattgcggaaggagaaatgcacgaggcaattaaacatgaagatccttgtgccaaacgtctggccaatgtcgttcgccaagtacagacttctggaggactgtggactgagtgcatagcacagctcagtcctgagcagcaggccgccattcaggagctcctgaactctgcgtgaagggccttaatgtcacccaccagaaaactaactccaaataaacgcttaccctttcctttaggnttctttgttttggttttgagcaaaagagatcggtagtgttgtgggtaggccat

SEQ ID NO: 4928 - DNA, 357 bp, Homo sapiens
  misc_feature 322: n = A,T,C or G
gcggttccgggcgttaccatcgtccgtgcgcaccgcccggcgtccaggtgagtctcccatctgcagagacgcggacgcgccggcccgcagttggcctgcggagcgcggtggacggtttggcgcccaccaggcgatcaatactttggatttttaatttctagatttggcaattcttcgctgaagtcatcatgagctttttccaactcctgatgaaaaggaaggaactcattcccttggtggtgttcatgactgtggcggcgggtggagcctcatctttcgctgtgtattctctttggaaaaccgatgtgatccttgatcgaanaaaaaatccagaaccttgggaaactgtggacccta

SEQ ID NO: 4929 - DNA, 411 bp, Homo sapiens
ggccatcgccgcagatccagcgcccagagagacaccagagaacccaccatggccccctttgagcccctggcttctggcatcctgttgttgctgtggctgatagcccccagcagggcctgcacctgtgtcccaccccacccacagacggccttctgcaattccgacctcgtcatcagggccaagttcgtggggacaccacaagtcaaccagaccaccttataccagcgttatgagatcaagatgaccaagatgtataaagggttccaagccttatgggatgccgctgacatccggttcgtctacacccccgccatggagagtgtctgcggatacttccacaggtcccacaaccgcagcgaggagtttctcattgctggaaaactgcaggatggactcttgcacatcactacc

SEQ ID NO: 4930 - DNA, 392 bp, Homo sapiens
gattcttcccctctctacaaccctctctcctcagcgcttcttctttcttggtttggtgcttctgagatgtgggcttgcacacgctgttgctatagtacgtgttgatcctgactgctgtcatggcgtgccctctggagaaggccctggatgtgatggtgtccaccttccacaagtactcgggcaaagagggtgacaagttcaagctcaacaagtcagaactaaaggagctgctgacccgggagctgcccagcttcttggggaaaaggacagatgaagctgctttccacaagctgatgagcaacttggacagcaacagggacaacgaggtggacttccaagagtactgtgtcttcctgtcctgcatcgccatgatgtgtaacgaattctttgaa

SEQ ID NO: 4931 - DNA, 372 bp, Homo sapiens; identical to SEQ ID NO: 3869

SEQ ID NO: 4932 - DNA, 322 bp, Homo sapiens; identical to SEQ ID NO: 3870

SEQ ID NO: 4933 - DNA, 70 bp, Homo sapiens; identical to SEQ ID NO: 3871

SEQ ID NO: 4934 - DNA, 376 bp, Homo sapiens
gctcctcggccaggcggaacctctctgctgggcccggtggccgcaaaaaaactttctttctcccgcccgaacggacgccgcggccaactgcctcgcccgcctggcagcctaaccctccttctcttcttctcctctccggcttcgcgcggccctgcctccctctcgcccggcggcatccgcttgctgctgccaccgcctcctcatcttctgcccggccaaccggcctgccccgctgcagtgatgtgcgacaaggagttcatgtgggccctgaaaaacggagacttggatgaggtgaaagactatgtggccaagggagaagatgtcaaccggacactataaggtggaaggaaacctcttcattatgcagcagattgtg

SEQ ID NO: 4935 - DNA, 61 bp, Homo sapiens; identical to SEQ ID NO: 3872

SEQ ID NO: 4936 - DNA, 424 bp, Homo sapiens; identical to SEQ ID NO: 3874

SEQ ID NO: 4937 - DNA, 460 bp, Homo sapiens; identical to SEQ ID NO: 3879

SEQ ID NO: 4938 - DNA, 446 bp, Homo sapiens; identical to SEQ ID NO: 3880

SEQ ID NO: 4939 - DNA, 468 bp, Homo sapiens
cattattataaagctcaaccgagttctaggcttcaaacctaagcctcccaagaatgagtccttggagacttacccagtgatgaagtataacccaaatgtccttcccgttcagtgcactggcaagcgagatgaagataaggataaagttggaaatgtggagtattttggactgggcaactcccctggttttcctctgcagtattatccgtactatggcaaactcctgcagcccaaatacctgcagcccctgctggccgtacagttcaccaatcttaccatggacactgaaattcgcatagagtgtaaggcgtacggtgagaacattgggtacagtgagaaagaccgttttcagggacgttttgatgtaaaaattgaagttaagagctgatcacaagcacaaatctttcccactagccatttaataagttaaaaaaagatacaaaaacaaaaacctactagtcttgaaca

SEQ ID NO: 4940 - DNA, 410 bp, Homo sapiens
aagggacagatcagaatcagtatggatccacgtcattatggagggggacagactccaggccaggagactgatcagttcattcaagaggagttgagggccaggattagtggctcatgcctgtaatcccagcactttgggaagccaaggcaggcagatcacctgaggtcaggagtttgagaccagcctggccaacatgtcgaaactctgtctctactaaagatataaaaattagccgggcatggtggtgggcgcctctaatcccagctacttgggaggctgagacaggagaattgcttgaaccccaggaggcggaggttgcagtgagccaagatcacaccactgcactccagactgggcaacagagcaagactccatctcaaaagatatatatatatatataggccgggcgc

SEQ ID NO: 4941 - DNA, 514 bp, Homo sapiens
caagctccaggacatgcaagagatcatctcccactatgaggaggaactggcgcagctacgccacgaactggagcggcagaacaatgaataccaagtgctgctgggcatcaaaacccacctggagaaggaaatcaccacgtaccgacggctcctggagggagagagtgaagggacacgggaagaatcaaagtcgagcatgaaagtgtctgcaactccaaagatcaaggccataacccaggagaccatcaacggaagattagttctttgtcaagtgaatgatatccaaaagcacgcatgagaccaatgaaagtttccgcctgttgtaaaatctattttcccccaaggaaagtccttgcacagacaccagtgagtgagttctaaaagatacccttggaattatcagactcagaaacttttattttttttctgtaacagtctcaccagacttctcataatgctcttaatatattgcacttttctaatcaaagtgcgagtttatgagggtaaagctcta

SEQ ID NO: 4942 - DNA, 504 bp, Homo sapiens; identical to SEQ ID NO: 3885

SEQ ID NO: 4943 - DNA, 79 bp, Homo sapiens
gtgcgctgatcctgattatttggcaggaaaacgagacaatccagcagcccaggagggacagatggacttaatcctcccc

SEQ ID NO: 4944 - DNA, 136 bp, Homo sapiens
tttttttttttttttttcaaccagcccctctttgttttaaaaagaaaattaagctacccactttctgtttacttacatagaattccactatttaggctttagaaaatagcccttctgtcgtcttctcgcagccgta

SEQ ID NO: 4945 - DNA, 464 bp, Homo sapiens; identical to SEQ ID NO: 3886

SEQ ID NO: 4946 - DNA, 360 bp, Homo sapiens; identical to SEQ ID NO: 3887

SEQ ID NO: 4947 - DNA, 391 bp, Homo sapiens
aatttgacttgtaccaggattataaaacatatagaaaatgattccttccgctgtgcatagagtttatcatcgtctttcttctgcttgtcacatccttgctttttagaccatttatcacccatcactctgacttttcagaccctcataatccacatgatacttatccttttgattaaaacaacttaatggccttttcacgaataattaatctgctgtctttactttcagctccaggcttttaactttaatgttgagttatccagcctgtgttgcctttcaaagtttcactccccttagccttttcccctcaaaggtttaatacttctttagaaacttcaatagttgctatacaaaggttttaaaaaatgcttctgagttactctcacatccc

SEQ ID NO: 4948 - DNA, 412 bp, Homo sapiens
gcactcattctgagcttccttccttcatttctgtcattactgctgagaactggactgtgcccagctgacctttcccttccttgccctcatcttgctgccagggtctgcaggtttgccaccgtcccggccccagtctgaaacatgggattatttcagaattggaggtggcagcttcagaaaaaaatccttctcgtgtgttgactgctgagatccaggaactgggaaatcaacccccagtttgtagattgctctctttggaaattctgtggcccaacctcgtggctgttttctggaattccttctatcggggcagacagtgctgtgcctttcttgacttcaggatgttccaaggatgctgctggatctgtgtgtgtgtgtgtgtgtgtgtgtgtgtgtgtgtgtgtgcgcgcgc

SEQ ID NO: 4949 - DNA, 51 bp, Homo sapiens
ggcttcgcctagaagaggaagcccgaaagcaggaagaagaaaggaagcgcc

SEQ ID NO: 4950 - DNA, 591 bp, Homo sapiens; identical to SEQ ID NO: 3890

SEQ ID NO: 4951 - DNA, 615 bp, Homo sapiens
gaatttggccctcgaggccaagaattcggcacgaggaccgatccccaccccaattcaatcccggaagggacttacttaggaaacccttctttactagatatcctggccccctgggcttgtgaacacctcctagccacatcactacagtacagtgagtgaccccagcctcctgcctaccccaagatgcccctccccaccctgaccgtgctaactgtgtgtacatatatattctacatatatgtatattaaaactgcactgccatgtctgcccttttttgtggtgtctagcattaacttattgtctaggccagagcgggggtgggaggggaatgccacagtgaagggagtggcagaatcaaattgctacatagtccaaacaaaaaagaaggctttttcaaaaaacattaaattcacatgcagtctcagagactatttagacaaagttcaagttaggagcttttaggatgtgggagtaaaactttaatgggaggggagggctggctgctggaagaaggaagaagccagactggttagacagtactcttaactcctagcccagcctagcgtgccctgcccctctggccactgctgcagacacctgccttaacacacaca

SEQ ID NO: 4952 - DNA, 617 bp, Homo sapiens
gaatttggccctcgaggccaagaattcggcacgaggcgcccactcctgcacccctgttgctggacctgggtatccctgtgggccagcggtcagccaagagcccccgacgtgaggaggagccccgcggaggcactgtctcacccccaccggggacatcacgctctgctcctagcaccccaggcaccccacgttcaccacccctgggcctcatcagccgacctcggccctcgccccttcgcagccgcattgatccctggagctttgtgtcagctgggccacggccttctcccctgccatcaccacagcctgcaccccgccgagcaccctggaccttgttcccggactcagaccccttctgggactccccacctgccaaccccttccaggggggcccccaggactgcagggcacagaccaaagacatgggtgcccaggccccgtgggtgccggaagcggggccttgagtgggccaggccactcccccgagctccagctgccttaggaggagtcacagcatacactggaacaggagctgggtcagcctctgcagctgcctcagtttccccagggaccccacccccctttgggggtcaggaacactacactgcacaggaagc

SEQ ID NO: 4953 - DNA, 651 bp, Homo sapiens
ggaatttggccctcgaggccaagaattcggcacgagggggggctcccgcctgtgccccttctcctcaccatgtctcccccaccctgcctcagttctccgttccccttcatctccgtccccctctttgaagctgtccccatctcagtgtcagaccagccttctcctcagctgaccaccctcctctgacccacgccccctccttgtctgaaagaaaggagccttgaatggtggagggaggcagtggggagaaaggtctcaccggacaggttgggagaatgaggtcagcggtgctggggaacagatggagggggcagtggggacagggcttgggcagacaccagcaggaataatttgaaatgtgtgaggtgactccccggagggccttgggcttgggcatttgggaaaagaatgatgtctggaagggcttaagggacacagtggacgaggggagagtcctcatctgctggcattttgtggggtgttagtgccaaacttgaataggggctggggtgctgtcttccactgacacccaaatccagaatccctggtcttgagtccccagaactttgcctcttgactgtcccttctcttcctacctccatccatggaaaattagttattttctgatcctttcccctgcctggtctagct

SEQ ID NO: 4954 - DNA, 61 bp, Homo sapiens
ccaggttcattcccagtgtttacctggaatattgctagaatttacttttgtcataatgcaa

SEQ ID NO: 4955 - DNA, 510 bp, Homo sapiens
  misc_feature 465: n = A,T,C or G
cataaatctaatattagccttgtctttgattttatggaaactgatctagaggttataataaaggataatagtcttgtgctgacaccatcacacatcaaagcctacatgttgatgactcttcaaggattagaatatttacatcaacattggatcctacatagggatctgaaaccaaacaacttgttgctagatgaaaatggagttctaaaactggcagattttggcctggccaaatcttttgggagccccaatagagcttatacacatcaggttgtaaccaggtggtatcgggcccccgagttactatttggagctaggatgtatggtgtaggtgtggacatgtgggctgttggctgtatattagcagagttacttctaagggttcctttttttgccaggagattcagaccttgatcagctaacaagaatatttgaaactttggggcacaccaactgaggaacagnggccggacatgtgtaggcctccagattatgtgacatttaagagtt

SEQ ID NO: 4956 - DNA, 578 bp, Homo sapiens
tcggcacgaggcactgttgtattttggggtcgtgtatggagttacttagtcatccttaatccttatcttagggatacttgaacacaaacactgtggtaggataacagtatatctgattaacagactgctactaggtgattaatgggtgggtagtgtaaatacacaagaaaaggatgattcacatcccatgtgggatggagcagaactgcattatttcattacattactcagaacaggcatataattgaaaacttatgaattatttttttttaattatttgagatggaatcttgctttgtcagccaggctggagtgcagtgacacgatctcagctcactgcaacctctgtctcctgggttcaggtgattctcctccctagtctcccaagtagctgggactataggcacgtgccaccacacccggctaattttcatatttttagtagagatggggtttcaccatgttggccaggctgttcttgaaatcctgacctcaagtgatccacacatgtctacctcccaaagtgctgggattacagtcgtgagccactgtaccccccctaaaactgatgaattatt

SEQ ID NO: 4957 - DNA, 557 bp, Homo sapiens; identical to SEQ ID NO: 992

SEQ ID NO: 4958 - DNA, 470 bp, Homo sapiens
gcactctaccccatctccttgccgggtcagccctgacaaaggtcagctagccccttgaggacatcagctttggcctcagggtcctaatggcagcagaaccactgacagagctagaggagtccattgagaccgtggtcaccaccttcttcacctttgcaaggcaggagggccggaaggatagcctcagcgtcaacgagttcaaagagctggttacccagcagttgccccatctgctcaaggatgtgggctctcttgatgagaagatgaagagcttggatgtgaatcaggactcggagctcaagttcaatgagtactggagattgattggggagctggccaaggaaatcaggaagaagaaagacctgaagatcaggaagaagtaaagccgcctggctgagatggggtgggcagggcagagctgatcagggccgagcagaaccgcactcttcccaaataaagcttcctccttg

SEQ ID NO: 4959 - DNA, 342 bp, Homo sapiens
aggccactctgtatcaggctctttgcttatgccagggcatgaagcctcatctaaagacccaaatcacagcacagctttgaaagtgatagagtcagacactcacaggacaaatacaccaaggagaaggaagggaagaaataaagaaatccaggacctggaggagagctttgtgcctgttgctgcacccctaggtcatccaagagagctgcagaagtactccagtgattctgagagccccagaggaactggcagtggtgcgttgccaagtggtcagaagctggaggagttgaaggcagaggagccagataacttcagcagcaaagtagtgcagaggggccgaga

SEQ ID NO: 4960 - DNA, 428 bp, Homo sapiens; identical to SEQ ID NO: 3894

SEQ ID NO: 4961 - DNA, 467 bp, Homo sapiens
gtccaatatggcggcgcccagtggcggtgtgaactgtgaggagttcgccgagttccaggaattactcaaggtgatgaggacaattgatgacagaatagtacatgaattaaacactacggttccaacagcttcctttgcagggaaaattgatgccagccaaacctgtaaacaactttatgagtctttgatggcagctcatgccagtagagacagagtcataaaaaactgtatagcccagacttcagcagtagtaaaaaacctccgagaagagagagaaaagaatttggacgatttaacgttattaaaacaacttagaaaagagcagacaaagttgaaatggatgcagtcagaactgaatgttgaagaagtggtaaatgacaggagctggaaggtgtttaatgaacgctgccgaattcacttcaagcctccaaagaatgaataaagagagattcttttttttttttttt

SEQ ID NO: 4962 - DNA, 508 bp, Homo sapiens; identical to SEQ ID NO: 3895

SEQ ID NO: 4963 - DNA, 119 bp, Homo sapiens
attaatcccctggcccaacccgtcatctactctaccatctttgcaggcacactcatcacagcgctaagctcgcactgattttttacctgagtaggcctagaaataaacatgctagcttt

SEQ ID NO: 4964 - DNA, 415 bp, Homo sapiens
ggcacatgccaccatgcccggctaatttttttgtatttttagtagagaccaggcttcgccatgttggccaggctggtctcgaacccctgagctcaggtgatccacctgcctcggcctcccaaagtgggaaatgggtcattttcaaaggggcaacagtgataccatccctgcactcctgggtcctgctcttccaatgcccaaggcatggcatggtggcagctgtgcccccgcccattgctttggagcacagatgactctgggggcagaggtgggctctgtttacgagggcagtgagaccacccagccaaattgcttctcaaccctagacaaagcctttggccaagagggaggtgctgttagttgggcagcccttctgggtttcagagaccggtgttggctctagactggtctcatc

SEQ ID NO: 4965 - DNA, 458 bp, Homo sapiens
cagcattctgactgggaaccaggactcccggtcggagtagctcttcactcctcagcgcgacgtcgtgtcgagttcccaaaaagctccgcaggggctgtagggaggcatacaagagttaaattctgaataagtctgcaggtaggatggacagttattttaaagcagctgtcagtgacttggacaaactccttgatgattttgaacagaacccagatgaacaagattatctccaagatgtacaaaatgcatatgattctaaccactgctcagtttcttcagagttggcttcctcacagcgaacttcattgctcccaaaagaccaagagtgcgttaatagttgtgcctcatcagaaacaagctatggaacaaatgagagttccctgaatgaaaaaacactcaagggacttacttctatacaaaatgaaaaaaatgtaacaggacttgatcttctttcttct

SEQ ID NO: 4966 - DNA, 423 bp, Homo sapiens
gagtacaccgtagccaatgtcatctctgtcggctcggggctgctgagcgtttccgtgggacttgtggccctcctggcgtccaggaaccttcttcgccctccactgcactgggtcctgctggcactagctctggtgaacctgctcttgtccgttgcctgctccctgggcctccttcttgctgtgtcactcactgtggccaacggtggccgccgccttattgctgactgccacccaggactgctggatcctctggtaccactggatgaggggccgggacatactgactgcccctttgaccccacaagaatctatgatacagccttggctctctggatcccttctttgctcatgtctgcaggggaggctgctctatctggttactgctgtgtggctgcactcactctacgtggagttgggccctgc

SEQ ID NO: 4967 - DNA, 96 bp, Homo sapiens
caccattcttcctgggaaccgcactgctgccttgaaagccttcctgctctccgaactgtgcctccttggggcctgggccgccttggcaggaggggg

SEQ ID NO: 4968 - DNA, 135 bp, Homo sapiens
accacaaaaaccaaactgccccaatgaccttagccccattgctccattcactcccaggtgagaattcaggcaaacgtccacaaaggtcacaggcagcgtacatacggttctgttataccccatatattacccctt

SEQ ID NO: 4969 - DNA, 62 bp, Homo sapiens; identical to SEQ ID NO: 3900

SEQ ID NO: 4970 - DNA, 423 bp, Homo sapiens
cctcatccattccaaaatatgcccggtgctatccgcccagctgctcctagaccaccatgtagtactatgagaccagcttcttcacaggttccacgagtcatgtcaacacagcgtgttgctaacacatcaacacagacaatgggtccacgtcctgcagctgcagccgctgcagctactcctgctgtccgcaccgatccacagtataaatatgctgcaggagttcgcaatcctcagcagcatcttaatgcacagccacaagttacaatgcaacagcctgctgttcatgtacaaggtcaggaaccttggactgcttccatgttggcatctgcccctcctgaagagcaaaagcaaatgttgggagaacggctgtttcctcttattcaagccatgcaccctactcttgctggtaaaatcactggcatg

SEQ ID NO: 4971 - DNA, 411 bp, Homo sapiens; identical to SEQ ID NO: 3901

SEQ ID NO: 4972 - DNA, 382 bp, Homo sapiens
agggctcagtagtcagtttgaagcgggtatgcacaaagatagctggcttctgggtaagtttgcaagtgtgaattttcattttgtttggaggcatagaaaagttatgtaggctgggggcggtggctcacacaaccccagcactttgggaggctgaggcggtagatcacctgaggtcaagagctggagaccagcctggccaacatggtgaaatcttgtctctactaaaaatacaaaaattgggcatggtggcaggcgcctgtagttccagctactcgggaggctgaagcaggacaatcgcttgaacccagaacgcagaggttgcagtgagccgagatggcgccattgcacccccacctgggcaacagaacaaaaactccatctc

SEQ ID NO: 4973 - DNA, 83 bp, Homo sapiens
tggacagaatcgccggacaggtggcaactgccaacaagaagcattagaacaaaccatgctgggttaataaattgcctcattcc

SEQ ID NO: 4974 - DNA, 279 bp, Homo sapiens
gggactaaacgtaagccttctcctcactctctcaatcttatccatcatagcaggcagttgaggtggattaaaccaaacccagctacgcaaaatcttagcatactcctcaattacccacataggatgaataatagcagttctaccgtacaaccctaacataaccattcttaatttaactatttatattatcctaactactaccgcattcctactactcaacttaaactccagcaccacgaccctactactatctcgcacctgaaacaagctaacatgact

SEQ ID NO: 4975 - DNA, 310 bp, Homo sapiens
gctggcgagagtttgtgcggcgacatgaaactgcttacccacaatctgctgagctcgcatgtgcggggggtggggtcccgtggcttccccctgcgcctccaggccaccgaggtccgtatctgccctgtggaattcaaccccaacttcgtggcgcgtatgatacctaaagtggagtggtcggcgttcctggaggcggccgataacttgcgtctgatccaggtgccgaaagggccggttgagggatatgaggagaatgaggagtttctgaggaccatgcaccacctgctgctggaggtggaagtgatagagg

SEQ ID NO: 4976 - DNA, 215 bp, Homo sapiens; identical to SEQ ID NO: 3902

SEQ ID NO: 4977 - DNA, 280 bp, Homo sapiens
ctgcttccgcatcttctgttcacgttcctgtttctgctcttggtgcaggatctgcagctactgctgcatcagaagaaatggttagtacagtttatacaggtcccaccttatgaaaagggcggccaggcccagtggctcacacctgtaatcccagcactttgggaggccgaggcaggtggatcacgaggtcaggagatcgagaccatcctggctaacacggtgaaaccccgtctctactaaaaatacgaaaaattagccgggtgtggtggcagccgcctgt

SEQ ID NO: 4978 - DNA, 390 bp, Homo sapiens
gagaaatcattggaattcagaagctgaattcagatgacacttaccagaccgccctcttgagtggctcagatgaggaatgagccgagatgcggagggcgcagatgtcccactgcacagctggaatgaatggagttcatcccctccacctgaatgcctgctgtggtctgatcttaagggtctatatatttgcacctcctcattcaacacagggctggaggttctacaacaggaaatcaggcctacagcatcctgtgtatcttgcagttgggatttttaaacatactataaagtctgtgttggtatagtacccttcataaggaaaaatgaagtaatgcctataagtagcaggcctttgtgcctcaatgtgaagagaaatcaagagatgctaag

SEQ ID NO: 4979 - DNA, 422 bp, Homo sapiens; identical to SEQ ID NO: 3904

SEQ ID NO: 4980 - DNA, 430 bp, Homo sapiens
gggcagctgctgtagcgaagagagtttggcgcgatgtctcacaccattttgctggtacagcctaccaagaggccagaaggcagaacttatgctgactacgaatctgtgaatgaatgcatggaaggtgtttgtaaaatgtatgaagaacatctgaaaagaatgaatcccaacagtccctctatcacatatgacatcagtcagttgtttgatttcatcgatgatctggcagacctcagctgcctggtttaccgagctgatacccagacataccagccttataacaaagactggattaaagagaagatctacgtgctccttcgtcggcaggcccaacaggctgggaaataattgtgttggaagcactgggggggttggggtgggcttggaacacaagtgtgtacagcgtgctgtagtggaagttttgtatcat

SEQ ID NO: 4981 - DNA, 363 bp, Homo sapiens
gagagcacatccggtgttagaagcgctggtaggccttggagaggcgggttaggaagagtggagactgctgcacggactctggaaccatgaacatatttgatcgaaagatcaactttgatgcgcttttaaaattttctcatataaccccgtcaacgcagcagcacctgaagaaggtctatgcaagttttgccctttgtatgtttgtggcggctgcaggggcctatgtccatatggtcactcattttattcaagctggcctgctgtctgccttgggctccctgatattgatgatttggctgatggcaacacctcatagccctgaaactgaacagaaaagactgggacttcttgctggatttgcat

SEQ ID NO: 4982 - DNA, 72 bp, Homo sapiens
gggccttttcacaagatggcgccgaaagcgaagaaggaagctcctgcccctcctaaagctgaagccaaagcg

SEQ ID NO: 4983 - DNA, 432 bp, Homo sapiens
attaatcccctggcccaacccgtcatctactctaccatctttgcaggcacactcatcacagcgctaagctcgcactgattttttacctgagtaggcctagaaataaacatgctagcttttattccagttctaaccaaaaaaataaaccctcgttccacagaagctgccatcaagtatttcctcacgcaagcaaccgcatccataatccttctaatagctatcctcttcaacaatatactctccggacaatgaaccataaccaatactaccaatcaatactcatcattaataatcataatggctatagcaataaaactaggaatagccccctttcacttctgagtcccagaggttacccaaggcacccctctgacatccggcctgcttcttttcacatgacaaaaactagcccccatctcaatcatataccaa

SEQ ID NO: 4984 - DNA, 300 bp, Homo sapiens
ggtgagtgtctctagggtgatacgtgggtgagaaaggtcctggtccgcgccagagcccagcgcgcctcgtcgccatgcctcggaaaattgaggaaatcaaggacttcctgctcacagcccgacgaaaggatgccaaatctgtcaagatcaagaaaaataaggacaacgttaagtttaaagttcgatgcagcagatacctttacaccctggtcatcactgacaaagagaaggcagagaaactgaagcagtccctgccccccggtttggcagtgaaggaactgaaatgaaccagacacactg

SEQ ID NO: 4985 - DNA, 330 bp, Homo sapiens
gcttttttttcgaggtaggagtcgactcctgtgaggtatggtgctgggtgcagatgcagtgtggctctggatagcaccttatggacagttgtgtccccaaggaaggatgagaatagctactgaagtcctaaagagcaagcctaactcaagccattggcacacaggcattagacagaaagctggaagttgaaatggtggagtccaacttgcctggaccagcttaatggttctgctcctggtaacgtttttatccatggatgacttgcttgggtatggagagtcggcttgactacactgtgtggagcaagttttaaagaagcaaaggactca

SEQ ID NO: 4986 - DNA, 330 bp, Homo sapiens
gagttgcttcagcgtcccggtgtggctgtgccgttggtcctgtgcggtcacttagccaagatgcctgaggaaacccagacccaagaccaaccgatggaggaggaggaggttgagacgttcgcctttcaggcagaaattgcccagttgatgtcattgatcatcaatactttctactcgaacaaagagatctttctgagagagctcatttcaaattcatcagatgcattggacaaaatccggtatgaaagcttgacagatcccagtaaattagactctgggaaagagctgcatattaaccttataccgaacaaacaagatcgaactctcact

SEQ ID NO: 4987 - DNA, 290 bp, Homo sapiens
gagctcacgctggctcacacagctctagggggctgctcctctaactcacagagggttttgtgaggctctgtgggccacaacagacctgcatatctgagcaaaaatagcaaaagcctctctcaacccactgggctgaatctacactggaagccaacttgctggcacccccgctccccaacccttcttgcctgggtaggagaggctaaagatcaccctaaatttactcatctctctagtgctgcctcacattgggcctcagcagctccccagcaccaattcacaggtcaccc

SEQ ID NO: 4988 - DNA, 257 bp, Homo sapiens
gagaatatattcataatcaagctgatacttcatgattaaattatttttgttgcttaaaagtcgtattagacagactaaatcattttttttttatggttcaaaaaagatgaataccaacgtttttgcaggttctgctgtgaaaagggggttgaattttttgggggggtaattttgatcataaatgcgttaatactcataaaccagattaatccttttatttgcttcctccaactatttaaaggggggcaaaaacactt

SEQ ID NO: 4989 - DNA, 365 bp, Homo sapiens
ggttttgtgctgggagctggtggcgcggtgcagggctcttaagaacgaacggcttgggcgcggactggtatccggggactgtgacttgcagggtccgccatggagccagagcagatgctggagggacaaacgcaggttgcagaaaatcctcactctgagtacggtctcacagacaacgttgagagaatagtagaaaatgagaagattaatgcagaaaagtcatcaaagcagaaggtagatctccagtctttgccaactcgtgcctacctggatcagacagttgtgcctatcttattacaaggacttgctgtgcttgctaaggaaagaccaccaaatcccattgaatttctagcatcttatctttt

SEQ ID NO: 4990 - DNA, 157 bp, Homo sapiens
ttgtgccgccgctgtggctctaaggcctaccaccttcagaagtcgacctgtggcaaatgtggctaccctgcccagcgcaagagaaagtattactggagtgccaaggcttaaagacgaaataccaccggaactggtcgaatgaggcacctaaaaattg

SEQ ID NO: 4991 - DNA, 76 bp, Homo sapiens
gctctttacggtgtggagtctggagaccacctgcagaaatggcacctccaaaggggaagggaaacaaggaagaaca

SEQ ID NO: 4992 - DNA, 264 bp, Homo sapiens
tatcccaatcttcaaactcaaatttgaacgcccactggccatctctacttggatatttatttctttttttgtttgtttgttttctttttttgtttgtttttgagacggagtcttgctctttcgcccaagccggagtgcaatggcgctatcttggttcactgcaagctccgcctcccaagttcacgccattctcctgcctcaacctcccgagtagctgggactacaggcgcccattaccgcgcccggctaattttttgtattttt

SEQ ID NO: 4993 - DNA, 357 bp, Homo sapiens
  misc_feature 357: n = A,T,C or G
gagagctctcagcgccgctcccagccacagcctcccgcgcctcgctcagctccaacatggcaaaaatctccagccctacagagactgagcggtgcatcgagtccctgattgctgtcttccagaagtatgctggaaaggatggttataactacactctctccaagacagagttcctaagcttcatgaatacagaactagctgccttcacaaagaaccagaaggaccctggtgtccttgaccgcatgatgaagaaactggacaccaacagtgatggtcagctagatttctcagaatttcttaatctgattgtggcctagctatggcttgccatgactccttcctcaaggctggcccttn

SEQ ID NO: 4994 - DNA, 101 bp, Homo sapiens
gtcaaaaagctccagcccagaaagcacctgctccaaaggcatctggcaagaaagcataagtggcaatcataaaaagtaataaaggttctttttgacctgct

SEQ ID NO: 4995 - DNA, 494 bp, Homo sapiens; identical to SEQ ID NO: 3914

SEQ ID NO: 4996 - DNA, 493 bp, Homo sapiens
gagaatgaaatatcatgtttatttggtggggaggggacagccagggtctaatgctattccaaaaggttacttctcaaattagggacacctgggaatttgaagcgctagcaggccagccctggggcaagaactggaagggtttataggccccctgaataaaggctatggcacttgatcctcaacaccagacatctaaggtacaactgaaaatgactcattttggacagaaagggtttagagtaaagagctggactaaccaggagagaagtctagttggttccctacaggtgcactggaaacactccagcagggaccttctgggatctggggagcactgctgccaattattaacagcagtcagggccagtaaagacctatcctgcctaaacaccactgcatccctggtaatctatctatgacccacttctagttggtactgatgtcctgccaagaaccttaaccaacagttgactatattctccgaaaccagaag

SEQ ID NO: 4997 - DNA, 411 bp, Homo sapiens
gcggccgctcacctctcctccgtggagaagacgaacttcctaagcttcaggtcccccagcacgatggctgactggtggcagtgggcgacggcggagacaatctgcttgaagagccgggcggcttcctcttcccgcagcctcttccggcttcgcacataggagtgcatgtccccaaagtccttctcaaagaagacataggccttggtttccccaaggatcacttccacaatgccagtaatgttgctgtgcgatggcagctggatgtaaggcctgattttgtcctggtagtgtttaatgggaaacacctgtagagagaaggggggcccgtttagggggctagaaaagcaaaggcagcctcgcaaacccctgagggagctgaacagaagttctcaacctgtgggcttaggatgt

SEQ ID NO: 4998 - DNA, 181 bp, Homo sapiens
ccacagaagagaggctttcgacgaaacatctctgcaaagatacagccaacaatccacatgtccacaagtgttgcatatgtggactggcaaaaacttcgggagctggtaccagagtgtaaaaaccacgggtgtaagtgccatctgttagccgtagatatctggcaggccaagtcagccagtt

SEQ ID NO: 4999 - DNA, 436 bp, Homo sapiens
gggccggggtaatgtcacccagcacgtgcaaggacacaggaacctctccacgtgctttagttctggagacctcttcactgcccacaatttcagcgagcagtcgcggattgggagcagcgagctccaggagttctgccccaccatcctccagcagctggattcccgggcctgcacctcggagaaccaggaaaacgaggagaatgagcagacggaggaggggcggccaagcgctgttgaagtgtggggatacggtctcctctgtgtgaccgtcatctccctctgctccctcctgggggccagcgtggtgcccttcatgaagaagacgctttacaagaggctgctgctctacttcagagctctggcgattggaaccctcttactcaagcgcctcttccagctcatcccgggagcagtttggtttcagcctctggaagat

SEQ ID NO: 5000 - DNA, 589 bp, Homo sapiens
gagagttttagaggaatataaggtgtgaatgaaaattccaataacataatgtacaaaaatgttgtcacatacagaagagcaaaaatctacgtattggggactattgctgtgggaagaagggcctgatcttcatactcatcttcctcattgagtaccatgaccccttccaattcatccatactacaccatcatctgtgccatgctttgccatgtcccaggtgtactgtccaccccagtagtatctgccgtttggattggctgcatgacatctattataccaccatccaccaccgtcttctttagaacactgttttctgggatctgatgttaaccagccgtcattgtctctgtcatacgtgctgaagaacatgccgttgtgaatggtcatggtcctgttttctcccatcagctgagatgctccatccatgagggcattaccggctgttcctctgtatttgttcactgagatctggtatttgttggcttcattctgtacagtgaatcctccatagtgagcctttactttgctccctttcagtcctccattctatcaaagttctgtggtcccatcctgtaagctggttatttt

SEQ ID NO: 5001 - DNA, 534 bp, Homo sapiens
cactgaaaactttttattgctcttttggatagaaacgggaatttatttgccaggaaggatgatcccatcatacttctgctggaaccagcgcatggcctcctctttgctgattctgtgtttggccccaatgcagcctgtcctgcgcttcttgtctgcgatgctgaaacctggcctacccagcaccacatagaagtccaggccgtagataccaatgcttgggtcatatttgatacccagatcgatgtgttcctggatcccaaaaccaaagtttccagtatctgagaagttgttttttcttaactcaaaatcccgaacctttagacccttctccaagatttcttctgccttggcccctcgaactgtgcagtggacagcaatcttttcatttctccggatgccaaaggatctgacagtgtatctagctttggaaaacacaggggtctgccctgtgagctgctccaacaccttggctgctcgcgtcagtctgtctccactctccccaacacagatgttgagacagagtttgcggatgcg

SEQ ID NO: 5002 - DNA, 372 bp, Homo sapiens
cagtgatcagaatagcaataaaccaatccttcgctttctttaaagaatataaaattcaattctgtgttttaaatattcaatatggaacttccagaaatatgtaacaatccatcgtaggaaaatttcaccataggcttatgctcaggagggctgcataacccctactcaccatctggtagatacataatcagtgtatggtggctgtgaccttaattctcttgcaagtccaaaatcagcaattttcacgagctctggacccatacaaagcaagttttctggtttcatgtccctatgaaaaaagccttgatgatatacggagaaaaaaaaatacagtaaatcattacgtttaaacatagctttatttgatttata

SEQ ID NO: 5003 - DNA, 830 bp, Homo sapiens; identical to SEQ ID NO: 1000
  misc_feature 586, 595, 620, 664, 666, 678, 699, 704: n = A,T,C or G

SEQ ID NO: 5004 - DNA, 580 bp, Homo sapiens
  misc_feature 466, 503, 545: n = A,T,C or G
atctcgaaatagttgaggccatacatttccaggtcctgagcaatcttcaggtattccaacatagcattatctttgagcatcccacggtgttccgcatgccacacctggatccggtcctcccactggtccctggtaagtttgtgctggtccatcactctttgagggatcagccgctcagagctgaggtacccagacttgtgcacttctttgttgtagtccccaaacttggcctgcacagcgtaggaccccaagagcacggcagtctcaggggggcagtagatctcatcgctaaggattccttccttcacttggaggaagaaaagtttctgggtgatgtcctggatgagctcctcagccacatcttcagggtagaacttggcccggaacttgaactggaggggattctccttcctgacctcctgggcagacaccttcttatccagcttcagccaggtaggaaatcctntattatccacatagtggaggccaaagtaccacacttnccggaggccgatagtctttaccacctgatcaataagctgttntccagtgtatttggctggattgaaactccagctct

SEQ ID NO: 5005 - DNA, 596 bp, Homo sapiens
aagcagtaaaaccaaatgtccttagaaattcctttagtgctcagctgtccatgaaaacaggataagcggcttcctccgtctgtgctcagcagggcagggtggaggcgctgcgctcaggccaggaggacctctaatcaggacggggtggggcggggctctgagctggggaagcggctccagcgttgctactttagggcgtccaggtgggtgcagacctgggagaagacactgtccacggagccctcagcgttgaccttgcgcacaatgccacgtttctcatagaaggcgatgacgggttctgtggccttgtaataggtctccagccgctttttgatggtctcctcattgtcgtccacacgcccgctggtctctccacgtttcaagagccgctgggtcatggtctcagggcctgcgtccacatacagcagcagtgtgggctgtccaatccgtcgctcaaactcttctccttgctgcacctcccgcgggtagccatcaatcaggaagcctttggaagtattgactttggccaccatggcatcccggagcatgtccaacactgtctccagtggaaccagctgccccttctccatgatttc

SEQ ID NO: 5006 - DNA, 508 bp, Homo sapiens
ggcatctgaaataaaaatacttactaaaaaggaagaagccgaagatgtatatttagaccagcacacaattttgatttcaattagccttattctaatatttagcttttagatctttcatacacattttcacgtactttgcaattgagaccagaaagacttgtaggtctttctgcagaatgagtgggtccttgcaaagtgagtgggaaacttactcctagatcagaaatgtttgcctctctgagtaaaatgtttctttcagatgagccatagagggggcaccttttactcaacttttctttgttttgaaactttgtttcccatactgttttcagccttttgtttataattagaaattgtgagaagcttcatttagtgtttaaaaatgtggggagataaatcagacttaacatgtatgtaagatcaattcacttaaaagtatggtccaaatagcaaaataggaccaggtgaaacatgtagtcattttttaaaaacatgtacttggtctttt

SEQ ID NO: 5007 - DNA, 446 bp, Homo sapiens
aattctcctgcttcagcctcccaagtagctgggactacaggcgcccaccaccacacccagctgatttctgtatttttagtagagacagggtttcaccatgttggccaggatggtcttgatctcttgacctcatgatctgcccccgtcggcctcccaaaatactgggattacaggcatgagccaccacgcccagcccccagtgtgttaacaaatgatgcagaccacagtaaaggttcccatcaaaaatctgcctacaagagcgctactgatttccttgagtctataaaaagattatttcactttctaattttctacaataaaaagatcatgatactaatgtaaatttttttaattccaaattctaatgcttcatcaaaatataattttattggtgtttcacacttgtaatcccagcactttgggaggctgaggcgggtggatcacct

SEQ ID NO: 5008 - DNA, 506 bp, Homo sapiens; identical to SEQ ID NO: 3919

SEQ ID NO: 5009 - DNA, 404 bp, Homo sapiens
ggccagactgagcccaggttgatttcatgcggacacgaatagactccacagcacctccaggagcccagacaccggcggccagaagcaaggctaggagctgctgcagccatgtcggccctcagcctcctcattctgggcctgctcacggctgtgccacctgccagctgtcagcacggcctggggaaccttcagccctggatgcagggccttatcgcggtggccgtgttcctggtcctcggtgcaatcgcctttgcagtcaaccacttctggtgccaggaggagccggagcctgcacacatgatcctgaccgtcagaaacaatgcagatggagtcctggtgggaacagatggaaggtactcttacatggcggccagtttcaggtacagtgagcatgataatgccta

SEQ ID NO: 5010 - DNA, 509 bp, Homo sapiens
aggccgtgctgaacgagctggtgtctgtggaggacctgctgaagtttgaaaagaaatttcagtctgagaaggcagcaggctcggtgtccaagagcacgcagtttgagtacgcctggtgcctggtgcggagcaagtacaatgatgacatccgtaaaggcatcgtgctgctcgaggagctgctgcccaaagggagcaaggaggaacagcgggattacgtcttctacctggccgtggggaactaccggctcaaggaatacgagaaggccttaaagtacgtccgcgggttgctgcagacagagccccagaacaaccaggccaaggaactggagcggctcattgacaaggccatgaagaaagatggactcgtgggcatggccatcgtgggaggcatggccctgggtgtggcgggactggccggactcatcggacttgctgtgtccaagtccaaatcctgaaggagacgcgggagcccacggagaacgctccaggagggcctgtccatcctcgct

SEQ ID NO: 5011 - DNA, 317 bp, Homo sapiens
  misc_feature 317: n = A,T,C or G
tacacagagtggtcttttcaacactcctccccctactccaccggacctcaaccaggacttcagtggatttcagcttctagtggatgttgcactcaaacgggctgcagagatggagcttcaggcaaaacttacagcttaacccattttcaagcaaaacagttctcagaaatgtcatgattgccggggtgaaggcaagagatgaattgcattattttatatattttttattaatatttgcacatgggattgctaaaacagcttcctgttactgagatgtcttcaatggaatacagtcattccaagaactataaacttan

SEQ ID NO: 5012 - DNA, 357 bp, Homo sapiens
agggattgtctctggatctcgagataaaaccatcaagctatggaataccctgggtgtgtgcaaatacactgtccaggatgagagccactcagagtgggtgtcttgtgtccgcttctcgcccaacagcagcaaccctatcatcgtctcctgtggctgggacaagctggtcaaggtatggaacctggctaactgcaagctgaagaccaaccacattggccacacaggctatctgaacacggtgactgtctctccagatggatccctctgtgcttctggaggcaaggatggccaggccatgttatgggatctcaacgaaggcaaacacctttacacgctacatggtggggacatcatcaa

SEQ ID NO: 5013 - DNA, 352 bp, Homo sapiens; identical to SEQ ID NO: 3924
  misc_feature 40, 51: n = A,T,C or G

SEQ ID NO: 5014 - DNA, 515 bp, Homo sapiens
gagatgaatgcggctgttaagacctgcaataatccagaatggctactctgatctatgttgataaggaaaatggagaaccaggcacccgtgtggttgctaaggatgggctgaagctggggtctggaccttcaatcaaagccttagatgggagatctcaagtttcaacaccacgttttggcaaaacgttcgatgccccaccagccttacctaaagctactagaaaggctttgggaactgtcaacagagctacagaaaagtctgtaaagaccaagggacccctcaaacaaaaacagccaagcttttctgccaaaaagatgactgagaagactgttaaagcaaaaagctctgttcctgcctcagatgatgcctatccagaaatagaaaaattctttcccttcaatcctctagactttgagagttttgacctgcctgaagagcaccagattgcgcacctccccttgagtggagtgcctctcatgatccttgacgaggagagagagcttgaaaagctgttt

SEQ ID NO: 5015 - DNA, 480 bp, Homo sapiens; identical to SEQ ID NO: 3928

SEQ ID NO: 5016 - DNA, 481 bp, Homo sapiens; identical to SEQ ID NO: 3929

SEQ ID NO: 5017 - DNA, 458 bp, Homo sapiens; identical to SEQ ID NO: 3930

SEQ ID NO: 5018 - DNA, 52 bp, Homo sapiens
ttatgtcagaaaaacacacacacacacacacacacacacacacacacacaaa

SEQ ID NO: 5019 - DNA, 368 bp, Homo sapiens
cataactgaattagataatcctatgtgctttatactattttttatactgttattctacaaaaacttgtgatcaatttatgtagagaccaggctgggagcggttgctcacgcctgtaatcctagcactttgggaggctgaggcaggcagatcactaggtcaggagatcgagaccatcctggctaacacagtgaaaccccatctctactaaaaatacaaaaaattagctgggcgtggtggcgggcgcctgtagtcccagctacttgggaggctgaggcagtagaacggcgtgaacccgggaggtggagcttgcagtgagccaagatcgtgccactgcactccagcctgggcgacagcgacactccatctg

SEQ ID NO: 5020 - DNA, 323 bp, Homo sapiens
gcctttgagagaggtttccgctgtaggagcagagcttccgggctgcgctcttcgttgcccagtttccgctcagtggtcgcgtctccgccccccacccaccagtcccgctgcattctcggccgggctctaggcgccatggctgcccgtgggaggaatcgttaggctgaggccgcagtggtcgccgtagccgagaagcgagagaagctggcgaacggcggggagggaatggaggaggcgaccgttgttatcgaacattgcactagctgacgcgtctatgggcgcaacgccgcggtcctgagccatgcgctgcgcctggaggcccc

SEQ ID NO: 5021 - DNA, 265 bp, Homo sapiens
gaggcggccaccgtggagagcagagcgcggcggctggaagctgctaagtcagagccgcgatgttccggattgagggcctcgcgccgaagctggacccggaggagatgaaacggaagatgcgcgaggatgtgatctcctccatacggaactttctcatctacgtggccctcctgcgagtcactccatttatcttaaagaaattggacagcatatgaagacaggacatcacatatgaatgcacgatatgaagagcctggttacagtt

SEQ ID NO: 5022 - DNA, 369 bp, Homo sapiens; identical to SEQ ID NO: 3934

SEQ ID NO: 5023 - DNA, 111 bp, Homo sapiens; identical to SEQ ID NO: 3936

SEQ ID NO: 5024 - DNA, 381 bp, Homo sapiens
  misc_feature 337: n = A,T,C or G
gcctttgagagaggtttccgctgtaggagcagagcttccgggctgcgctcttcgttgcccagtttccgctcagtggtcgcgtctccgccccccacccaccagtcccgctgcattctcggccgggctctaggcgccatggctccccgcgggaggaagcgtaaggctgaggccgcggtggtcgccgtagccgagaagcgagagaagctggcgaacggcggggagggaatggaggaggcgaccgttgttatcgagcattgcactagctgacgcgtctatgggcgcaacgccgcggccctgagccaggcgctgcgcctggaggccccagagcttccagtanaggtgaacccgacgaaaccccggaagggcagcttccaggggacc

SEQ ID NO: 5025 - DNA, 459 bp, Homo sapiens; identical to SEQ ID NO: 1004

SEQ ID NO: 5026 - DNA, 77 bp, Homo sapiens; identical to SEQ ID NO: 3949

SEQ ID NO: 5027 - DNA, 219 bp, Homo sapiens; identical to SEQ ID NO: 1009

SEQ ID NO: 5028 - DNA, 191 bp, Homo sapiens
taaagcttacattttcacagggggggctcttaaacacattccacaaatgccattaagaatttattttgctttaagccagtcatggtggctcatgcctgtaatcccagcaatttgggaggctgaggcaagaactgcttgagcccacgagtttgagactagcctgggcaacatagaaagaccctggctctacc

SEQ ID NO: 5029 - DNA, 173 bp, Homo sapiens
agggagtggtcatataaatgatgtccggcatgcaaaatctggaggtacagcacttcacgttgcagctgctaaaggctataccgaagttttaaaacttttaatacaggccggctatgatgttaatattaaagactatgatgggtggacacctcttcatgctgcagctcattggg

SEQ ID NO: 5030 - DNA, 407 bp, Homo sapiens
  misc_feature 159: n = A,T,C or G
cttttaaaaatctaatatgaggccaggcgcggtggctcacgcctgtaatcccagcactttgggaggctgaggtgggtagatcacgaggtcaggagatcaagaccatcctggccaacatggtgaaaccctgtctctactaaaaatacaaaaattagccgngtgtggcggcgcatgcctgtagtcccagctactcaggaggctgaggcaagagaatttcttgaacccgggaggaggaggctgcagtgagccgagatcattccattgcactccagcctggcgacagagtgagactctgtctcaaaaaaccaacaaaccaaaaaaaaacaaaaacaaaccaacaaaccaatctaatatgaaattctaggctgggcaccgtgactcatgcctatgatcccagcactgtggga

SEQ ID NO: 5031 - DNA, 357 bp, Homo sapiens
  misc_feature 349, 357: n = A,T,C or G
ggagtatggttgcaaagctgaaacttaaaggaattgacggaagggcaccaccaggagtggagcctgcggcttaatttgactcaacacgggaaacctcacccggcccggacacggacaggattgacagattgatagctctttctcgattccgtgggtggtggtgcatggccgttcttagttggtggagcgatttgtctggttaattccgataacgaacgagactctggcatgctaactagttacgcgacccccgagcggtcggcgtcccccaacttcttagagggacaagtggcgttcagccacccgagattgagcaataacaggtctgtgatgcccttagatgtccggngctgcacn

SEQ ID NO: 5032 - DNA, 51 bp, Homo sapiens; identical to SEQ ID NO: 3955

SEQ ID NO: 5033 - DNA, 94 bp, Homo sapiens; identical to SEQ ID NO: 3956

SEQ ID NO: 5034 - DNA, 197 bp, Homo sapiens
gggtaacacagttaatttaccaactgatacagataatagaatatattcataatcaagctgatacttcatgattaaagggatttttgttttttaaaagtcgtattggataagactaaatcattcttttttatggtttaaaaaagatgaatacaaacgtttttgcaggttctgctgtgaaatgtggtttgatttttttg

SEQ ID NO: 5035 - DNA, 130 bp, Homo sapiens
taataaaataaaaattaaacactttgggaggccgaggcgggtggatcatgaggtcaggagatcgagaccatcctggctaacaaggggaaaccccgtctctactaaaaatacaaaaaattaaccgggcgtg

SEQ ID NO: 5036 - DNA, 322 bp, Homo sapiens
gagacacactctgccccaaccatcctgaagctacaggtgctccctcctggaatctccaatggatttcagtcgcagaagcttccacagaagcctgagctcctccttgcaggcccctgtagtcagtacagtgggcatgcagcgcctcgggacgacacccagcgtttatgggggtgctggaggccggggcatccgcatctccaactccagacacacggtgaactatgggagcgatctcacaggcggcggggacctgtttgttggtaatgagaaaatggccatgcagaacctaaatgaccgtctagcgagctacctaaaaaaggtg

SEQ ID NO: 5037 - DNA, 74 bp, Homo sapiens; identical to SEQ ID NO: 3958

SEQ ID NO: 5038 - DNA, 468 bp, Homo sapiens; identical to SEQ ID NO: 3961

SEQ ID NO: 5039 - DNA, 336 bp, Homo sapiens; identical to SEQ ID NO: 3963

SEQ ID NO: 5040 - DNA, 459 bp, Homo sapiens; identical to SEQ ID NO: 3967

SEQ ID NO: 5041 - DNA, 399 bp, Homo sapiens
tgttccggattgagggcctcgcgccgaagctggacccggaggagatgaaacggaagatgcgcgaggatgtgatctcctccatacggaactttctcatctacgtggccctcctgcgagtcagtgagtgtctcccgggctgtgactgtgagaccagcggggagctcaccgacgggcaccccttaactctaaggggtcatcggggccttcgaactgagctgaacggtagcgggtagcaaggaggctccatttatcttaaagaaattggacagcatatgaagacaggacatcacatatgaatgcacgatatgaagagcctggttacagtttcgactcctctctgcaagtgaataggcccagaaaggtgtaagagactctttgaatggacataaaattctgctt

SEQ ID NO: 5042 - DNA, 344 bp, Homo sapiens
gcactcaagtgaggagacaggccgtgcctttcaagtgcatgcagctcactgatttcatcctcaagtttccgcacagtgcccaccagaagtatgtccgacaagcctggcagaaggcagacatcaatacaaaatgggcagccacacgatgggccaagaagattgaagccagagaaaggaaagccaagatgacagattttgatcgttttaaagttatgaaggcaaagaaaatgaggaacagaataatcaagaatgaagttaagaagcttcaaaaggcagctctcctgaaagcttctcccaaaaaagcacctggtactaagggtactgctgctgctgctgctgctgct

SEQ ID NO: 5043 - DNA, 444 bp, Homo sapiens; identical to SEQ ID NO: 3969

SEQ ID NO: 5044 - DNA, 190 bp, Homo sapiens
gggtgggaagccagagccgcctgccatgccccagccagtccccacagcataacagggtctccttggcagctgtattctggagtctggatgttgctctctaaagacctttaataaaattttgtacaaaaaaaaaaaaaaaaaaaaaaaaggttttttttttttccccccaattttaaaaaatttccccccc

SEQ ID NO: 5045 - DNA, 456 bp, Homo sapiens; identical to SEQ ID NO: 3971

SEQ ID NO: 5046 - DNA, 439 bp, Homo sapiens; identical to SEQ ID NO: 3975

SEQ ID NO: 5047 - DNA, 546 bp, Homo sapiens
cggggcgaagtctgtgtctcacgagaagcagcgttccagggactccgttcccgccacccgttcagcaaccctctacacctggacccgacctcctcgccttggaggaagaatataagtaagaaattcggcggttgaacttttccttctttctttcatctgaatgaggctgcttacaagtacttttttctggagactggctggatcttcgggaccactcactctgcagcattcccttctcgtcatctcgttcacctgccgtttatcctttctttgtctttgatctgagtagttcgcctgcgtattagaagatatttgaagtgggcgaaaatttagcccaagcgtttaaatgcagaattgcaggcaaaaacagctgacgtggttcaacaagctaaggaaataataagagatcggcaagaagtacgatctaggcctgtttcaacacaaatgaaatcatgtgatgacgaagatgattacagtttaagcacactcttgattacccttgttgtaactgtggagttgtggagtaagctggttttagacctcaag

SEQ ID NO: 5048 - DNA, 512 bp, Homo sapiens
ctccatgctaaactttccacgtcttctatctaaaaggtccccaaaggcaccactatttggtgtgaagattttgagcagcacttagattgctgattttctgggaggttgcatgcctgtaagttgctgctgactctccttttaacccactgaactcccccaagagcctccacgccaaagtttcaccgttttctaaaaacatcttaagtccctgtagaattacgggtgtggaactggtgggctgcaaattcctataagtactggaggtttgaataagttgctaagaaacaagacaacaaggagaaagaaaacacagaaggttacacctgcaagagaaaaaaaaatattagaaaccaagtacctggaataaagattccatttttggagcagctattctgcagatacttagcacagctcttttaaagcaagcacagcttcactttcccccaagcccagtgttgcaacacagatacatcacttcatccctttggtttgaggtagacttcttagggcaa

SEQ ID NO: 5049 - DNA, 689 bp, Homo sapiens; identical to SEQ ID NO: 1018

SEQ ID NO: 5050 - DNA, 559 bp, Homo sapiens
gtggatactacattaccacccgggcccagtttgaaacacttcagcagcttgtacaacattactcagagagagctgcaggtctctgctgccgcctagtagttccctgtcacaaagggatgccaaggcttaccgatctgtctgtcaaaaccaaagatgtctgggaaatccctcgagaatccctgcagttgatcaagagactgggaaatgggcagtttggggaagtatggatgggtacctggaatggaaacacaaaagtagccataaagactcttaaaccaggcacaatgtcccccgaatcattccttgaggaagcgcagatcatgaagaagctgaagcacgacaagctggtccagctctatgcagtggtgtctgaggagcccatctacatcgtcaccgagtatatgaacaaaggaagtttactggatttcttaaaagacggagaacgaagagctctgaaattaccaaatcttgtggacatggcagcacaggtggctgcaggaatggcttacatcgagcgcatgaattatatccatagagatctgcgatcagccaacattct

SEQ ID NO: 5051 - DNA, 625 bp, Homo sapiens
ctcgtgggcctcctcagcccacacaacgcggccctggccgctgccgccctcgattatagatgcccagttcatttttactgggtgcgtggtgaagaaattattcctcgtggtcatcgaagaggtcgaattgatgacttgcgataccagatagatgataaaccaaacaaccagattcgaatatccaagcaactcgcagagtttgtgccattggattattctgttcctatagaaatccccactataaaatgtaaaccagacagacttccattattcaaacggcagtatgaaaaccacatatttgttggctcaaaaactgcagatccttgctgttacggtcacacccagtttcatctgttacctgacaaattaagaagggaaaggcttttgagacaaaactgtgctgatcagatagaagttgtttttagagctaatgctattgcaagcctttttgcttggactggagcacaagctatgtatcaaggattctggagtgaagcagatgttactcgaccttttgtctcccaggctgtgatcacagatggaaaatacttttcctttttctgctaccagctaaatactttggcactgactacacaagctgatcaaaataaccctcgtaaaaata

SEQ ID NO: 5052 - DNA, 452 bp, Homo sapiens; identical to SEQ ID NO: 3979

SEQ ID NO: 5053 - DNA, 131 bp, Homo sapiens; identical to SEQ ID NO: 3981

SEQ ID NO: 5054 - DNA, 453 bp, Homo sapiens; identical to SEQ ID NO: 3982

SEQ ID NO: 5055 - DNA, 434 bp, Homo sapiens
atcattaatttttctttttttcaaggttcattttcaacaattaaagggctcagcaagcatatcctttttggggctgggcgcggtgactcacacctgtaatcccagcactttgggaggccgaggtgggtggatcacttgaggtcaggagtatgagaccagcctggccaacatggcgaaacctcgtctctactaaaaatacaaaaatgagctgggtgtgatagcgcacctgtaatgccagctactcaggaggctgaggtaggagaatcacttgaacctgggaggcggaggttgcagggagccgagatcgtgccactgcactccattcagcctgggcaacaaaaggagactctgtctcaaaaaaaacaacaaaggccaggcgtggtggctcattcctgtaatcccagcactttgggaggctgaggcaggtgaatcac

SEQ ID NO: 5056 - DNA, 492 bp, Homo sapiens; identical to SEQ ID NO: 3983

SEQ ID NO: 5057 - DNA, 358 bp, Homo sapiens
gtgcagtggtgcgatctcagctcactgcatcctctgcctcccgggttcaagcaattctctgcctcagcctcccaagtagttgggattacaggcacctgccaccatgcctggctaattttttgtatttttagtagagacgggggtttcactatgttggctaggctggtcttgaactcctgacctcgtgatccacccgccttggcctcccaaagtgctgggattacgggcatgagccaccgcacctggccttccctgcttcctctctagaatccaattagggatgtttgttactactcatattgattaaaacagttaacaaactttttttctttttaaaatgtgagatcagtgaactctg

SEQ ID NO: 5058 - DNA, 496 bp, Homo sapiens
gagaacagccacccctctctcgggcactgctgccatgaatgccttcctgctcttcgcactgtgcctccttggggcctgggccgccttggcaggaggggtcaccgtgcaggatggaaatttctccttttctctggagtcagtgaagaagctcaaagacctccaggagccccaggagcccagggttgggaaactcaggaactttgcacccatccctggtgaacctgtggttcccatcctctgtagcaacccgaactttccagaagaactcaagcctctctgcaaggagcccaatgcccaggagatacttcagaggctggaggaaatcgctgaggacccgggcacatgtgaaatctgtgcctacgctgcctgtaccggatgctaggggggcttgcccactgcctgcctcccctccgcagcagggaagctcttttctcctgcagaaagggccacccatgatactccactcccagcagctcaacctaccctggtccagtcg

SEQ ID NO: 5059 - DNA, 305 bp, Homo sapiens; identical to SEQ ID NO: 3984

SEQ ID NO: 5060 - DNA, 280 bp, Homo sapiens
cgcattctagctgggaaccggcatttttcttggaaaccaataattatctgttataacaaacccacagccaatataatactgaatgggcaaaactggttgattccttttgtaaactggcacaagacaaggatgccctctcttaccactcctattcaacatagttttagaagttcaggccagggcaatcaggcaagataaaaacataaagcgtattcaaataggaagagaggaagtcaaattgtccctgtttgcagatgacatgattgtatatttagaaatc

SEQ ID NO: 5061 - DNA, 325 bp, Homo sapiens
ccaatcccatgggcccacagaggctcttagaaaaacacagcatggcggccgggcatggtggctcatgcctgtaatcccagcattttgggaggccgaggcgggtggatcacgaggtcaggagatggagaccatcctggctaacacggtgaaaccccgtctctactaaaaatacaaaaattagccaggcatggtggtgggcacctgtagtcccagctaattgggaggctgaggcaggaaatggcgtgaaccctggaggcggagcttgcagtgagctgagatggcgccactgtactccagcctgggcgacagggcaagactccatctc

SEQ ID NO: 5062 - DNA, 307 bp, Homo sapiens
attggctagatgatttttaaaattcatttggaaacacaaatgtcaaaaaaataaacaaaataatcttgaaaagaggccgggtgcggtggctgatgcctgtaatcccagcacttcgggaggctgaggcaggtgaatcacctgaggtcaggagttcaagaccagcctggccaacatggtgaaaccccatctctactaaaaacacaaaaattagccgggcgtggtggccggcacctgtaatccagctacttgggaggctgaggcaggagaattgcttgaaccctggaggcagaggttgcagtgagccaaa

SEQ ID NO: 5063 - DNA, 114 bp, Homo sapiens
gcgagaagaccgatcagatagggcggggaggtaatagatgagcagctatacagtgactaggaatagaggactagtgtgaaagatcctgataaggaaaagagtgctgaactttac

SEQ ID NO: 5064 - DNA, 84 bp, Homo sapiens
aaggggcagagagtaaaaaacatgacctggtagaaggaagagaggctaaggaaactgggtggggaggatcaattagagaggagg

SEQ ID NO: 5065 - DNA, 379 bp, Homo sapiens
ttactgaccactgcatggcaggctctatgctgagcactgtgaatacagaagtgcatcttgatatggggattccaactgcatggagctcacaccgtccaacccagattgacgtacataataggtccttgactaaaaaaatctcagaggctgccaggcctagtggctcacacctataatcccagcactttgggaggccgaggcaggcagatcacctgaggtcgggagttcaagaccagtctgaccaacatggagaaacctcatctctactaaaaatacaaaattagctgggtgtggtggcgcatgcctgtaaccaagctactcgggaggctgaggcaggagaattgcttgaacgcaggagaatcgcttgaacccaggaggc

SEQ ID NO: 5066 - DNA, 96 bp, Homo sapiens
ggaagaagaacgacaggagagagaagaggaacaacgtctcaaacggcttgaagaattagaagccaagcgtaaagaagaggatcgattggagcagag

SEQ ID NO: 5067 - DNA, 206 bp, Homo sapiens
gcggggcccgaagcgtttactttgaaaaaattagagtgttcaaagcaggcccgagccgcctggataccgcagctaggaataatggaataggaccgcggttctattttgttggttttcggaactgaggccatgattaagagggacggccgggggcattcgtattgcgccgctagaggtgaaattcttggaccggcgcaagacggacc

SEQ ID NO: 5068 - DNA, 319 bp, Homo sapiens
atggagtctcactctattgcccaagctggactgcagtggcacgatcttggctcaccacaacctctgcctcccaggttcaagcaattctcttgcctcaacctcccgagttgctgggactacaggcatgcgccaccatgctgggctaattcttgtattcttagcagagacggggtttcactatcttggacaggctggtctctaactcctgaccttgtgatccacctgcctcatcctcccaaattactgggattacaggcgtgagccaccgcgctcggcctgacttcaaattttttaagctcactgaaagcataatataaac

SEQ ID NO: 5069 - DNA, 148 bp, Homo sapiens
ctgaactgacaattaacagcccaatatgtacaatcaaccaacaagtcattattaccctcactgtcgacccatcacaggcatgctcataaagaaaggttaaaaaaagtaaaaggaactcggcaaatcttaccccgcctgtttaccaaaa

SEQ ID NO: 5070 - DNA, 132 bp, Homo sapiens
gctaatgaatactaagctctgttcatgcaaactcagcctttgtgctcgaatgctcatcttaggatgggcatctgctcacaccctaaaaagtaggctgaagccgggcacagtggcttacacctgtaataccag

SEQ ID NO: 5071 - DNA, 139 bp, Homo sapiens
ttccctagtagctgggattacaggctcccaccaccatgccaggctaatatattttttttttggaaacaaaattttgttttgtcaaccaagttggggtgcggaggcataacctcagttcactgaaacctccttatcccgg

SEQ ID NO: 5072 - DNA, 171 bp, Homo sapiens
aaataaacgtctttatcgacgatcccttctttatagagcgatgtgtatttatttgtataacacaaacacctacatctatcatacagaagtctatttccatacaaccgatacgtatttaccatacgcaagagtattcaatgcagagatacacgttgtcggtgtttgcatata

SEQ ID NO: 5073 - DNA, 437 bp, Homo sapiens; identical to SEQ ID NO: 3990

SEQ ID NO: 5074 - DNA, 132 bp, Homo sapiens
acagaagggggagataaggcaaagaggcactttgtggatttctccatactgagcagctctgtgattcattatctgttctagagagcagcacacgcagttccagcaaaaaaaaaaaaaaaaaaaaggtttttt

SEQ ID NO: 5075 - DNA, 245 bp, Homo sapiens
tctcttcttcagatttgcagtctggggaagacacagcctctactgtactttagaacctgagatatggtggtggagggagccctgggtcgagtggtaagattcacccttaggttagtattgacgtaaggtgacgaggagctgtagacaaaagattgtaaccataagaacttcatagtttttgcattttcaccgagcttatatttggtgtgttttttgtcttttctttatgattatcaataaaatgc

SEQ ID NO: 5076 - DNA, 491 bp, Homo sapiens; identical to SEQ ID NO: 3993

SEQ ID NO: 5077 - DNA, 361 bp, Homo sapiens
gagttcacggatacctcttatgaggagaaacggtacacgtgcggggaagctcctgactatgatcgaagccaatggctggatgtgaaattcaagctagacctggactttcccaatctgccctacctcctggatgggaagaacaagatcacccagagcaatgccatcttgcgctacatcgctcgcaagcacaacatgtgtggtgagactgaagaagaaaagattcgagtggacatcatagagaaccaagtaatggatttccgcacacaactgataaggctctgttacagctctgaccacgaaaaactgaagcctcagtacttggaagagctacctggacaactgaaacaattctccatgtttc

SEQ ID NO: 5078 - DNA, 508 bp, Homo sapiens
acagaagggattctgtatttgtctcccatgtcttgctcctctcctggagaattctgtcttctctttggccatctcaaattgagaacctaaactattcctgcagaactgcctggttggcgtccacaagtaatacctctcgttccagcaggaccaagggagccagcctccagtgagtgactccagcaagtgcagccacctctcccttgatggtctgggagcctggcctcagcaaggggccttcctgacctctggctccagtgaagctgaatgtcctcactttgtgggtcacactctttacatttctgtaaggcaatcttggcacacgtggggcttaccagtggcccaggtaattttttgtttcatggactatggactctttcaaagggatctgatccttttgaattttgcacagccctagatacaatcccttttgataaaagggtctttgcttctgattacaggagcactgtggaacgtctgtaaatatgtttttataattccatgtata

SEQ ID NO: 5079 - DNA, 324 bp, Homo sapiens
atcgaggcactcgctggcgtacccatgtatcgaaatgagttcacggcctggtaccggcggatgtcggtggtctacgggatcggcacctggtctgtgttgggctcactgctttactatagccggacaatggcgaagtcgtcagaccaaaaggatggctcagcaagtgaagtacccagtgaactctctgaacgcccaaaaggattttatgtggaaacagttgtcacatataaagaagattttgttccaaatacagaaaagatcctcaactattggaaatcatggactggtggccctggtacagaaccatgactggctgctgaattc

SEQ ID NO: 5080 - DNA, 364 bp, Homo sapiens
gcacttccagatcgagaagctcttgaacaaacctcgactgaaatataaaccagtgactaaccaggttgagtgtcacccatacctcacgcaggagaaactgatccagtactgccactccaagggcatcaccgttacggcctacagccccctgggctctccggatagaccttgggccaagccagaagacccttccctgctggaggatcccaagattaaggagattgctgcaaagcacaaaaaaaccgcagcccaggttctgatccgtttccatatccagaggaatgtgattgtcatccccaagtctgtgacaccagcacgcattgttgagaacattcaggtctttgactttaaattgagtgatgaa

SEQ ID NO: 5081 - DNA, 139 bp, Homo sapiens
cccggggccggaccccgagggctcgatccgcatctgcagcatgaggttctgcccatttgctgagaggacgcgtctagtcctgaaggccaagggaatcatgcatgaagccatcaatatcaacctgaaaaataggcctgag

SEQ ID NO: 5082 - DNA, 319 bp, Homo sapiens; identical to SEQ ID NO: 3998

SEQ ID NO: 5083 - DNA, 338 bp, Homo sapiens
atacatcattcattcaagggctaaatttatattttttggaaatcatggcaactacacaggatgttgcttaccaggacggagttttggtatcttagtactgaagttagcactatgtttacatgcaaaagattaaggaaaaaacccttaaagtggacaggtatccaaagttcattttctgtgactcatcaaagtgacaaaagacttgtaacaactttgcctggacttttttcattttacaacagttcatccattcacaatgattttgttctctgctccatattttttaatcccttaagcatttgatgaaacactctttagtgctatatgcattttcttac

SEQ ID NO: 5084 - DNA, 341 bp, Homo sapiens
gcacagtgccaggaaccttgcaaagacacggtgcaaatccatgatatcactgggaaagattgtcaagacattgccaataagggagctaaacagagcgggctttactttattaaacctctgaaagctaaccagcaattcttagtctactgtgaaatcgatgggtctggaaatggatggactgtgtttcagaagagacttgatggcagtgtagatttcaagaaaaactggattcaatataaagaaggatttggacatctgtctcctactggcacaacagaattttggctgggaaatgagaagattcatttgataagcacacagtctgccatcccatatgcatt

SEQ ID NO: 5085 - DNA, 346 bp, Homo sapiens
  misc_feature 293, 346: n = A,T,C or G
gccccactgagcggtgtcctgagccgattacagctaggtagtggagcgccgctgcttacctgggtgcaggagacagccggagtcgctgggggagctccgcgccgccggacgcccgtgaccatgtggagattcctgggcactcctccccgccagtgctggcgtaaagacactgctcccagtaccaagttttgaagatgtttccattcctgaaaaacccaagcttagatttattgaaagggcaccacttgtgccaaaagtaagaagagaacctaaaaatttaagtgacatacggngaccttccactgaagctacggagtttacagaaagcaattttgcaatcttgggn

SEQ ID NO: 5086 - DNA, 397 bp, Homo sapiens
ggggggatggtatctgaaacaacaatggtcaccctcttgagattcgttttaagtgtaattccataatgagcagaggtgtacgcgaaattgtgttatgactgatagccttcagctacaaaaagataggactgacctggtttaaagtgttctattttgtaaatcattccatttgagtctttctgatgaacttggctatactgaaatctgttattttagtgaggctccaaaatgagcaaagctaggcctgattagagtagagtgactattaaaaaacataactttctaggagctataaatcaaagttttaaaaagatgtttggatatatttgagtattccgatcatgaaaacagaaattgccctgcctactacaaggacagactgatgggaaattatgca

SEQ ID NO: 5087 - DNA, 327 bp, Homo sapiens; identical to SEQ ID NO: 4001

SEQ ID NO: 5088 - DNA, 341 bp, Homo sapiens
ggcggcgacgacccattcgaacgtctgccctatcaactttcgatggtagtcgccgtgcctaccatggtgaccacgggtgacggggaatcagggttcgattccggagagggagcctgagaaacggctaccacatccaaggaaggcagcaggcgcgcagattacccactcccgacccggggaggtagtgacgaaaaaaagcgcgcaaaattaacccaatcacgagccggcgtttttttgtcgaaatccaacttggaaaaaatcctttggggggttggccccccccccgcttgaaggggggggaaaaaacgctttttttgggaaaattggacccgcttttgttt

SEQ ID NO: 5089 - DNA, 58 bp, Homo sapiens
ctctgctcaaaatttctctttcagagacagaacctcgcctgtttgctcacaaacccac

SEQ ID NO: 5090 - DNA, 66 bp, Homo sapiens
gatatagtctcatttttaattgtcctgtcatggaacagtagccaattcactaaacttttgtgttca

SEQ ID NO: 5091 - DNA, 337 bp, Homo sapiens
gaaaaaatccaacatatcccctaacttcaacttcatgggtcagctgctggacttcgagaggacgctgggactcagcagcccatgtgacaacagggttccagcacagcagctgtattttaccaccccttccaaccagaatgtataccaggtggactctctgcaatctacgtgaaagaccccacacccctccttgctggaatgtgtctggcccttcagcagtttctcttggcagcatcagctgggctgctttctttgtgtgtggccccaggtgtcaaaatgacaccagctgtctgtactaaacaaggttaccaagtgcggaattgggtaatactaaccg

SEQ ID NO: 5092 - DNA, 53 bp, Homo sapiens
aggggttacacagtcaccaaatgaatgtgcataaaccataaacagccctcttg

SEQ ID NO: 5093 - DNA, 347 bp, Homo sapiens
ccagcttaatctctcccactttagggtcccacaccgcccctaatccggcttgaagcggccctgagaaacatcgaccattctctcttcataccaccccccaaaaattttcgccaccccaagacttcaacactattttggattatttttcttattaatataagaaggcaggaatgtcaggcctctgagcccaagccaagccatcgcatcccctgtgacttgcacgtatacgcccagatggcctgaagtaactgaagatccacaaaagaagtaaaaatagccttaactgatgacattccaccattgtgatttgttcctgccccaccctaactaatcaatgtactttgtag

SEQ ID NO: 5094 - DNA, 496 bp, Homo sapiens
gggggctgaggtgatttggatatccctagaacgttgagggcacgagtcgggtcctgagaccaggtcctcagccagcagagccacgttccttatgagcaccgtgggtttatttcattttcctacaccactgacccgaatatgcccggcgccatggggactccggctttgggagaagctgacgttgttatccccaggaatagctgtcactccggtccagatggcaggcaagaaggactaccctgcactgctttccttggatgagaatgaactcgaagagcagtttgtgaaaggacacggtccagggggccaggcaaccaacaaaaccagcaactgcgtggtgctgaagcacatcccctcaggcattgttgtaaagtgccatcagacaagatcagttgatcagaacagaaagctagctcggaaaatcctacaagagaaagtagatgttttctacaatggtgaaaacagtcctgttcacaaagaaaaacgagaagcggcc

SEQ ID NO: 5095 - DNA, 345 bp, Homo sapiens
gggcccggggcgactgagcggacaaacggaagtgtaggttacggtctgagacatcaccgccaagctgggcatcggggagatggccgagactgaccccaagaccgtgcaggacctcacctcggtggtgcagacactcctgcagcagatgcaagataaatttcagaccatgtctgaccagatcattgggagaattgatgatatgagtagtcgcattgatgatctggaaaagaatatcgcggacctcatgacacaggctggggtggaagaactggaaagtgaaaacaagatacctgccacgcaaaagagttgaaggttgctaataatttatactggaatctggcattt

SEQ ID NO: 5096 - DNA, 402 bp, Homo sapiens; identical to SEQ ID NO: 4005

SEQ ID NO: 5097 - DNA, 336 bp, Homo sapiens
aaaatatatatatatacacacacacatatacatacaaagtcaaactgaagaccaaatcttagcaggtaaaagcaatattcttatacatttcataataaaattagctctatgtattttctactgcacctgagcaggcaggtcccagatttcttaaggctttgtttgaccatgtgtctagttacttgctgaaaagtgaatatattttccagcatgtcttgacaacctgtactcttccaatgtcatttatcagttgtaaaatatatcagattgtgtcctcttctgtacaattgacaaaaaaaaaatttttttttctcactctaaaagaggggggggtcg

SEQ ID NO: 5098 - DNA, 335 bp, Homo sapiens; identical to SEQ ID NO: 4009

SEQ ID NO: 5099 - DNA, 351 bp, Homo sapiens
acaggcacctgccagctgcacctggctaatttttatatttttaatagagacggggtttcaccatcttggtcaggctggtcttgaactcctgaccccgtgatccacctgcctcggcctcccaaagtgctgggattacaggtgtgagccaccggggctggccagtttttatatttttagtagagacagggtttcaccatgttggccaggctggtctcgaattcctgacctcaagtgatccacccaccttggcatcccaaagtgctgggattacaggtgtgagccattttgcccggctgatattagtaaattttacaaacatagtttcttcagagatgaccaggggaatacaga

SEQ ID NO: 5100 - DNA, 173 bp, Homo sapiens
aacttgaccaacggaacaagttaccctagggataacagcgcaatcctattctagagtccatatcaacaatagggtttacgacctcgatgttggatcaggacatcccgatggtgcagccgctattaaaggttcgtttgttcaacgattaaagtcctacgcgatctgagttcaga

SEQ ID NO: 5101 - DNA, 149 bp, Homo sapiens; identical to SEQ ID NO: 1785

SEQ ID NO: 5102 - DNA, 408 bp, Homo sapiens
ggatttggcgccctcctctgtggattctggccaggccgggttcggcggttgctgtgagagcgggcttcccaacaccatgccgtccgccttctctgtcagctctttccccgtcagcatcccagccgtactcacgcagacggactggactgagccctggctcatggggctggccaccttccacgcgctctgcgtgctcctcacctgcttgtcctcccgaagctacagactacagatcgggcactttctgtgtctagtcatcttagtctactgtgctgaatacatcaatgaggcggctgcgatgaactggagattattttcgaaataccagtatttcgactccagggggatgttcatttctatagtattttcagccccactgctggtgaatgccatgatcattgtggttat

SEQ ID NO: 5103 - DNA, 103 bp, Homo sapiens
gggtcaaaaagctccagcccagaaagcacctgctccaaaggcatctggcaagaaagcataagtggcaatcataaaaagtaataaaggttctttttgacctgtt

SEQ ID NO: 5104 - DNA, 367 bp, Homo sapiens; identical to SEQ ID NO: 4013

SEQ ID NO: 5105 - DNA, 430 bp, Homo sapiens
caacatacggttgggtgactcaaggacaacctggacgtcaccaatgcccagcttcacgggggcatgtagtgtgactcacggctgaacacaaaatcactgtgaagcctgtgctacagccctgggcgactttgggacacgcaagaggacactcggttacatgagacctgacttgctcgggctgtacccagaaggatgtccagtcgcggaggccaggagagaggtgggcaggcctgggtctggcagtggagacggtcctccagggagccgttgggcaggaagccgtacaccaggcagtagaagccgttctgagcacagtagccagaaaagtccacaatgtttgggtgaccaaacctggacagctgctccacctcggtccagaagctctgttcactgcagtccactccaagtcaacgttccccttcagcttttt

SEQ ID NO: 5106 - DNA, 803 bp, Homo sapiens
  misc_feature 611: n = A,T,C or G
gcaattggtttgagaaggtttaataatttggggtcagcagaaaagaatgttaggtccagctcatgggtgtgactttctccacgccccgcgggaagaaatttagaacaaaagatggtggtcagagttcaggtcccagatctcacttatctgaggtctacgtgcaagtggatgtgcaagcagatctgtttggtgagggttcggtttcttccaaatttaatacaaaagccacatttggattttccgatgtcccaagtgtgtctaggcactgcggaacgtcgtcatgtctttgggttctctgctggggacgcaccagtcatcagcctcgtggttggtgttgtaatgcttccaggcagctttgttatacactgggagtctttctattgagtctgttgacagagccttaatgtagataactgcatctgtcccgtaaccctctagggaatacagcttcaggtctccttggaagtattgtgcgtaaagacgtgatatgggcaatccataaccaaaaccagccagaggcactgcgcgggaggtctcaacacgaggtcttggtgcagttgaatacatgtagttgaaaagtctgtcaattttcctcaaaggaacgccacctnctcggtcactcatcttcacagtcaaatcctcattacccagcgtgacatgaactttgattaggaggtaaacacctctgttggcattgtagttcatagtggctctcattgcattcttgaaaaagttaacaccatgtgatagaagatggaatgtacataaaccactagtaattgctgtactggtgattttgcatt

SEQ ID NO: 5107 - DNA, 500 bp, Homo sapiens
gagaacagacacaggctggggcagcaggggctgggggcggccacaatcactgctcagcttctccaaagacgtcgttctgtttgcgcttcatgttctcaaagtcaaaggccgtgcagccatgcgtttgtagatgtctttgatgtcgttgcaggttgtctcaaagtgtgtggtggcatcgtaggagcaggaacagaacacctggctctcacaaccatcatcaatgggctcatacaagtcactgatagccacaaacttctggtcaatgggctccaacagctccagagccggctccacctccttttcagggtccgtggtctccacagtagtgctggcaatagctatgtacttgccctgggccgccacgttgtgtgcataggagatcatgcacacgtagatgtctgacttcctgttgacctggttctgggggatgattatttggcaggagttggcgtcgttggtgttcttgatggggtggctaaggatacagatgatgcggataa

SEQ ID NO: 5108 - DNA, 556 bp, Homo sapiens
gtttttgaatttggattcttttaatagcctcataataagtgccatacagggtttttattcacaggcttgaatgacaaagaaattctgacaagtttaatacccatctgtgatttaagtctggcaaaatacaggtcattgaaacagacattttaactgagttttataaaactatacaaatcttccaagtgatcataaatcagtttctcactacaggtactttaaagcaactctgaaaaagtcacacaattacacttttaagattacagtgtttaatgtttatcaggatacatttctacagctagcaggataacagatgagttaaggggcctcagactacatccaagggaatgtttattgggcgatcccaattacaccacaagccaaacgacttccagcgtttcctgtctttgtactttcttcatttccacctttgcccaagtcatctgctttttcatggaccacagtgtgcggccaatgatgcaatggtctcctgagagtgagatcacagaatcttcaatagacacacgggccacaccatctttgtcagcagtcacat

SEQ ID NO: 5109 - DNA, 491 bp, Homo sapiens
tttagacatttttcctctagagtagcttttcaaggccttctcatgaacagccttaagttttattgtcaaaataaatgcacttattttgggaaacagtttgaagtaagtaataagcatttgccactgtacttacaacttctcttgaagttcgctttctatttaggtcactagcttttaaataaagccaaccctggttctgcgttacttactacattttacctatagtcattcccacaaaggatgcaatattatattagaaagaaatattactttaaatttgttgaaaaatagaaggaccaatttagagctctgacctaggttcagtcctggaaatgggtctttcataaattcagatccaattacttccacagttttattactgttcagtttattactaacctgacaagcctaattgggtaacatttcactccctcattgggttttatacaaaatgctgtaggagaaagttaattaaacactatattaagtat

SEQ ID NO: 5110 - DNA, 696 bp, Homo sapiens
atagagaagacagaaagctggaattctttttaatgtttaacttttctttgtaaaaaacttattaaaaaacttaaatggtcagttaaagttaaaaatctattgctgcacaatttaactgattaaaagatttccagatctcttgactccaagagtcatttctttcatttcttacagatctcacacttccagatttctctttagcaaacatgatctgaaatcatttgtaggtaatcagcacttcaagcttcattccactttgattctcatcagctcccatcttcctcctccacagagtttcagaaccaaggaatgaaacttctcaaggctctgccgatgtcccacactgatgaacgtcatccccagctgctggccgatgcgatagagctcgctctccacttcctctgtcagggcactggtggcttcatcaagcactgcgtacttcggctgcaggtagaagagtcgggcaaaggagagccgttgcatctcccccggggacagaacatcataccagttccagtccacctgcttgtccaaggccctctgttctttgccacaaattgggacagccctgccaattccaaagaacctcaagatcctctcatcatcggcagaaacctgagtcggggtagaccttctttcagggatatatcacctgcttcccgagggtccccgtcagtgaaaaaatggtttttgtgg

SEQ ID NO: 5111 - DNA, 688 bp, Homo sapiens
gaatttggccctcgaggccaagaattcggcacgaggctctgctgtccttagagattttcaacttaaatcaaaaccaagccctactgcctgataaaccgagaaaactggtgtacaatagagccatgccctgatgcagcatctcttctggcttccaagcagagcccagaatgtgagaacttcctggatgttggactgggcagagagtgtacctcaaaacaaggtgtacttaaaagagaatctgggagtgattctgacctctttcactcacccagtgatgacatggacagcatcatcttcccaaagccagaggaagagcatttggcctgtgatatcaccggatccagttcatccaccgatgacacggcttcactggaccgacattcttctcatggcagtgatgtgtctctctcccagattttaaagccaaacaggtcaagagatcggcaaagccttgatggattctacagccatgggatgggagctgagggtcgagaaagtgagagtgagcctgctgacccaggcgacgtggaggaggaggagatggacagtatcactgaagtgcctgcaaactgctctgtcctaaggagctccatgcgctctctttctcccttccggaggcacagctgggggcctgggaaaaatgcagccagcgatgcagaaatgaaccaccggagttcattgcgagttc

SEQ ID NO: 5112 - DNA, 501 bp, Homo sapiens
tttaattttagaagtgttttgggtctttattagaaatttggtagtgtttttgtaaccagaaatatatgccatagggacttaactcttatttatatcagttcacctatggtaaaattgatttcattatatgttgtttttcttaaacttgcagtttcccagaacctatcaacaacattgaggacttattgtattataaattatctttatatgaatataaagactttccctatttcaattgcgaatatacagatctgtgcactcaaaaataacaagcctattaggactcaaacagttatttgtatacccacgttcacagaagcattattcacaatagccaaaaagcagaagcaacccagtgtccattaatggatgaactgataaacaaaatacggtatttacatactacggcatatttggcctttaagaggaaagaaattctaatacatgctacaacatgaatgaactttgaagacattatggtaaatgaaataagaatgaatc

SEQ ID NO: 5113 - DNA, 890 bp, Homo sapiens
  misc_feature 507, 607, 663: n = A,T,C or G
gacgatgactctggagtccatgatggcgtgttgcctgagcgatgaggtgaaggagtccaagcggatcaacgccgagatcgagaagcagctgcggcgggacaagcgcgacgcccggcgcgagctcaagctgctgctgctcggcacgggcgagagcgggaagagcacgttcatcaagcagatgcgcatcatccacggcgccggctactcggaggaggacaagcgcggcttcaccaagctcgtctaccagaacatcttcaccgccatgcaggccatgatccgggccatggagacgctcaagatcctctacaagtacgagcagaacaaggccaatgcgctcctgatccgggaggtggacgtggagaaggtgaccaccttcgagcatcagtacgtcagtgccatcaagaccctgtgggaggacccgggcatccaggaatgctacgaccgcaggcgcgagtaccagctctccgactctgccaagtactacctgaccgacgttgaccgcatcgncaccttgggctacctgcccacccagcaggacgtgctgcgggtccgcgtgcccaccaccggcatcatcgagtaccctttcgacctggagaacatcatcttncggatggtggatgtggggggcccagcgtccgagcggaggaagtggatccactgctntgagaacgtgacatccatcatgtttctcgtcgccctcagcgaatacgaccaagtcctggtgggagtcgaccacgagaaccggatggaggagagccaagccctgtcccggacatcatcacctacccctgggtccagaactcttcgtcatccttcttcttacaaggaagacctgctggagacaagatactgacttgcactggtggctacttcccccagttgatggcccc

SEQ ID NO: 5114 - DNA, 711 bp, Homo sapiens
  misc_feature 657, 670, 678, 695: n = A,T,C or G
agatatttttcctataggtttctgctgtggagccgtactcactgcagaccctgaaggaggaggagcacctgctttctgccactcagtggcctcagctgccattcttctcacatatgcatcatccacacacatcaagatattttccggctttatgtcagtatgaatgatcttgcacttactgtgtaagtaatctaacccttgaaggacctgtcgaatgatactcttcacacaacgtactgggaggccttgatagttggatttgatgatccacttgaggagatggtggccaagtacttcgaagaccatgcagacatgtatcccattcatgcctgaaatcttgaagtcgtcaatgagctggaccaccatgtctttgtttgggtcactgggatcactttctcgaacacatttgagcaattttatttcatccaaggctgtctccgtataatgctgggcactttttacaactttcattgcaacaaatcttttcccctgcatatcccagcacagccagacagtagagaagtgcccccatccaagctttctaataacatgataccggccattgaagaggtctccaattttcactggatgatatccacctttgcagtagtccgcagggtcctcttgctcctcatcatctgatccccagatctcctnctctggctcccgnggtgtggngtcttggcaaagtggcngttgtggtggtggtgc

SEQ ID NO: 5115 - DNA, 497 bp, Homo sapiens; identical to SEQ ID NO: 4015

SEQ ID NO: 5116 - DNA, 294 bp, Homo sapiens
gcgacgctcatagtgcgctctcctcttcccccggggggatcctcgctcgccttctggctctgacatgccctgctctgaagagacacccgacatttcacccagtaagcgggcccggcctgcggaggtgggcggcatgcaactccactttgcccggctctcctagcacgccacggaccccacccggggctccgcgcgcgccgcgggctacgacctgtacagtgcctatgattacacaataccacctatggagaaagctgatgtgaaaacggacattcagatagcgctcccttctgg

SEQ ID NO: 5117 - DNA, 232 bp, Homo sapiens; identical to SEQ ID NO: 4016

SEQ ID NO: 5118 - DNA, 294 bp, Homo sapiens; identical to SEQ ID NO: 1029

SEQ ID NO: 5119 - DNA, 392 bp, Homo sapiens
atcaatgctgacttcctcgtcttagaaattgtactattggccaggcgcagtggctcacacctgtaatcctagcactttgggaggccgaggtgggcagatcacctgaggttgggagttcaagaccagcctgaccaacatggagaaaccctgtctctactaaaaatacaaaattagctgggcatggtggcgcatgcctgtaatcccagctactcaagaggctgaggcaggagaatcgcttgaacccgggaggcagaggttgcagtgagctgagatcgtgccactgcgttccagcctgggcataaagagtgaaacttcatgttataaaaaaaaagaaaagaaggaaagaattggtcctgttgtggccaggcccgggggctaatgcttataatcct

SEQ ID NO: 5120 - DNA, 298 bp, Homo sapiens
gctttcccgcgcgaccggcgagggaggaagaagcgcgaagagccgttagtcatgccggtgtggtggcggcggcggagactgcgggcccgtagctgggctctgcgaggtgcaagaaagcctttgaggtgaaggtgtatgaaagtcatcataacagatgttttccaaaaacttgtagaaggttgtgaaaaaactactaggatcacgcggcatgtattgagcatataggttgctgtagatgaatgttcttagctgtcatgtttaaaaatacttctgcttcgttacctcaagtgtggcatgc

SEQ ID NO: 5121 - DNA, 486 bp, Homo sapiens
attattcctaaaaaggccattagtaaagcagcgggccaatggtagttcttactaggagctctgtttctcctctcatcctcccctcgtctccctcataaattaacattagaattattgctttgtagtttgattatatctttatatcctgatgactgtctaattccactgaaacaaaattgcaaattattcctcccttgacattttgtctccaaaataagtaaatacacaattattataaaagttataaagtaatcaatacaaaataaggaagaaacaaataatctctttattttccctaggccactgagaaaatcccaggcccagcagatggttctggcctgactctgtttcttacatttcatctggtcttaaatagttattgaatagtcttaagatcagtttttctatctataaactggtgaaacaaaatgtgtttttcaccttcagggtatttttttgagtgttaaaaacttatggaaacattct

SEQ ID NO: 5122 - DNA, 328 bp, Homo sapiens
cggaggcggtagtgacggtggtgtttccttgaggaagagtgagggttccaacttttctgcttatctgggaggtgttgggcgcggacagtcgagatgtcagagaaaaagcagccggtagacttaggtctgttagaggaagacgacgagtttgaagagttccctgccgaagactgggctggcttagatgaagatgaagatgcacatgtctgggaggataattgggatgatgacaatgtagaggatgacttctctaatcagttacgagctgaactagagaaacatggttataagatggagacttcatagcatccagaagaagtgttgaagt

SEQ ID NO: 5123 - DNA, 491 bp, Homo sapiens
ggttgttctctggagcagcgttcttttatctccgtccgccttctctcctacctaagtgcgtgccgccacccgatggaagattcgatggacatggacatgagccccctgaggccccagaactatcttttcggttgtgaactaaaggccgacaaagattatcactttaaggtggataatgatgaaaatgagcaccagttatctttaagaacggtcagtttaggggctggtgcaaaggatgagttgcacattgttgaagcagaggcaatgaattacgaaggcagtccaattaaagtaacactggcaactttgaaaatgtctgtacagccaacggtttcccttgggggctttgaaataacaccaccagtggtcttaaggttgaagtgtggttcagggccagtgcatattagtggacagcacttagtagctgtggaggaagatgcagagtcagaagatgaagaggaggaggatgtgaaactcttaagtatatctgg

SEQ ID NO: 5124 - DNA, 267 bp, Homo sapiens
agaaattactcggaaggcttccactagggtccaccaggagttctgcgaccccctgaccagtttccagggggggggcaccacgacgccctcgaggttgctctggagatcccatcgataagctcgcttgttcttttggccgaagcggccaataaaccgctcaactttggcagatagaattctgcagatatccatcacactggcgggcgctatgtacgttgatccagacatgataagatgcattgatgagtttggacaaaccacaactag

SEQ ID NO: 5125 - DNA, 523 bp, Homo sapiens; identical to SEQ ID NO: 4019

SEQ ID NO: 5126 - DNA, 511 bp, Homo sapiens
gcgcgcagcctgcgcatgcgcgccggcgaccacgcctaaatagccgcagcctctgcgcgtcgccctccacggttaccccggctctccgcccctccttctcgcggcgctcgagggaccatggccgatcctcgcgtgagacagatcaagatcaagaccggcgtggtgaagcggttggtcaaagaaaaagtgatgtatgaaaaagaggcaaaacaacaagaagaaaagattgaaaaaatgagagctgaagacggtgaaaattatgacattaaaaagcaggcagagatcctacaagaatccaggatgatgatcccagattgccagcgcaggttggaagccgcatatttggatcttcaacggatactagaaaatgaaaaagacttggaagaagctgaggaatataaagaagcacgtttagtactggattcagtgaagttagaagcctgaaacttttctcgtatggggtggtttttgcattaaatcctggggtccattttacaatccattatttttg

SEQ ID NO: 5127 - DNA, 398 bp, Homo sapiens; identical to SEQ ID NO: 4022

SEQ ID NO: 5128 - DNA, 65 bp, Homo sapiens
agatctccctgacttgcaggaacagggtccagatcatggctctctatgctgacctcagtggaaaa

SEQ ID NO: 5129 - DNA, 346 bp, Homo sapiens
gcctgcccaccatggaaggacccccaaccttcaacccgactgtgccatatttcgggaggctgcaaggatggctcacagctcgaagaaccatcatcatcaagggctatgtgcctcccacaggcaagagctttgctatcaactacaaggtgggctcctcaggggacatagctctgcacattaatccccgcatgggcaacggtaccgtggtccggaacagccttctgaatggctcgtggggatccgaggagaagaagatcacccacaacccatttggtcccggacagttctttgatctgtccattcgctgtggcttggatcgcttcaaggtttacgccaatggccagca

SEQ ID NO: 5130 - DNA, 270 bp, Homo sapiens
gggttggcattaaattgatataaagacaccctggcctggaagttaaaagttttttttctttcttttttgagacagagtcttcctctatcgcccaggctgaaatgcagtggcatgatcttggctcactgcaacctccacctcctgggttcaagcagttcttgtgcctcagcctcccgagtagctgggactacaggcatgcgccaccatgcccgactgatttttatatttttagtagagacggagtttcaccatgttggccaggctggtctt

SEQ ID NO: 5131 - DNA, 500 bp, Homo sapiens
cttttcgaggtaggagtcgactcctgtgaggtatggtgctgggtgcagatgcagtgtggctctggatagcaccttatggacagttgtgtccccaaggaaggatgagaatagctactgaagtcctaaagagcaagcctaactcaagccattggcacacaggcattagacagaaagctggaagttgaaatggtggagtccaacttgcctggaccagcttaatggttctgctcctggtaacgtttttatccatggatgacttgcttgggtatggagagtcggcttgactacactgtgtggagcaagttttaaagaagcaaaggactcagaattcatgattgaagaaatgcaggcagacctgttatcctaaactagggtttttaatgaccacaacaagcaagcatgcagcttactgcttgaaagggtcttgcctcacccaagctagagtgcagtggcctttgaagcttactacagcctcaaacttctgggctcaagtgatcctc

SEQ ID NO: 5132 - DNA, 170 bp, Homo sapiens
gggcaggagaaagaagagagcaaaaaggataggaaagaggacaaggagaaagataaagataaggaaaagagtgatgtaaagaaagaggagaaaaaggagaaaaagtaaaacatgtattaaatagcttttttaatttgtaaattaaaatcttacaaactaaaaaaaaaagg

SEQ ID NO: 5133 - DNA, 159 bp, Homo sapiens; identical to SEQ ID NO: 1848

SEQ ID NO: 5134 - DNA, 611 bp, Homo sapiens
ctgatcgaccgctttgtgaagggaaggggccagctagacaaagacaccctagacaccctgaccgccttctaccctgggtacctgtgctccctcagccccgaggagctgagctccgtgccccccagcagcatctgggcggtcaggccccaggacctggacacgtgtgacccaaggcagctggacgtcctctatcccaaggcccgccttgctttccagaacatgaacgggtccgaatacttcgtgaagatccagtccttcctgggtggggcccccacggaggatttgaaggcgctcagtcagcagaatgtgagcatggacttggccacgttcatgaagctgcggacggatgcggtgctgccgttgactgtggctgaggtgcagaaacttctgggaccccacgtggagggcctgaaggcggaggagcggcaccgcccggtgcgggactggatcctacggcagcggcaggacgacctggacacgctggggctggggctacagggcggcatccccaacggctacctggtcctagacctcagcgtgcaagaggccctctcggggacgccctgcctcctaggacctggacctgttctcaccgtcctggcactgctcct

SEQ ID NO: 5135 - DNA, 109 bp, Homo sapiens; identical to SEQ ID NO: 4027

SEQ ID NO: 5136 - DNA, 441 bp, Homo sapiens; identical to SEQ ID NO: 4031

SEQ ID NO: 5137 - DNA, 508 bp, Homo sapiens; identical to SEQ ID NO: 4033

SEQ ID NO: 5138 - DNA, 518 bp, Homo sapiens; identical to SEQ ID NO: 4034

SEQ ID NO: 5139 - DNA, 337 bp, Homo sapiens
ggggctgaggagccgccgcgtcccctcgccgagtcccctcgccagattccctccgtcgccgccaagatgatgtgcggggcgccctccgccacgcagccggccaccggcgagacccagcacatcgccgaccaggtgaggtcccagcttgaagagaaagaaaacaagaagttccctgtgtttaaggccgtgtcattcaagagccaggtggtcgcggggacaaactacttcatcaaggtgcacgtcggcgacgaggacttcgtacacctgcgagtgttccaatctctccctcatgaaaacgagcccttgaccttatctaactaccagaccaacggaggcg

SEQ ID NO: 5140 - DNA, 479 bp, Homo sapiens
aaaaatccaagttcatttgggatcttgtttacttatcatctagataaaaagtttgcaaactatagccaaagggcccaatcccacctgccacctgattttataaataaagttttactggagcataactgcacctatttgttttgttttgttttttgagtcggagtctcgctgtgttgcccaggctggagtgcagtggcacgatctcagctcactgcaagctccgcctcttgggttcacaccattctcctgcctcagcctcccgagtaggtgggactacaggcgcccgccaccacgcccggctaattttttgtatttttagtagaaatggggtttcaccgtgttagccaggatggtcttgatctcctgacctcgtgatccacccgcctcggcctcccaaagtgctgggattacaggtgtgagccaccatgcctggcccacctatgtgtttacatatgatctatggccactctttcactaca

SEQ ID NO: 5141 - DNA, 505 bp, Homo sapiens; identical to SEQ ID NO: 4035

SEQ ID NO: 5142 - DNA, 377 bp, Homo sapiens; identical to SEQ ID NO: 4037

SEQ ID NO: 5143 - DNA, 479 bp, Homo sapiens
aggtgagtggatcacttgaggtcaggagttcgagaccagcctgaccaacatggtgaaaccccgtctctactaatattacaaaaatcagccaggcatggtgttgtgcgcctgtaatcccagctattcgggaggctgaggcaggagaattacttgcacctgggaggcggaggctgcagtaagccaagatcgcgccactgcaccccagcctgggtgacaagagcaaaactctgtctcaaaacaaagaaaaaagagaaggaaagaattagaaaatcaccatgttgcaaaagccagcaaaatcattgatgcatacagcgatcatctataggtgctaaaaaaagtagatgaggccgggtgcggtggctcatgcctgtaatcccagcactttgggaggccgaggcgggcagatcacctaagatcaggagttcgagaccagcctggctaacatggtgaaaccccatctctactaaaaatacaaaaat

SEQ ID NO: 5144 - DNA, 507 bp, Homo sapiens; identical to SEQ ID NO: 4041

SEQ ID NO: 5145 - DNA, 353 bp, Homo sapiens
tgccttcatttacgagaagcggggtggtacatactgggccctgctgaggactctgctagcgctggcagatttctccacagccatcgctgccctcaaactttggaatgaagatttccgatatggctactcttattacaacagtgcctgccgcatctacagctcgagtgactggaacactccagcccccactcagagtccagaagaagtcagaaggctacacctatgtacctccttcatggacatgctgaaggccttgttcaaaacccttcaggccatgctcttgggtgtctggattctgctgcttctggcatatctggcccctctgtggctgtactgctggagaatgttcccaa

SEQ ID NO: 5146 - DNA, 387 bp, Homo sapiens
ttagaaggagatctgtattctatccaaagctaatcttataaagagactgtctaaaaagtgtggcttcttatttatgctctctgacttatccaactaagaaataaaaagtggctgggcgtggtggctcacgcctgtaatccctgcactttgggaggccgaggcaggcagatcacgaggtcaggagatcgagaccatcctggctaacacggtgaaaccccgtctctactgaaaacacacaaaaaactagccgggcgtggtggcgggcgcctgtagtcccagctattggggaggctgaggcaggagaatggcgtgaacccgggaggcggagcttgcagtgagccgagattgcgccactgcactccagcctgggcgacagagtgagactcc

SEQ ID NO: 5147 - DNA, 271 bp, Homo sapiens
aaattagctgggcgtggtggcgggcatctgtagtcccagctactcaggaggctgaggcaggagaatggcgtgaactcgggaggcggagcttgcagtgagccgagattgtgccactgcactccagcctgggtgacagagcaagactctgtctcaaaaaaaaaaaaaaaaaaaaaaaaaaggggggcgtttttttctgaaaccccgacggggaaaaaacctttgggggggtgggacccccccacttaaaggggggggaaaaaaaggttttttg

SEQ ID NO: 5148 - DNA, 489 bp, Homo sapiens; identical to SEQ ID NO: 4045

SEQ ID NO: 5149 - DNA, 228 bp, Homo sapiens
gccgcatcctatggctctactttgagaccggtacctgggtgtatcctgtgtttgccaaactcagcctgttgggtctagcagctttcttctctctcagctacgtgggggtcgccagcatctacctacttggagagaagctcaaccactggaaatggggtgacatgaggcagccccggaagaagaggaagtaattgcacaccattttccaagaacctagaaagaagaaaa

SEQ ID NO: 5150 - DNA, 449 bp, Homo sapiens; identical to SEQ ID NO: 4048

SEQ ID NO: 5151 - DNA, 458 bp, Homo sapiens; identical to SEQ ID NO: 4049

SEQ ID NO: 5152 - DNA, 457 bp, Homo sapiens; identical to SEQ ID NO: 4054

SEQ ID NO: 5153 - DNA, 399 bp, Homo sapiens; identical to SEQ ID NO: 4055

SEQ ID NO: 5154 - DNA, 418 bp, Homo sapiens
caagaaggaagacagtgatgaagaggaggatgatgacagtgaggaggatgaggaggatgacgaggacgaggatgaggatgaagatgaaattgaaccagcagcgatgaaagcagcagctgctgcccctgcctcagaggatgaggacgatgaggatgacgaagatgatgaggatgacgatgacgatgaggaagatgactctgaagaagaagctatggagactacaccagccaaaggaaagaaagctgcaaaagttgttcctgtgaaagccaagaacgtggctgaggatgaagatgaagaagaggatgatgaggacgaggatgacgacgacgacgaagatgatgaagatgatgatgacgaatatgatgaggaggaggaagattaggaggaggaatatcctgtcaaagaagcacctggaaaa

SEQ ID NO: 5155 - DNA, 648 bp, Homo sapiens; identical to SEQ ID NO: 4058

SEQ ID NO: 5156 - DNA, 610 bp, Homo sapiens
  misc_feature 524, 579, 594: n = A,T,C or G
attcatttttattatattaatagacttagttacatataaataaacacaaaaagcaaatatcaactgaaaggtttggttgggtagtcaactaattttgttcttttctagggcaattcaagaaggtaacatttgaaaggtttctaaatgatgcacactgtaatcattcattctttgttaaaatacaacacaaaccaacagctacaatgctttttatttttaacaaaaaggatgtaaggagggtaagaaaaacagaggacagtaagataggatgtaaagtgtgatgtatctctggacaccatccctctctgcctgccccacacccaaaagttttaaataatttaaaggataccaattacagtaccagaacaccatcaaaataattgtctttatcagggtcaaaaaatacagtgattatgaatgagctgtgaccagttacgaaattttactggaaatgtttaactgtggtcagcagtccaatggtgtgcacagtgccttcaattaatgcacttgagcatccgtaattncatttctggcagggtccacaccccccaagaaaaggtaagctaagcattcattccncatctaacctggaanacgagccagttaaaga

SEQ ID NO: 5157 - DNA, 512 bp, Homo sapiens
gaagggatgggcaagggtgagtgggtttgctccacaccgtcctgtgctgctcgatgaggacctgggacgtgcgagggaaacgtgggtgacggtgcctaggctgcggccttcactgctgtgctgggttcctgcagcctgctacgtttcccttggcaatgtaaatgaagatggaggggtcgtttcgtgatttcctgctgctgagaataaatgtcttgttaaaaacgtggcaacggttactcttaggtgccatggatcgatgtcagggtggtcagctctggactaagccacccacctccaatttgtacaacagtattgatacatagggctacactcattactgttcaagtgttctatgttaagagttgtgtttaatttctaaagattaaaaaaagcaaaaaaattggtgctaaaccttcacccctgagcacgctcagtgagactggtcatgcaagcatttacagtgccatgctcctcaagccgattttttcttgtagaaatgttgccctatttgt

SEQ ID NO: 5158 - DNA, 618 bp, Homo sapiens; identical to SEQ ID NO: 4059

SEQ ID NO: 5159 - DNA, 601 bp, Homo sapiens
tcaaaggcagcaagcagatagactcaaggtgtgtgaaagatgttatacaccaggagctgccactgcatgtcccaaccagactgtgtctgtctgtgtctgcatgtaagagtgagggagggaaggaaggaactacaagagagtcggagatgatgcagcacacacacaattccccagcccagtgatgcttgtgttgaccagatgttcctgagtctggagcaagcacccaggccagaataacagagctttcttagttggtgaagacttaaacatctgcctgaggtcaggaggcaatttgcctgccttgtacaaaagctcaggtgaaagactgagatgaatgtctttcctctccctgcctcccaccagacttcctcctggaaaacgctttggtagatttggccaggagctttcttttatgtaaattggataaatacacacaccatacactatccacagatatagccaagtagatttgggtagaggatactatttccagaatagtgtttagctcacctagggggatatgtttgtatacacatttgcatatacccacatggggacataagctaatttttttacaggacacagaattctgttcaatgct

SEQ ID NO: 5160 - DNA, 571 bp, Homo sapiens
ccaagaattcggcacgaggagatattccaacctagagttttggatggaactgatatattgacagttctcaccgaagtccttttataaagaattgctactccaatatatggtcagattagatgcaagaataaatcagttgtccgagtctaagtttctattttattaataaaaactaaaatggtacgtactatcggtcatttcattttcattcttttaatcatgtattcaagcacaaacttgaaatttcatagccataatgtcaagatttagacctaccaaataaaaccttgggccagctgtgttaaggatttgctcaccttttcccaaactataccttgataattatttccttgataccctacttacaaaatgaagtagatgacattaaaaaggcaaacagagactggccacgctggcttactcctgtggtcccggcaccttgtgaggccgaggcgggtggatcacctaaggtcaggagttcgagaccagcctcaccaatatgatgaaaccctgtctctactaaaaatacaaaaattagccgggcgtggtgacatgcgcctgtgatatcagc

SEQ ID NO: 5161 - DNA, 148 bp, Homo sapiens; identical to SEQ ID NO: 4060

SEQ ID NO: 5162 - DNA, 561 bp, Homo sapiens
tcggcacaggctggacacggcatgatgttcgtccgcaacgattgcaaggtgttcagattttgcaaatctaaatgtcataaaaactttaaaaagaagcgcaatcctcgcaaagttaggtggaccaaagcattccggaaagcagctggtaaagagcttacagtggataattcatttgaatttgaaaaacgtagaaatgaacctatcaaataccagcgagactatggaataaaactattgatgcgatgaagagagttgaagaaatcaaacagaagcgccaactaaatttataatgaacagattgaagaaaaataaagagctacagaaagttcaggatatcaaagaagtcaagcaaaacatccatcttatccgagcccctcttgcaggcaaagggaaacagttggaagagaaaatggtacagcagttacaagaggatgtggacatggaagatgctccttaaaaatctctgtaaccatttcttttatgtacatttgaaaatgccctttggatacttggaactgctaaattattttattttttacataaggtcacttaaatgaaaag

SEQ ID NO: 5163 - DNA, 693 bp, Homo sapiens
tcactatttggaatttggccctcgaggccaagaattcggcacgagattcgattttacatgtatgagattctgaaggccctggattattgtcacagcatgggaattatgcacagagatgtcaagccccataatgtcatgattgatcatgagcacagaaagctatgactaatagactggggtttggctgagttttatcatcctggccaagaatataatgtccgagttgcttcccgatacttcaaaggtcctgagctacttgtagactatcagatgtacgattatagtttggatatgtggagtttgggttgtatgctggcaagtatgatctttcggaaggagccatttttccatggacatgacaattatgatcagttggtgaggatagccaaggttctggggacagaagatttatatgactatattgacaaatacaacattgaattagatccacgtttcaatgatatcttgggcagacactctcgaaagcgatgggaacgctttgtccacagtgaaaatcagcaccttgtcagccctgaggccttggatttcctggacaaactgctgcgatatgaccaccagtcacggcttactgcaagagaggcaatggagcacccctatttctacactgttgtgaaggaccaggctcgaatgggttcatctagcatgccagggggcagtacgcccgtcagcagc

SEQ ID NO: 5164 - DNA, 559 bp, Homo sapiens
gaggagttgaggacatttatttcacattcacacaactgtacattttctataaataatgtggggctgaaatatttacagtcatttcttgcccatacccaggcagtctctccctcctgacaccccgtgcctggagagacagcctgcagacagatgtgcaaacccagcttggtctttcctgccccctccctgatgctcaggcagagcagccagcggtccctgggactccactagcctcgaccactccatcctctgatgccgaagtgtgacaggccacagggaattcgccgctccactgcagtcacagaggctgtggcaggcagcagccaacactgcgggccctgggcagtagctgccggctagggaatgcagaaggaagcagggaggctgccactcactccggctgccccccaattcttcccttcctctctgtgcccttcctctgagagggtgagccccagggttccctcactcctcacagagtgaaactgctccaggcgcccagtcatgccgggtcacagagaagggagagccagactcttgcagtggacagttataacgc

SEQ ID NO: 5165 - DNA, 491 bp, Homo sapiens
cctcctttgttactagtttggagcagatccttgcagacgttttcctctgcattcacatgcatgcaaatgtacttctgaatgcgcacgtatgtctttatatacagatagcttttaacaaatagcaggtggggccggcactgtggctcacacctgtaattccaggactttgggaggctgaggcggggggatcacttgaggccagaagttggagaccagcctggccaacatggtgaaacaccatctctactaaaaatacaaaaattagctgggcgtggtggcgggtgtctgtagtcccagctactcaggaggctgaggcaggagaatcgcttgaacccacgaggcggaggttgcagtgagctgagattatgccactgcacgccaacctgggtgatagagcaagactctgtctcaattaaaaaaaatatgtggggccaggcaccgtggctcacacctgtaatcctagcacttttggagactgaggcgggtggatc

SEQ ID NO: 5166 - DNA, 329 bp, Homo sapiens; identical to SEQ ID NO: 1037

SEQ ID NO: 5167 - DNA, 337 bp, Homo sapiens; identical to SEQ ID NO: 2816

SEQ ID NO: 5168 - DNA, 344 bp, Homo sapiens
acctcaacgtcggtaccgccgcaacttcaattaccgacgcagacgcccataaaaccctaaaccacaagatggcaaagagacaaaagcagccgatccaccagctgagaattcgtccgctcccgaggctgagcagggcggggctgagtaaatgccggcttaccatctctaccatcatccggtttagtcatccaacaagaagatatatgaaattccagcaataagaaatgaacaaaagattggagctgaagacctaaagtgcttgctttttgcccgttgaccagataaatagaactatctgcattatctatgcaacatggggtttttattatttttacctaaagacg

SEQ ID NO: 5169 - DNA, 348 bp, Homo sapiens
  misc_feature 292: n = A,T,C or G
cgtgaagaatcagcatcatgtttggcagctgagtattggagccaggagcctgccatgaggttttgagaacagagtgctgttttagagctggcagcagcatctcagcccaagagaaggttatattcccagaggatgtcagtcccaaggaccagtagctgccatcagtttggattctgaaaactaactggcatcaacactgggtgtagaaacatgcttgccttatgtatcagaggacatgctcagcagatccaagagatatatttggcaactttttctagaaaaggcacattgngtatcattcattacattcttgagttgttttgggttttttttttttttttaaaacca

SEQ ID NO: 5170 - DNA, 124 bp, Homo sapiens
gagaagacgacagaaggggtgattattatatttaccacataatctgtgtcctttcaaggctgtcaggaatacaaaggcaggcatggtcaggaaagaataaaggagagatgagtcttatttcttt

SEQ ID NO: 5171 - DNA, 370 bp, Homo sapiens; identical to SEQ ID NO: 4068

SEQ ID NO: 5172 - DNA, 424 bp, Homo sapiens
gctccacctcccgggttcacgccattctcctgcctcagcctcccgagtagctgggactacaggcgcccgccaccacgcccggctaatttttttgtatttttagtagagactgggtttcaccgtgttcgccaagatagtctttatctcctgacctcgtgatccgcccgcctcggcctcccaaagtgctgggattacaggcgtgagccaccgcgcccagccaggagaattatttttatagtctcagagttgtatagtcttttctaatatgccacaaaaactaagaaagaatagataattgattaatcagactacataacaaaacttttctgcatataaaaatacattataaacatatgacgaactaattttcaaaagtaaaatggcatgcccaaaattaagagccaatattcttaattcataaaga

SEQ ID NO: 5173 - DNA, 392 bp, Homo sapiens
actgaccacccctcctcttctggaatgtgtgacctggattgtgctcaaggaacccatcagcgtcagcagcgagcaggtgttgaaattccgtacacttaacttcaatggggagggtgaacccgaataactgatggtggacaactggcgcccagctcaaccactgaagaacaggcaaatcacagcttccttcaaataacatggtcccatagtctgtatccaaataatgaatcttcaggtgtttccctttagctaagcacagatctaccttggtgattcggaccctggttgctttgtgtctacttttctagacccttcatctcttacttgatagacttactaataaaatgtgaagactataccaattgtcatgcttgacacaactgctgtggctg

SEQ ID NO: 5174 - DNA, 473 bp, Homo sapiens
taattttatatctgacagtaaagtttgctgcaagtgtatgagttcaaacacatcccttgttttctgtccctaggggaaaagtcatgtagttttagcttggctccagtgttaatattatattcagtagcagccttagaagagtggtctaagacttgaacctggagcaattttatagcacagaatcctacgaagataggactgtgaacatttgttttctttttcgtgtgtgtcaaactaactggtttttgctttaccaataaaatgtcctcggcagagtaaattttaaacgtgaaaattatagatcttgatattgaatccatcagtgattcaagagatacacctatttgcctaaaacaacctaagatgtattggttatggaatcatgtgttggataggttcttaagacctgtttcctcaaatcttgacacagttttcaagggtggcttattgacttgcacggttgggcagataat

SEQ ID NO: 5175 - DNA, 462 bp, Homo sapiens
ccatatcaatctagaaacagctactttattcatcttccattataacatatgccagacataccaaaaaggaaggcacacctgatgcttgaaatgatcctattatatggatgcttcaaaatttgtttaacctgtcccctattgctcaacattcagaattttctcaattttccttacaaataaaaacactgcacaacaacaaccactagagctaataaatgaattcagcaaagtagcagggtacaaggttaaccaaaaaaaatccattgtgtttctatacatcaacaatgaataatccgaaaaggaaatttaaaaaacggttctggccaggcgcggtggctcacgcctataatcccagcactttgggaggctgaggtgggcagatcacgaggtcaggagatcgagaccatcctggctaacaaggtgaacaccgtctctactaaaggtacaaaaattagcaggcgt

SEQ ID NO: 5176 - DNA, 143 bp, Homo sapiens
taaccagttgttggagagatctggcccctccccacaaattctctgtgtccctctaggatacctcaaataacaataatgatagcaacgataaaaagaagacccaaaaaaaaaaaaaaaaaaaaaaaaaaaagtcgtatcgatgt

SEQ ID NO: 5177 - DNA, 77 bp, Homo sapiens
tgatgaggactgacaattaacagcaaaaaaaaaaaaaaaaaaaaaaaaaaaacccttttttttttttttcccccccc

SEQ ID NO: 5178 - DNA, 173 bp, Homo sapiens
gccgcctgccatgccccagccagtccccacagcataacagggtctccttggcagctgtattctggagtctggatgttgctctctaaagacctttaataaaattttgtacaaaaaaaaaaaaaaaaaaaaaaaaagttttttttttttcccccatatttttttttttttccccc

SEQ ID NO: 5179 - DNA, 359 bp, Homo sapiens
acgacagaaggggttcaagcgattctcctgcctcagcttcccaagtagctgggactgcatgcgcgtgccactgtgcccagctaatttttgtatttttaatagaaacggggtttcatcacgttggcaggatggtctcgattcctgacctcgtgatctgcccacctctgcctcccaaagtgctgggattacaggcgtgagccactgtacccggcctcctttcttaaaggtaaaaccgttctctaatccacctagtctccatagcattagtgccacaagaacattttactcttaaatgacttgtctaattctttgcagataccaaatataaagccagaacatttctagggatatgtatgacg

SEQ ID NO: 5180 - DNA, 610 bp, Homo sapiens
ggtagttttcatttgtggtgagattctctcccaggccacaagacatttcctgctcggaaccttgtttactaatttccactgcttttaaggccctgcactgaaaatgcaagctcaggcgccggtggtcgttgtgacccaacctggagtcggtcccggtccggccccccagaactccaactggcagacaggcatgtgtgactgtttcagcgactgcggagtctgtctctgtggcacattttgtttcccgtgccttgggtgtcaagttgcagctgatatgaatgaatgctgtctgtgtggaacaagcgtcgcaatgaggactctctacaggacccgatatggcatccctggatctatttgtgatgactatatggcaactctttgctgtcctcattgtactctttgccaaatcaagagagatatcaacataaggagagccatgcgtactttctaaaaactgatggtgaaaagctcttaccgaagcaacaaaattcagcagacacctcttcagcttgagttcttcaccatcttttgcaactgaaatatgatggatatgcttaagtacaactgatggcatgaaaaaaatcaaatttttgatttattataaatgaat

SEQ ID NO: 5181 - DNA, 384 bp, Homo sapiens
atagctcatgcctataatcccagcgctttgggaggccaaggggggaggatcgcttggggccgggagttggagaccggcccggggaacacagtgagactttatctccttaaaaaaattagctgggcatggtggtatgagcctgtggtctcagcttcccgagtggctgggactgcaggtgcatgccaccatgcccaactaatttttgtatttttagtagagatgggatttcaccatatcggacaggatgggctcgaactcctgacctcaggtgatccacctgcctcggcctcccaaagtgctgggattacaggcgtgagccactgcgcccggccacaaataataatttgatgaacagaatttcttctttttatttttaaaaagatc

SEQ ID NO: 5182 - DNA, 313 bp, Homo sapiens; identical to SEQ ID NO: 4073

SEQ ID NO: 5183 - DNA, 127 bp, Homo sapiens
aagactgtggcgaggaataggacgaggaagaataaggtgatggtgacgaagaggatggatatgatgatgacgaagctgagtcatctacgggcaagcgggcagctgaagatgatgaggatgacgatgt

SEQ ID NO: 5184 - DNA, 302 bp, Homo sapiens
tcaaagggaaggaattgtagatgaacaagcgtggcttcagcatggaagtggggcagtatatctttgttaattgcccctcaatctctctcctggaatggcatccttttactttgacctctgctccagaggaagatttcttctccattcatatccgagcagcaggggactggacagaaaatctcataagggctttcgaacaacaatattcaccaattcccaggattgaagtggatggtccctttggcacagccagtgaggatgttttccagtatgaagtggctgtgctggttggagcaggaatt

SEQ ID NO: 5185 - DNA, 372 bp, Homo sapiens
gccctttcccctggctggcagcgcggaggccgcacgatgcctggagttactgtaaaagacgtgaaccagcaggagttcctcagagctctggcagccttcctcaaaaagtccgggaagctgaaagtccccgaatgggtggataccgtcaagctggccaagcacaaagagcttgctccctacgatgagaactggttctacacacgagctgcttccacagcgcggaacctgtacctccggggtggcgctggggttggctccatgaccaagatctatgggggacgtcagagaaacggggtgatgcccaaccacttcagccgaggctccaagagtgtggcccggcgggtcctccaagccctggaggggctgaaaatg

SEQ ID NO: 5186 - DNA, 212 bp, Homo sapiens
tctgtgtgagcccattctactcattagggtacagatttttaatagaaactatgtctatgcatggcttattctatattgatggaagagaagtctaatttgagcagagagccatacaaacatggagtcctgcactgtactcaagatatttctccgtatttacgtattgaaaaaatgactgatgggctcttattacctaatggacactatataaa

SEQ ID NO: 5187 - DNA, 333 bp, Homo sapiens
gcagatcatggcaggcagccggctggaaaccgtagggagcatcttctctcggactcgggacctggttcgggccggggtgctgaaggagaagcccctgtggtttgacgtatatgacgcctttcccccgctgagggagcccgtcttccaaaggcctcgagtgcgatatggcaaagccaaagctcccatccaagacatctggtaccacgaggatcggattagagcgaagttttattcagtgtatgggtctggtcaaagagcttttgatctattcaatccaaacttcaagtctacctgtcaacggtttgtggagaagtacactgagctacagaaact

SEQ ID NO: 5188 - DNA, 331 bp, Homo sapiens; identical to SEQ ID NO: 1047

SEQ ID NO: 5189 - DNA, 339 bp, Homo sapiens; identical to SEQ ID NO: 1048

SEQ ID NO: 5190 - DNA, 319 bp, Homo sapiens; identical to SEQ ID NO: 4092

SEQ ID NO: 5191 - DNA, 348 bp, Homo sapiens; identical to SEQ ID NO: 1050
  misc_feature 348: n = A,T,C or G

SEQ ID NO: 5192 - DNA, 96 bp, Homo sapiens
acaaaacgaactgcacagaaccgcaccacaggcgtctgcttgcgtcaataagcattaaaacataccatgctgcgttaataaattgcctcattccaa

SEQ ID NO: 5193 - DNA, 361 bp, Homo sapiens
gaatttgaagatattaaatcaggttacagaatagatttttattttgatgaaaatccttactttgaaaataaagttctctccaaagaatttcatctgaatgagagtggtgatccatcttcgaagtccaccgaaatcaaatggaaatctggaaaggatttgacgaaacgttcgagtcaaacgcagaataaagccagcaggaagaggcagcatgaggaaccagagagcttctttacctggtttactgaccattctgatgcaggtgctgatgagttaggagaggtcatcaaagatgatatttggccaaacccattacagtactacttggttcccgatatggatgatgaagaaggagaaggagaag

SEQ ID NO: 5194 - DNA, 125 bp, Homo sapiens
ttaagttgttgcaacagagactatatggctagtgaagtccaacatatttactactggccatttacagaaaaagtctggactgcaaggaagaccaaaaaaaaaaaaaaaaaaaaaagtcgtatcga

SEQ ID NO: 5195 - DNA, 127 bp, Homo sapiens
ctatcaggaggagggaccagcacaagcaccttacagagtgcatgcactagtcagggtcctggaacagtccagagaagcggtgggagccagtcaggaaagacattttgggatctgattgttaaatgcc

SEQ ID NO: 5196 - DNA, 859 bp, Homo sapiens
  misc_feature 3, 127, 212, 330, 331, 337, 345, 346, 369, 435, 546, 611,656, 689, 722, 730, 738, 772, 777, 782, 834: n = A,T,C or G
ggnacgaggggaattgtgccctcataaaagggaccccagagaactgctgcaccccctccaccacgtgggacacagtgagaaggcactggctacgaaccaggaaaccctccccagacaccagatctantaacaccttcatcttgggacttccagcccccagagcagtgagaaatacattcctgttatttgtaagcctcacggtttacagtgtnttgctatcacagctcgaatggactaagacagcaggaaacagaatacagagaacatggagagaagcaaggcttttctgggtgtgaacttcccaagcatgcaaaaattttacacaatcannaaacanaaaattannttgtaacatttaaaatgaactanaattaatgtaactgcctatcaagccagtgacacaatcacacaagcaacatttctggtgccgcgaanacaagactgggcccagcttccatgggacatgttctaaggagtgagacgctgcaaagaagcgcagatgccatccgggagctggactggtgcttactgttatcggtaatatcnggagtgctattttgaaactaaagattttagaaaccagaatttttattgtaagagatgcaatatanatcccagaagttggtaagaactctaccctgttaatttgaattggnatattagcatgagcacatttttaagatccattncttcataactctgttccctgaaagtggtcagtnccatggancctgcagngtgggaccccgattcattcgtgtcaaaatcttcnttccnaggcnagggatctggggaatggccgttaaagtttggcaagacctagggagcccgggntcctgtcccgaggaaatttcccaag

SEQ ID NO: 5197 - DNA, 297 bp, Homo sapiens
attgggtaccgggccccccctcgagtttttttttttttttttaaaaaaagaaacccttttttcccttgtttggaaaaaaaaacgggcaaagggggtggcttttgggggataagcaaaaaaaaccaaaccccatttcctggcccaacccctccaacttttcttgggtttaaaccttagggggggctgaaaaaacaaaaaaaccagctgggggggaaacacccacgggggcaccacccccaagggcaaagggttcacccaaaagggccttgcccttttaaaaaaggggaaaggggaaac

SEQ ID NO: 5198 - DNA, 610 bp, Homo sapiens; identical to SEQ ID NO: 4095

SEQ ID NO: 5199 - DNA, 512 bp, Homo sapiens; identical to SEQ ID NO: 4096

SEQ ID NO: 5200 - DNA, 780 bp, Homo sapiens
  misc_feature 516, 569, 663: n = A,T,C or G
gaaatgcagaaatatttattttggtttccttcattgtttttggaaattttgttttggtttataaaacatagaaatagccaacacttaaagcaaacattcaaaaccccaaggtgacaaattattgactttttgtgcaattaagaatacatatatgaagttaggctaccaagtagtgttattacaatgacaattctttagtgcaagccctgttgtgcttgtatataatacatgtactctcacagaccccaaaacagctgctttaaatgtacaaatgacagctcaattcagtcaaatgtggcaaagactcacaataaagtgaactgctgttaatttcccaaattaactttaaaaaatccctggagaagtgaatcccaggaaatgaactttccagatttctacatcctagaattttggcttgtcaaacacatttcatagaaatcaggtagcattataagaacatttgcttattactgtccatttcaataagtactcaagtatatactcccttaatagctntaaagaaatgcttgcctgagagtttattttttggggaaaaagggcagttaatnccaacatgatcttttgatatgaaaaccacattaaaaatctgtttggctttacacagagtgagtggttcagtgaagataagtagacagttatcangcgtcacagctgagcatggctgatccaggtactctttcttgaaatgcttggctcactatagaatctacgcagattttaaaataaccctgaaaaaggatgagtcggggatcaggcctg

SEQ ID NO: 5201 - DNA, 583 bp, Homo sapiens
tcttgctttaggattgctattttattgttgccctttctgttacatgggatgtacacatcaggtgttaaaaggtacaatacattctacaactgagcaccactttctgtaactgaacaggcaaagaaattacactgaacatcagcatctggcagtatttttttggaaaaaaaagtgactaaaatgggtttaaattgattaacactattaaatcacatctaatatttgatactacatgattcaatacagctatacgatacaattatacaaaatgtgttaacatcaaagaatacaaccaaaattaagatagcaaacaaaacctatataacttttttttttttacaggaaaatacttttgaagtatgcatgtaactgcccattcttttaaagaaaatctactgcaagcaaagttatcaacctccagaaaaatcacacgtagcattactaagcatatccccaaaaaagtgtacaatatgcacacttggaaaatacaaaattaaaaaaattgtaagcaacaggtgagcttcatatttataagaatgtgaaaagaagttcccatttttagcactgttgtgataaagaattg

SEQ ID NO: 5202 - DNA, 525 bp, Homo sapiens
gagacagggtctctctctattactcagctgggagtgcagtggcatgatgtctgctcactgcagcttcgacctcccaggctcaggtaatcctcctacctcagccccctgagtagctgggactacaggtgcatgccaccatgcccgactaattttttgtatgttggtagagatgcggttttgtcatgttgcccaggctggccatgaactcctgagatcgggcgatctgcccacctcagcctcccaaagtgctgggattataggcatgagccaccaggcccagcctccaccttctattttcatagacattattcatgaaaatttaaagcttaaataatagaactgcttatagaattaccttgggtaccaacaatctccatgtgaagatgggcaagaccgctcgccgtggacagagcaagttttatcattccttccacagtaactgtgtatctgtttaagtaatcaaaaagggatccatgctcatgataatctgacaccaaccagagctgagtccaagtaccattgtct

SEQ ID NO: 5203 - DNA, 135 bp, Homo sapiens
agggcgaattgggtaccgggccccccctcgagtattttttttttttttttgcataaatgagtccacttggattacctatagcaaataaacccatcccaagggtatggaatcaactgtttatagtcttttcacact

SEQ ID NO: 5204 - DNA, 585 bp, Homo sapiens
  misc_feature 540: n = A,T,C or G
cggcacgaggccagaccatcttcaccacaattggactcctgtaccccttccccaaggactgctcccaagcaatgctgaatggagacacgacctctggcctctacaccatttatctgaatggtgataaggctcaggcgctggaagtcttctgtgacatgacctctgatgggggtggatggattgtgttcctgagacgcaaaaacggacgcgagaacttctaccaaaactggaaggcatatgctgctggatttggggaccgcagagaagaattctggcttgggctggacaacctgaacaaaatcacagcccaggggcagtacgagctccgggtggacctgcgggaccatggggagacagcctttgctgtctatgacaagttcagcgtgggagatgccaagactcgctacaagctgaaggtggaggggtacagtgggacagcaggtgactccatggcctaccacaatggcagatccttctccacctttgacaaggacacagattcagccatcaccaactgtgctctgtcctacaaaggggctntctggtacaggaactgtcaccgtgtcaacctgatggggagatatg

SEQ ID NO: 5205 - DNA, 456 bp, Homo sapiens
acgacagaagggagtctcagctcactgcaacctctgcctcccagttcaagcaattcttctgcctcagcctcccaagtagctgggattacaggcacccgccaccacgcccagctaatttttgtatttttgtagagatggggtttcacgatgttggccaggctggtctcaaacttctgacctcaagtgatctgcccaccttggcctcccaaagtgctgggattacaggtgtaagccactgcgcccggcctttttaactttaaacatgttttagaattcacctaaagatcaaaatatcatggattgaacctcatcaattgatagcagtgagtgactgaagcttccaaatcaagaaaagccggcaccaagaacttccattctaatctagagctgaccagtttgagctgattctctctttgaagagtccttcttgattgcagtgcagtactggcatttctg

SEQ ID NO: 5206 - DNA, 411 bp, Homo sapiens
ctgaatcacatattccaggactgttagctgctatttatttttcatctacagatggcttcataaaagccattctccttattctgaaaaaagtccaagtggtagttagatattaatttaagatgcaaatcaggttatgcaggtggcataaaataactgcagactttaagaaccacaaatgaggggtggagctgacacagcaccatgcactggttgatggaagcacaactttttccacccgctttccacaagatcaacacctccactgtgaggccgcttttctcttacctgtagacaacgtaaagaaaattctaaaaacaatgctgtctccttaaattcctcttcatttcatgctgcttccacgttctagaccaggggtcagcaaattattctggaaagggtcaaacagtaagt

SEQ ID NO: 5207 - DNA, 366 bp, Homo sapiens
catggccatccccttatgagcgggcgaagtgattataggctttcgctctaagattaaaaatgccctagcccacttcttaccacaaggcacacctacaccccttatgcccatactagttattatcgaaaccatcagcctactcattcaaccaatagccctggccgtacgcctaaccgctaacattactgcaggccacctactcatgcacctaattggaagcgccaccctagcaatatcaaccattaaccttccctctacacttatcatcttcacaattctaattctactgactatcctagaaatcgctgtcgccttaatccaagcctacgttttcacacttctagtaagcctctacctgcacgacaa

SEQ ID NO: 5208 - DNA, 332 bp, Homo sapiens
gagaagcgcgaagagccgttagtcatgccggtgtggtggcggcggcggagactgcgggcccgtagctgggctctgcgaggtgcaagaaagcctttgaggtgaaggtgtatgaaagtcatcataacagatgttttccaaaaacttgtagaaggttgtgaaaaaactactaggatcacgcggcatgtattgagcatataggttgctgtagatgaatgttcttagctgtcatgtttaaaaatacttctgcttcgttacctcaagtggggcatgcagcattttggaaggaaaattgaagacgtgttcaagaaaacatgaacaggagccaatgatgg

SEQ ID NO: 5209 - DNA, 330 bp, Homo sapiens
ggggtcagtgccgcgcgccgatcggtcgttaccgcgaggcgctggtggccttcaggctggacggcgcgggtcaaccctggttcgccggcttctgggtctttgaacagccgcgatgtcgatcttcacccccaccaaccagatccgcctaaccaatgtggccgtggtacggatgaagcgtgccgggaagcgcttcgaaatcgcctgctacaaaaacaaggtcgtcggctggcggagcggcgtggaaaaagacctcgatgaagttctgcagacccactcagtgtttgtaaatgtttctaaaggtcaggttgccaagaaggaagatctcatcag

SEQ ID NO: 5210 - DNA, 435 bp, Homo sapiens
gagcggcctgtgacagcgggcgaggaggacgagcaggttcccgacagcatcgacgcacgcgagatcttcgatctgaggcgctccatcaatgacccggagcatccactgacgctagaggagttgaacgtagttgagcaggtgcggcttcaggttagcgaccccgagagtacagtggctgtggctttcacaccaaccattccgtactgcagcatggccacccttattggtctgtccatcaaggtcaagcttctgcgctcccttcctcatcgtttcaagatggacgtgcacattactccggggacccatgcctcatagcatgcactgaacatgcaacttgcagataaggagcgggtggcagctgccctggagaacacccacctcttggaggttgtgaatcattgcctgtcagcccgctcctgagcctggcctttgacc

SEQ ID NO: 5211 - DNA, 350 bp, Homo sapiens
gcggttgggggaaagtaattccggctgttgcaccatggcgtccatggggaccctcgccttcgatgaatatgggcgccctttcctcatcatcaaggatcaggagcgggggtcccgtcttatgggacttgaggccctcaagtctcatataatggcagcaaaggctgtagcaaatacaatgagaacatcacttggaccaaatgggcttgataagatgatggtggataaggatggggatgtgactgtaactaatgatggggccaccatcttaagcatgatggatgttgatcatcagattgccaagctgatgggggaactgtccaagtctcaggatgatgaaattggagatggaa

SEQ ID NO: 5212 - DNA, 337 bp, Homo sapiens
  misc_feature 337: n = A,T,C or G
catacatcatgatcgccatctacgggaagaatttctgtgtctcagccaaaaatgcgttcatgctactcatgcgaaacattgtcagggtggtcgtcctggacaaagtcacagacctgctgctgttctttgggaagctgctggtggtcggaggcgtgggggtcctgtccttctttttttttctccggtcgcatcccggggctgggtaaagactttaagagcccccacctcaactattactggctgcccatcatgacctccatcctgggggcctatgtcatcgccagcggcttcttcagcgttttcggcatgtgtgtggacacgctcttcctctgcttcn

SEQ ID NO: 5213 - DNA, 241 bp, Homo sapiens
ctcattatagaactgactcaatttatggcccatggaagaaaatgaaagggactgtttagggactttacatactcttaggacttttattaaaatcccatgtcccggctgggcatggtggctcacgcctgtaatcccagcactttgggaggccgaggcaggtggatcacctgaggtcaggagttggagaccagcttggccaacatggggaaatgctgtctctaataaaaatacaaaaattacc

SEQ ID NO: 5214 - DNA, 339 bp, Homo sapiens
gggcggatcatgaggtcaggagatcgagaccatcctggctaacacagtgaaaccccgcctctactaaaaatacaaaaaattaaccgggcgtggtggcaggcgcctgtagtcccagctactcaggaggctgaggcaggagaatggcgtgaacccgggaggcggagcttgcagtgagccgagatcgcgccactgcattccagcctgggcgacggagcgaaactccgtctcaaaaaaaaaaagacatttacttaaggcaattatttataacccagggttgggcttatagtattacttaagggaggggccgggaccaaagcgttctgcagggaagtatccaac

SEQ ID NO: 5215 - DNA, 358 bp, Homo sapiens
gggaatcttcaactcctacatacttcccccattattcctagaaccaggcgacctgcgactccttgacgttgacaatcgagtagtactcccgattgaagcccccattcgtataataattacatcacaagacgtcttgcactcatgagctgtccccacattaggcttaaaaacagatgcaattcccggacgtctaaaccaaaccactttcaccgctacacgaccgggggtatactacggtcaatgctctgaaatctgtggagcaaaccacagtttcatgcccatcgtcctagaattaattcccctaaaaatctttgaaatagggcccgtatttaccctatagcaccccctctagagccaa

SEQ ID NO: 5216 - DNA, 450 bp, Homo sapiens
aggatccaatgtctttagccaacagcatctgggaacctgagacctgccaacacccttgtgagtgagcctggaagtggacctcctgctcttgaaccttgaggtgactatagtgctggctgacaccttgactgcagtccctgagctggggggcccagctgatctactcccagaatcccccctactaaaacagtgatataataaatgcttattgtttcaagctggtaacttttggaatgcattcactgaaaaaaattagaatatcaaactataaaccgtttacttagtcaactttttggggaactaatatggccataaatatcaaacctcctacaattttgcacattctttgactttgtagttctacatctataaacttctcttaagggaaatcatggatgccaacaaagaaatagttacaaaaatgttcagcagaggagcactatttataat

SEQ ID NO: 5217 - DNA, 481 bp, Homo sapiens; identical to SEQ ID NO: 2935

SEQ ID NO: 5218 - DNA, 436 bp, Homo sapiens; identical to SEQ ID NO: 4110

SEQ ID NO: 5219 - DNA, 93 bp, Homo sapiens
accgaacgcatgagccaagctccctactgtgtgacaaatgtgcgtattggaaccaagcttggatcacatatcaagctggaagattctttatgg

SEQ ID NO: 5220 - DNA, 254 bp, Homo sapiens
ggaaagctgaaaaaatgcacagtaaaaaattgtttgggcccaatgtggtggctcatgcctgtaatcttagcactttgcgaggccaatgcaggcagatcacaaggtcaggagatcaagaccatcctggccaacatggtgaaactctgtctctactaaatacacaaaaattagctgggcatggtggcatacacctgtagtcacagctacttgggaggttgaggcatgaggatcacctgaacctgggaggggaggca

SEQ ID NO: 5221 - DNA, 377 bp, Homo sapiens
gctttttgtccgacatcttgacgaggctgcggtgtctgctgctattctccgagcttcgcaatgccgcctaaggacgacaagaagaagaaggacgctggaaagtcggccaagaaagacaaagacccagtgaacaaatccgggggcaaggccaaaaagaagaagtggtccaaaggcaaagttcgggacaagctcaataacttagtcttgtttgacaaagctacctatgataaactctgtaaggaagttcccaactataaacttataaccccagctgtggtctctgagagactgaagattcgaggctccctggccagggcagcccttcaagagctccttagtaaaggacttatcaaactggtttcaaagcacagagctca

SEQ ID NO: 5222 - DNA, 462 bp, Homo sapiens
gcttttcattcccgttgttatggagggccacatctgccagagcctggagtctgcgaaggccgggacccggttccccggcccacagtgggggtgtgcaaacccgagagaactgggttgcaaattcgtgaagaatcagcatcatgtttggcagctgagtattggagccaggagcctgccatgaggttttgagaacagagtgctgttttagagctggcagcagcatctcaacccaagagaaggttatattcccagaggatgtcagtcccaaggaccagtagctgccatcagtttggattctgaaaactaactggcatcaacactgggtgtagaaacatgcttgccttatgtatcagaggacatgctcagcagatccaagagatatatttggcaactttttctataaaaggcacattgggtatcattcattacattcttgagttttttttgggttttttttttttt

SEQ ID NO: 5223 - DNA, 139 bp, Homo sapiens
gggcacctggaggcgtctgcagagtgtgcgcagttcttcagtatttagagcatcgatcctgcggtgatactcagccactgacactacctaaatatggagacaggaagacaataattccactgacagttgagaaaaacag

SEQ ID NO: 5224 - DNA, 140 bp, Homo sapiens
ggggtggtgcacagaggctgcagtgagtggagatcgcaccattacactccagcccgggcgacagtgcgagactccatctcaaaaaaaaaaaaaaaaaaaatttttttttttttccaccctttttttttttttttcccccc

SEQ ID NO: 5225 - DNA, 360 bp, Homo sapiens
cttccttgcgtcgtatgcattgatcaatttttcagtattccatgcatcacttgcaaaatctccaggatggcgtcctgcattcaaatactacaacatgtggatatcacttcttggagcaattctttgttgcatagtaatgttcgtcattaactggtgggctgcattgctaacatatgtgatagtccttgggctgtatatttatgttacctacaaaaaaccagatgtgaattggggatcctctacacaagccctgacttacctgaatgcactgcagcattcaattcgtctttctggagtggaagaccacgtgaaaaactttaggccacagtgtcttgttatgacaggtgctccaaactcacg

SEQ ID NO: 5226 - DNA, 386 bp, Homo sapiens
  misc_feature 187, 254: n = A,T,C or G
gctttcacattcgggaagcgtcgggattaggtgaaagtacgtagttgtctttcgtaggttaaaatgataattgggccgaaacttactgccttacctaaaaggcagcgcagtcaggatattggtaggtcgggggcggctttggaaacccttaagtttacaagcatgcgcggacttgagtgctcattangtcgccgggcgtccacgtgcagccctggaccctgaaccccggcgtgcgtgggccgtgggccctcggngaaaggttccgtgcactcggggactccggtgaagcctgttcagccgtctgtgtcatgtggccatcttgagactactctgtcgctcttgtggcctagcaccccgagaaccgtcagtttgaaccagagggaaac

SEQ ID NO: 5227 - DNA, 431 bp, Homo sapiens; identical to SEQ ID NO: 4118

SEQ ID NO: 5228 - DNA, 207 bp, Homo sapiens
gtttcaccgttttagccgggatggtctcgatctcctgacctcgtgatccgcccgcctcggcctcccaaagtggctgggattacaggcgtgagccaccacgcccggccggagtaattttacaaaagagacttgttagtaactacctcatccaggttatcaaattaacatcaacagtgattaaagccagttgataccctgtgcccggga

SEQ ID NO: 5229 - DNA, 534 bp, Homo sapiens
cactaaccatataccaatgatggcgcgatgtaacacgagaaagcacataccaaggccaccacacaccacctgtccaaaaaggccttcgatacgggataatcctatttattacctcagaagtttttttcttcgcaggatttttctgagccttttaccactccagcctagcccctaccccccaattaggagggcactggcccccaacaggcatcaccccgctaaatcccctagaagtcccactcctaaacacatccgtattactcgcatcaggagtatcaatcacctgagctcaccatagtctaatagaaaacaaccgaaaccaaataattcaagcactgcttattacaattttactgggtctctattttaccctcctacaagcctcagagtacttcgagtctcccttcaccatttccgacggcatctacggctcaacattttttgtagccacaggcttccacggacttcacgtcattattggctcaactttcctcactatctgcttcatccgccaactaatatttcactttacat

SEQ ID NO: 5230 - DNA, 513 bp, Homo sapiens
gagccctcggaaacggaagtgagcggcggggtcgactgacggtaacggggcagagaggctgttcgcagagctgcggaagatgaatgccagaggacttggatctgagctaaaggacagtattccagttactgaactttcagcaagtggaccttttgaaagtcatgatcttcttcggaaaggtttttcttgtgtgaaaaatgaacttttgcctagtcatccccttgaattatcagaaaaaaatttccagctcaaccaagataaaatgaatttttccacactgagaaacattcagggtctatttgctccgctaaaattacagatggaattcaaggcagtgcagcaggttcagcgtcttccatttctttcaagctcaaatctttcactggatgttttgaggggtaatgatgagactattggattttttgatattcttaatgatccatcacaaagcgaagtcatgggagagccacacttgatggtggaatataaacttggtttactgtaatagtgtgc

SEQ ID NO: 5231 - DNA, 509 bp, Homo sapiens; identical to SEQ ID NO: 4129

SEQ ID NO: 5232 - DNA, 518 bp, Homo sapiens; identical to SEQ ID NO: 4130

SEQ ID NO: 5233 - DNA, 208 bp, Homo sapiens
caccatcatatatgcattttgttgttgaccgaaacgtcgttatatattctttccatacatagcatgtggaaagaatagatctcttttttttaattggtccacactttaccatataatggaatacgcaaaatttcacaatacctttcaggatgtaaaatacatataccctttgacgacattagaaaagagaaaatgtgggccgggcgcg

SEQ ID NO: 5234 - DNA, 474 bp, Homo sapiens
gcagaaggtggtggtccaccccctggtgctgctcagtgtggtggatcatttcaaccgaatcggcaaggttggaaaccagaagcgtgttgttggtgtgcttttggggtcatggcaaaagaaagtacttgatgtatcgaacagttttgcagttccttttgatgaagatgacaaagacgattctgtatggtttttagaccatgattatttggaaaacatgtatggaatgtttaagaaagtcaatgccagggaaagaatagttggctggtaccacacaggccctaaactacacaagaatgacattgccatcaacgaactcatgaaaagatactgtcctaattccgtattggtcatcattgatgtgaagccgaaggacctagggctgcctacagaagcgtacatttcagtggaagaagtccatgatgatggaactccaacctcgaaaacatttgaacacgtgaccagtgaaattggagc

SEQ ID NO: 5235 - DNA, 357 bp, Homo sapiens; identical to SEQ ID NO: 4132

SEQ ID NO: 5236 - DNA, 324 bp, Homo sapiens
gggactacaggcgcccgccaccacgcccggctaattttttgtattgttagtagagacggggtttcaacgtgttagccaggatggtctcgatctcctgacctcgtgatccacccgcctcggcctcccaaagtgctgggattacaggcctgagccaccggcccggccaaatccctttatttttaatattgaggctttatactgaatttacaatagcatttgcaataatgtcaagtgtttcatcgacagagtgaacttccagaagctatactttgaaagtgtatgaaaaattacctcgttgccgttgggcgccgtggctcacgcctg

SEQ ID NO: 5237 - DNA, 340 bp, Homo sapiens; identical to SEQ ID NO: 4133

SEQ ID NO: 5238 - DNA, 436 bp, Homo sapiens; identical to SEQ ID NO: 4137

SEQ ID NO: 5239 - DNA, 321 bp, Homo sapiens; identical to SEQ ID NO: 1067

SEQ ID NO: 5240 - DNA, 352 bp, Homo sapiens
agccatatgaagacaccctagctggacgatcagtccttgtcaaaagtctgacccctcaaactctacagcctcaatggaccagaccctacccggtcatttatagcacaccaactgccgtccatctgcaggaccctctccattgggttcaccattccagaataaagccatgcccatcagacagccagcttgatctctcctcttcctcctggaagccacaagattaggccgagagccgatcagacaaacaacctacaacccttaagctcctggcagcgcccagccaaggccatgcttccatgcaacactccttccaaatggccatcccagcatgcttccaagcaggcttcatccg

SEQ ID NO: 5241 - DNA, 508 bp, Homo sapiens; identical to SEQ ID NO: 4142

SEQ ID NO: 5242 - DNA, 503 bp, Homo sapiens; identical to SEQ ID NO: 4144

SEQ ID NO: 5243 - DNA, 488 bp, Homo sapiens
gctctctttccttgcctaacgcagccatggctcgtggtcccaagaagcatctgaagcgggtggcagctccaaagcattggatgctggataaattgaccggtgtgtttgctcctcgtccatccaccggtccccacaagttgagagagtgtctccccctcatcattttcctgaggaacagacttaagtatgccctgacaggagatgaagtaaagaagatttgcatgcagcggttcattaaaatcgatggcaaggtccgaactgatataacctaccctgctggattcatggatgtcatcagcattgacaagacgggagagaatttccgtctgatctatgacaccaagggtcgctttgctgtacatcgtattacacctgaggaggccaattacaagttgtgcaaagtgagaaagatctttgtgggcacaaaaggaatccctcatctggtgactcatgatgcccgcaccatccgctaccccgatcccctcatc

SEQ ID NO: 5244 - DNA, 511 bp, Homo sapiens; identical to SEQ ID NO: 4146

SEQ ID NO: 5245 - DNA, 421 bp, Homo sapiens; identical to SEQ ID NO: 4149

SEQ ID NO: 5246 - DNA, 537 bp, Homo sapiens; identical to SEQ ID NO: 4150

SEQ ID NO: 5247 - DNA, 579 bp, Homo sapiens
gaatttggccctcgaggccaagaattcggcacgagggtcctgcggaagctgaaccaggagagcatcgtcaagctctttgcggtggaggagacgggcggaagccggcagaaggtactggtgatggagtactgctccagtgggagcctgctgagtgtgctggagagccctgagaatgcctttgggctgcctgaggatgagttcctggtggtgctgcgctgtgtggtggctggcatgaaccacctgcgggagaacggcattgtgcatcgcgacatcaagccggggaacatcatgcgcctcgtaggggaggaggggcagagcatctacaagctgacagacttcggcgctgcccgggagctggatgatgatgagaagttcgtctcggtctatgggactgaggagtacctgcatcccgacatgtatgagcgggcggtgcttcgaaagccccagcaaaaagcgttcggggtgactgtggatctctggagcattggagtgaccttgtaccatgcagccactggcagcctgcccttcatcccctttggtgggccacggcggaacaaggagatcatgtaccggatcacc

SEQ ID NO: 5248 - DNA, 327 bp, Homo sapiens; identical to SEQ ID NO: 4153

SEQ ID NO: 5249 - DNA, 411 bp, Homo sapiens; identical to SEQ ID NO: 1072

SEQ ID NO: 5250 - DNA, 246 bp, Homo sapiens
aatgctttttaaagagattatttgtttagatgtaggcattttaattttttaaaaattcctctaccagaactaagcactttgttaatttggggggaaagaatagatatggggaaataaacttaaaaaaaaatcaggaatttaaaaaaacgagcaatttgaagagaatcttttggattttaagcagtccgaaataatagcaattcatgggctgtgtgtgtgtgtgtatgtgtgtgtgtgtgtgtgtgt

SEQ ID NO: 5251 - DNA, 376 bp, Homo sapiens
cttggctgattgatgggaacatccagcaacacacacaagagctctttatctccaacatcactgagaagaacagcggactctatacctgccaggccaataactcagccagtggccacagcaggactacagtcaagacaatcacagtctctgcggagctgcccaagccctccatctccagcaacaacttcaaacccgtggaggacaaggatgctgtggccttcacctgtgaacctgaggctcagaacacaacctacctgtggtgggtaaatggtcagagcctcccagtcagtcccaggctgcagctgtccaatggcaacaggaccctcactctattcaatgtcacaagaaatgacgcaagagcctatgtatgtggaat

SEQ ID NO: 5252 - DNA, 414 bp, Homo sapiens; identical to SEQ ID NO: 1076

SEQ ID NO: 5253 - DNA, 442 bp, Homo sapiens
ggttctgcgctggtcggcggagtagcaagtggccatggggagcctcagcggtctgcgcctggcagcaggaagctgttttaggttatgtgaaagagatgtttcctcatctctaaggcttaccagaagctctgatttgaagagaataaatggattttgcacaaaaccacaggaaagtcccggagctccatcccgcacttacaacagagtgcctttacacaaacctacggattggcagaaaaagatcctcatatggtcaggtcgcttcaaaaaggaaggtgaaatcccagagactgtctcgttggagatgcttgatgctgcaaagaacaagatgcgagtgaagatcagctatctaatgattgccctgacggtggtaggatgcatcttcatggttattgagggcaagaaggctgcccaaagacacgagactttaacaagcttgaac

SEQ ID NO: 5254 - DNA, 376 bp, Homo sapiens
gcccctaaccctgaggctgccgcgcggcggtcactgcgccggggtagtgggccccagtgttgcgctctctggccgttccttacactttgcttcaggctccagtgcaggggcgtagtgggatatggccaactcgggctgcaaggacgtcacgggtccagatgaggagagttttctgtactttgcctacggcagcaacctgctgacagagaggatccacctccgaaacccctcggcggcgttcttctgtgtgacccgcctgcaggattttaagcttgactttggcaattcccaaggcaaaacaagtcaaacttggcatggagggatagccaccatttttcagagtcctggcgatgaagtgtggggagtagtatggaaa

SEQ ID NO: 5255 - DNA, 297 bp, Homo sapiens
cacgccattctcctgtctcagcctcctgagtagctgggactacaggcgcccgccaccatgcccagctaatttttttgtatttttagtagagacgggttttcaccgtgttagccaggatggtctcgatctcctgacctcgtgatctgcccgccttggcctcccaaagtgctgggattacaggcatgagccaccgcgcctggcccattttcttcctcttttgaggtaatggatttgtttggagatggcatgttagtagacgactgattatggaaaggatatcgagttatctattttgtt

SEQ ID NO: 5256 - DNA, 356 bp, Homo sapiens
gggggcagaaagaagtatttccaacctagaaattctatatatacccagcgaaaatatctcttaaaaagatatccaaggctgggcgtgacggctcacgcctataatcccaatactttgggaggccaaggcaggtggataacctgaggtcaggagttcgagacaagcctggccaacatggagaaaccctgtctatactaaaaatacaaaaattagccgggcgtggtggcatgtgcctgtaatcccagctactagggaggctgaggcaggagaatcacttgaatccaggaggtggagattgcagtgagccaagatcatgccactgcactccagcctgggcaatggagcaagactctatc

SEQ ID NO: 5257 - DNA, 196 bp, Homo sapiens
gagaagacgacagaaggggaagctgccaaaaatccctacaaacggagggttgggccacctgtggccaccagaaaagccaaggttggggttggttcaccacccaatttccagttaaaaggcggattgggccgggaccgtggccagccacttaattaaaatgggaaaggatcttttggcttggattaaccttccggcc

SEQ ID NO: 5258 - DNA, 143 bp, Homo sapiens
tcattgaggtcataaggtttctgagacaactcaagagatgggattaaccttgggtgggaggaggaacggcttctgtaaactttgaattagtgaggtatctcactttggtggcttctattttctctgtaaagcatgaggccacc

SEQ ID NO: 5259 - DNA, 466 bp, Homo sapiens
gacattttctcggccctgccagcccccaggaggaaggtgggtctgaatctagcaccatgacggaactagaggcagccatgggcatgatcatagacgtcttttcccgatattcgggcagcgagggcagcacgcagaccctgaccaagggggagctcaaggtgctgatggagaaggagctaccaggcttcctgcagagtggaaaagacaaggatgccgtggataaattgctcaaggacctggacgccaatggagatgcccaggtggacttcagtgagttcatcgtgttcgtggctgcaatcacgtctgcctgtcacaagtactttgagaaggcaggactcaaatgatgccctggagatgtcacagattcctggcagagccatggtcccaggcttcccaaaagtgtttgttggcaattattcccctaggctgagcctgctcacgtacctctgattaataaatgcttatt

SEQ ID NO: 5260 - DNA, 427 bp, Homo sapiens; identical to SEQ ID NO: 4178

SEQ ID NO: 5261 - DNA, 488 bp, Homo sapiens
ttttgagatggagtttcactcttgttgcccaggctggagtgcagtggtgcgatctcagctcactgcaacctccgcctccggggttcaagcgattctcctgcctcagcatcccaagtagctgggattacaggcatgcgccaccatgcccggctaatattttgtatttttagtagagacagggttgcaccatgttggtcaggctggtcttgaactcctgacctcaggtgatccacctgcctctgcctcccaaagtactgggattacaggcgtgagccactgcgcctggccaatatttttgacatgctgaatcctcactttatccacatcagtgaggtactacttgacaaaaataccccaacatttttggtttcttggtgacagtttacatcttaccatgtaaatgaactctgaataacaaattacttatgataaatgttaaattagtccatgatagttcctctggaattatttatcaagtaaaagatgag

SEQ ID NO: 5262 - DNA, 297 bp, Homo sapiens
gcttctttgctgcgtctactgcgagaatgaagactattctcagcaatcagactgtcgacattccagaaaatgtcgacattactctgaagggacgcacagttatcgtgaagggccccagaggaaccctgcggagggacttcaatcacatcaatgtagaactcagccttcttggaaagaaaaaaaagaggctccgggttgacaaatgggggggtaacagaaaggaactggctaccgttcggactatttgtagtcatgtacagaacatgatcaagggtgttacactgggcttccgttaca

SEQ ID NO: 5263 - DNA, 409 bp, Homo sapiens
gactcctgctcagcatggctgctttagtgactgttctcttcagtgtccggaggctgcactgcagcgcagccgcttgggcgggcggccagtggcgactacagcagggactggctgccaacccctccggctacgggccccttaccgagctcccagactggtcatatgcggatggccgccctgctcccccaatgaaaggccagcttcgaagaaaagctgaaagggagacgtttgcaagacgagttgtactgctgtcacaggaaatggacgctggattacaagcatggcagctcaggcagcagaagttgcaggaagaacaaaggaagcaggaaaatgctcttaaacccaaaggggcttcactgaagagcccacttccaagtcaataaaaagcaactcctgcctcccttcctcg

SEQ ID NO: 5264 - DNA, 468 bp, Homo sapiens; identical to SEQ ID NO: 4185

SEQ ID NO: 5265 - DNA, 453 bp, Homo sapiens; identical to SEQ ID NO: 4186

SEQ ID NO: 5266 - DNA, 452 bp, Homo sapiens; identical to SEQ ID NO: 4187

SEQ ID NO: 5267 - DNA, 399 bp, Homo sapiens
tactgctacgacaacatccatttcatgaaagcctttcagaagattgtggttctcttttataaagctgatgttctgagcgaagaagcaatactgaaatggtataaggaagcacatgttgctaaaggcaaaagtgtttttcttgaccagatgaagaaatttgttgagtggttacaaaatgcagaagaagaatccgaatcggaaggtgaggaaaattaaatggctcaacaagcacaatacctaggttaccccacaccactttttgattgggaatgctgaaccatttgagaagagaaacttggcttctgttttcgcaaaggaaaaaaaaaataggataggcttcccttgtgcagagggagaaatggttttgttttggttttgtttttaaatggagccctgagg

SEQ ID NO: 5268 - DNA, 411 bp, Homo sapiens
acagaagggtgacattttggtatctttcatctgaccatccatatccaatgttctcatttaaacattacccagcatcattgtttataatcagaaactctggtccttctgtctggtggcacttagagtcttttgtgccataatgcagcagtatggagggaggattttatggagaaatggggatagtcttcatgaccacaaataaataaaggaaaactaagctgcattgtgggttttgaaaaggttattatacttcttaacaattctttttttcagggacttttctagctgtatgactgttacttgaccttctttgaaaagcattcccaaaatgctctattttagatagattaacattaaccaacataattttttttagatcgagtcagcataaatttctaagtcagcctctag

SEQ ID NO: 5269 - DNA, 60 bp, Homo sapiens
tgaggggattcacttgtgtgcgggactcctcttaaccatgggggcccttttccttgcacc

SEQ ID NO: 5270 - DNA, 133 bp, Homo sapiens
cttaaaaatgtaatgtgggtgctggcccggcgcgggggctcacgcctgtaatcccagcactttgggaggcccaggcgggcggatcacgaggtcaggagatcgagaccatcctggctaacacggtgaaaccccg

SEQ ID NO: 5271 - DNA, 348 bp, Homo sapiens
gcttttcattcccgttgttatggagggccacatctgccagagcctggagtctgcgaaggccgggacccggctccccggtccacagtgggggtgtgcaaacccgagagaactgggttgcaaattcgtgaagaatcagcatcatgtttggcagctgagtattggagccaggagcctgccatgaggttttgagaacagagtgctgttttagagctggcagcagcatctcagcccaagagaaggttatattcccagaggatgtcagtcccaaggaccagtagctgccatcagtttggattctgaaaactaactggcatcaacactgggtgtagaaacatgcttgccttatgt

SEQ ID NO: 5272 - DNA, 356 bp, Homo sapiens
  misc_feature 330: n = A,T,C or G
ggaagaaatgcatcactaggggttgattcccaatctgatcaactgataatgggtgagagagcaggtaagagccaaagtcaccttagtggaaaggttaaaaaccagagcctggaaaccaagatgattgatttgacaaggtattttagtctagttttatatgaacggttgtatcagggtaaccaactcgatttgggatgaatcttagggcaccaaagactaagacagtatctttaagattgctagggaaaagggccctatgtgtcaggcctctgagcccaagccaagcatcgcatcccctgtgatttgcacgtatacatccagatggcctanagtaactgaagatccacaaaagaagg

SEQ ID NO: 5273 - DNA, 281 bp, Homo sapiens; identical to SEQ ID NO: 4188

SEQ ID NO: 5274 - DNA, 136 bp, Homo sapiens
ctacaagagcccctgcccctctgttggaggcacagttttagaataaggaggaggagggagaagagaaaatgtaaaggagggagatctttcccaggccgcaccatttctgtcactcacatggacccaagataaaaga

SEQ ID NO: 5275 - DNA, 351 bp, Homo sapiens
ggcggctgcgccggcgcgtcgaggggagaggcagcagccgcgatggacgtgttcctcatgatccggcgccacaagaccaccatcttcacggacgccaaggagtccagcacggtgttcgaactgaagcgcatcgtcgagggcatactcaagcggcctcctgacgagcagcggctgtacaaggatgaccaactcttggatgatggcaagacactgggcgagtgtggcttcaccagtcaaacagcacggccacaggccccagccacagtggggctggccttccgggcagatgacacctttgaggccctgtgcatcgagccgttttccagcccgccagagctgcccgatgtgatg

SEQ ID NO: 5276 - DNA, 335 bp, Homo sapiens; identical to SEQ ID NO: 1082

SEQ ID NO: 5277 - DNA, 450 bp, Homo sapiens; identical to SEQ ID NO: 4193

SEQ ID NO: 5278 - DNA, 291 bp, Homo sapiens; identical to SEQ ID NO: 4194

SEQ ID NO: 5279 - DNA, 364 bp, Homo sapiens
acttgcgaggctgaggtgggaggatcacctgagcccaggaggtcgaggctgcagtgagcttgacagatctcatgacagggccttgctctgttgcccaggctggacagaatagatttaaattaaaatatatttctggccgggcgtggtggctcacacctgtaatcctggcactttgggaggctgaggcaagcagaccacctgaggtcaggagttcaagaccagcctggccaacatggtgaaaccctgtctctactaaaaatgcaaaaattatccgggcacgatggtgcatgcctgtaatcccagctactcggaaggctgaggcaggataattgcttgaaccccggagatggaggttttaatgatt

SEQ ID NO: 5280 - DNA, 365 bp, Homo sapiens
gcctcggcctcccagagtgctaggattacaggcgtgagccaccgcacccgtccgacaactcgatttttatatgaaaaggtaaccagggccaggcatagtggcttatgcctgtaacccagcattctgggaggctgaggtgggtggatcacctgaggtcaggagtttgagactagcctggccaacatggtgaaaccctgtctctactaaaaatacgaaaaattagctgggcatggtggtgggcacctgtaatcccagctactcaggagactgaggcaggagaattgcttgaacccgggaggcggagggttgaccctcctatactatgctactgaaattttagcctggattaatgtgtggagcactcg

SEQ ID NO: 5281 - DNA, 121 bp, Homo sapiens
ggacaaagggatctggacagaatcgccggacaggtggcagctgccaacaagaagcattagaacaaaccatgctgggttaataaattgcctcattcgcaaaaaaaaaaaaaaaaaaaaaagg

SEQ ID NO: 5282 - DNA, 398 bp, Homo sapiens
gtcttttcttaaacttttattttacgtttaggggtacatgtgaaaatttgttacataggtaaacacgtgtcatgggggtttgttgtacatattatttcatcacccaggtattaagctcagtacccaatagttatcttttctgctcctttcccttttcccaccaccctcctaccttttcattatctatgaaaaaatcatgttccaaaaagaataattgacttgcccaaggccatggctatagggctagttatgagcagtgctgggtctgcctatagattcctcacttcatgcatccacagggtagaagaaagtacttttttccttcattgtgatgcttccctgttattatcatccttatttttattattgacacatactgaaaaaaatttatgactgac

SEQ ID NO: 5283 - DNA, 502 bp, Homo sapiens
gtgctctgaaggcacagacttggaagcaccagctggaagaagaactgagacagcagaaagaagcagcttgtttcaaggctcgtccaaacaccgtcatctctcaggagccctttgttcccaagaaagagaagaaatcagttgctgagggcctttctggttctctagttcaggaaccttttcagctggctactgagaagagagccaaagagcggcaggagctggagaagagaatggctgaggtagaagcccagaaagcccagcagttggaggaggccagactacaggaggaagagcagaaaaaagaggagctggccaggctacggagagaactggtgcataaggcaaatccaatacgcaagtatcagggtctggagataaagtcaagtgaccagcctctgactgtgcctgtacctcccaaattctccactcgattccactgctaaactcagctgtgagctgcggataccgcccggcaatgggacctgctcttaacctcaaacct

SEQ ID NO: 5284 - DNA, 154 bp, Homo sapiens
cggagtgctgtgccacctggtgccgacaagaaagccgcggctgatgctgggtcagcaaccgaattccattttagaggcggatttggtcgtggacgtggtcagccacctcagttaaattggagaggattcttttgcattgaataaacttacagtc

SEQ ID NO: 5285 - DNA, 450 bp, Homo sapiens
gggcgaattgggtaccgggcccccccttgagaccccatgacctctagggtcacgcggaggctcctggggtcagactgagaaaggggctcgtcctgagaagccacaaagtgtgctcctgcgggggtgcggggtgggggaggtaccacgtctcccgggcagccacagatcccacactcacggcccatgtgacgcttggtgcagagctggaaggttctcagggtgggaggagggttatttttaacgcactgcactagagcatctctaaggccggtggttctggacagaaaaaccacaaaaatgagaagaccaggaatagcaagtccccagccctggggcctcatgtctgcaatgagcccttggtggctctgagcagtgccagttcagcaccttggagagctgccgcctctgtgcctcccctcctgcttgctgcgtgggggcttgtggagcctg

SEQ ID NO: 5286 - DNA, 691 bp, Homo sapiens; identical to SEQ ID NO: 265

SEQ ID NO: 5287 - DNA, 327 bp, Homo sapiens
ataccagataaaatactctttgactaccatgttaattcggggtaagcaaatgttctcatataggagttgacacttacccttgtactgcagtattccaagagaatgtcaatgttttctttgtcctcgaagtagtggtaaaactgcactacatgcttatgatgaagaattctgtgaagctctatttctttgtcaatcttttccctttgatgaggtttagctactctgctgtgaggaataattgttgcggcctagactttgttatttgacaaatatgtcatctcgtaacattttgcatagccaccctttgccagcactttgccccggcag

SEQ ID NO: 5288 - DNA, 600 bp, Homo sapiens
  misc_feature 566, 586: n = A,T,C or G
ctcgaagaatattttaatacattttaaaactcaacaaccttgtataaaaacctgtcgagtctgctggcacacgtggggctgggtggttgggggccggggctacgtgtggacagggctggtctggacgagtgggttggggcaagagggcatcgctcatcccaacacagaaacaggtctccagctccgaagattaaacaatccacccggctcccaccagttcctttccaaatcacggcccagccagccccgtgcgtgtcgagagtgggagagggtgtgtggaggtttgtgctgccccacgtgggcacccgaagatgccctggcaagtcacggagaaaacacagctctttcctccacaacaaggaaaatgatttaattctacaaatttacaaaccaaaatacaaaaacaaaacatggagcacaaagtaagacgaggagttcgagtctcatcgcagctccagccgcagtagccacgcctgtggtcccggctgagttctccccatgacggggtccactctgaccttcagaactgaggctgagcggggggccgcgcagagcccctggttcgntgtggtaaggtggagccgtntcttcagtcgtcgt

SEQ ID NO: 5289 - DNA, 914 bp, Homo sapiens
  misc_feature 845: n = A,T,C or G
ccagctcaacccttctttaatgtcatccagggagggggccagggatggaggggaggggttgaggagcgagaggcagttatttttgggtgggattcaccacttttcccatgaagaggggagacttggtattttgttcaatcattaagaagacaaagggtttgttgaacttgacctcgggggggatagacatgggtatggcctctaaaaacatggccccagcagcttcagtccctttctcgtcgatggtcagcacagccttatgcacggccttggagagcttcaggggtgcctcctctgtgaccccggagaggtcagccccattgctgaagaccttagtgatgcccagttgacccaggacgctcttcagatcataggttccagtaatggacagtttgggtaaatgtaagctggcagaccttctgtcttcattttccaggaacttggtgatgatatcgtgggtgagttcattttccaggtgctgtagtttcccctcgtcaggcaggaagaagatggcggtggcattgccaggtatttcatcagcagcacccagctggacagcttcttacagtgctggatgttaaacatgcctaaacgcttcatcataggcaccttcacggtggtcatctggttcacgtggaagtcctcttcctcggtgttcctgacttcaaagggtctctcccatttgcctttatagaagatgtgattcatcagagcagaaactgtgtctctgtcagaggctcgggcaaaaccacaattttcctctggggacccttctcccggatagtgtgagattgtttctggcgctccggggtgccccagattttgaatgagagtgcttcggtggngaacattttttaatcctcccaaaaatcttatctattagttgaggcctctgtgtagagaaaagggcattg

SEQ ID NO: 5290 - DNA, 325 bp, Homo sapiens
gcttttcgccatcttttgtctttccgtggagctgtcgccatgaaggtcgagctgtgcagttttagcgggtacaagatctaccccggacacgggaggcgctacgccaggaccgacgggaaggttttccagtttcttaatgcgaaatgcgagtcggctttcctttccaagaggaatcctcggcagataaactggactgtcctctacagaaggaagcacaaaaagggacagtcggaagaaattcaaaagaaaagaacccgccgagcagtcaaattccagagggccattactggtgcatctcttgctgatataatggccaagaggaatc

SEQ ID NO: 5291 - DNA, 297 bp, Homo sapiens; identical to SEQ ID NO: 4202

SEQ ID NO: 5292 - DNA, 340 bp, Homo sapiens
gcttttccaagcggctgccgaagatggcggaggtgcaggtcctggtgcttgatggtcgaggccatctcctgggccgcctggcggccatcgtggctaaacaggtactgctgggccggaaggtggtggtcgtacgctgtgaaggcatcaacatttctggcaatttctacagaaacaagttgaagtacctggctttcctccgcaagcggatgaacaccaacccttcccgaggcccctaccacttccgggcccccagccgcatcttctggcggaccgtgcgaggtatgctgccccacaaaaccaagcgaggccaggccgctctggaccgtctcaaggtgtttga

SEQ ID NO: 5293 - DNA, 510 bp, Homo sapiens; identical to SEQ ID NO: 4205

SEQ ID NO: 5294 - DNA, 435 bp, Homo sapiens; identical to SEQ ID NO: 4206

SEQ ID NO: 5295 - DNA, 459 bp, Homo sapiens
gaagccaagtgactcagtcatttcaggtgcaaatctcagtaatcgagataaacaatattttaatataatactttaaaaatcaatattgtggctcatgcctgtaatcccagcactttgggaggccgaggcaggcggaccacgaggtcaggagatcgagaccatcctggctaacacggagaaaccccgtctctactaaaaatacaaaaaattagccgggcgtggtggtgggcgcctgtagtcccagctactcaggaggctgaggcaagagaatggcttgaagccaggggaggcagagcttgcagtgagccaaaatcgcgccactgcactccagcctgggcgacagagcaaggctctgtctcaatattaatgcaaaaaacactatgtggcataacaactaaaggtaatgtagtccggaacaggaaagaacattatgtaaaaactaaggaaatatgaatagag

SEQ ID NO: 5296 - DNA, 480 bp, Homo sapiens; identical to SEQ ID NO: 1095

SEQ ID NO: 5297 - DNA, 416 bp, Homo sapiens
atcataaacattctataatactttatagtttacacaaagcattttcataagtttatctcatttaatcatcataacaaatctatgggacctagatatttatacctgttctacagatgaggagattaaagaagtttaagagccgggtgcggtggctcacgcctgtaatcccagcactttgggaggctgaggtgggcggatcacaagtcaggagatcgagaccatcttggctaatgtggagaaaccctgtctgtactaaaaatacaaaaattagccgggtgtggtggcaggcgcctgtagtcccagctgctccggaggctgacgcatgataatggtgtgaacccgggaggaggagcttgcagtgagccaagatcatgccactgcactccaacctggatgacagagtgagactctgtctc

SEQ ID NO: 5298 - DNA, 110 bp, Homo sapiens; identical to SEQ ID NO: 4208

SEQ ID NO: 5299 - DNA, 386 bp, Homo sapiens
tggcatcacggagggaggacgcctcggctggctggaagcggctcacctgctaaaaagccctcggagccaggcgcggtggctcacgtctataatcccagcactttgggaggccaagacgggcagatcacctgaggtcggggttcgagaccagtctgaccaacatggagaaaccctgtctctactaaaaatacaaaattagctgggcgtggcggcatgcgcctgtagtcccagctactcacgaggctgaggcaggccaattgcttgaacctgggaggcggaggtggcactgagccaagattgtgccattgcactccagcctaggcaacaagagtaaaactccgtcccaaaggaaaaaactacgaaccaaaagaaaaaattttttgggg

SEQ ID NO: 5300 - DNA, 495 bp, Homo sapiens; identical to SEQ ID NO: 1096

SEQ ID NO: 5301 - DNA, 314 bp, Homo sapiens; identical to SEQ ID NO: 4213

SEQ ID NO: 5302 - DNA, 505 bp, Homo sapiens; identical to SEQ ID NO: 4214

SEQ ID NO: 5303 - DNA, 67 bp, Homo sapiens
tggaccttgaacctaccagctgttgaactgaaccaggggggctctcctggtgctcatagccttcaaa

SEQ ID NO: 5304 - DNA, 55 bp, Homo sapiens; identical to SEQ ID NO: 4216

SEQ ID NO: 5305 - DNA, 315 bp, Homo sapiens
gactccgtctcaatatgtctcaagatggcggccaatgtgggatcgatgtttcaatattggaagcgctttgatttacagcagctgcagagagaactcgatgccaccgcaacggtattggcgaaccggcaggatgaaagtgagcagtccataaagcggcttatcgaacagagccgggagttcaagaagaacactccagaggatttgcgcaagcaggtagcgccgctgctgaagagtttcctaggagagattgatgcactgagtaaaagaagcaaggaagctgaagcagctttcttgaatgtctacaaaaagattgat

SEQ ID NO: 5306 - DNA, 437 bp, Homo sapiens; identical to SEQ ID NO: 4219

SEQ ID NO: 5307 - DNA, 360 bp, Homo sapiens
ggagctggataatcagatagttactgctacccagagcaatatctgtgatgaagacagtgctacagagacctgctacacttatgacagaaacaagtgctacacagctgtggtcccactcgtatatggtggtgagaccaaaatggtggaaacagccttaaccccagatgcctgctatcctgactaatttaagtcattgctgactgcatagctctttttcttgagaggctctccattttgattcagaaagttagcatatttattaccaatgaatttgaaaccagggcttttttttttttttggggggaggaaaaaccacctccttgcccccaaaataataaaaaaggccccttggtttttttt

SEQ ID NO: 5308 - DNA, 440 bp, Homo sapiens; identical to SEQ ID NO: 4221

SEQ ID NO: 5309 - DNA, 297 bp, Homo sapiens
ggagagcgtgcggccgggtaagggagccgtcttctcagattcaccacaacatggcaaatctttttataaggaaaatggtgaaccctctgctctatctcagtcgtcacacggtgaagcctcgagccctctccacatttctatttggatccattcgaggtgcagcccccgtggctgtggaacccggggcagcagtgcgctcacttctctcacccgggctcctgccccatctgctggctgcgctggggttcaaaaacaagactgtccttaagaaacgctgcaaggactgttacctggtga

SEQ ID NO: 5310 - DNA, 204 bp, Homo sapiens
gccctttcctataacaggcctcaacggggcgggagccgccaaaatgaagtttaatccctttgtgacttccgacccaagcaagaatctcaaaaggcatttcaatgcaccttcccacattcgaaggaagattatgtcttcccctcttttcaaagagctgagacagaagtacaacgtgcgatccatgcccctcccaaaggatgatga

SEQ ID NO: 5311 - DNA, 223 bp, Homo sapiens
gtttgaaattttttcaaatgaaatgtatttttaaaatatagaaaacaaaaactggctgggcacagtagctcacgcctgtaatcccagcactctgggaggcccaggcgggtggatcatgaggtcacgactttgagaccagcctggccaatatggtgaaaccccatctctactaaaaatacaaaaattatctgggtgtggtggcacgcatctgtagtcccagcta

SEQ ID NO: 5312 - DNA, 315 bp, Homo sapiens
ataaccatgcacactactataaccaccctaaccctgacttccctaattccccccatccttaccaccctcgttaaccctaacaaaaaaaactcatacccccattatgtaaaatccattgtcgcatccacctttattatcagtctcttccccacaacaatattcatgtgcctagaccaagaagttattatctcgaactgacactgagccacaacccaaacaacccagctctccctaagcttcaaactagactacttctccataatattcatccctgtagcattgttcgttacatggtccatcatagaattctcactg

SEQ ID NO: 5313 - DNA, 362 bp, Homo sapiens
caagaaaacttacgaacaaccccatctccagacaaaggaagagcaacggaagaaacgcgagcaagaacgaaaggagaagaaagcaaaggttttgggaatgcgaaggggcctcattttggctgaagattaataattttttaacatcttgtaaatattcctgtattctcaacttttttccttttgtaaattttttttttttgctgccatccccactttagtcacgagatctttttctgctaactgttcatagcctgtgtagggcccatgggttcttcatgggctatgatctctgaaaagacgttatcaccttaaagctcaaattctttgggagggtttttacttaagcccattaccaattcagg

SEQ ID NO: 5314 - DNA, 502 bp, Homo sapiens
agaggggatgtggtgagagccaggttcctctggccctctccagggtgttttccactagtcactactgtcttctccttgtagctaatcaatcaatattcttcccgtgcctgtgggcagtggagagtgctgctgggtgtacgctgcacctgcccactgagttggggaaagaggataatcagtgagcactgttctgctcagagctcctgatctaccccaccccctaggatccaggactgggtcaaagctgcatgaaaccaggccctggcagcaacctgggaatggctggaggtgggagagaacctgacttctctttccctctccctcctccaacattactggaactctatcctgttaggatcttctgagcttgtttccctgctgggtgggacagaggacaaaggagaagggagggtctagaagaggcagcccttctttgtcctctggggtaaatgagcttgacctagagtaaatggagagaccaaaagcctctgatttttaattt

SEQ ID NO: 5315 - DNA, 333 bp, Homo sapiens
gagtcttggctgggagacctgtactccgtactccgtacttcgtagtcgcagcggcgcggtcttcggcagtctagtcatccaccgccatcctgggccccacgtgttgcctgaccattcctgagcccaggtgggagccgtggctgaggtgacggtctcaaagtggaagagcttactgtcacagcaactcctttgcaagatgccccggccaggaatagttgctgaacaccccaggcctgctgaggtccctccttgagtctcatggtcaagcagtctttgtccatgaaactgggaggcgaccgtgttagctgccagttcctgacagccacctctcac

SEQ ID NO: 5316 - DNA, 514 bp, Homo sapiens; identical to SEQ ID NO: 1101

SEQ ID NO: 5317 - DNA, 426 bp, Homo sapiens; identical to SEQ ID NO: 4232

SEQ ID NO: 5318 - DNA, 485 bp, Homo sapiens; identical to SEQ ID NO: 4233

SEQ ID NO: 5319 - DNA, 527 bp, Homo sapiens; identical to SEQ ID NO: 1103

SEQ ID NO: 5320 - DNA, 521 bp, Homo sapiens
gggtacggctgcgcgaagacggcagaaggggggaggggctctgcgttctgtagtggcgctgcttgggcccgtggcggattgtaagctgctggttttgcggctgggaagagcggcgagagggttcggcatttttcgtcgggatccccgcaaggatgagtgctgccagagagtctcacccgcatggggtgaagcgttcagcctccccagacgacgatctgggatctagcaattgggaggcagcagacttgggtaatgaagagaggaaacaaaagttcttgagacttatgggtgcaggaaagaaagaacatactggtcgtcttgttataggagatcacaaatcaacatctcacttccgaaccggggaagaagacaagaaaattaatgaagaactggagtctcaatatcagcaaagtatggacagtaaattatcaggaagatatcggcgacattgtggacttggcttcagtgaggtagaagaccatgatggagaaggtgatgtggctggagatgatgatgatgac

SEQ ID NO: 5321 - DNA, 487 bp, Homo sapiens; identical to SEQ ID NO: 4238

SEQ ID NO: 5322 - DNA, 84 bp, Homo sapiens; identical to SEQ ID NO: 4240

SEQ ID NO: 5323 - DNA, 364 bp, Homo sapiens; identical to SEQ ID NO: 4241

SEQ ID NO: 5324 - DNA, 131 bp, Homo sapiens; identical to SEQ ID NO: 1105

SEQ ID NO: 5325 - DNA, 95 bp, Homo sapiens; identical to SEQ ID NO: 4242

SEQ ID NO: 5326 - DNA, 210 bp, Homo sapiens
acaaccggcattctgtctggaaaacgacatactggctgggatgcagaatactaccgaagggtctcttcctttctgggctcggacctaggtcgcggcgacatggccaaacgtaccaagaaagtcgggatcgtcggtaaatacgggacccgctatggggcctccctccggaaaatggtgaagaaaattgaaatcagccagcacgccaagtac

SEQ ID NO: 5327 - DNA, 402 bp, Homo sapiens; identical to SEQ ID NO: 4243

SEQ ID NO: 5328 - DNA, 440 bp, Homo sapiens; identical to SEQ ID NO: 4244

SEQ ID NO: 5329 - DNA, 70 bp, Homo sapiens; identical to SEQ ID NO: 4247

SEQ ID NO: 5330 - DNA, 446 bp, Homo sapiens
tgggaactcggtggtggccactgcgcagaccagacttcgctcgtactcgtgcgcctcgcttcgcttttcctccgcaaccatgtctgacaaacccgatatggctgagatcgagaaattcgataagtcgaaactgaagaagacagagacgcaagagaaaaatccactgccttccaaagaaacgattgaacaggagaagcacgcaggcgaatcgtaatgaggcgtgcgccgccaatatgcactgtacattccacaagcattgccttcttattttacttcttttagctgtttaactttgtaagatgcaaagaggttggatcaagtttaaatgactgtgctgcccctttcacatcaaagaactactgacaacgaaggccgcgcctgcctttcccatctgtctatctatctggctggcagggaaggaaagaacttgcatgttggtgaaggaa

SEQ ID NO: 5331 - DNA, 401 bp, Homo sapiens
gactccgccttccacgtgcacccactgcctcttcccttctcgcttgggaactctagtctcgcctcgggttgcaatggaccccaactgctcctgtgccgctggtgtctcctgcacctgcgccagctcctgcaagtgcaaagagtgcaaatgcacctcctgcaagaagagctgctgctcctgctgccctgtgggctgtgccaagtgtgcccagggctgcatctgcaaaggggcatcggagaagtgcagctgctgcgcctgatgtcgggacagccctgctcccaagtacaaatagagtgacccgtaaaatccaggattttttgttttttgatacaatcttgacccctttgctacattcctttttttctgtgaaatatgtgaataataattaaacacttagactt

SEQ ID NO: 5332 - DNA, 438 bp, Homo sapiens; identical to SEQ ID NO: 4249

SEQ ID NO: 5333 - DNA, 370 bp, Homo sapiens; identical to SEQ ID NO: 4250

SEQ ID NO: 5334 - DNA, 495 bp, Homo sapiens; identical to SEQ ID NO: 4254

SEQ ID NO: 5335 - DNA, 477 bp, Homo sapiens; identical to SEQ ID NO: 4256

SEQ ID NO: 5336 - DNA, 505 bp, Homo sapiens
gaagggggcgcattcttacctgtcggggtgcggcgagtgtctcacctctctgcacttccaaggactcttgtcatctgccttaggcgggaaatgctgttgctggattgcaaccccgaggtggatggtctgaagcatttgctggagacaggggcctcggtcaacgcacccccggatccctgcaagcagtcgcctgtccacttagccgcaggaagcggccttgcttgctttcttctctggcagctgcaaacgggcgctgacctcaaccagcaggatgttttaggagaagctccactacacaaggcagcaaaagttggaagcctggagtgcctaagcctgcttgtagccagtgatgcccaaattgatttatgtaataagaacgggcaaacagctgaagatctcgcttggtcatgtggatttccagactgtgccaagtttcttacaacaattaaatgtatgcagacaataaaagcaagtgaacaccctgacaggaatgattgtgttgccg

SEQ ID NO: 5337 - DNA, 503 bp, Homo sapiens
gaaatgtgctcatagccaaaacattttactctctcctcctagaatgctgcccttgacatttcccattgctgtatgttatttcttgctctgttatcttttgccctcttagaatgtccctctcttgggacttgcttagatgatgggatatgaatattattagacagtaattttgctttccatccagtatgctagttcttattcgagaactatggtcagagcgtatttggatatgagtatcctttgcttatctttgtagtactgaaaatttgccgaagtaactggctgtgcagaatgtaatagaagcttttcttattcttttattcttaagatcagtatctttttacagtattctttctacatgatcctttttttgtacatttaagaatattttgattatattaaacaagactgctgattttgctactttttttaaggggtcttcaagtaagtaaaacatacatcgtagctagaagaaaaatgtaccttaaatttgcatcttccct

SEQ ID NO: 5338 - DNA, 500 bp, Homo sapiens; identical to SEQ ID NO: 4257

SEQ ID NO: 5339 - DNA, 509 bp, Homo sapiens; identical to SEQ ID NO: 4258

SEQ ID NO: 5340 - DNA, 576 bp, Homo sapiens
gaatttggccctcgaggccaagaattcggcacgaggcaaccttaaccaaatcggcagcagccacctcgaccgcccacacattcctggccaatcagctcagctgtttatttaccaaatgtcttcacaacaactacagcagcagccttcggctaacaaaaaagcaggaaaaatccacaacacccccttcgccaaccaactaaatccaacgcaacatctggcaaaaccttttcagcaaattcttcctggccgtcagtccggcagcctcacctcaccatttctagcttgttgaaacccaaaactaatctccaagaaggagaagcttctctcgcagccggagcaggtccctttctagagataggagaagagagagatcgctgtctcgggagagaaatcacaagccgtcccgatccttctctaggtctcgtagtcgatctaggtcaaatgaaaggaaatagaagacagtttgcaagagaagtggtgtacaggaaattacttcatttgacaggagtatgtacagaaaattcaagttttgtttgagacttcataagcttggtgcatttttaagatgttttagct

SEQ ID NO: 5341 - DNA, 460 bp, Homo sapiens; identical to SEQ ID NO: 230

SEQ ID NO: 5342 - DNA, 556 bp, Homo sapiens
gcacaggcactgccaggccgttctgatttccaggggccacgactgggggactggtggtttggagggatctgtccccagagggctggctgcagggctcattcacactgtcctgagactggctgggtgccagcggggtggaaggtgactcctcgagaggcttgtcagcattgaggcttggcggactcacctcagaggagttctgagtatggttctccagggtggaggcggcatccacggcgtcctcctcttccccctcatcccggccgtcttcgatctcttccatcacctcggccttggcctcagccaccagctcccgcagagccttgttactggtgatgctgctgacgaagggatgctccagcagctgcgcggcactgggtcgggtttctgggttcttatccagggctatcttcaggaagtcacggaactctacagaccacttggagggcgtgagcagcgtgggagggtccgacttggcgatctttagcaggacccgcatggggttgagctcgtggtgtggcggctcgatctgggccatctcaatcagcgtgatgcc

SEQ ID NO: 5343 - DNA, 495 bp, Homo sapiens; identical to SEQ ID NO: 232
  misc_feature 331: n = A,T,C or G

SEQ ID NO: 5344 - DNA, 943 bp, Homo sapiens
ccaaaagccttgtttttatttatatagagtcctaaccacttcggtgggaggaggagtgggagaggctcctttttcaatccagggacctccatgatgttggtttgttgttaccaaacacacaggtaagtggcatcacggatctggtaaactaacgacaatgtttagtctctctctgctagagcaacaaggtgagcatcaatctctgcttctgtaagaatcctgaatttaggattttcaactgtcactactccaacttctatttctgaaggtttgaaatcaattgatagaacagtagacaggcatgtaattgcagtttccactgtctgttcaaatgtccaatcaaatttcttcttcacttttttttcaaggaagctggttgactcagtttgtttaactcccgctgcagtggctttaaacccacagtagtaacctgcaggatcacacttatatacctgagggccttgctcttcatctataccaattaaaatcatacaacaaccaagagggctcatttcagcattctgtgtgtagacctgagaaatatcggcaattcttttacacagcatgtcacaggaatctcatagccatacttgtatttccagttagctgcctcataggaggcctctgtacctgggatctgctgtcagctgtcattacggtcatcacacaaccaatgttttcagtatcctggaaaagagaggcactgtgctggaatccataatttgttcaggaccttcctcctgggtgacaattaacggacagtcttttccctcgacaggcaatggatggaagggcaacccggttaattgagcttaaaagcaaattcctccttggggagccgccccccccgtggaaaaaatggtgatgtggcggtcaaaaccggcgctggaacacccgggaaatgttgggagaaaaaatacttttaaaaaaaatctcctgggcc

SEQ ID NO: 5345 - DNA, 655 bp, Homo sapiens
gaatttggccctcgaggccaagaattcggcacgaggagatgatccgccaccccaatatcactcagctccttgatattttagaaacggaaaacagctactacctggtcatggagctgtgccctgggggcaacctgatgcacaagatctatgagaagaagcggctggaggagtccgaagcccgcagatacatccgacagctcatctctgccgtagagcacctgcaccgggccggggtggtccacagagacttgaagatagagaatttgctactagatgaagacaataatatcaagctgattgactttggtttgagcaactgcgcagggatcctgggttactcggatccgttcagcacacagtgtggcagccctgcctacgctgcacctgaactgctcgccaggaagaaatacggccccaaaatcgatgtctggtccatgtgccatcagtttcctgcgctctctcctggaaccggatcctgtgaagaggccaaatattcagcaggcactggcgaatcgctggcttaatgagaattacacgggcaaagtgccctgtaatgtcacctatcccaacaggatttctctggaagatctgagcccgagcgtcgtgctgcacatgaccgagaagctgggttacaagaacagcgacgtgatcaaca

SEQ ID NO: 5346 - DNA, 694 bp, Homo sapiens; identical to SEQ ID NO: 4259

SEQ ID NO: 5347 - DNA, 440 bp, Homo sapiens
gaatttggccctcgaggccaagaattcggcacgaggataaaaacaactcccatcagtagcaatacaaggttatacattttaaccagattttctcaggccttttttggatacctttagtagttaactctcttttgtcaaaccctcttgtatataaccatcgcacaacatacagaaccctggggaatacagccaagggcactgctcactgtggcccgtgtattcattcccacaggctgcactgaaataacctggtaaacaacaccctcctccattttgcgtctatttcttctattgtgcttctttggggataggaagagaaacataactactgttccaggtaacgtctgtatcatacagttagtgttgccagtgaaacgttcccagatacaaagaattgtgcttttaattccatttcacaatctgttttgtttttttttttg

SEQ ID NO: 5348 - DNA, 502 bp, Homo sapiens
cgacagaaggggagaccgcgctgggttgccgctgccgctgccgccatcgtgccagcccctcgggtctccgtgaggccgggtgacgctccagaatgggagacaagccaatttgggagcagattggatccagcttcattcaacattactaccagttatttgataatgatagaacccaactaggcgcaatttacattgacgcgtcatgccttacgtgggaaggacaacagttccaggggaaagctgccattgtggagaagttgtctagccttccgttccagaaaattcagcacagcatcaccgcgcaggaccatcagcccactccagatagctgcatcatcagcatggttgtgggccagcttaaggcggatgaagaccccatcatggggttccaccagatgttcctattaaagaacatcaacgatgcttgggtttgcaccaatgacatgttcaggctcgccctgcacaactttggctgacctcctctcagctaggcactcacgct

SEQ ID NO: 5349 - DNA, 520 bp, Homo sapiens
gagtttccggtgcggcgaacaccaaagtccgggaacttaagcattttcggtttctagggttgttacgaagctgcaggagcgagatggaggtggacgcaccgggtgttgatggtcgagatggtctccgggagcggcgaggctttagcgagggagggaggcagaacttcgatgtgaggcctcagtctggggcaaatgggcttcccaaacactcctactggttggacctctggcttttcatccttttcgatgtggtggtgtttctctttgtgtattttttgccatgacttgttcgctgatatctaaattaagaagttggttcttgagtgaattctgaaaatggctacaaacttcttgaataaagaagacaggactctcaatagaagaatttcacatctccaagggacccttcctttcattttacactttgttactaatttgcagaactctattaattgggtaggatttcacccattcctagctaagttcttaaaattaaaccctttggttcgtgtttaaaaac

SEQ ID NO: 5350 - DNA, 516 bp, Homo sapiens
agaagggggccgtggggcgggtatgggactagctggcgtgtgcgccctgagacgctcagcgggctatatactcgtcggtggggccgacggtcagtctgcggcagcggcagcaagacggtgcagtgaaggagagtgggcgtctggcggggtccgcagtttcagcagagccgctgcagccatggccccaatcaaggtgggagatgccatcccagcagtggaggtgtttgaaggggagccagggaacaaggtgaacctggcagagctgttcaagggcaagaagggtgtgctgtttggagttcctggggccttcacccctggatgttccaagacacacctgccagggtttgtggagcaggctgaggctctgaaggccaagggagtccaggtggtggcctttctgagtgttaatgatgcctttgtgactggcgagtggggccgagcccacaaggcggaaggcaaggttcggctcctggctgatcccactggggcctttgggaaggagacagacttattact

SEQ ID NO: 5351 - DNA, 497 bp, Homo sapiens; identical to SEQ ID NO: 4264

SEQ ID NO: 5352 - DNA, 308 bp, Homo sapiens
tcttaatgcagaattgggatgcagccatggaagaccttacacggttaaaagagaccatagataataattctgtgagttctccacttcagtctcttcagcagagaacatggctcattcactggtctctgtttgttttcttcaatcaccccaaaggtcgcgataatattattgacctcttcctttatcagccacaatatcttaatgcaattcagacaatgtgtccacacattcttcgctatttgactacagcagtcataacaaacaaggatgttcgaaaacgtcggcaggttctaaaagatctagttaaa

SEQ ID NO: 5353 - DNA, 502 bp, Homo sapiens; identical to SEQ ID NO: 4265

SEQ ID NO: 5354 - DNA, 435 bp, Homo sapiens
cgattacattgcagtgaagggagaagtatgccaagtacctgcctcacagtgcagggcggtatgccgccaaacgccttccgcaaagctcagtgtcccattgtggagcgcctcactaactccatgatgatgcacggccgcaacaacggcaagaagctcatgactgtgcgcatcgtcaagcatgccttcgagatcatacacctgctcacaggcgagaaccctctgcaggtcctggtgaacgccatcatcaacagtggtccccgggaggactccacacgcattgggcgcgccgggactgtgagacgacaggctgtggatgtgtcccccctgcgccgtgtgaaccaggccatctggctgctgtgcacaggcgctcgtgaggctgccttccggaacattaagaccattgctgagtgcctggcagatgagctcatcaatgct

SEQ ID NO: 5355 - DNA, 333 bp, Homo sapiens
gctttcgcgtctgcggtgcccggagtgtggtacttctcctagttgcagtcaggcttcatacgctattgtcctgcccgttagagcagccagcgggtacagaatggattttggaagagggagtcaccactggacctccaaggaagccacgtgcagacatctacaaccttcgatctcctgacgagtttattgttggccaaaaccaggctttgattgaaccacgatgaatgcgggtgttggaagtagaatatatatatacatataaaattgaaactggcgatggaatatgagaggagccctctggaaagaaaaggacagaccctgtgctttcatgaa

SEQ ID NO: 5356 - DNA, 156 bp, Homo sapiens
tgctaaaaaccatgctattcatgcacacaatggctgtatccccaaatctaatctttggctaaagatggggaggtatgtctctctcattcccacgagatttgcatatgacgacattaatacaaggttcctaaatgatatcccaagctctcagattct

SEQ ID NO: 5357 - DNA, 371 bp, Homo sapiens; identical to SEQ ID NO: 4273

SEQ ID NO: 5358 - DNA, 409 bp, Homo sapiens; identical to SEQ ID NO: 4277

SEQ ID NO: 5359 - DNA, 321 bp, Homo sapiens; identical to SEQ ID NO: 1112

SEQ ID NO: 5360 - DNA, 352 bp, Homo sapiens
gcaggtctgatccaacttcgtatgcagggtacattgaagaccttaagaagtttctaaaaccatatactttagaagaacagaagaacctcacagtctgtcctgatggagcactttttgaacagaagggtccagtttatgttgcatgtcagtttcctatttcattacttcaagcatgcagtggtatgaatgatcctgattttggctattctcaaggaaacccttgtattcttgtgaaaatgaacagaataattggattaaagcctgaaggagtgccaaggatagattgtgtttcaaagaatgaagatataccaaatgtagcaggttatcctcataatggaatgatagacttaaa

SEQ ID NO: 5361 - DNA, 271 bp, Homo sapiens
gattacaggcgtgcaccaccatgcccagcttgtttttgtatttttaatagagatgaggtttcaccttgttggccaggctggtctctactgctgacctcaggtgatccactcaccttggcctgccaaagtgctgggattacaggtgtgagccactgcgcccggcctactacatacatttctaaaaaaaaaaatacattactaaaaaaaaaaggggggcttttttttaaaaaccccccctttaaaaaaaaacttgggggggggggaaaacccc

SEQ ID NO: 5362 - DNA, 239 bp, Homo sapiens; identical to SEQ ID NO: 1113

SEQ ID NO: 5363 - DNA, 147 bp, Homo sapiens
ctgtggactcacaaattttaccaaaaatcaaagctcttcctcatctccagggctacctgcgatctgtgtttgctctgacgaatggaatttatcctcacaaattggagtactgagtgtcttaagaacctaattaaatagctgactaca

SEQ ID NO: 5364 - DNA, 450 bp, Homo sapiens; identical to SEQ ID NO: 4281

SEQ ID NO: 5365 - DNA, 390 bp, Homo sapiens; identical to SEQ ID NO: 4282

SEQ ID NO: 5366 - DNA, 305 bp, Homo sapiens; identical to SEQ ID NO: 4283

SEQ ID NO: 5367 - DNA, 496 bp, Homo sapiens
gatcaatgtgaagagattccagaaaacactatatgtggaagaagttgttccgaatgtaattgaaccttccttcggcctgggtaggatcatgtatacggtatttgaacatacatttcatgtacgagaaggagatgaacagagaacattcttcagtttccctgctgtagttgctccattcaaatgttccgtcctcccactgagccaaaaccaggagttcatgccatttgtcaaggaattatcggaagccctgaccaggcatggagtatctcacaaagtagacgattcctctgggtcaatcggaaggcgctatgccaggactgatgagattggcgtggcttttggtgtcaccattgactttgacacagtgaacaagaccccccacactgcaactctgagggaccgtgactcaatgcggcagataagagcagagatctctgagctgcccagcatagtccaagacctagccaatggcaacatcacatgggctgatgtggag

SEQ ID NO: 5368 - DNA, 320 bp, Homo sapiens
gtggtggctgctcttggcatgattaaaaaaatatggccaggcgtggtggctcatgcctgtaatcccagcaatttgagaggctgaggagtgtggatcacctgaggtcaggagtttgagaccagcctggtcgacatggtgaaaacccgactctgccaaaaatacaaaagttagccaggcatggtagcaggcacctgtaatcccagctactcgggaggctgaggcaggagaatcacttgaacccgggagatggaagttgcagtgagccgagttcacaccattgcactccaacctgggcaacaagagcaaaactgcatctcaaa

SEQ ID NO: 5369 - DNA, 247 bp, Homo sapiens
gggccttgctaactttatttcagaaagtggtaaaatagctatggagtacagacccagtgaagagattgtagatgtcagatgggaagaagaactacacgggttaatataagtatgtggagataaaaactcaaaggtgacagggccgggcacagtggctcacacctgtaatgccagtgcttttggaggctgaagcgggtggatcacctgaggtcaggagttcaagatcagactgaccaacatggagaaa

SEQ ID NO: 5370 - DNA, 50 bp, Homo sapiens
gtctgtcaaagcctatactaactttgatgctgagcgggatgctttgaaca

SEQ ID NO: 5371 - DNA, 139 bp, Homo sapiens
ccctgcctcaagcctcctgagtagctgggactacaggcacacgccaccacgcctggctaatttttgttttttgggttgatttgtttttttgagacagagtctcactctgtcacccaagctggagtgcattggtgtgatt

SEQ ID NO: 5372 - DNA, 526 bp, Homo sapiens; identical to SEQ ID NO: 2612

SEQ ID NO: 5373 - DNA, 478 bp, Homo sapiens; identical to SEQ ID NO: 4290

SEQ ID NO: 5374 - DNA, 93 bp, Homo sapiens
ggccacatggtgtcagatgaatatgagcagctgtcctctgaagccctggaggctgcccgaatttgtgccaataagtacatggtaaaaattttt

SEQ ID NO: 5375 - DNA, 524 bp, Homo sapiens; identical to SEQ ID NO: 4291

SEQ ID NO: 5376 - DNA, 293 bp, Homo sapiens
gagacagcagcgactttaggctggataatagtcaaattcttacctcgctctttcactgctagtaagatcagattgcgtttctttcagttactcttcaatcgccagtttcttgatctgcttctaaaagaagaagtagagaagataaatcctgtcttcaatacctggaaggaaaaacaaaataacctcaactccgttttgaaaaaaacattccaagaactttcatcagagattttacttgacaggaaaggccatgtgaggacatagggagaaagcagccaccattggcaagccaa

SEQ ID NO: 5377 - DNA, 489 bp, Homo sapiens
gacacgtgaaggtcggtgcggagttcgtctctgcaagcttggtcgccctgggatggattcctcctcctcttcctccgcggcgtgtttgggtgcagtggacccgcagttgcagcatttcatcgaggtagagactcaaaagcagcgcttccagcagctggtgcaccagatgactgaactttgttgggagaagtgcatggacaagcctgggccaaagttggacagtcgggctgaggcctgttttgtgaactgcgttgagcgcttcattgatacaagccagttcatcttgaatcgactggaacagacccagaaatccaagccagttttctcagaaagcctttctgactgatctcagcattacctctttggaaaaggaaggtagttcaagaaatgaagagctgttgatgggatgattgaagaaacagctatgagaggattggctcccatcttttgttactcttgggacatcctgtcatctgagaatgaacaaag

SEQ ID NO: 5378 - DNA, 86 bp, Homo sapiens
ccgctggagaagaccacagaagggggagatgccactttgaagaaccccatcctctggaatgtggctgatgtggtcatcaaattccc

SEQ ID NO: 5379 - DNA, 77 bp, Homo sapiens
gctcttcctaagccggcgctcggcaagttctcccaggagaaagccatgttcagttcgagcgcccagatcgtgaagcc

SEQ ID NO: 5380 - DNA, 360 bp, Homo sapiens
gactccgccttccacgtgcacccactgcctcttcccttctcgcttgggaactctagtctcgcctcgggttgcaatggaccccaactgctcctgtgccgctggtgtctcctgcacctgcgccagctcctgcaagtgcaaagagtgcaaatgcacctcctgcaagaagagctgttgctcctgctgccctgtgggctgtgccaagtgtgcccagggctgcatctgcaaaggggcatcggagaagtgcagctgctgcgcctgatgtcgggacagccctgctcccaagtacaaatagagtgacccgtaaaatccaggattttttgttttttgatacaatcttgacccctttgctacattcctttt

SEQ ID NO: 5381 - DNA, 387 bp, Homo sapiens
  misc_feature 387: n = A,T,C or G
tacggctgttagaagacgattgaaggggagacactgaccttcagcgcctcggctccagcgccatggcgccctccaggaagttcttcgttgggggaaactggaagatgaacgggcggaagcagagtctgggggagctcatcggcactctgaacgcggccaaggtgccggccgacaccgaggtggtttgtgctccccctactgcctatatcgacttcgcccggcagaagctagatcccaagattgctgtggctgcgcagaactgctacaaagtgactaatggggcttttactggggagatcagccctggcatgatcaaagactgcggagccacgtgggtggtcctggggcactcagagagaaggcatgtcttttgggagtcagatgaan

SEQ ID NO: 5382 - DNA, 51 bp, Homo sapiens; identical to SEQ ID NO: 2818

SEQ ID NO: 5383 - DNA, 111 bp, Homo sapiens
cagaagggagtcaccctgagagtgaaacagataccaagagagaatgaccctcacagctacagaaagaaatgaaatggggcaggagaagagggggaagaaagctaaataact

SEQ ID NO: 5384 - DNA, 362 bp, Homo sapiens
  misc_feature 324: n = A,T,C or G
ggcaccagaagccgtatcctcagggcactcaacgctgcctccccttgtgtcccggcctggaagtgccgacacgcccagtgaggccgaacagaggttccggaagaagcggaggcggtcacagcggaggccgcgactccggcaattcagcgatctgtgggtccgcctggaggagagtgacatagtcccgcaactccaggtccctgtcctggacaggcacatctccactgaactgcggctccctcgccgtggtcattcccaccacagccagatggtggccagcagtgcctggctgtctctctggactcctgtgttctgggtgctggngctggtttccaaacagagacaccccttctggtacgact

SEQ ID NO: 5385 - DNA, 353 bp, Homo sapiens
tccactatggcttccagcactgacccggtgagcgctgctggctcggctaatgaaactcccgaaataccggacaacgtgggagattggcttcggggcgtctaccgctttgccactgataggaatgacttccggaggaacttgatactaaatttgggactctttgctgcgggagtttggctggccaggaacttgagtgacattgacctcatggcacctcagccaggggtgtagccaagtagacaaatggaatcctgtgctgaacccgaatcttccaaaaaacagcctacaatctgtggccaccacaagatgtgccctgatggcagctgaagtttgattcagatgggcacttttct

SEQ ID NO: 5386 - DNA, 392 bp, Homo sapiens; identical to SEQ ID NO: 4293

SEQ ID NO: 5387 - DNA, 421 bp, Homo sapiens; identical to SEQ ID NO: 4294

SEQ ID NO: 5388 - DNA, 343 bp, Homo sapiens
  misc_feature 343: n = A,T,C or G
agtaggagatggcacagttagctggggtctagaagatgacgaagacatgacacttacaagatggacagggatgataattgggcctccaagaacaatttatgaaaaccgaatatacagccttaaaatagaatgtggacctaaatacccagaagcacccccctttgtaagatttgtaacaaaaattaatatgaatggagtaaatagttctaatggagtggtggacccaagagccatatcagtgctagcaaaatggcagaattcatatagcatcaaagttgtcctgcaagagcttcggcgcctaatgatgtctaaagaaaatatgaaactccctcagccgcccgan

SEQ ID NO: 5389 - DNA, 336 bp, Homo sapiens
atccctgtacgggtgcctggcctcgcttctgtcccaccactctgcccaagaactggctggctccaggattggtgccttctcttatggctctgggttagcagcaagtttcttttcatttcgagtatcccaggatgctgctccaggctctcccctggacaagttggtgtccagcacatcagacctgccaaaacgcctagcctcccgaaagtgtgtgtctcctgaggagttcacagaaataatgaaccaaagagagcaattctaccataaggtgaatttctccccacctggtgacacaaacagccttttcccaggtacttggtacctggagcgagtgga

SEQ ID NO: 5390 - DNA, 146 bp, Homo sapiens
tgggtcaaatagctccagcccagatagcacctgcttcaaaggcatctggcaagaaagcataagtggccacccttaaaaggtattaaaggttttttctgacctgttgcgaaaaaaaaaaaaaattaaaatataaaatctcgcatcgt

SEQ ID NO: 5391 - DNA, 137 bp, Homo sapiens
actaagagctgcatcctttaccgcacctgtttcatacgcgtctggccagatagcatctggctctgtcatggaaagtgatcctggctctttatcacctgccggggaaataaaaatgtggactgccaaaaagtcgtatc

SEQ ID NO: 5392 - DNA, 436 bp, Homo sapiens; identical to SEQ ID NO: 4298

SEQ ID NO: 5393 - DNA, 446 bp, Homo sapiens; identical to SEQ ID NO: 1121

SEQ ID NO: 5394 - DNA, 223 bp, Homo sapiens
acagaaggaaggtgagatcttcgacacagaaaaagagaaatatgagattacggagcagcgcaagattgatcagaaagctgtggactcacaaattttaccaaaaatcaaagctattcctcagctccagggctacctgcgatctgtgtttgctctgacgaatggaatttatcctcacaaattggtgttctaaatgtcttaagaacctaattaaatagctgactac

SEQ ID NO: 5395 - DNA, 68 bp, Homo sapiens
agtaataaaggttctttctgacctggcgaaaaaatattaaaataaacagtgctggtaagtatgaagct

SEQ ID NO: 5396 - DNA, 556 bp, Homo sapiens; identical to SEQ ID NO: 4301

SEQ ID NO: 5397 - DNA, 65 bp, Homo sapiens
taacaacttcctgaaagcccttcaagagaaagtggaaattaaacaattaaatcatttctgggaaa

SEQ ID NO: 5398 - DNA, 590 bp, Homo sapiens
acgcagacggtccgcgttgtagcgttggagcagagccgacagcagcggggctgggtgttcacgccaggggtggacgatgctgagtcagaatgtggcctggacaacttcggggactttgactgggtcatcgagaaccatggagttgaacagcgcctggaggagcagttggagaacctgatagaatttatccgctccagactttagtcactaggttctaggagtgagctggggcctgctgaggtgggggtgggctgactctgcaaaatgggggtgtcccccgatcctggccgaggtgaggaacagacagggggggtctagattctgagggggttggtggatattgggcaaggcaggaaacctctggagacctcattttctccatgggaagacagccatgctcttcaggaggagactccaagggcaaaggagggtgtcttggctgtgcttgaaggcgaaaccctgccatatccccagtgccagtcccctcagcctgtggtggccttgcatcctgactggatgttctcagccccttgttctgggcaagaacccagagctccccagtgtggatactaataaacctcttggagcac

SEQ ID NO: 5399 - DNA, 424 bp, Homo sapiens
aacaaccgagctccccaagtgagcaattcctgtcccttttaagggctcacaactctaagggtgtccgcttgagagggtcgtgatcaattgagcaagcaggggtacatgactgggggctgcatacatcggtaattagaaagaaactgaacaggacacggatcttcacagtgccttttttatgcaaataactgattaggtcaggggtcgatctttaactaccaggcccagggtgtggcaccaggttgtctgtttgtggatttcatttctgccttttagtttttacttcttctttctttggaggcagaaattgggcataagacaatataaggggtggtctcctcccttattccccccatttgagaatctcactcaatagtgggagttctcactttcatcctcactacccatgtcttcttgcaagaca

SEQ ID NO: 5400 - DNA, 69 bp, Homo sapiens
tagggcgaattgggtaccgggcccccccttgaggttttttttttttttttttttaaaaggaagggcttt

SEQ ID NO: 5401 - DNA, 513 bp, Homo sapiens
gtgtacacatatacatgttatcccaggatccacaaagcaaacagaagtggtaattgagcctagcaagcagtttagatggactacattcctcattccagctgaggagagatctcacaaggagaaaggagtgctaaggaagagcaagaccccacagccttccaaagatcccctatggtccaaagtcctttgaccatctcagtcagctgctttgttttctgttggcagtggagggacaaggtgagaggagccaggggtagtcatgaacaccagtgggttctgccctgggcagctccccaccttctttaagagagtactgtgtctcagctccagcagtctcaactgggaagacccaggactcctgctcttttctctaatccctgggagacgaggtccagctaaggtagagtaagcagtcagtgaccaggcaggctggtttgggaggtcactgcctggaggacgggatcttgtattcttcggaagatggctgggaaattcttcctccattacgtagac

SEQ ID NO: 5402 - DNA, 510 bp, Homo sapiens
aatgagatggagaagtactagcggatacgagtggtggggagaggtgccttcgggattgtgcacctgtgcctgctaaaggctgaccagaagctggtgatcatcaagcagattccagtggaacagatgaccaaggaagagcggcaggcagcccagaatgagtgccaggtcctcaagctgctcaaccaccccaatgtcattgagtactacgagaacttcctggaagacaaagcccttatgatcgccatggaatatgcaccaggtgggccagcctccttacagtggcctggctggagggcctcttacctctgggacaggcagacacaaatcttctggcttccctccttggaatgggcatggccaagggttagagttctggtcccaattatctgaccccggctagccccttgtcctctctggtcccagtgccctgttccatacataaaatgataggggttgttggctgggcacagtggctcatgcctgtaatctcagcactttgggaggccaact

SEQ ID NO: 5403 - DNA, 424 bp, Homo sapiens; identical to SEQ ID NO: 4304

SEQ ID NO: 5404 - DNA, 453 bp, Homo sapiens
tggctcacgtctgtaactccagcacttcgggaggccgaggcggatggatcacctgaggtcaggagtttgagacgagcctggccaacatggtgaaaccctgtctctactaaaaatacaaaaaattagccaggcatggtggcgggcgcctgtaatcccagctacttgggaggctgaggcaggagaattgcttgaacctgggaggcagaggttgcagtgagccgagatcgcaccactgcactccagcctgggcgacaagagcaagactccgtctcaaaaaataaacaaacaaataaaggtcaaagaaaatatctcagcaggacataccttaagaaattactagataattaatactcaggccaagaatgaaattggaaaacaaacaaacaaaaaaaacatgatattaaacaagaacatctcataaaacatcataatcaacagtaaacgtgggatgca

SEQ ID NO: 5405 - DNA, 343 bp, Homo sapiens
tcttatttttaatttaaggatttgcagctgtaagcttgcctttaacatgggttcgagatctttcttctttttaattaaaggatctgcagctgaaagctttcctttagcatgggttcgagatctttcttctttttaattaaagcatctgcagctgtaagcttccctttagcactgcctttgttgcctcctactgagtttgggtatgtcatgggtttgtgttcatttgcttaaacattttttagggctatagtaatataattgtgctgttgttaataaaggtaattaatgagacacataatgaattgtactactgattttataatattctaagcattcttaactc

SEQ ID NO: 5406 - DNA, 520 bp, Homo sapiens
gctctctgctctcgcggccgactcgcaagatggcgccgcagaaagacaggaagcccaagaggtcaacctggaggtttaatttggaccttactcatccagtagaagatggaatttttgattctggaaattttggtaccttccctagtgaatatctagggttctcttccctagttttgcattttttctgttttaaaataggagcaatttctacgggagaaggttaaagtcaatggcaaaactggaaatctcgggaatgttgttcacattgaacgcttcaagaataaaatcacagttgtttctgagaaacagttctctaaaaggtatttgaaataccttaccaagaaataccttaagaagaacaatcttcgtgattggcttcgagtggttgcatctgacaaggagacctacgaacttcgttacttccagattagtcaagatgaagatgaatcagagtcggaggactaggcaaggctccccttacagggctttgcttattaataaaataaatgaagtatacata

SEQ ID NO: 5407 - DNA, 486 bp, Homo sapiens
tgacattttggtatctttcatctgaccatccatatccaatgttctcatttaaacattacccagcatcattgtttataatcagaaactctggtccttctgtctggtggcacttatagtcttttgtgccataatgcagcagtatggagggaggattttatggagaaatggggatagtcttcatgaccacagataaataaataaaactaagctgcattgtgggttctgaaaaggttattatacttcttaacaattctttttttcagggacttttctagctgtatgactgttacttgaccttctttgaaaagcattcccaaaatgctctattttagatagattaacattaaccaacataattttttttagatcgagtcagcataaatttctaagtcagcctctagtcgtggttcatctctttcacctgcattttatttggtgttcgtctgaagaaaggaaagaggaaagcaaatacgaattgtactattt

SEQ ID NO: 5408 - DNA, 313 bp, Homo sapiens; identical to SEQ ID NO: 2822

SEQ ID NO: 5409 - DNA, 505 bp, Homo sapiens
tgctattgctgtatggctgggagctaccagactggacaacacagatagagaagcctcatagcatcccataaagttgcattgaaatgtgctgatcaagggcaggagtgcaagaccagcctggtcaacatggtgaaaacctgtctctactaaaaatacaaacatgagctgggtgtggtggtgtgcacctgtaatcatagctacttgggaggctgatgcatgagaatcgcttgaacccaggaggtggagattgcagcgagccgagattgcgccactgctctccagcctggagacagagtgagactccatctcaacaaataaaaacaaaaaaggaaaagtgctggtccagcacatcactaagcaagcattaaaattgagaatgcctagtctgggcgcagtggctcatgcctttaatcccagcactttgggatgccgaggcgggtggatcacgacgtcaggagttcgagaccagcctggccaatatggagaaactccgtctctactaaaa

SEQ ID NO: 5410 - DNA, 453 bp, Homo sapiens; identical to SEQ ID NO: 4307

SEQ ID NO: 5411 - DNA, 510 bp, Homo sapiens; identical to SEQ ID NO: 4308

SEQ ID NO: 5412 - DNA, 377 bp, Homo sapiens
agaaaaagcgccagtgaagaaatctatacgagatactccagccaaaaatgcacaaaagtcaaatcagaatggaaaagactcaaaaccatcatcaacaccaagatcaaaaggacaagaatccttcaagaaacaggaaaaaaactcctaaaacaccaaaaggacctagttctgtagaagacattaaagcaaaaatgcaagcaagtatagaaaaaggtggttctcttcccaaagtggaagccaaattcatcaattatgtgaagaattgcttccggatgactgaccaagaggctattcaagatctctggcagtggaggaagtctctttaagaaaatagtttaaacaatttgttaaaaaattttccgtcttatttcatttct

SEQ ID NO: 5413 - DNA, 347 bp, Homo sapiens
gttacaggtacctgccaccacacccagctaatttttgtattttagtagagacggggtttcaccatgttggccaggctggtcttgaactcctgacctcaggtgatctgcccgcctcggcctcccaaagtgctggggttacaggtgttagcccaccgtgcccggcctcttttttttttcgtacaatggcccattctgttgccccggacgacattcgatgcccctgtttacagttctttgcctccactttctgctagtgttttgtttttgtcagcctcccccctgcccgagagaatataatatagtttgttccgcacccgcgaaaccataactcccttttatttggttgc

SEQ ID NO: 5414 - DNA, 341 bp, Homo sapiens
tgagcactctgtcactagggtatataagccaggatggacacagggaaggacatttctgcatcagtggtgggtccccatcagttaagagagcctgtgactctgtcgagggaccatggggggtggcaccagagcccagggcacctgagggcctgtctggatgcagctgctagtggtcataggacagcaaacactattcattggattctgacttaggcaggtaccctgccgagtgccttaaaggtgtaatctcagttactcttcacagtacattaaaaaaatagttggctgggtgcagtggctcaggccaggcgcggtggctcatgcctgtaatcccagcactt

SEQ ID NO: 5415 - DNA, 312 bp, Homo sapiens
tggatcacctgaggtcaggagttcaaaaccagcctggccagcatagtgaaaccccatctctactaaaaatacaaattagccaggtgtgttggtgcatgcctgtaatcccagctcttgggaggctgaggcaggagaatcccttgagcctgggaggtggaggttgcagtgagccaagatcgcacaattgcactccagcctggacaacaagagtgaaactcccatctcaaaaaaaaaaaaatttaacttcgctcatcataaaagcgaattaaaactgatataccatttttcacctttcaaatccgcaaaagccaa

SEQ ID NO: 5416 - DNA, 451 bp, Homo sapiens; identical to SEQ ID NO: 1136

SEQ ID NO: 5417 - DNA, 307 bp, Homo sapiens; identical to SEQ ID NO: 4314

SEQ ID NO: 5418 - DNA, 488 bp, Homo sapiens; identical to SEQ ID NO: 4315

SEQ ID NO: 5419 - DNA, 316 bp, Homo sapiens; identical to SEQ ID NO: 4316

SEQ ID NO: 5420 - DNA, 384 bp, Homo sapiens; identical to SEQ ID NO: 4317

SEQ ID NO: 5421 - DNA, 379 bp, Homo sapiens
cttagttttctttatgtggtgaatcccatttattgatttgcatatgttcaaccatccttgcattcctggaataaaccctacttgatcatgatgaattatctttttaatgtgcttttaaaggacacaagaacaccagtggagtgttgaagcctcccactagtgtattgctcaggttcttaggtttagtagtagttttttttatgaatccgggtgctctgatgttgcgtgcatgtatatttaggatagaccttgatgactgtgtgccttggtgatgttcatcttgcatagcatctctcaagtgttctctgaatttcttgtatctgggtgaaaaacatggaacaattcatgaattcacatatcatccttgcatcttatagcc

SEQ ID NO: 5422 - DNA, 200 bp, Homo sapiens
ccagctacttgggaggctgaggccggagaatcacttgaacccggggggcagaggttccagtgagccgagatcctgccactgcactccagcctgggcgacagcatgagactccgtctcaaaaaaaaaaaaaaaaaaaattggccgggggggggggtttatcccctgaacccgggacttttgggggggcgggggggggggaa

SEQ ID NO: 5423 - DNA, 493 bp, Homo sapiens
gggcctcctttgttactagtttggagcagatccttgcagacgttttcctctgcattcacatgcatgcaaatgtacttctgaatgcgcacgtatgtctttatatacagatagcttttaacaaatagcaggtggggccggcactgtggctcacacctgtaattccaggactttgggaggctgaggcggggggatcacttgaggccagaagttggagaccagcctggccaacatggtgaaacaccatctctactaaaaatacaaaaattagctgggcgtggtggcgggtgtctgtagtcccagctactcaggaggctgaggcaggagaatcgcttgaacccaggaggcggaggttgcagtgagctgagattatgccactgcacgccagcctgggtgatagagcaagactctgtctcaattaaaaaaaatatgtggggccaggcaccgtggctcacacctgtaatcctagcacttttggagactgaggcgggtggat

SEQ ID NO: 5424 - DNA, 516 bp, Homo sapiens
ggcggcgcgtgcgtctgtgcctctgcgcgggtctcctggtccttctgccatcatgccgatgttcatcgtaaacaccaacgtgccccgcgcctccgtgccggacgggttcctctccgagctcacccagcagctggcgcaggccaccggcaagcccccccagtacatcgcggtgcacgtggtcccggaccagctcatggccttcggcggctccagcgagccgtgcgcgctctgcagcctgcacagcatcggcaagatcggcggcgcgcagaaccgctcctacagcaagctgctgtgcggcctgctggccgagcgcctgcgcatcagcccggacagggtctacatcaactattacgacatgaacgcggccaatgtgggctggaacaactccaccttcgcctaagagccgcagggacccacgctgtctgcgctggctccacccgggaacccgccgcacgctgtgttctaggcccgcccaccccaaccttctggtggggagaaataaacggtttagagact

SEQ ID NO: 5425 - DNA, 639 bp, Homo sapiens; identical to SEQ ID NO: 1137

SEQ ID NO: 5426 - DNA, 500 bp, Homo sapiens
tgactgaacgctgctcagatggctggagctttgatgctaccaccctggatgacaatggaaccatgctgttttttaaaggggagtttgtgtggaagagtcacaaatgggaccgggagttaatctcagagagatggaagaatttccccagccctgtggatgctgcattccgtcaaggtcacaacagtgtctttctgatcaagggggacaaagtctgggtataccctcctgaaaagaaggagaaaggatacccaaagttgctccaagatgaatttcctggaatcccatccccactggatgcagctgtggaatgtcaccgtggagaatgtcaagctgaaggcgtcctcttcttccaaggtgaccgcgagtggttctgggacttggctacgggaaccatgaaggagcgttcctggccagctgttgggaactgctcctctgccctgagatggctgggccgctactactgcttccagggtaaccaattcctgcgcttcgaccctgtc

SEQ ID NO: 5427 - DNA, 399 bp, Homo sapiens; identical to SEQ ID NO: 1138

SEQ ID NO: 5428 - DNA, 401 bp, Homo sapiens
ctggagaattttgtcaactacccacctggggatgaagctcactggccacaatacccacctctgtggatgatgttgtatgcactggagctgcactgcataattctaagtcttccaccctgtttaaagatttcaagaagatggcaaaatcatcttacatttttcagacttcatcttcaaaactgccattaccaaacgattccgccacacatccttttagctacagggctgatacatccttctgtggcttggagatgaataggatgattccgtgtgtgtactgattcaagaacaagcaatgatgacccactaaagagtgaatgccatttagaatctagaaatgttcacaaggtaccccaaaactctgtagcttaaaccaacaataaatatgtattacctctggc

SEQ ID NO: 5429 - DNA, 447 bp, Homo sapiens; identical to SEQ ID NO: 4319

SEQ ID NO: 5430 - DNA, 209 bp, Homo sapiens; identical to SEQ ID NO: 4321

SEQ ID NO: 5431 - DNA, 462 bp, Homo sapiens
taagctcgggaattcggctcgggaccaggtgtacagttctgaccatcctgtgttgtaagtacccgtggaatggatttgtaaggtaatctttatagataaacctcaagcaacgattcatgttgtaaccgcttcatatggtttagttttcaaaaaacttcaccatgaagcacaatgtatatatttatgcagtttttaaagtttataacagtctgtttggccattactacactttttactttataatataaaagcaaagtttttgtcattaaatgaatgtttgttgagctacattcttcattgctttaaatgcaataaagtaataatctcacttttatatgaataatatatttcacatctttattattgcagttttctctagaaagctctgagaagctttctctgctgcagctgtgtataaaatatttaaaatgttgtatggtgtaaataaacttttgtctacat

SEQ ID NO: 5432 - DNA, 571 bp, Homo sapiens; identical to SEQ ID NO: 1143

SEQ ID NO: 5433 - DNA, 502 bp, Homo sapiens
agctcggaattcggctcgagccagacccggcagccttgctcagttcagcatagcggagcggatccgatcggatcggagcggatcggagcacaccggagcaggctcatcgagaaggcgtctgcgagaccatggagaacggatacacctatgaagattataagaacactgcagaatggcttctgtctcacactaagcaccgacctcaagttgcaataatctgtggttctggattaggaggtctgactgataaattaactcaggcccagatctttgactacggtgaaatccccaactttccccgaagtacagtgccaggtcatgctggccgactggtgtttgggttcctgaatggcagggcctgtgtgatgatgcagggcaggttccacatgtatgaagggtacccactctggaaggtgacattcccagtgagggttttccaccttctgggtgtggacaccctggtagtcaccaatgcagcaggagggctgaaccccaagtttga

SEQ ID NO: 5434 - DNA, 497 bp, Homo sapiens; identical to SEQ ID NO: 4324

SEQ ID NO: 5435 - DNA, 458 bp, Homo sapiens
tcaaggttctccataggttcttcgagataagcttaaagctgaatttcctgtgtgtttcaggcattcacagataaactcattctctgtacttctagggtagcatctttatgtatctattatgtacctcttatctattgtgttatcatctctgttatagaagagccttctgtagaccatatagaaaaagattatagaggaggagaatctactgctggcaattgggaaccgcaaggtatactaaataatatatcaacaactaatggccatctaatgctatgctggatatgaacttttggggcctcaggaaagaaaaaccaggaactagtttcaataatgaggtgtcatggttccctgtggcaaatttagaacgcttatcgtttggcaggacacagagaggtaggtgaacattccaggaaagaagcagcttagagaaaatgtggaggaaataatatgacact

SEQ ID NO: 5436 - DNA, 543 bp, Homo sapiens
ttttttttttttttttttttttaagtctggctctgtcacccaggctggagtgcagtggcgtgatctgcaacctctgccccccgggttcaagcgattctcctgcctcagcctcccgagtagctgagattgcaggtgctcgccaccacacttggctaatttttgtattattagtagagacggggtttcagcatgttggctaggccggtctctcctgacctcagggtgatcagcccacctcggcctcacaaagtgctgggattacaggcgtgagccaccttgcccagcccacatcatacagtttgaaatgaaactttgccacaaccagcctttgctgtagcacacacatatctcactgaacctgtttgaaataaagctttctttctttttcatgattcgcctttgagtacctccacgctgaaagactgttgtaccactaaaaacttaaaggcacaaattctccttgaagaccttctcccttttatgtggccccatattttatgttgctttatctttggaattttgcatgaaaaggaaatgaatgga

SEQ ID NO: 5437 - DNA, 152 bp, Homo sapiens
ttttttttttttttttcccattaaaaaaactttattttctttttttacaaaaaatatccccatctggggtaaaaatatatttggttaagtccaaaatatagtctttcccttccaaaaggatccttattccaaaaccttgaaaccaccctttt

SEQ ID NO: 5438 - DNA, 491 bp, Homo sapiens
tggtggtgtgtgcctgtagtcccagctacccaggaggctgaggaaggagaatcgctggaacccagggggcagaggctgcagtgagccgagattgcaccaccgcactccagcctgggtgacagagcaagactccatctcaaataaataaataaataaagtgaaaatatactgcaggaaagaaaagttcatttcatgtgctgaatacacagcatgtgaagagggtcctgagaggggctaggggctttgaatatcacatttcatccagtgcttggaacattggaagatagtattgacttaaatgtttgcagtcaccgtgctatgtactatgcaccaggcattgtgtacactgattgactgaccatgccatatgagatattcaggggacagcaagcttgactaagccacagagttgcaatgcactgcctcaattttctcatttcctcagacgaagatgctgagccaatgtttaaagtgattataatgtgactttc

SEQ ID NO: 5439 - DNA, 487 bp, Homo sapiens; identical to SEQ ID NO: 1147

SEQ ID NO: 5440 - DNA, 392 bp, Homo sapiens
tttttttttttttttttttttttttgggagggagtctcgcttagattgcctaatctcagctcattgcaacttctgcctccggggttcaagggattctcgtgtctcagcctcctgggtagctaggatacaggcacccgctaccatgcctggctaattttggacttttagtagagacagggtttcgccacgttggccaggctggtctcgaactcctgacctcaggtgagccgcctgccttggcctcccaaagtgctgagattacaggcgtgagccaccgcgcttggcctaatttgcttctcctgaaattcaaatggtctaatatgaaaaacgccaaccttgcttgaaagaataagaaagaggtgcggtttcgttgggccgttgatgtttggaac

SEQ ID NO: 5441 - DNA, 303 bp, Homo sapiens
tttttttttttttttttttttttttgcaaatgtgtcagtttattaaaaatgcagcatttttcacatgagctttaaagatgtggaagatggggtacgattaaaaccatgagagttgtgcagggaacagccgtagggcctgtttgcaccttcagatattgcctgctcccaaaaattcagacccccagatgcagggcaagacaataagaaagggtgagtgcaagcaaggagagcctcctgctaagaggctgaggtcccctctggttccaaggatgggatgtcagccttgaccttccggggtctgca

SEQ ID NO: 5442 - DNA, 255 bp, Homo sapiens
accccagaagttgacaaagactcctccaaacttctcatttaacatctcatggatgtttgaaaacataacataatctgtgatatttcttctgtcgctagtcactgtgtttaaattttaaagtagtgaattgtgaccagtgttaatccaaagaagaattaagaattatttttccctcacacctggaatggcagtgaacatggctggagttgattggctgtgagtgccttgggctctatgagagattcattaggggat

SEQ ID NO: 5443 - DNA, 533 bp, Homo sapiens
catttagataactattaaaggttgttaagatgaagatttactgtttctttgttactcgttggtacagctgtttgttttacttgcacatttgtacatatacttaatgttttcaagtgccttaattgtttaaaatctctggcttcaaagtttcttggggaaaggtcggtttacctcacattttttgtttccattagtaatattctaggtacctcacaaaatgtattatggtgcatggctgttagtttttagtgagtgctgtaggattaattcgaaaataggcagaattccattcctcccaaggtggcaaaaattagctatactgatgtaattgtcatttacctgggtatgaattccctgacacacattcatgtcaacatatgtagcaaattttgtgaaaacacaacaatttgaagcttctgtaattttgagcactgctctaacaacaagcataatataaaattagttagattttgcaagtctacaaatgagctcttgcaacagaactcacagcctttttacttttttcccctaac

SEQ ID NO: 5444 - DNA, 285 bp, Homo sapiens
tttttttttttttttttttttttggatttaatgctttattgctcttgatggcaaatcaaaatatgttttagaaataaagttaatttactggaaaataggagtttttgcaccaaaccataaaattgcatttcattacatcaagagaacaccctcattgtctacaatcatgcccgcttcctttcccctcagcgcccggggcacgtgaccgagatcataccctaaattcctgatccttttgcagttgccacatactgtggcttttagtacatcataaaaaagtgcttt

SEQ ID NO: 5445 - DNA, 486 bp, Homo sapiens
attgtaatactctatttttactgtaccttttctatgtgtagatatgttaggtacacaaataaataccattgtgttacagttgtctgcagtattcagtacagtaacatgctgtgcagggttgtaggctaggagcatcaggctgggccatctatcctatgtgtggagtaggatgtgcacctatctttgtgcaagtgtactctgcgatgttcccacagtgacgaaatcacgtaacgatgcatctctcataacctgtccccatccttaagtgatgtatgactgtgttgaaaggctcttaattggatttgggaactctgtctcatagggatgtcatgaggattagtgactctttgtatttattgatccatttgagccttacagcaattctttgtagtaactcttcagcctctggtagatctgccagtccaccaactgtcttccagtatctctccattaattctttctgttttcacttcccttcctgtctat

SEQ ID NO: 5446 - DNA, 549 bp, Homo sapiens
ggaggcccgggcaactcttttgaatggaatcgggctgattcatcgccggtttgcagactgagccgcgtcgggtgtgcgccgctgctgctgttgcctctgtcttcgcgtcaccacagaggcaagacaagggtccatatcgcggcatccggctcccgcccgtcttcaggagagaaagaaaaaataaaatatacttggggaagttgtacctgccagaattagcaagagctttctttaagatgacatttgtcaaactcaacaaattgaaggttaacaccttaagagttgtagttactgaccagaaatatggacagacttcttaaacttggaggaggtatgcctggactgggccaggggccacctacagatgctcctgcagtggacacagcagaacaagtctatatctctcccctggcactgttaaaaatgttaaaacatggccgtgctggagttccaatggaagttatgggtttgatgcttggagaatttgttgatgattataccgtcagagtgattgatgtgtttgctatgccgcagtcaggaacaggtgtc

SEQ ID NO: 5447 - DNA, 612 bp, Homo sapiens
tttttttttttttttttttttttttgggagcatagtgagtggagtttatttttataatttgtagaaaattgacatttagatttcaaaacttatattacaaaattatcagcagcagtcttaagcatttcaacaatgctgatagattccactttgctaacacaaacaaggctattataccatgttcgaaaagcaagacttgttccaagagggcctattattatacatctgcctcactgctcaggacccgtttgtgactgtgtcttcttccatctcttcttcaccatcatcagtgggccctgatctgcgttctctgccagggatctgaccagactgcagcaaccccttcagcccccccacttcagccagagttgaagcatttgctatggcattcttgattgcttctacatcccctggagatggcccacctttctttttgtcagttggcaaaccagcacctggattaaaagttttgcttctcctggcaatatcctttgcaagctgtgcaccccgttcgcccttgaacattttctctgcttcctgacgctcttttagtttcactttctggaaatccagtactctgacttgcggaactttataaatcacatacaatct

SEQ ID NO: 5448 - DNA, 456 bp, Homo sapiens; identical to SEQ ID NO: 1150

SEQ ID NO: 5449 - DNA, 486 bp, Homo sapiens; identical to SEQ ID NO: 1151

SEQ ID NO: 5450 - DNA, 610 bp, Homo sapiens; identical to SEQ ID NO: 2602

SEQ ID NO: 5451 - DNA, 644 bp, Homo sapiens
tttttttttttttttttttttctcttcgttttctccttgcctcttttttcttcttattaagcaaagatcttttggtggcttcatcccaattgctgacaaacgaggaaaagatgggaagtgcagccgatttctcagttttcacaaacaggagtttcacgctctcccacttctctggcaatttttctgaaagtcctttggtgacagcaacaatgttttcaatgatgtgctcaatttgcattccaacgtgaccaatacgtatagcactgcaagaaccacttttagaaatgtttaagaccgttccacctatacagtcattgatctctcttgataaattcttggacagaaggtttacagatactggaaccttctttctttgatagaaatgtctcccaatgagtgagggtaagagccgcctaattctggcatcagtaaggaagaaatcaaaactgctcagaaggcggagcttggcttcataggatttatattccttctttagagtttggagggagataatctgagaaacggttttaattccatgcttgtttaaaagctttctataaaactgttctgtcttttcaggagttgaattgggttcatccttcgtaaataaacagatatcttctgaatctgatcgaatactatga

SEQ ID NO: 5452 - DNA, 531 bp, Homo sapiens
catcactaacctgacagtcgttgccaggaatttgctttgtttactgctagtatattagaaatcctagatctcagaatcacaatagtaataaacaacagggggcattttttcctaacttactctgtgttcaggtgtggaatttctgtctcccaagaggaaatgtgacttcactttggtgccaatggacagaaaattctacctgtgctacataggagaagtttggaatgcacttgatagctggtttttacaccttgatttcgaggtggaaagaaattgatcatgaatctctaataaatttaaatctcttaaaccagtaggtgcttaatattttttgatttgattaatgcccatttaaatctcatgggttctattaaaaaaatatatatatagggccccaatccattgccatcaaattgcccttggacttttccaaggtatattatggggttttatgcaaaattccaagctaccatgtaactttttttaaccatttaacaaggagggggaactgtttcctaccttctttacatg

SEQ ID NO: 5453 - DNA, 611 bp, Homo sapiens
ttttttttttttttttctttttttttgcaatatttctccactttattaacgctgaccaccatatttatgtatctaaacattttttataagttttcagtggtgtctagattctgaattatttttccataattaattaggcacgttggtttgtattttatagagaacacatctttaggacacagataagaacaagtataatttgcaaatattacaaagatgatttccaaatctcagttgacctctttcccaactgcaaaccctcatttagtctttagtgacaacagagaccaaaaacaaccacccacacatctcatgtgagattctggtggcttagaaatccctgaaagagcagtaaactgattattgaaaagctcagaacactggcaaggcttaagtgcaaagtatttaatagaaggccacaagaactgttttcctaagaggagctaggaactacaaatgtcatttagtaatgcattgaaatggcattgcctagtgtgagtgttgcacagaaacttcaggtcacttcttctggatctattattttggataagcttccactatcatagcatggccctgccctccagctgcacacgcagccactaagccatact

SEQ ID NO: 5454 - DNA, 61 bp, Homo sapiens
agtccgctcgcgtcacctcctcacgctgccgctgtcgcccgtgtaccgccggcccattccg

SEQ ID NO: 5455 - DNA, 706 bp, Homo sapiens
ggggagctgggaggcgcgacgaattattggttgggggaaacccacgaggggacgcggccgaggagggtcgctgtccacccgggggcgtgggagtgaggtaccagattcagcccatttggccccgacgcctctgttctcggaatccgggtgctgcggattgaggtcccggttcctaacggactgcaagatggaggaaggcgggaacctaggaggcctgattaagatggtccatctactggtcttgtcaggtgcctggggcatgcaaatgtgggtgaccttcgtctcaggcttcctgcttttccgaagccttccccgacataccttcggactagtgcagagcaaactcttccccttctacttccacatctccatgggctgtgccttcatcaacctctgcatcttggcttcacagcatgcttgggctcagctcacattctgggaggccagccagctttacctgctgttcctgagccttacgctggccactgtcaacgcccgctggctggaaccccgcaccacagctgccatgtgggccctgcaaaccgtggagaaggagcgaggcctgggtggggaggtaccaggcagccaccagggtcccgatccctaccgccagctgcgagagaaggaccccaagtacagtgctctccgccagaatttcttccgctaccatgggctgtcctctctttgcaatctgggctgcgtcctg

SEQ ID NO: 5456 - DNA, 642 bp, Homo sapiens
acggccgggtcttatcaaaggaggagctgccaaacttcagataataacggactttgatatgacactcagtagattttcatataaagggaaaagatgcccaacatgtcataatatcattgacaactgtaagctggttacagatgaatgtagaaaaaagttattgcaactaaaggaaaaatactacgctattgaagttgatcctgttcttactgtagaagagaagtacccttatatggtggaatggtatactaaatcacatggtttgcttgttcagcaagctttaccaaaagctaaacttaaagaaattgtggcagaatctgacgttatgctcaaagaaggatatgagaatttctttgataagctccaacaacatagcatccccgtgttcatattttcggctggaatcggcgatgtactagaggaagttattcgtcaagctggtgtttatcatcccaatgtcaaagttgtgtccaattttatggattttgatgaaactggggtgctcaaaggatttaaaggagaactaattcatgtatttaacaaacatgatggtgccttgaggaatacagaatatttcaatcaactaaaagacaatagtaacataattcttctgggagactcccaaggagacttaagaatggc

SEQ ID NO: 5457 - DNA, 629 bp, Homo sapiens; identical to SEQ ID NO: 1155

SEQ ID NO: 5458 - DNA, 610 bp, Homo sapiens
gtcattttatactctgtataaaacttagctctaaagcagaaactaaagcagcaaatgcaggaaggctgtctcgccatcctcaagactcagcagctctcattctccagtggtgagcacaccatttgtgcagctgctgttgtcgtgaaatataacaacagtggaagtcacaaaaatgtcccctgcccagccccctcgccgcccttgacttcctgcaggccatgtgtgtattacttgtctagtgatgtcctctcaaagtgctgtacgcgagctcggcgccacctccgcctccctttcagagcctgctccccgccctctctgctcgctgcattgtggtgttctcttctcaaggctttgaaatctccccttgcactgagattagtcgtcagatctctccccgtctccctcccaacttatacgacctgatttccttaggacggaaccgcaggcacctgcgccgggcgtcttactcccgctgcttgttctgtcccctccctcggaccaaacagtgctcatgcttcaggaccttgtttgtcgaagatgttggtttccctttctctgttatttatataaaaataatttatcaaaaggatattttaaaaaagctagtctg

SEQ ID NO: 5459 - DNA, 649 bp, Homo sapiens; identical to SEQ ID NO: 2977

SEQ ID NO: 5460 - DNA, 607 bp, Homo sapiens; identical to SEQ ID NO: 2726

SEQ ID NO: 5461 - DNA, 604 bp, Homo sapiens
ggtccggtttccggcgggaacgtgggccgccagactcgggagaggctccgtcttgtgcaagggtcctgtgggctggctgcactggcctctgggtggtgcctgccagaatgccccacttggaaaacgtggtgctttgtcgcgagtctcaagtgtccatcttgcagtccttgtttggggagagacatcatttcagctttccatccatttttatttatggacatactgctagtggaaagacctatgtaacacaaacgttgttgaaaactttagagctcccacatgtgtttgtgaattgtgttgaatgctttacattgaggctgcttttggaacaaattttaaacaaattgaatcatcttagttcttcagaggatggatgttctactgaaataacctgtgaaacatttaatgactttgttcgcttgtttaaacaagtaaccacagctgaaaatcttaaagatcagactgtatatattgttctagataaagcagagtatctaagagatatggaagcaaatcttttgcctggatttcttagattacaagaattggctgacagaaatgtgactgttctctttctcagtgaaattgtttgggaaaagtttcg

SEQ ID NO: 5462 - DNA, 578 bp, Homo sapiens; identical to SEQ ID NO: 1157

SEQ ID NO: 5463 - DNA, 641 bp, Homo sapiens
tcggtacccgcgagcggggaggaggcaggaaagaaggacgcggcgtctggggagcacccaggcagcaagacggggcccgggctttcgacagtggggagtgtgacgcgcttgggaaaggcaggagcgccagcggtcgggctgctcttggctaacgagaggagtccgaggcggcggcgaggggcgaacgacccgacgcaagatggcgagtaaagagatgtttgaagatactgtggaggagcgtgtcatcaatgaagaatataaaatctggaagaagaatacgccgtttctatatgacctggttatgacccatgctcttcagtggcccagtcttaccgttcagtggcttcctgaagtgactaaacctgaaggaaaagattatgcccttcattggctagtgctggggactcatacgtctgatgagcagaatcatctggtggttgctcgagtacatattcccaatgatgatgcacagtttgatgcttcccattgtgacagtgacaagggtgaatttggtggctttggttctgtaacaggaaaaattgaatgtgaaattaaaatcaatcacgaaggagaagtaaaccgtgctcgttacatgccgcagaatcctcacatcattgctacaaaaacaccatcttctgatg

SEQ ID NO: 5464 - DNA, 462 bp, Homo sapiens
tgacattccggaaattcataccgaagtgcagcaagattgtcattgactttgattcaattaacagcagaccgagtcaaaagcttcagtgagttacatctcgttcaatctccagaagattgggattatcgtcttctaagaggttgctaatgcctttcatcttgaagttacacataacttcttactagccagtatggcaaaagtaggcatctaaagaatataaagcctcaaatcttccttaccgtctctcttgtcacatggaatctacatgtgtttgaactattgctttaggatttaaaataggggagcctgtggtggcctggtgcacagggctagaacgagagtgcctccccttcttgtgtcctggctggctgggatgctggtggctcttcagaggagtatcagctgtctgtcatctgctgcgatccggcagcctctcttcactgctacatgtgctggaaggac

SEQ ID NO: 5465 - DNA, 506 bp, Homo sapiens
tccaagtttctctctcaccttcaggggcattcttcgggggtgcatcagagggagggcagagcctgaggatctaagcgaaggcttccccgggtgtaatttcctgggctgtttgtgaggagagatcgaattcgcctcctgccctcaggcctctctgctcctgtcttttgtttggatgccggcgctgctgcctgtggcctcccgccttttgttgctaccccgagtcttgctgaccatggcttctggaagccctccgacccagccctcgccggcctcggattccggctctggctacgttccgggctcggtctctgcagcctttgttacttgccccaacgagaaggtcgccaaggagatcgccagggccgtggtggagaagcgcctagcagcctgcgtcaacctcatccctcagattacatccatctatgagtggaaagggaagatcgaggaagacagtgaggtgctgatgatgattaaaacccaaagttccttggtcccagctttgacag

SEQ ID NO: 5466 - DNA, 572 bp, Homo sapiens
actgtacctggtggagcatgaggagtaccagctgtgccagccccagtccaaggaccaagtccgctggcagtgcaaccggcccagtgccaagcatggcccggagaagctgtctgagaagttccagcgcttcacacctttcaccctgggcaaggagttcaaagaaggacacagctactactacatctccaaacccatccaccagcatgaagaccgctgcttgaggttgaaggtgactgtcagtggcaaaatcactcacagtcctcaggcccatgacaatccacaggagaagagacttgcagcagatgacccagaggtgcgggttctacatagcatcggtcacagtgctaccccacgcctcttcccacttgcctggactgtgctgctccttccacttctgctgctgcaaaccccgtgaaggtgtgtgccacgcctggccttaaagagcgacaggctgaagagagggacaggcactccaaacctgtcttggggccactttcagagcccccagccctgggaaccactcccaccacaggcataagctatcacctagcagcctcaaaacgggtcaatat

SEQ ID NO: 5467 - DNA, 522 bp, Homo sapiens
tagagcccagaccttttgatcctcagtattatgaagatgaatttgaagatgaagaaatgctggatgaagaaggtagaaccaggttaaaattaaaggtagaaaatactataagatggaggatacgccgagatgaagaaggaaatgaaattaaagaaagcaatgctcggatagtcaagtggtcagatggaagcatgtccctgcatttaggcaatgaagtgtttgatgtgtacaaagccccactgcagggcgaccacaatcatctttttataagacaaggtactggtctacagggacaagcagtctttaaaacgaaactcaccttcagacctcactctacggacagtgccacacatagaaagatgactctgtcacttgcagataggtgttcaaagacacagaagattagaatcttgccaatggctggtcgtgatcctgaatgccaacgcacagaaatgattaagaaagaagaagaacgtttgagggcttccatacgtagggaatctcagcagcgccgaatgagag

SEQ ID NO: 5468 - DNA, 421 bp, Homo sapiens
tgggaatcggagtgggcacctctgtgtttctctagggagtaacattcaacatttaattgaatcgtgtatcctgataggtggattaggaacaggattcattcctttaactttaacttttggctaaacgacatgccttggattgagtgtatatgtcttccccaaattcatatgttgaagcttaaatcctgaatgtgatggttcttggaattgggacctttggaaggttattaggtcttgagggcagagccctcacgaatggggttaaggcccttataagaagagacatggggccaggtgcagtggctcacacctgtaatcccaacattttgagaggccgagaagggtggatcatgaggtcaggagatggagaccatcctggccaacatggtgaaacctcatctctactaaaaatacaaaaatt

SEQ ID NO: 5469 - DNA, 510 bp, Homo sapiens; identical to SEQ ID NO: 2619

SEQ ID NO: 5470 - DNA, 328 bp, Homo sapiens
actacctgcaggtcgagagcacctctgtgtttctctagggagtaacattcaacatttaattgaatcgtgtatcctgataggtggattaggaacaggattcattcctttaactttaacttttggctaaacgacatgccttggattgagtgtatatgtcttccccaaattcatatgttgaagcttaaatcctgaatgtgatggttcttggaattgggacctttggaaggttattaggtcttgagggcagagccctcacgaatggggttaaggcccttataagaagagacatggggccaggtgcagtggctcacacctgtaatcccaacat

SEQ ID NO: 5471 - DNA, 304 bp, Homo sapiens
tttataatttatttagctttttaagctgttcttagcaagatattggcctgcttcaaactagttcattttacctaagtgcagacaatttcctattattattattattgtcatttatttttgcagagataggatgtgactttgttgcccaggcttgtcttgaactcctgggctcaagtgatcctcctgctttgaccttccaaattattaggattacaggcatgagccactctagctggcgcctgtcattttttaaaggtatgcagaatacccaatatttatgagctgttttatgtagtgttcttta

SEQ ID NO: 5472 - DNA, 552 bp, Homo sapiens; identical to SEQ ID NO: 2746

SEQ ID NO: 5473 - DNA, 345 bp, Homo sapiens
gccgggggaaaataactgggagtgaagaagtttttgttgcttgtacagtgtcagatgaagaacaacactatcttaattttgcaatacactgcatttgctggtgctgtttttatatagtgaagcaacagctgtacagcaaaataataaaatactcacctcttcgttaaaaaaaaaaaaatttactttttacaattctggaggccaggaaaaccatgatcaggtgccagcatctgggaagggccttcttgctgtcctcccatggcaaaaaatggaagggcaagggaaagctaacatgctcccgcaaaccctttttataatggcatcaatcaaatatgaggccaaagt

SEQ ID NO: 5474 - DNA, 196 bp, Homo sapiens
aggaagagaagaccagtgccaaccctgagactctgctgggggagatggaggcgaagacaagagagctcattggtctgttttgctcatttcttctcttttctttattgagagatttactcgtagaggatatacgttttttctctttttcttgactgtgataacaagttgaaacttgttacaggcttgacagaaatgt

SEQ ID NO: 5475 - DNA, 577 bp, Homo sapiens
ggcaacagtagttctaggaggagacaccatgggccctgagcgtatcttccccaatcagactgaggaactgggacatcagggcccttcagaaggcactggggattggagcagtggggagcctgaggaagagcaggaggaaacggggtcgggcccagctggctactcctaccagcccctgaaccaagatcctgaacaagaggaggtggaactggcaccagtgggggatggagatgtagttgctgacatccaggatcgaatccaggccctggggcttcatttgccagacccaccattagagagtgaagatgaagatgaggagggagctacagcgttgaacaaccacagctctattcccatggacccagaacatgtagagctggtgaaaaggacaatggctggagtaagcctgcctgcgccaggggttcctgcctgggctcgggagatatcggatgcccagtgggaagatgtggtacagaaagccctccaagcccggcaggcatcccctgcctggaagtgaccacagtgagagctgccttatattcctacattccaggccagaaccagcacaggactgaac

SEQ ID NO: 5476 - DNA, 558 bp, Homo sapiens
ggtgaaatgcatccctcctgtgactggattggagacacaagaacagaaacatcctgatctctctactctactgtgcaggcttatgtactcataaaatggcagttatggacctatcctccccatgggctttaactaaacaggactctgcctgtttccatctgagaaatgctgaagaggaaaggatgattgctgtatttctgacaacctggttacaggaaccaatgactttcaaagatgtagctgtggagttcactcaggaggagtggatgatgctggattctgctcaaagaagtctgtacagagatgtgatgttggaaaactatagaaatctcacctccgtggaatatcagttgtacaggcttactgtgatctccccattggatcaagaagagataaggaatatgaaaaagagaattccccaagccatctgtccagaccagaagattcaacctaaaaccaaagaatcaactgtgcagaaaattttgtgggaggaaccatccaatgcagtgaaaatgataaaactcacaatgcataattggtcctccacattaagagaag

SEQ ID NO: 5477 - DNA, 579 bp, Homo sapiens; identical to SEQ ID NO: 1169

SEQ ID NO: 5478 - DNA, 619 bp, Homo sapiens
aacggcgccagcgtgatcctccgtgacattgcgagagccagagagaacatccagaaatccctggctggaagctcaggccccggggcctccagcggcaccagcggagaccacggtgagctcgtcgtccggattgccagtctggaagtggagaaccagagtctgcgtggcgtggtacaggagctgcagcaggccatctccaagctggaggcccggctgaacgtgctggagaagagctcgcctggccaccgggccacggccccacagacccagcacgtatctcccatgcgccaagtggagcccccagccaagaagccagccacaccagcagaggatgacgaggatgatgacattgacctgtttggcagtgacaatgaggaggaggacaaggaggcggcacagctgcgggaggagcggctacggcagtacgcggagaagaaggccaagaagcctgcactggtggccaggtcctccatcctgctggatgtcaagccttgggatgatgagacggacatggcccagctggaggcctgtgtgcgctctatccagctggacgggctggtctggggggcctccaagctggtgccccgtggctacggtatccggaagctacagattcagt

SEQ ID NO: 5479 - DNA, 619 bp, Homo sapiens; identical to SEQ ID NO: 1170

SEQ ID NO: 5480 - DNA, 380 bp, Homo sapiens
tgccatgaagatgctgcatgtcagagcagtggctgttcctgctggagaatgtggcctcgagcagcaaagctagggtggcagtgaaaatcgaagaatggaccaggcatggtgactcatgctggtaatcccagcactttgggagtctgaggtgggtggatcacctgaggtcgggagttccagaccatcctgaccaacatggtgaaaccccatctctactaaatacaagaaattagccaggtttggtggcacatgcctgtaatcccagcgccttgggaggctgaggcaggagaatcgcttgaacctagaaggcggaggttgcagtgagccgagattgcaccatttacactccagcctgggcgacaagagtgaaactctgtctc

SEQ ID NO: 5481 - DNA, 442 bp, Homo sapiens; identical to SEQ ID NO: 1172

SEQ ID NO: 5482 - DNA, 573 bp, Homo sapiens
caacagcttccataaatcctgcttcctgtgcatggtctgcaagaagaatctggacagtaccactgtggccgtgcatggtgaggagatttactgcaagtcctgctacggcaagaagtatgggcccaaaggctatggctacgggcagggcgcaggcaccctcagcactgacaagggggagtcgctgggtatcaagcacgaggaagcccctggccacaggcccaccaccaaccccaatgcatccaaatttgcccagaagattggtggctccgagcgctgcccccgatgcagccaggcagtctatgctgcggagaaggtgattggtgctgggaagtcctggcataaggcctgctttcgatgtgccaagtgtggcaaaggccttgagtcaaccaccctggcagacaaggatggcgagatttactgcaaaggatgttatgctaaaaacttcgggcccaagggctttggttttgggcaaggagctggggccttggtccactctgagtgaggccaccatcacccaccacaccctgcccactcctgcgcttttcatcgccattccattcccagcagctttgg

SEQ ID NO: 5483 - DNA, 517 bp, Homo sapiens; identical to SEQ ID NO: 1173

SEQ ID NO: 5484 - DNA, 534 bp, Homo sapiens
gaaaactcactggagtttgacatggtgggaattgacgcagccattgccaatgcttttcgacgaattctgctagctgaggtgccaactatggctgtggagaaggtcctggtgtacaataatacatccattgttcaggatgagattcttgctcaccgtctggggctcattcccattcatgctgatccccgtctttttgagtatcggaaccaagatgaagaaggcacagagatagatactctacagtttcgtctccaggtcagatgcactcggaacccccatgctgctaaagattcctctgaccccaacgaactgtacgtgaaccacaaagtgtataccaggcatatgacatggatccccctggggaaccaggctgatctctttccagagggcactatccgaccagtgcatgatgatatcctcatcgctcagctgcggcctggccaagaaattgacctgctcatgcactgtgtcaagggcattggcaaagatcatgccaagttttcaccagtggcaacagccagttacaggctcctg

SEQ ID NO: 5485 - DNA, 616 bp, Homo sapiens; identical to SEQ ID NO: 1174

SEQ ID NO: 5486 - DNA, 631 bp, Homo sapiens
tgaaatcttggtactgtggcttggtgggctatgttgaccttggagaatttctatcctctctaccacctcagtctccccacataacaaaattccactttggaaggtggagctaatatgaggactaaatgagattatttgtaaagtccccagcataatgtctcatatgtagcaagtgtctagtcaatgtctatgcttattagagggcctgcccatgagtctctgtttaaactgtgttggctggcactggggacatccttgtggtaggagtagactcctcagaagcaggatcatggttgggagccccaggctctggagttacatggccacaggtcaaatcctggcttcgccaatttcctaatggggcaagtttggacaagttatttaacttctcaggacctcagtttcctcatctataaagtagagatgacatgaaaagtgttgtcgaaagacaacaatgaaatgatacctgtaaaatgcttggaaaagcatgacacatagtaagtatttgataaatgtttgctggtttttataataatcataatcatacttgtagtttttattttattgaactctcaaggaggaaattgagagccaagttcatttcgagcaaagcttcaaagctctcttatct

SEQ ID NO: 5487 - DNA, 651 bp, Homo sapiens
tacggccgggttacgtgaaaggctgagtgctcgatgggaggagggtttgctgggtgagctggttcagactccttgaaaaatcatcgtcactctttcttcctcgcggacgtcctgcccatcgctctgagccggcgccccaagtagagccagagtagttcgtacccagccttttcacgtaactcggccgaggtggttcttctccgaattttttccgtcaggcccagattagcagattttggggtcagctgggagaggcgttaacttttcttcgcacactcttgctttgtgcgctcaaccacagtctgaattctcgcagaggcgttccttgagtagcccttggccacactgctcacctccctgcagaagtcaaagccccagccctcctctgcgaatcccgaggccagcctggttggttaccttctccccttcgccctttactccaggccgtccagcatcaaacactagcctccacacgtggaaaagaccctgactcccacagtagactagtcttatgggagtcctggctcttgggccaggctgcattaggaaaatggaaaccagactgtcttcaaattcttctgcctagccttagccattagagagaggtcctgctaaagatggactgcaaatgcgcttgatggaaggagatgt

SEQ ID NO: 5488 - DNA, 512 bp, Homo sapiens
ggcggggtggaagagcagtgcaaacggcgcaccatcctgacagccatacactgggggccttgggtgaagaagcgcatccctgtcatgtaccagcaccacactgacctgaaccccatcgaggtggccattgacgagatgagtaagaaggtggcggagctccggcagctgtgctcctcggccgaggtggacatgatcaaactgcagctcagacggcagggcagcgtgagtgttcaggtcaatgctggcccactagcatatgcgcgagctttcttagatgatacaaacacaaagcgatatcctgacaataaagtgaagctgcttaaggaagttttcaggcaatttgtggaagcttgcggtcaagccttagcggtaaacgaacgtctgattaaagaagaccagctcgagtatcaggaagaaatgaaagccaactacagggaaatggcgaaggagctttctgaaatcatgcatgagcaggtgagggccgcactggctccaacaacttggagttcttg

SEQ ID NO: 5489 - DNA, 480 bp, Homo sapiens; identical to SEQ ID NO: 1177

SEQ ID NO: 5490 - DNA, 336 bp, Homo sapiens; identical to SEQ ID NO: 1178

SEQ ID NO: 5491 - DNA, 285 bp, Homo sapiens
gggttaatatttgtgaggaaaagtgaaacaagtgatctggttttagcccagatgatgaaagtggatgtggggggttttcacacacgtgagataattaccgcttgccccacaacactgggtgttggagaaagggagagatagtcataagtggaagaaaagcccagcctagtgagtgggaaagagagtgagagcctgtgccggctgctgacgagccccaggcggggcacaagtttctcgtggggagatggaggcagagccccgggtaggggacagagctgctggggc

SEQ ID NO: 5492 - DNA, 536 bp, Homo sapiens
aactgttgcaatagaaaaaaaatagaataagttatatttttggagtaacatcaatggttaggcatttttacaccgatcggtgtttgaaaatttgccatttcaggctaatatttttatatatttttgactttttaaaagttcatcagtgtttttgctactgttaagcttatgccgtttatactgtattttttatgtatcctttatattgacgggacctgactccctgtaaaggagtgctgtcttaaaaacaactgaaggggttaaagtcgtttcttttagtttaatagatgtgcataaggtagctttagcaattaaattctagtgaagttgatatagtctcatttttaattgtcctgtaatggaacagtagcaaattcactaaacttttgtgttcagagttaaattgttctcagtactttcaatgtaggggaatgtaataaacatagtgtgtatgtttgggttttaattacacattttatatatgagccatttagatatgcagtgttaattctatactgcatttgaagtgtatgtaa

SEQ ID NO: 5493 - DNA, 310 bp, Homo sapiens
  misc_feature 231: n = A,T,C or G
tatttttagcttttcattttgaatattttcaaccttacaaaaaagttgtgaaaatactacaaagacctgaaaagcgattttgctaagttgtgccagacacagaagaccacatattgtatagttgcatttatatgaaatatccagacaaagcaaatctgctgaatgcatgccccaaaagttcatgtgttggacttaatccccagtgcaacagtgttgggaggtggggcctantaagaggtgattgggtcatgagggcagaaccctcatgaatgaatgtttttttgttgttgttggtttaatttgagaagga

SEQ ID NO: 5494 - DNA, 743 bp, Homo sapiens
  misc_feature 616: n = A,T,C or G
tttgggaatgcaacaactttattgaaaggaaagtgcaatgaaatttgttgaaaccttaaaaggggaaacttagacaccccccctcaagcgcaggaccaagtgcagagtggactctttctggatgttgtagtcagacagggtgcgtccatcttccagctgtttcccagcaaagatcaacctctgctgatcaggagggatgccttccttatcttggatctttgccttgacattctcaatggtgtcactcggctccacttcgagagtgatggtcttaccagtcagggtcttcacgaagatctgcatcccacctctaagacggagcaccaggtgcagggtggactctttctggatgttgtagtcagacagggtgcgtccatcttccagctgtttcccagcaaagatcaacctctgctggtcaggagggatgccttccttgtcttggatctttgccttgacattctcaatggtgtcactcggctccacttcgagagtgatggtcttaccagtcagggtcttcacgaagatctgcatcccacctctaagacggagcaccaggtgcagggtggactctttctggatgttgtagtcagacagggtgcgtccatcttccagctgnttcccaagcaagatcaacctctgctgatcaggagggatgctttcctttgtcttggatctttgccttgacattctccatggtgtcacttcgctccaccctcgagagtgatggtcttaccagtcagggt

SEQ ID NO: 5495 - DNA, 524 bp, Homo sapiens
  misc_feature 469: n = A,T,C or G
gcccctagccccacagccaagacagtttgacataacaggccccggggccatggttgggtagaggcagggtggcctggcctcctgattagtggctgtggccgtggccaccatgactgtggccgtggcgtggcactgtgatcttggccactgtggtcttagggggtgccctccccgaggcctggcttatggtggtggccagggccctcgtcaccctcgtgcatcttctcgtgggaggcccaggttagcctcgccatcagcatgatgaactcctcgaagctcagctgcttgtctgcatttgtgtccaggtcctccatgatgtgttctatgaccttttcattcttattctccttcttgagaaaattttgcagatcttttcgcaccagctctttgaattccccctggttcagggtgtctgggtgccccagcttcacagagtattggtggaaggtgttgatgatggtctctatgntgcgttccagctgcgacattttgcaagtcatcgtcttgcactctgtcaaaccgag

SEQ ID NO: 5496 - DNA, 355 bp, Homo sapiens
acatgttttttttttttttttttttttttttccgatggagtctcgctctgctgcccagcctgaagtgcagtggtgtgatctcggctcactgcaacctccgccttccaggtttaggtgattctcttgcctcggcctcccgagtagctgggatggactacaggcacatgtcaccatgcccagctaattttttgtatttttagtagagacggggtttctgtgttagccaggacggtctggatctcctgatttcatgatccgcccgcctcggcctccctacctcttcctttacttaataagaatgcggtctaattttcaggtgccaagcccccaaactcctcttctagccttctgaatt

SEQ ID NO: 5497 - DNA, 423 bp, Homo sapiens; identical to SEQ ID NO: 1183

SEQ ID NO: 5498 - DNA, 321 bp, Homo sapiens
tttttttttttttttttttttttagaatatgaaccctaaacttgtgtatactataatattctgctaatattatttttacagtataagaataaagaagccatttttaaaatgaaattattaagccaatttgtccaaaaaaaatcttgattagatgtattatatattttccttattaaaaaaacctaataaaagaggtattaatatttttaagttatttaaaaattgtgaagtattttttttacaaaatactttaagctgttaactaagaccactaatgaaactcacagttaaactttttttctcttaattagaacttaaaga

SEQ ID NO: 5499 - DNA, 100 bp, Homo sapiens; identical to SEQ ID NO: 1185

SEQ ID NO: 5500 - DNA, 582 bp, Homo sapiens; identical to SEQ ID NO: 1186

SEQ ID NO: 5501 - DNA, 540 bp, Homo sapiens
ttttttttttttttttttttttttccggccttttattcatttattgagcaaaacacaagtaggatgatacaatgaggcactgacgcagtacaggaagcaatggtgcttttaatgaaacttctttcaaatctgtgaacatgctagctgtgaagtacatgcttttattctttccataggacatatttccaaataatgatcacagtattatggttaataagatgctggacagatgcgtagccaaagaatattacataacaacaaaatctcatcaatgatatatcaaatgcaaatttactaagacatcaagagaatatctgtttgtagttacatggctaaaaacaagacattattacagtaaccaagtccataaaactagaaaaaaagcactgtataacaaaaaggccttttagaagctattaaatgaacaaacattatagataaaccaattttatatctgaagcagcttatagcaccaacacgttggcaggaccagcagaggggtggggtctttggaccaaggcatctgggaacaggaagggc

SEQ ID NO: 5502 - DNA, 470 bp, Homo sapiens
actataggctcagtgagatgacagaggctgaacagcagcagcttattgatgaccactttctgtttgataagcctgtgtccccgttgctgactgcagcaggaatggctcgagactggccagatgctcgtggaatttggcacaacaatgagaagagcttcctgatctgggtgaatgaggaggatcatacacgggtgatctccatggagaagggtggtaacatgaagagagtgtttgaaagattctgccgaggcctcaaagaggtggagagacttatccaagaacgtggctgggagttcatgtggaatgagcgtttgggatacatcttgacctgtccatctaacctgggcactgggcttcgggcaggagtgcacatcaaactgcccctgctaagcaaagatagccgcttcccaaagatcctggagaacctaagactccaaaagcgtggtactggaggagtggacactgctgcc

SEQ ID NO: 5503 - DNA, 450 bp, Homo sapiens; identical to SEQ ID NO: 1189

SEQ ID NO: 5504 - DNA, 444 bp, Homo sapiens
tttttttttttttttttttttttttatcggggctgcctgtgtgctcacaggctgtttatttatccaagagtaaggaggagagagacaggatgaagagaaaaaccagactccccacggtggcagggctgaggggaaaaacaaacagaaaatcccctcttctttctcttgctgctgaccccagggtactccagcttcagatgggacctctgggggtggcttaggggcctcgaggaggcccggcagctcagctgttggctggggtcaggatccgcacaggggcaggtcccagactcggaatggcttctgtgtacacaaaatatctctctgcaaaaggcactggtggaggggggcagcaggaaggccaccccatcacaggcagagtccactctgtcctgcgtctgggtcctgggccccaagaccaatccagtctccctcagggttggg

SEQ ID NO: 5505 - DNA, 580 bp, Homo sapiens
ttttttcttttttttttttttttttacgacggagactcgctctgttgcccagactgtgccgtggcacgatcttggctcactacaacctctgcctcccaggttcaagcaattatcctgcctcagcctcctgagtagctgggattacaggtacctcccaccatggctggctaatttttgtatttttaatagagacaaggttttgccatgttggccaggctggtctcaaactcctgaccttcagcagttcacttgcctcggcccctcaaagtgctgggattacaggcgtgagccaccgtgcccagcccctatatccaattttgatatctactttctcctacgctgggttttatatccttgaggggctgcctcagatgtaattgaatcagtcaaacattctcagaaatttgggccacagaatccattcttcaagtgcaaaatttatttgaaatgccaagtcaaaagagcttctctaatcaaagaggggatggggtagcccaattcctatagctccattctattttcttcagagctttggggttccaaagagcatgatgtaaaagcaattggtctaatctactct

SEQ ID NO: 5506 - DNA, 384 bp, Homo sapiens; identical to SEQ ID NO: 1192

SEQ ID NO: 5507 - DNA, 516 bp, Homo sapiens
gcacttaagcgggccatgccatgcaaccttgggcgctgccaaccgtgggcgacctctgggtgtgcgggcggcctggcgcggcgctccgctgtgtcagcgtgttatgatgccgtcccgtaccaacctggctactggaatccccagtagtaaagtgaaatattcaaggctctccagcacagacgatggctacattgaccttcagtttaagaaaacccctcctaagatcccttataaggccatcgcacttgccactgtgctgtttttgattggcgcctttctcattattataggctccctcctgctgtcaggctacatcagcaaagggggggcagaccgggccgttccagtgctgatcattggcattctggtgttcctacccggattttaccacctgcgcatcgcttactatgcatccaaaggctaccgtggttactcctatgatgacattccagactttgatgactagcacccaccccatagctgaggaggagtcacagtggaactgtcccagcttta

SEQ ID NO: 5508 - DNA, 333 bp, Homo sapiens
cgcctacccccaacagaaagcctgccaatggcaccaacccctctgctgagctgcaccgtagtcctagcctcctataaggcccaggaagagggcagaggggccagaaggactccatggcccaaagaccctcctccctgcaggcactgtgggaacagacacagagatggagaagcagggacatgctgagaggacgaagccaaggaaattagggaggagagtcaaagggatcaaggagagttggggatttgagctgcagcagagagggatgagggatttagccctctgccctaaggtgccattgaaaagggacaggacccttcggaggtgcctgtg

SEQ ID NO: 5509 - DNA, 399 bp, Homo sapiens
ttttttttttttttttttttttttttggatttttaatagagatggagtttcaccatgttggccaggctggtcccaaacccctgacctcaggtaatctgcccaccttggcctcccaaagtgctgggattacaggtgtgagccaccgtgcccagccaggtctgccttctgatggggcacagactagtgcaacatctagtggacagagtgtaggggtgtcctgggtgaccacaccctgcctctcatctctggttatgcccagagacagcccatgtgctgttagacacccatagcactgcagccactctcttcctaaatcctcccagctttgcatgcctggaaatgctgcaacaccaaggcagaagcaaagcctttcttttgactctgccacatggcatgggt

SEQ ID NO: 5510 - DNA, 371 bp, Homo sapiens
tttcaagatgctttctgtatttatttaaaaaaaaaaaattccagaatgggtaagagaacaatcatcaaggatgtaggtgccagacacagggcagaaggtagctagaaaagtatgccttagggaagttaaaggtctagcctcattcctaccttgttttaatagctgtacctaatataaatagctaagtttcccattgttctagattcctctgccccatctacaaacatggcacagccagcttgactcgcaaggcctcagttgaaggaccccatgtacatacaggccagtacagcagtactaggctaactagaaggatctcatccccatatgtggtctcatttcaagtctatggatgactaccttcattgctg

SEQ ID NO: 5511 - DNA, 356 bp, Homo sapiens
ttttttttttttttttttttttttttaggagagacagggtttcactgtgttagccaggattgtctcaatctcctgacctcgtgatctgcctgcctaggcctcccaaagtgctgggattacaggtgtgagccaccacttttaatacatgatttcaaccaaataaaacttttaccctaacgttttcatctaccagaagatttcacggagtttttcatattcactattaacaaaacaccaaacatcctaggtatgcaggacactgtgacacaagttacctggaaaagtgcctccaggctgaggtttgcttgtcctgtagcattaagggccttgatggcagatgttctgtaaggacaaag

SEQ ID NO: 5512 - DNA, 430 bp, Homo sapiens; identical to SEQ ID NO: 1197

SEQ ID NO: 5513 - DNA, 519 bp, Homo sapiens
agacaactaactaaagtagtgagatagattctaagggcaaacatttttccaagtcttgccatatttcaagcaaagaggtgcccaggcctgaggtactcacataaatgctttgttttgctggtgatttaaccagtgcttggaaaaatcttgcttggctatttctgcatcatttcttaaggctgccttcctctctgagtacgttgccctctgtgctatcaatcatcttatcatcaattattagacaaatcccactggcctacagtcttgcttctgcagcacccactttgtctcctcaggtagtgatgaattagttgctgtcacaaaaggagggaagtagcacccaaattaaattgcttaagagaggaaacgtacatcttgtataacttaaggagcgaagaaaatgtagacgcgaaagtgaaaagtgaggcagctagttcttcctattccattctcgaccaacctgccctttcttaatatgactagtggtcttgatgctagagtcaacttactctgttgctg

SEQ ID NO: 5514 - DNA, 542 bp, Homo sapiens
  misc_feature 87: n = A,T,C or G
agattctcattacaacagtgccacccaatcttcgaaaactggatccagaactccatttggatatcaaagtattgcagagtgccttancagccatccgacatgcccgctggttcgaggaaaatgcttctcagtccacagctaaagttctcatcagactactgaaggacttgaggattcgttttcctggctttgagcccctcacaccctggatccttgacctactaggccattatgctgtgatgaacaaccccaccagacagcctttggccctaaacgttgcatacaggcgctgcttgcagattctggctgcaggactgttcctgccaggttcagtgggtatcactgacccctgtgagagtggcaactttagagtacacacagtcatgaccctagaacagcaggacatggtctgctatacagctcagactctcgtccgaatcctctcacatggtggctttaggaagatccttggccaggagggtgatgccagctatcttgcttctgaaatatctacctgggatggagtgatagtaacaccttca

SEQ ID NO: 5515 - DNA, 596 bp, Homo sapiens
tgcccatcccgaactgaccgggagatcaaggtaaccctggtgtttgagcatgtagaccaggacctaaggacatatctggacaaggcacccccaccaggcttgccagccgaaacgatcaaggatctgatgcgccagtttctaagaggcctagatttccttcatgccaattgcatcgttcaccgagatctgaagccagagaacattctggtgacaagtggtggaacagtcaagctggctgactttggcctggccagaatctacagctaccagatggcacttacacccgtggttgttacactctggtaccgagctcccgaagttcttctgcagtccacatatgcaacacctgtggacatgtggagtgttggctgtatctttgcagagatgtttcgtcgaaagcctctcttctgtggaaactctgaagccgaccagttgggcaaaatctttgacctgattgggctgcctccagaggatgactggcctcgagatgtgtccctgccccgtggagcctttccccccagagggccccgcccagtgcagtcggtggtacctgagatggaggagtcgggagcacagctgctgctggaaatgctgac

SEQ ID NO: 5516 - DNA, 608 bp, Homo sapiens
atcgaagaggcggcgcgatctgtgtcgggcattaccagaagagtctccatgtggacagtctcagggacaccatgtagagaattttggtctcgattcagaaaagagaaagagccagtggttgttgagacagtagaagagaaaaaggaacctatcctagtgtgtccacctttacgaagccgagcatacacaccacctgaagatctccagagtcgtttggaatcttacgttaaagaagtttttggttcatctcttcctagtaattggcaagacatctccctggaagatagtcgtctaaagttcaatcttctggctcatttagctgatgacttgggtcatgtagtccctaactccagactccaccagatgtgcagggttagagatgttcttgatttctataatgtccctattcaagatagatctaaatttgatgaactcagtgccagtaatctgccccccaatttgaaaatcacttggagttactaagcaattcggaagagaaacacattgaaatcactgtctttccctgagcaagggggctgctcattagatcttttgatactttaccatgtgaaatactaccagaactgttctctaaacccactttttct

SEQ ID NO: 5517 - DNA, 648 bp, Homo sapiens
gcgtgtgtgcgcctaatctcaggtggtccacccgagaccccttgagcatcaaccctagtcccccgcgcggccccttattcgctccgacaagatgaaagaaacaatcatgaaccaggaaaaactcgccaaactgcaggcacaagtgcgcattggtgggaaaggaactgctcgcagaaagaagaaggtggttcatagaacagccacagcagatgacaaaaaacttcagttctccttaaagaagttaggggtaaacaatatctctggtattgaagaggtgaatatgtttacaaaccaaggaacagtgatccactttaacaaccctaaagttcaggcatctctggcagcgaacactttcaccattacaggccatgctgagacgaagcagctgacagaaatgctacccagcatcttaaaccagcttggtgcggatagtctgactagtttaaggagactggccgaagctctgcccaaacaatctgtggatggaaaagcaccacttgctactggagaggatgatgatgatgaagttccagatcttgtggagaattttgatgaggcttccaagaatgaggcaaactgaattgagtcaacttctgaagataaaacctgaagaagttactgggagctgctattttatattatgactgc

SEQ ID NO: 5518 - DNA, 441 bp, Homo sapiens
tagcctgggtcaggagtttgagaccagcccggccaaaatggcgaaaccccgtctctaaaaacacaaaaattagccgggtgtggtggtgcacacctgtaatcccagccactcgggaggctgaggcaagagaactgccgggaacccaggaggcagagctttgcagcgagccaagatcatgccactgcacttcagcctgggcaacagagcgagactctgtctcaaaaaataataaaacaaaacacagaatataagttccataaggaaggagatgtttttctgtcatatgcacctcctgtagccaggactgtatttcagtgagtatctgtagggtggacagatgggtggatgtgggtgactgattctagaagagtaataaatgtgtcagaccagctgagaaagtctttttttttttggaaacaaaatttaactttttttccccag

SEQ ID NO: 5519 - DNA, 67 bp, Homo sapiens; identical to SEQ ID NO: 1202

SEQ ID NO: 5520 - DNA, 546 bp, Homo sapiens; identical to SEQ ID NO: 1204

SEQ ID NO: 5521 - DNA, 553 bp, Homo sapiens
agaaggacactgttgtggtccaggatttgggcaacatcttcactcgcctgccactcaagcggatgtggcatcaggcactgctgcgctcaggggataaagagcgcatggaccccccctgcaccaacacaacagctgcttccacctacctcaacaacccgtacgtgcggaaggccctcaacatcccggagcagctgccacaatgggacatgtgcaactttctggtaaacttacagtaccgccgtctctaccgaagcatgaactcccagtatctgaagctgcttagctcacagaaataccagatcctattatataatggagatgtagacatggcctgcaatttcatgggggatgagtggtttgtggattccctcaaccagaagatggaggtgcagcgccggccctggttagtgaagtacggggacagcggggagcagattgccggcttcgtgaaggagttctcccacatcgcctttctcacgatcaagggcgccggccacatggttcccaccgacaagcccctcgctgccttcaccatgttctcccgcttcctgaa

SEQ ID NO: 5522 - DNA, 426 bp, Homo sapiens
gtttggtcgttcgttgggcggtgctgatttttcgctcgtcgactgcggctcttcctcgggcagcggaagcggcgcggcggtcggagaagtggcctaaaacttcggcgttgggtgaaagaaaatggcccgaaccaagcagactgctcgtaagtccaccggtgggaaagccccccgcaaacagctggccacgaaagccgccaggaaaagcgctccctctaccggcggggtgaagaagcctcatcgctacaggcccgggaccgtggcgcttcgagagattcgtcgttatcagaagtcgaccgagctgctcatccggaagctgcccttccagaggttggtgagggagatcgcgcaggatttcaaaaccgacctgaggtttcagagcgcagccatcggtgcgctgcaggaggctagcgaagcgtacctggt

SEQ ID NO: 5523 - DNA, 625 bp, Homo sapiens
ttggaaaaaccacactaggcaaagaacttgcgtcaaaatcaggactgaaatacattaatgtgggtgatttagctcgagaagtctgatcatcggatatcatggagtctggcaagacggcttctcccaagagcatgccggaagatgcacagatgatggcacaaatcctgaaggatatggggattacagaatatgagccaagagttataaatcagatgttggagtttgccttccgatatgtgaccacaattctagatgatgcaaaaatttattcaagccatgctaagaaagctactgttgatgcagatgatgtgcgattggcaatccagtgccgcgctgatcagtcttttacctctcctcccccaagagattttttattagatattgcaaggcaaagaaatcaaacccctttgccattgatcaagccatattcaggtcctaggttgccacctgatagatactgcttaacagctccaaactataggctgaaatctttacagaaaaaggcatcaacttctgcgggaagaataacagtcccgcggttaagtgttggttcagttactagcagaccaagtactcccacactaggcacaccaaccccacagaccatgtctgtttcaactaaagt

SEQ ID NO: 5524 - DNA, 621 bp, Homo sapiens; identical to SEQ ID NO: 1210

SEQ ID NO: 5525 - DNA, 525 bp, Homo sapiens
tacggccgggattctgaggtggcatattgtggcttcccctcattccatcaaacctttagacataagaacaattgactgacctggtgcctacccagtttgctggtttcctgcctataaggaaagttatgttgcagatcagtggtagacctgaaagtcacataatagaaaaaaaggaggataaggagaaaatgaattgctgttcccaagtaatcgagatttgtttcttcttgcagggaagatgattgggaaaatattgtgacctgataaaagtgttgatacatttaataagggtttgccaccatctgactaaatgataacatgcctttcagagtcttttctgaaaaatatcctgaaacagtttggcatactccttcagcaacactgacatcttcatgtgtttacgtagacatatcccgccactttgccgtactaattggcactaggagccaccaagtaacatggggagaaaaaaggggactacaaatggcagctttgaattggctatttacatcagttgtatttggg

SEQ ID NO: 5526 - DNA, 429 bp, Homo sapiens
gtaaatgaaagaggaattatgtggatgtgatggtgcctttaactgagatgcaaaagactgtgagaggaactcattttgagcagtctttgctaatcaatagataggtttgaagtagtttcagacattcaagtggcgatgctgaactggaagttgtatgtgtaattgtagaagtgaaggtagaggccaggtgtgaaggtagagccctccactgggatcagaagcactgaaactagtgggaaagggagagagagatgaggaccaaccttttggagctcatttaatggtcaagaagatgaagtggatgctgcggtggactggagaaggcaagttgttaaggaaggcagtttgtgtggatattttaaatctgagtgccaaaagttttagatttaagcgtcaaaggtgatgcacctttgcttttttttttttaaa

SEQ ID NO: 5527 - DNA, 516 bp, Homo sapiens
tacggccgggtctgctgagtccgcagcactcagactacgtgcacctctgcagcaggtgcaggcccagttgtcacccctccagaacatctccccatggattctggcggtattgactcttcagattcagagtctgatatcctgttgggcattctggacaacttggacccagtcatgttcttcaaatgcccttccccagagcctgccagcctggaggagctcccagaggtctacccagaaggacccagttccttaccagcctccctttctctgtcagtggggacgtcatcagccaagctggaagccattaatgaactaattcgttttgaccacatatataccaagcccctagtcttagagataccctctgagacagagagccaagctaatgtggtagtgaaaatcgaggaagcacctctcagcccctcagagaatgatcaccctgaatccattgtctcagtgaaggaagaacctgtagaagatgacctcgttccggagctgggtatctcaaatctgctt

SEQ ID NO: 5528 - DNA, 463 bp, Homo sapiens
tacggccgggattcatatcgaattggaaaatcgcggataattctagtcttactatactacctaatatagcatcctactatacacttatgttaagtttcttgatagcatttatcacggccgagcgcagtggctcatgcctgtaatcctagcgctttgggaggccgagtgggtggatcacctgagttagggagttcaagaccagcctggccaacacggctaagccctgtctctgctggaaatacaaaaattaaccaggcatgttgagcgcctgtagttccagctactcggaaggctggggcggggggattgcttgaacccaggtggcagaggttgtagtgagccgagatcatgccactgcactccagcagtggaaacagagtgagactgtcttaaaaacaaacaaacaaaacaacaacaacagcaacaaaaagcatttattatataaatactgtcttatttattt

SEQ ID NO: 5529 - DNA, 123 bp, Homo sapiens
ttttgtcccttcccctgccccttagagtttgcagggctgtcagaacccgaggagggtgtgcgtcctcacgtcaaggggccactcgctgccagcggcttgaaggatactggtgatgcagctgcc

SEQ ID NO: 5530 - DNA, 461 bp, Homo sapiens; identical to SEQ ID NO: 1218

SEQ ID NO: 5531 - DNA, 538 bp, Homo sapiens
atatgatgacataagacttcactccaacttccagttcaaattcccatcagatctaggtatagtttgtttcttatctttgattttttgaggatatattgtataagatatagcctcctttagtgctaatttgaatatattttcacttgtttcatccaaaatagccttagtgagacttgttactttccacgaaaaacattttcatttttaatgtaccttttcagtgtggcttttccaatgtatttatctgttgaaattgtaaaggtgctttatgatctagcccaattcctatttgtgactttttagaaatttcaccccaaattagtattgtttttacacacctttgttcttagtgcacttcttattctattcaaagccttagacattctacttttgatattttaagttctgtatctatttccataatactactttgaaccatatcaaattgtcccgggtattaatattgtacaaatcgccgatacttgactatttttgacttactaaaatggcaatttcatgcagatcaacttattatatt

SEQ ID NO: 5532 - DNA, 539 bp, Homo sapiens; identical to SEQ ID NO: 1220

SEQ ID NO: 5533 - DNA, 103 bp, Homo sapiens
actttacaagcgaggactattatatttatataagaaaagctttagatactgggtgttttatgcaggtggcacatttagaacgaacaaggcattacttaagtgt

SEQ ID NO: 5534 - DNA, 510 bp, Homo sapiens
ggcggcccaagcggtttcaaacggcttagagcaggccgcttggttctgacccagctgaggaaatactcttaattctaaggaaaacctggaagcacaatgggagatgacagtgagtggttgaaactgccagttgatcagaaatgtgaacacaagctgtggaaagcaaggttaagtgggtatgaagaggtcctgaagatcttccagaaaataaaggatgaaaagagcccagagtggtccaaatttttaggattgatcaaaaaatttgtcactgattccaatgcagtggttcaattgaaaggattagaagctgcacttgtttatgttgaaaatgcccatgtagcaggaaaaaccacaggagaagttgtgtcaggtgttgtaagtaagggtgttcaatcaacctaaagctaaagccaaggagctgggcatagagatctgtcttatgtacatagagattgagaaaggagaggctgttcaagaagagctcctgaaaggcttggacaataagaatcc

SEQ ID NO: 5535 - DNA, 542 bp, Homo sapiens; identical to SEQ ID NO: 1222

SEQ ID NO: 5536 - DNA, 547 bp, Homo sapiens; identical to SEQ ID NO: 1223

SEQ ID NO: 5537 - DNA, 587 bp, Homo sapiens
cccagctggtgtacgtgtgtgatccagtcttgggtgacaagtgggacggcgaaggctcgatgtacgtcccggaggacctccttcccgtctacaaagaaaaagtggtgccgcttgcagacattatcacgcccaaccagtttgaggccgagttactgagtggccggaagatccacagccaggaggaagccatgcgggtgatggacatgctgcactctatgggccccgacaccgtggtcatcaccagctccgacctgccctccccgcagggcagcaactacctgattgtgctggggggtcagaggaggaggaatcccgctggctccgtggtgatggaacgcatccggatggacattcgcaaagtggacgccgtctttgtgggcactggggacctgtttgctgccatgctcctggcgtggacacacaagcaccccaataacctcaaggtggcctgtgagaagaccgtgtctaccttgcaccacgttctgcagaggaccatccagtgtgcaaaagcccaggccggggaaggagtgaggcccagccccatgcagctggagctgcggatggtgcagagcaaaagggacatcgag

SEQ ID NO: 5538 - DNA, 376 bp, Homo sapiens
agaatttctctctctcttttaatagttttattttgtctgtcctgtttgttcatttggatgttttaatttttaaaaaaaaaaaaaccttggcggattttaataatttggtaccataggaaggtttccctctacagtattggcctggccagtttataccaaaaaaaggcggggtttttatttttttgggaacctttacggttttgtttaactttgggccaaaatttttattggaataaagggctacctaaggtaaaaaagttcaaagtttataccttttcctttagggcctcagggggggttttagggtagggggtttaagggaaaaaaattttcaaccggggcctcatggccaatttgggggaaaaggagttggggc

SEQ ID NO: 5539 - DNA, 573 bp, Homo sapiens
ttgtaaaaaattccagttgactacacaagacctgaaaccggaaactcctgagaataaggttgattctacacaccagaaaacacatacaaagccacagccaggcgttgatcatcagaaaagtgagaaggcaaatgagggaagagaagagactgatttagaagaggatgaagaattgatgcaagcatatcagtgccatgtaactgaagaaatggcaaaggagattaagaggaaaataagaaagaaactgaaagaacagttgacttactttccctcagatactttattccatgatgacaaactaagcagtgaaaaaaggaaaaagaaaaaggaagttccagtcttctctaaagctgaaacaagcctgacactattagaagcaatcttcactatatgaaagaaactacaagtgatgatcccgacactattagaagcaatcttccgcatattaaagaaattacaagtgatgatgtaagtgctgctaacactaacaacctgaagaagagcacgagagtcactacaaacaaattgaggaacacacagttagcaactgaaaatcctaatggtgatgctaat

SEQ ID NO: 5540 - DNA, 609 bp, Homo sapiens
gcggcgacagggtgttcccgaactagagtggggcatacataatcttgctgctatgcctcgaagctgtagtctgaatcaacctaagttttaaacagaaggtgaacctctgagaaaatcaagtatattttaaaagaagtgatgtgggatcaaggaggacagccttggcagcagtggcccttgaaccagcaacaatggatgcagtcattccagcaccaacaggatccaagccagattgattgggctgcattggcccaagcttggattgcccaaagagaagcttcaggacagcaaagcatggtagaacaaccaccaggaatgatgccaaatggacaagatatgtctacaatgggatctggtccaaacaatcatggaatttccaaggggattcaaacttcaacagaatgtggcaaccggaatggggaatgcatcagcagcccccacacccccctccagatcagccatggatgccaccaacaccaggcccaatggacattgttcctccttctgaagacagcaacagtcaggacagtggggaatttgcccctgacaacaggcatatatttaaccagaacaatcacaactttggtggaccacccgataattttgcag

SEQ ID NO: 5541 - DNA, 636 bp, Homo sapiens
acgcagttagtcggctgcatggcgccggtgaggcggtccgcgaagtggcggcctggtggtattgaggcgcgtggtgaaggggtttccactgtcgggtacaggaataagaatgtgagacagaagactggcggcctaaccacccgcaagccttcgtggggagcgttcgcgagggacaaggctttgcttttcgaagaaaactgaaaatacagcaaagttacaagaaattgctacggaaggaaaagaaggctcaaacgtcactggaatctcaattcacagatcgatacccagataatctgaaacatctctatttagctgaagaggaaagacataggaagcaagcaagaaaagtcgaccatcctttgtcagaacaagttcaccagccgttgcttgaagaacagtgtagcattgacgagcctttatttgaagatcagtgtagctttgaccagcctcagccagaagaacaatgtattaaaacagtaaactcctttacaattccaaagaaaaataaaaagaaaacatcaaatcaaaaagcacaagaagaatatgaacagatacaagccaaacgtgctgctaagaaacaagaattcgagaggagaaaacaggagagagaagaagcccaaaggcagtacaaaaaga

SEQ ID NO: 5542 - DNA, 650 bp, Homo sapiens; identical to SEQ ID NO: 1226
  misc_feature 582: n = A,T,C or G

SEQ ID NO: 5543 - DNA, 616 bp, Homo sapiens
ttagttaccagcatgccattgaagaatctgtcgttctcatttatgatcccataaaaactgcccaaggatctctcactaaaggcatacagactgactcctaaactgatggaagtttgtaaagaaaaggatttttcccctgaggcattgaaaaaagcaaatatcacctttgagtacatgtttgaagaagtgccgattgtaattaaaaattcacatctgatcaatgtcctaatgtgggaacttgaaaagaagtcagctgttgcagataaacatgaattgctcagccttgccagcagcaatcatttggggaagaatctacagttgctgatggacagagtggatgaaatgagccaagatatagttaaatacaacacatacatgaggaatactagtaaacaacagcagcagaaacatcagtatcagcagcgtcgccagcaggagaatatgcagcgccagagccgaggagaacccccgctccctgaggaggacctgtccaaactcttcaaaccaccacagccgcctgccaggatggactcgctgctcattgcaggccagataaacacttactgccagaacatcaagagttcactgcccaaaacttaggcaagctcttcatggc

SEQ ID NO: 5544 - DNA, 476 bp, Homo sapiens
ggaatcttcccacgcacctacatcgaggtaccgcagcctcttttcttcctaaggaaaagcctgacagtgcccaaagcaccatttatttaccaaatgcttatgttttgtttcctccttttcctcttgtttccctgctttcttctcttcccttgttctcttttacctctttccctttctcagctccttcctcctgctgagaaggcacagcccaaaaagttgacaccagtgcaggttttggaatatggagaagctattgctaagtttaactttaatggtgatacacaagtagaaatgtccttcagaaaggtaagctgcacttctcatgccttgctttggggctctcttggatggcgcagctatgtggggaagcgtggtgttgctatcacaccccagtctgggggtgctgtctgtacccttaagagaagtatgccaatcaataattgcattaagggctgggcacggtggctcatgcctgt

SEQ ID NO: 5545 - DNA, 543 bp, Homo sapiens
aaaagacatcttgcttggcactaaacaagaaccaaaacagctaggatttatgtttgaccacattaataataaaaacttttgaacaaagaaaggcatcataagtataatcagataataagtaacagcctggaggaaaatattttcactatacaaaggtgatgggatactatatattgcatacaaagagattctggctgggcgcggtggctcacacctgtaatcccagcactttgggaggctgaggtgggctaatcacccgaggtcaaattcgagaccagcctggccaacatagtgaaaccctgtctctactaaaaatacaaaaattagccaggtgtggtggtacatgcctgtagtcccagctacttgcggggctgaggcatgagaatcatttgaactcgggaagcagagattgcagtgagccaagattgcaccactgcactccagcctgggcaacagagcgagactctgtccccccagaaaaaaaggccggcatgatggctcacacctgtaatcccagcactttgggaagctgaagcgggtgga

SEQ ID NO: 5546 - DNA, 549 bp, Homo sapiens
ttaagacacagaatctaggaaatgtttagagaaaatggctatgaaagggaagagagaaaaacgtgtatctgaaagaggaacaggcatggctttttagttaaagaaaaaggtatatagacttgagcatgtgtaaatgctgctggtgaaaagccagtagagaaggagagtgaataaacaaacggagagaaaagaggcattagacagagcacagcccccagagggaatcaggacccagagctcagagcagaagcaccccactttcctgtaacaggaggaaagaagtgatggatgggggtaggtgctgctaggtttgagggcctggtagaaaatgagagtttctgcatggtgtttctattttctctgtgcgatacgaaacctcatcctatgccagagtgagggcagaggctgaggaccttgaaagaggtctcatacaggcactgctgttaacgggagagaatactgatgaaagcagcagaaatgaatgccgggtggcactgaggatgctgtgggcgtgaccatacatttctggaggcccccatttgtttggct

SEQ ID NO: 5547 - DNA, 533 bp, Homo sapiens
acatagattatccaggctgagatggaaaacaagccctttattgaattttcaacacagactccctgcttctcatctccttaataaaatttcattaaaatccccttgaactcccatgttcaaatctccatttgttgacagacaaagccaacaatactctaaactgaggcctgcaagtcatttcatttgtatttttgtccagaaatttcccataggaagacttcacctcctacaactccgaagaaaacccttactgtccaagaccgtcaccagcaaccatccgcagtcattcaagtggaagctttcacagcttttgtacattctctgtgtcaatatacaactgagttacagactgtcccctggctccctgacccttacaaacactaaaagttttgtttgactcaacttcaagctgctcatctgttagtaagtgatgttcactccagaacacattcatgatgagaactttctaaaagaccagcactgctcttcccctccctatatcataataatcatgataacctgaaacatgttac

SEQ ID NO: 5548 - DNA, 611 bp, Homo sapiens; identical to SEQ ID NO: 2681

SEQ ID NO: 5549 - DNA, 510 bp, Homo sapiens; identical to SEQ ID NO: 1232

SEQ ID NO: 5550 - DNA, 483 bp, Homo sapiens
tggtgaggggctgctggtggcggcgcattctcggtaggcggtatgagtttggctgggggccggacaccccggaagaccgctgcgaaccggctttctgggcttttggaggcagaggaggaatatgagttctaccagacgacttatgggggtttcacagaggaatccggagatgatgagtatcgagggggccagtcagacacagaggacgaagtggactctgactttgacattgatgaaggggatgaaccatccagggatggagaagcctaggagccacgaacgaagcgccgagtagtcaccatggcctatatggaacctctcaagagcttaatgcctcgaaaggtcaacaccccggctggtagctctcagaaggcgcgagaagagaaggcactactgccattataactacgagatgacggctctgacagtcggaagtctatgcgtcagtctacagctgagcatacacgaccaacgttccttcgg

SEQ ID NO: 5551 - DNA, 528 bp, Homo sapiens; identical to SEQ ID NO: 1233

SEQ ID NO: 5552 - DNA, 601 bp, Homo sapiens; identical to SEQ ID NO: 1236

SEQ ID NO: 5553 - DNA, 505 bp, Homo sapiens
  misc_feature 370: n = A,T,C or G
tacggccgggtgtgttttattctgattttgggggaggttatatgggtttaatagtttttttaatttatttagggggaatgatggttgtctttggatatactacagcgatggctattgaggagtatcctgaggcatgggggtcaggggttgaggtcttggtgagtgttttagtggggttagcgatggaggtaggattggtgctgtgggtgaaagagtatgatggggtggtggttgtggtaaactttaatagtgtaggaagctgaataatttatgaaggagaggggtcagggttgattcgggaggatcctattggtgcgggggctttgtatgactatgggcgttgattagtagtagttactggttgaacatntgtttgttggtgtatatattgtaattgagattgctcgggggaataggttatgtgattaggagtagggttaggatgagtgggaagaagaaagagaggaagtaaagtttaattatgcctttttgggttgaggtgatg

SEQ ID NO: 5554 - DNA, 577 bp, Homo sapiens
tacggccgggatggagttcctgtggaagggagtcgttacgctgcagatcggcgccgttacagacgtggctactatggaaggcgccgtggccctccccggaatgctggtgagattggagagatgaaggatggagtcccagagggagcacaacttcagggaccggttcatcgaaatccaacttaccgcccaaggtaccgtagcaggggacctcctcgcccacgacctgccccagcagttggagaggctgaagataaagaaaatcagcaagccaccagtggtccaaaccagccgtctgttcgccgtggataccggcgtccctacaattaccggcgtcgcccgcgtcctcctaacgctccttcacaagatggcaaagaggccaaggcaggtgaagcaccaactgagaaccctgctccacccacccagcagagcagtgctgagtaacaccaggctcctcaggcaccttcaccatcggcaggtgacctaaagaattaatgaccattcagaaataaagcaaaaagcaggccacaaccttaaccaacaccaaagaaacatccaagcaataaagtggaagactaac

SEQ ID NO: 5555 - DNA, 530 bp, Homo sapiens
gtccggatgctgttgatggagtaatgaatggtgaatactaccaggaaagtaatggtccaacagacagttatgcagctatttcacaagtggatcgattgcagtcagagcctgaaagtatccgtaaatggagagaagaacaaatggaacgcttggaagcccttgatgccaattctcggaagcaagaagcagagtggaaagaaaaggcaataaaggagctagaagaatggtatgcaagacaggacgagcagctacagaaaacaaaagcaaacaacagggcagcagaagaagcctttgtaaatgacattgacgagtcgtccccaggcactgagtgggaacgggtggcccggctgtgtgactttaaccccaagtctagcaagcaggccaaagatgtctcccgcatgcgctcagtcctcatctccctcaagcaggccccgctggtgcactgaagagccaccctgtggaaacactacatctgcaatatcttaatcctactcagtgaagctcttcacaggtcgttggattaattatgg

SEQ ID NO: 5556 - DNA, 507 bp, Homo sapiens
ataagctactaacaaccttttgaaagggaaaggataaaacactgaaatagcaaaatttgaatttatctttggaaaaatcttacaagctgaaatgtcctaaaatggtttttaagttaaaggcaatttttaaatcttacagaagctaaaacataactttaacagtgcgatggtctccctgtgaattttattttgctctgtttcactgaagctgctttcagtaacaaagaatgggattctcattagaggatgcttccttcagtgccaaaaccattaagcaaagcaaatgtacttagtctagttccaaaatattaattcattttaggtaaacacatataaatgtgtgcatataacctcttaaaagagggaagctaggccgggtgcggtggctcacatctgtaatcccaacactttgggaagccagacgggtgtatcacctgaggtcaggagttcaagaccagcctggccaacatgttgaaagcctgtctttacaaaatacaaaaattagct

SEQ ID NO: 5557 - DNA, 520 bp, Homo sapiens
tctgtccttgaaggactaatagaaaagtatgttctaacctttacatgaggactctattctttaactcccattaccatgtaatggcagttatattttgcagttcccacattaaagaagacctgagaatgtatccccaaaagcgtgagcttaaaatacaagactgccatattaaattttttgttgacattagtctcagtgaagactatgaaaatgctggctatagatgtcttttcccatttatctaaatatggactgctcaggaaacgagactttccattacaagtatttttaattaattgggccagcttttcaaacaaagatgccacattcaaaatagggtatattttcctatattacggtttgcccctttataaatccaagtagataggaagaaagaagacaaactttgcatctcagtatgaattattcaatttatttgaatgatttttctttacaaaacaaactcattcattagtcatgtttatctgcttaggagtttagggaacaatttggcaatttt

SEQ ID NO: 5558 - DNA, 519 bp, Homo sapiens; identical to SEQ ID NO: 1237

SEQ ID NO: 5559 - DNA, 580 bp, Homo sapiens
cggccgggtatttagcatgagaaaaaaaatccaactctgcttttggccttgcttctataaatatatagtgtatacttggtgtagactttgcatatatacaaatttgtagtattttcttgttttgatgtctaatctgtatctataatgtaccctagtagtcgaacatacttttgattgtacaattgtacatttgtatacctgtaatgtaaatgtggagaagtttgaatcaacataaacacgttttttggtaagaaaagagaattagccagccctgtgcattcagtgtatattctcaccttttatggtcgtagcatatagtgttgtatattgtaaattgtaatttcaaccagaagtaaatttttttcttttgaaggaataaatgttctttatacagcctagttaatgtttaaaaagaaaaaaatagcttggttttatttgtcatctagtctcaagtatagcgagattctttctaaatgttattcaagattgagttctcactagtgtttttttaatcctaaaaaagtaatgttttgattttgtgacagtcaaaaggacgtgcaaaagtctagccttgcccgag

SEQ ID NO: 5560 - DNA, 244 bp, Homo sapiens; identical to SEQ ID NO: 1238

SEQ ID NO: 5561 - DNA, 300 bp, Homo sapiens
ttggaaactgttttcctctgttttggtctcttgggcaacatttttggcccaagtttgggcaacatttggcccaagtttgggcattttggcagtagctgtatgggagaaaaagagtaagaggaaatattcccacagccatgaagggtgaaagggcaccttgtgcctagactagggctgcctggtcagtcccaggtgaggccaagggctttctggccatctcagggaggggccaccaggttcctcccctcaccccatattccatcaccttcctcctctgctctgggtggtaagggaagccct

SEQ ID NO: 5562 - DNA, 399 bp, Homo sapiens
  misc_feature 399: n = A,T,C or G
gactttggaacacatattagtggtaggattatttactgtgcttttactgtcacttttaatcccaaatatgatacgttattaaaagctgtaaaagatgctactaacactggaataaagtgtgctggaattgatgttcgtctgtgtgatgttggtgaggccatccaagaagttatggagtcctatgaagttgaaatagatgggaagacatatcaagtgaaaccaatccgtaatctaaatggacattcaattgggcaatatagaatacatgctggaaaaacagtgccgattgtgaaaggaggggaggcaacaagaatggaggaaggagaagtatatgcaattgaaacctttggtagtacaggaaaaggtgttgttcatgatgatatggaatgttcacattan

SEQ ID NO: 5563 - DNA, 236 bp, Homo sapiens
tttttttttttttttttttgggtaaagaaacctttaatgaggattcaaggttaataaggaagacgcagagggccagcactcagccccaacctcctcacgtgtacatggctccgtggaggttctccagtcggtgttgctgctgctgttttcgagcctgaaggaaagaaagcatgctgggcaggggccaaaactgaaggcctatgggtgaggggatgggcagctattatggggctggc

SEQ ID NO: 5564 - DNA, 616 bp, Homo sapiens
ttttttttttttttttttttttttccgaaaaatatttcatttctccattttctttttcaggggtcttttgaagaatccaatcttccacagtgctaaaatgagcagcattaacagcaacaatccggcaaaagcactcagcaggatgacccataatggcactctgcccggtagcccatctttggatatttgaatagcaagctctcttttttgattgctgctacttaaaaccagagatgcattttcactccgaagttctccccttatagtaagatttaagctggaaaaatatgattttataaaagttggtttccacaagataagcgaaacattgacttggctgatgtcagaagaagtgagattacatgtgatggtagcaaatttacatgtattgcagtccagaattgtgcctcgtttgagatggtcagttgatgtagtcattttctttccagagttgatactgaaaggatcctcaagatatggggtctgcagtttgcattctcagaagatgacaatccagttgggtacagcacagggtaaccatttgatgtcatattggggaatgaaattgacagcttaagctctggcattggaaaagatccactttttctaatcaagt

SEQ ID NO: 5565 - DNA, 107 bp, Homo sapiens; identical to SEQ ID NO: 1241

SEQ ID NO: 5566 - DNA, 493 bp, Homo sapiens; identical to SEQ ID NO: 1243

SEQ ID NO: 5567 - DNA, 501 bp, Homo sapiens
tatggaccagtaccgcaaataacaggaattaactgtgtttgcaaaggtgtgggcagctagtagggaaacctcaaaggatagctagcataatatccacatgccagtgattgcggggagctttttccacctgtgggtctgaagggaaagggctgttagcagatgggagcatgtaactctgtgatgctgcagtgtagacgccgggaaatgcccctacccacctctctgtccattggccagtgtccccgatgggccgaaccaccctgctgacttttgaccttcacgcaggtccttcccggagctgggaattatccctttaccctcacctttgcccatcttgatgcccagaaatcttgcataggaggcaaatgctccccttgcaagcaatgtcttgccctggggtttgcagcctgccaccctcaccttgctgtcaccgccccagtttgtgacctcagctcacacaatgtccccaaacagcatttgcacaattccccccattgcctc

SEQ ID NO: 5568 - DNA, 578 bp, Homo sapiens; identical to SEQ ID NO: 1245

SEQ ID NO: 5569 - DNA, 114 bp, Homo sapiens
aaaagattacagtgatgctctcacaaaatcttgccgccttccctcaaacagagagttccaggcaggatgaatctgtgctctgatccctgaggcatttaatatgttcttattatt

SEQ ID NO: 5570 - DNA, 83 bp, Homo sapiens; identical to SEQ ID NO: 1247

SEQ ID NO: 5571 - DNA, 472 bp, Homo sapiens; identical to SEQ ID NO: 1248

SEQ ID NO: 5572 - DNA, 633 bp, Homo sapiens
tttttttttttttttttttttttgagaagagattttagttattcagtgttttcagagtttcaacaagggatacagatacaagcagcttcttacagagtttacaatctggggagagaacatgaaagacactgtttaacaggcaaataattccaggaataaatatacatgaatgtgtttttcaaaatacaggttcttatacaaatgtataactaaatactgattccatagtggggtggttgtaactgaaagggctttgagaaaaggctttgaataaaactagtcatccacctagccaaagatccttttcagcagcacaaaaggaatttgtaaggagaacagagattaactgtcagatatctttctaatctgtaaatttatccaaagtttgaaaataccatgaagaatcttaggaatgccagtaaccagggaatgggatatttgcatatcacaacatctacaggctaaatacactccgaatgcttctcaatgtggggaagtatgagaagttaataattctcctagtgtctggcttcctttttctttgcctttccctctcatacgttcaatcacctgtgttacaggacacacataagtagttggaaggtgttaaacttgacagcaaagcaaaatcag

SEQ ID NO: 5573 - DNA, 407 bp, Homo sapiens
tgccaaaagatttatgggacctactccaagaattatgattcattaggttgaagtgggaccccaaaatttacatgtctgacacattccaaggggaagcctgtactgcttccagggatcacactttgagaatcactggcctacagcactcatcactggcattgacctcaccaccacacaaaacagcagagaaacaatgaaagatttaaagatagcacttttggggaatccccccaagatggctacataggaacagctccagtctacagctcccagcatgagcaacgcagaagatgggtgatttctgcatttccaactgaggtaccaggttcatctaaactgggacttgttggacagtggatgcagcccacagagtgtgagccgaagcagggtggggcatcgcctcaccc

SEQ ID NO: 5574 - DNA, 598 bp, Homo sapiens
atctcgttggaaataacacccccattttcttcatcagggatcccatattgtttccatcttttatccacagccaaaagagaaatcctcagacacatctgaaggatccggacatggtctgggacttctggagcctacgtcctgagtctctgcatcaggtttctttcttgttcagtgatcgggggattccagatggacatcgccacatgaatggatatggatcacatactttcaagctggttaatgcaaatggggaggcagtttattgcaaattccattataagactgaccagggcatcaaaaacctttctgttgaagatgcggcgagactttcccaggaagatcctgactatggcatccgggatctttttaacgccattgccacaggaaagtacccctcctggactttttacatccaggtcatgacatttaatcaggcagaaacttttccatttaatccattcgatctcaccaaggtttggcctcacaaggactaccctctcatcccagttggtaaactggtcttaaaccgggatccagttaattactttgctgaggttgaacagatagccttcgacccaagcaacatgccacctggcat

SEQ ID NO: 5575 - DNA, 568 bp, Homo sapiens; identical to SEQ ID NO: 1252

SEQ ID NO: 5576 - DNA, 604 bp, Homo sapiens; identical to SEQ ID NO: 1253

SEQ ID NO: 5577 - DNA, 591 bp, Homo sapiens
tttttttttttttttttttttttttataaccttagtttaggtaaatttaatgactgtaaaagctgttcacatagcagctttaaagagacacgttttccactgacataaagttgcttcgccccttgcagcttatctccaccttcatgacctgtttcctcagtggcaggcaatgtctccccttcctgttggggaggattgcccaagtctgctctgaggccatcttctcaggtcagcaatatgcagaagagtccctcagagtggtcctgcagagaacatgtcccctaagtgtctgagaactggctgaggtgatcttcaccaccacatagtccccaggctgggctctgaccctgagcccagggttattgacatcctccatctctgcatcagggaagatcaccttaaggtttccatcattcctaccacacaggtcagtggcagagcgtttactgagcccttccactagcaccaactgggtacagcccacagaggtctgattggcttttgttgcttcttctcggaagatagtgatgagttcctccaaacgccttaattttacctcttccgggacatcatccttcagcctatgatatg

SEQ ID NO: 5578 - DNA, 524 bp, Homo sapiens
actggctctgggaagacgttggcgtatctcctgcctgcaattgttcatattaaccaccagccatacttggaaaggggagatggcccaatctgtctagttctggctcctaccagagagcttgcccagcaagtacagcaggtggccgatgactatggcaaatgttctagattgaagagtacttgtatttatgggggtgctcctaaaggtccccagattcgagacttggaaagaggtgttgagatctgcatagccactcctggacgtctgatagatttcctggagtcaggaaagacaaatcttcgccgatgtacttaccttgtattggacgaagctgacagaatgcttgatatggggtttgaaccccagatccgtaaaattgttgaccaaatcaggcctgataggcagacactgatgtggagtgcaacctggccaaaagaagtaagacagcttgcagaggatttccttcgtgattacacccagatcaacgtaggcaatctggagttgagtgccaaccacaacatcct

SEQ ID NO: 5579 - DNA, 554 bp, Homo sapiens; identical to SEQ ID NO: 1255

SEQ ID NO: 5580 - DNA, 645 bp, Homo sapiens; identical to SEQ ID NO: 2537

SEQ ID NO: 5581 - DNA, 630 bp, Homo sapiens
cattagacgtggaactatctgatgattccttccctccagaagactttggcattgtgtctggaatgctcaatgtcaaatgggaccggattgcccctgctagcaatgtctcccacactgtggtcctgcgccctctcaaggctggttatttcaacttcacctcggcaacaattacttacctggcccaggaggatgggcccgttgtgattggctctaccagtgcacctggacagggaggaatcctggctcagcgggagtttgacaagcgattctcccctcattttctggactgggcagcctttggggtcatgacccttccctccatcggcatccccctgctattgtggtactccagcaagaggaaatatgacactcccaaaacgaagaagaactgattggggcttccacagccctcctctcccaagaaatccaggctcctctcccaagaaatccaggtgctttccagactccaaagggtatcttaaatgcaatctcttctctcttagcccttggccactttctcctggatcctgccctgctctcagccatagtgaaggaccagccctaggagtctgcgagagcctccttggttccatcgtgaagccataaacaggaatgcctttggcaatagcc

SEQ ID NO: 5582 - DNA, 644 bp, Homo sapiens
acagctgcctgggtaaggcccaagatggctgtcttcgccttagtactcgtgtgaagttggcggggacggttcctgtcatcttcttgggcttatttggtgtgctgtcgaaggggggagactagagaaatggcagggaacctcttatccggggcaggtaggcgcctgtgggactgggtgcctctggcgtgcagaagcttctctcttggtgtgcctagattgatcggtataaggctcactctcccgccccccaaagtggttgatcgttggaacgagaaaagggccatgttcggagtgtatgacaacatcgggatcctgggaaactttgaaaagcaccccaaagaactgatcagggggcccatatggcttcgaggttggaaagggaatgaattgcaacgttgtatccgaaagaggaaaatggttggaagtagaatgttcgctgatgacctgcacaaccttaataaacgcatccgctatctctacaaacactttaaccgacatgggaagtttcgataggagagaaagctgagaacttcggaaaaggctcatctgtcaccctggagaagggaaactgtacttttccctgtgaggaaacggctttgtattttctctgtaataaaatggggcttctttagaaaaaaaaaaaa

SEQ ID NO: 5583 - DNA, 671 bp, Homo sapiens
cccaacatggcgatgcacaacaaggcggcgccgccgcagatcccggacacccggcgggagctggcggagctcgtgaagcggaagcaggagctggcggaaacattggcaaatttggagcgacagatctatgcttttgagggaagctacctggaagacactcagatgtatggcaatattattcgtggctgggatcggtatctgaccaaccaaaaaaactccaatagcaaaaatgatcgaaggaaccggaagtttaaggaagctgagctgctcttcagtaaatcctcggttacctcagcagctgcagtaagtgcattggcaggagttcaggaccagctcattgaaaagagggagccaggaagtgggacggaaagtgacacttctccagacttccacgatcaggaaaatgagcccagccaggaggaccttgaggatctggatggatctgtgcagggagtgaaacctcagaaggctgcttcttctacttcctcagggagtcaccacagcagccataaaaagcgaaagaataaaaaccggcacaggattgatctgaagttaaacaaaaaaccacgagctgactattagaagacacattagtgcagaagcttccaggctgtagagccctgcttcccttctctgacctcacaaagataaacatccttcacctgagttcg

SEQ ID NO: 5584 - DNA, 559 bp, Homo sapiens
ggactggactcggcttgggcgtgagatggcggcggcaacggtgagcagcgccaagcggagcctgcggggagagctgaagcagcgtctgcgggcgatgagtgccgaggagcggctacgccagtcccgcgtactgagccagaaggtgattgcccacagtgagtatcaaaagtccaaaagaatttccatctttctgagcatgcaagatgaaattgagacagaagagatcatcaaggacatttttccaacgaggcaaaatctgcttcatccctcggtaccggttccagggcaatcacatggatatggtgagaatagaatcaccagaggaaatttctttacttcccaaaacatcctggaatatccctcagcctggtgagggtgatgttcgggaggaggccttgtccacagggggacttgatctcatcttcatgccaggccttgggtttgacaaacatggcaaccgactggggaggggcaagggctactatgatgcctatctgaagcgctgtttgcagcatcaggaagtgaagccctacaccctggcgttggctttcaaagaaca

SEQ ID NO: 5585 - DNA, 398 bp, Homo sapiens
tacggccgggaagtgggtggggggagttgaagggaggagaaaaagaatagaaatgtatttattactactgaactgaatacttaaaaacggtaaaaataggccgggcgcggtggctcacgcctgtaatcccagcactttgggaggccgaggcgggcggatcacgaggtcaggagatcgagaccatcctggctaacacggtgaaaccccgtctctactaaaaatacaaaaaaaattagccgggcgtggtagcgggcgcctgtagtcccagctactcggggaggctgaggcagaagaatctcttgaacccaggaggcggaggctgcagtgagccaagattgcaccactgcactccagcctgggcgacggagcaagactctgtctcaaaaaaaaaaaccaac

SEQ ID NO: 5586 - DNA, 492 bp, Homo sapiens
tacggccgggatcagagctttggcagtagaagatgatcaagttgcacctgctccattgaaagtcgttgaaacttcaagtagtgttagggaaagaaaaaagaaggaaaagaaacaaaagcccgtgcttgaagagcaggtcatcaaagaaagtgacgcatcaaagattcctggcaaaaaaagtagaacctgtcccagttactaaacagcccacccctccctctgaagcagctgcctcgaagaagaaaccagggcagaagaagtctaagaatggaagcgatgaccaggataaaaaggtggaaactctcatggtaccatcaaaaaggcaagaagcattgcccctccaccaagagactaaacaagaaagtggatcagggaagaagaaagcttcatcaaagaaacaaaagacagaaaatgtcttcgtagatgaaccccttattcatgcaactacttatattcctttgatggataatgctgactcaagtcctgtggtag

SEQ ID NO: 5587 - DNA, 323 bp, Homo sapiens
tacggccgggaggagctccttgagcccagagttcaataccagcttggacaacataaggagaccctatctctacaaaaattaaaacattagccaggtatgatggtgcacacctatatagtccccaccattgaagaggttgtggtaggaagaccgcttgaacccaggagttccagcctgcagtgagctatgatcatgccactgcactgcagcctgggtgacagagtaagaccctgtctcaaaaaataaaaatagaagtaatgacccaggtgcgagatggcaataatttgaatatgatgacgttagaggtggaaagacatggatgg

SEQ ID NO: 5588 - DNA, 435 bp, Homo sapiens
caggagttcaagaccagccttgcccacatggtgaaacctcatctctgctaaaaatgtaaaaattagccgggcatgactgtgggcatttgtaatctcaggtacttgggaggctgaggcaggagagttgcttgaacctgggaggcagaggttgcagtgagctttgtgccaccacactccagtctgggtgacagagtgagactccatctcaaaaaaaaaaaaaaaaaaaacccttaaattgggccctaaaaatgcaagggaaaaggggccagggcttcccccttttacccccaccttttgaaaacccaaattggggggatccgggaaaaccaagaatttaaaacccccctgggaaaaatggaaaaattttttttttaaaaaaaaattctaaaaaatttcctggacttgggggggggcttttggggccccaattttttg

SEQ ID NO: 5589 - DNA, 523 bp, Homo sapiens
tgggggagagggatctgggccaggggcctctgattgccgtatcatccgagtccagatggagttgggggaagatggcagtgtctataagagcattttggtgacaagccaggacaaggctccaagtgtcatcagtcgtgtccttaagaaaaacaatcgtgactctgcagtggcttcagagtatgagctggtacagctgctaccaggggagcgagagctgactatcccagcctcggctaatgtattctacgccatggatggagcttcacacgatttcctcctgcggcagcggcgaaggtcctctactgctacacctggcgtcaccagtggcccgtctgcctcaggaactcctccgagtgagggaggagggggctcctttcccaggatcaaggccacagggaggaagattgcacgggcactgttctgaggaggaagccccgttggcttacagaagtcatggtgttcataccagatgtgggtagccatcctgaatggtggcaattatatcacattgagacagaaattc

SEQ ID NO: 5590 - DNA, 607 bp, Homo sapiens
tggagaagcggtatctggctgcaggagccgtcactctgctaagcctgtatctgctgttcggctacggagcgtctctgctgtgcaatctcatcggatttgtgtaccccgcatatgcctcaatcaaagctatcgagagcccaagcaaggacgacgacactgtgtggctcacctactgggtggtgtacgccctgtttgggctggccgagttcttcagcgatctactcctgtcctggtcccctttctactacgtgggcaagtgcgccttcctgttgttctgcatggctcccaggccctggaacggggctctcatgctgtatcagcgcgtcgtgcgtccgctgttcctaaggcaccacggggccgtagacagaatcatgaacgacctcagcgggcgagccctggacgcggcggccggaataaccaggaacgtcaagccaagccagaccccgcagccgaaggacaagtgaagcagccccctgagcctcacaaggacctcctggctggtgaggagggggccgcgccaggctcccaggcctccacagagtcttcagcgcatcccccaacagcagcccctgccagtccctcgggtccaggcaaggccctgggggtc

SEQ ID NO: 5591 - DNA, 629 bp, Homo sapiens
tacggccgggcgtgggctctgctgccttgtaattcggccttactcacatttttagaatttcaaatctagatccctttatgcaagatatttctttcaaatatcttgcataaagttttcccccacagtattatacacaaatatataggacaaggatcctactatgtatattctaaccaacaaccgtgctgggcacatgattgatgataattgcccagtacatgtaatgaattgaattttctcagtaacaatttagtacacaattgacttagtatatggatcactagggatggatgaatacaaacaaattctgcactcaattttttcagatcactgaaaatcccagagcctctagagctctgttgaagtctactttataaaaagacatgaatatttacttactatacatttatacagcgtttattaagtagctattgattgttcatagttgccttctcagcaaccttagatcctcatagaaaatgcataattcttaaaggcatctaacatctccatttttttcaagttaataagaatggagtgaatacacagtagcatggggtacccttggcatgatgccgcgggcgaatgcagaatgcatcacgggatgactaatcccatttctttatcct

SEQ ID NO: 5592 - DNA, 602 bp, Homo sapiens
gatgaccagtggttagatctctcaccagatcagctggaccagctgctgcaggaagctgttggcaaaaaagaatccgagtctgtttccaaggaggagaaggagcagaactatgacttaactgaagtctcagagagcatgaaagctttcatatccaaagtctcaacccacaagggagcagagctgcctcgagaaccttctgaggctccaatcacttttgatgcagattcttttcttaattattttgataagattttagggccaaggcctaatgagtcagattctgatgatctggatgatgaagactttgaatgtttagatagtgatgatgacttggactttgaaacacacgaacctggcgaagaggcttccctgaaaggaacacttgataatctcaagtcatacatggcccagatggaccaggaactagcacacacctgcatcagcaaaagtttcaccactaggaaccaagtggaacctgtatcccagactaccgataacaattcagatgaggaagattctggtacgggagaatctgttatggcaccagtagatgtagacctgaacctggtttcaaatatattggaatcctatagctcccaagc

SEQ ID NO: 5593 - DNA, 533 bp, Homo sapiens
gcggacttgggcggccacagagcctttatgaccgaagagggactgaaatgccatcctgttatcaagaaggagcataagaacagctagaggagagatgcaagattgaaatatcatggaatggactatggtttatcctctcttctggttcgtaaaacaccatcaggttgtaattgttcagatcagaaattcccaagcttttaataaagccttcagggagcctcatccaggggcaaccgccctgtcattgggaataagtagagtgtgtgggaaacatgttgaccttggtaaaacctccccttaggaaagaaggcaagagaattgagtaagagaatgatgggccaaaaggagaaaatagagaaagaggctgcatgctacagagaacaagagcaaaattcagaagcctggcacagttgggcttgaaaccatctgtgtaaaggggactaataatgctgacctcactgcatcacaaatgacagagtttaaaatgatggtgtttttaagggacctagcacgtattaagaatttaatacaca

SEQ ID NO: 5594 - DNA, 468 bp, Homo sapiens
aggatgcgccaactacacacacagaggaatacagtggggatgagaaaacgtggatgtggaggcacaacttccggactttgagtgactataataaggggattgcatgggctcttgaaattggggctgacctcccatctaatcatggcattgatcgatggcttggggagcccatcaaaccagccattctccccactaacattttcctgaccaataagaatggatttgctgtactttctaaaatgcaccaacagctcaccttccgactcctcaagatggaggtgcagttcatcatgacaagcaccaaccaccactcacacaaggagttctgctcctacctccaatacctggaatacttaagccagaaccgtcctccacctaatgcctatgaactctttgccaagggctatgaacactatctgcaggccccgcttcaaccactgatggacaatatggaatctcacacatatg

SEQ ID NO: 5595 - DNA, 540 bp, Homo sapiens
ccaacagggacaaatcagttgggcctctcccccaggcggacccggaggtgggcacggctgcccatcaaaccaacagacaggaaaaaagcccccaggaccctggggaccccgtccagtacaacaggaccacagatgaggagctgtcagagctggaggacagagtggcagtgacggcctcagaagtccagcaggcagagagcgaggtttcagacattgaatccaggattgcagccctgagggccgcagggctcacggtgaagccctcgggaaagccccggaggaagtcaaacctcccgatatttctccctcgagtggctgggaaacttggcaagagaccagaggacccaaatgcagacccttcaagtgaggccaaggcaatggctgtgccctatcttctgagaagaaagttcagtaattccctgaaaagtcaaggtaaagatgatgattcttttgatcggaaatcagtgtaccgaggctcgctgacacagagaaaccccaacgcgaggaaaggaatggccagccacaccttcgcgaaacctg

SEQ ID NO: 5596 - DNA, 689 bp, Homo sapiens
agtgtttgttttacaataacaattgtatcttctagtgtttgcccctcaagtgaagttctccttagaagagaagatcttttgggaccagttccccccattttcttatatgttcactaatcagctggggttaacatttaattattcctcatattcacaaccacttaaacatttaatagagtttttaaaaatccaaacaatgtgtatcttgtataattttattttcatttaaaattctattaccaaaaaagccaggttagccatttgcttataataaatcatgccttcttttaggaatttttagagtcagtttaatgggactcctgagttgacagctgtacagtctgaattgccttagactctgaaaatgcttcagatttaaaatactaccaaccaacatggagtactgatcttcccacttgttgccaaagaggctagttaggaaaactagggacaggctgttctcttgcaattcaaaactgaacacaaactgaaattgagagaaagtcatattaaatcctcatgtctgccatgtttgcagaggtcagctatacaaatatgaatgttaatttgaacttcaagaaaaggacactgctaaaatataatacatcttgaaaatgaagatgactctctacttgttttaatcagaacctcactgatatgtctcagggattaatttcatatatcatatc

SEQ ID NO: 5597 - DNA, 611 bp, Homo sapiens; identical to SEQ ID NO: 1265

SEQ ID NO: 5598 - DNA, 490 bp, Homo sapiens
aaggaggtgattgccaagacaaaaacacaaaaagacacattctgcttattaaggaaacaatgagaaaggaaagcaaagctccccagaggccatctccattttatgtgtgagggtcccagataagggaaaggacttgactgatgtcctccaaacatcacagcatttcttcctccttatctggggcccattccactctgcacatccctcctggctgcttgcccacattactaattagtttcctcctgaaatatgccaaagaataaatagtgtaggctagttaaaaatgctcattctctccataaattttagtttcctctgttttttcttcccaataatactattttgttattgtctgcagtgtttgatgaatacaaaaggatatcacagaaggatattgaacagagtattaaatctgaaacatctggtagctttgaagatgctctgctggctatagtaaagtgcatgaggaacaaatctgcatattttgctg

SEQ ID NO: 5599 - DNA, 576 bp, Homo sapiens
caggcctccttgctccttcgttcacagctgggggtccccgattccaatgctgttttttggggagtggtttccaggagctgcctggtgtctgctgtaaatgtttgtctactgcacaagcctcggcctgcccctgagccaggctcggtaccgatgcgtgggctgggctaggtccctctgtccatctgggcctttgtatgagctgcattgcccttgctcaccctgaccaagcacacgcctcagaggggccctcagcctctcctgaagccctcttgtggcaagaactgtggaccatgcgagtcccgtctggtttccatcccaccactccaaggactgagactgacctcctctggtgacactggcccagagcctgacactctcctaagaggttctctccaagcccccaaatagctccaggcgccctcggccgcccatcatggttaattctgtccaacaaacacacacgggtagattgctggcctgttgtaggtggtagggacacagatgaccgacctggtcactcctcctgccaacattcagtctggtatgtgaggcgtgcgtgaagcaagaactcctgga

SEQ ID NO: 5600 - DNA, 495 bp, Homo sapiens
gagcccggggtgctggagggaggcggcaggcccgggtcaggggcctcgagatcgggcttgggcccagagcatgttccagatcccagagtttgagccgagtgagcaggaagactccagctctgcagagaggggcctgggccccagccccgcaggggacgggccctcaggctccggcaagcatcatcgccaggccccaggcctcctgtgggacgccagtcaccagcaggagcagccaaccagcagcagccatcatggaggcgctggggctgtggagatccggagtcgccacagctcctaccccgcggggacggaggacgacgaagggatgggggaggagcccagcccctttcggggccgctcgcgctcggcgccccccaacctctgggcagcacagcgctatggccgcgagctccggaggatgagtgacgagtttgtggactcctttaagaagggacttcctcgcccgaagagcgcgggcacagcaacgcagatgcg

SEQ ID NO: 5601 - DNA, 574 bp, Homo sapiens
acaaacacctttcccaccaaaaaccccccaattttccgtttgccaaagatgattctagtagcatgaaatcaatatgttagatgtatatgtgtctttatgtaaaatgttaatttctttagagcactcacctaatattagtcagttaaacatatttgtataagaatgcctgtgttttatctttgccaaaaaatatctctttcaaaacaaacatagtgagtaacctatgtgatcactggccagtgattttgagttggaagaaagtgtgtgtgtgtgtgtgtttgtgtgtgtgtctgattgtgcagaaagagggtgtaaggtaggggcagagaattaatactagtataacttcccaaccaggaggaaatactgcatttcaaatttccagtgcattcatcagatctaattgaattactgccaccttactcaatatcagaatatttagagagtttaactacctctggtgcttttctcttccattgatgaagtaatctcagatctgaatttaactgacattcctgggcaaagaatgtttgataagggccgggtgtggtggctcacgcctgtaatcccagca

SEQ ID NO: 5602 - DNA, 607 bp, Homo sapiens
ctcaggcccttcttggttccgtgggtacaaaattgagctccacgcccaatggagagaatgagctatgcgcgcctccggggcgggccacgcggggccaggctgccccagggtgcccgaggcctcgcctcgtctcgccgcgaggactggaatctcgcagcaaggaccctcctcgcactggaggtatcgtcgagtccagcccctaagcgacagatggccggggtgccaccccacccttgagctgacgccaagtctggccggggaaaggtcctcaaggggctggaggatgctgccgccgccctcctgtcgagcctggcaatgggccagtcccagcgcctgccgcggtctccaaccttggcagataccgtgcagtgccgagttctgccgttatggggtccctggaggtcttcctgggaagaggattttggaagagatgataaggaaaagtgcacagcacagtttggccagctagcctactcctctccacccttaactttcctctgtgttttcagctggctcagctgaactaaaatgtggggtgagggacagctggtaggtctcatttgcccagatgggtgattttcacctcttagaaaccttcctaaacagc

SEQ ID NO: 5603 - DNA, 554 bp, Homo sapiens; identical to SEQ ID NO: 1273

SEQ ID NO: 5604 - DNA, 471 bp, Homo sapiens
tcccctctgctgattctgggccccgaaccccggtaaaggcctccgtgttccgtttcctgccgccctcctccgtagccttgcctagtgtaggagccccgaggcctccgtcctcttcccagaggtgtcggggcttggccccagcctccatcttcgtctctcaggatggcgagtagcagcggctccaaggctgaattcattgtcggagggaaatataaactggtacggaagatcgggtctggctccttcggggacatctatttggcgatcaacatcaccaacggcgaggaagtggcagtgaagctagaatctcagaaggccaggcatccccagttgctgtacgagagcaagctctataagattcttcaaggtggggttggcatcccccacatacgatgatcagtagaattgaatatgtgcatacaaagaattctatacacagagacattaaaccagataacttcctaatgggta

SEQ ID NO: 5605 - DNA, 682 bp, Homo sapiens
  misc_feature 613: n = A,T,C or G
gccgggcatgcagtctctcttggcttctttgagactgaatggcagcttataggctttatactgtggtgcctcgcctggtcaagtttgtagatattctgaccaattggtatgttagaatgaaccgcagaagattaaagggtgaaaatgggatggaggattgtgtcatggccctagaaaccttgtttagtgttctgctttctctttgcagacttatggctccctacacaccttttctcactgaattgatgtaccagaatctaaaggtgctgattgaccctgtttctgttcaggacaaggacacactcagcattcactacctcatgctgccccgtgttcgagaagaattgattgacaagaaaacagagagtgcagtatctcagatgcagtctgtgattgaacttggaagagtgatcagagaccgaaaaactattcccataaagtatcctttgaaagaaattgtggttatccatcaagatccagaagctcttaaagatatcaagtctttggagaagtatatcattgaggaactcaatgttcgaaaagttacactgtctacagataaaaacaagtatggcattcggctaagggcagaaccagatcacatggtcctggngaagcgtctgaagggagcctttaggcagtgatgacgtccatcaagcagttgagcagtgaggagctggag

SEQ ID NO: 5606 - DNA, 628 bp, Homo sapiens
tacggccgggtagagggggatatgatagtctgcgcagcgtatgcacacgaactgccaaaatatggtgtgaaggttggcctgacaaattatgctgcagcatattgtactggcctgctgctggcccgcaggcttctcaataggtttggcatggacaagatctatgaaggccaagtggaggtgactggtgatgaatacaatgtggaaagcattgatggtcagccaggtgccttcacctgctatttggatgcaggccttgccagaactaccactggcaataaagtttttggtgccctgaagggagctgtggatggaggcttgtctatccctcacagtaccaaacgattccctggttatgattctgaaagcaaggaatttaatgcagaagtacgtcggaagcacatcatgggccagaatgttgcagattacatgcgctacttaatggaagaagatgaagatgcttacaagaaacagttctctcaatacataaagaacagcgtaactccagacatgatggaggagatgtataagaaagctcatgctgctatacgagagaatccagtctatgaaaagaagcccaagaaagaagttaaaaagaagaggtggaaccatcccaaaatgtcccttgctc

SEQ ID NO: 5607 - DNA, 483 bp, Homo sapiens
tttctatctgcgtgttttaattatggaattttaatgttgattttcattctgttttccaatcccatatattttttccttctcattggcttattgtgtgggttatcatttcagtgacctggtttgacaagaggcaacacaaatttctttgagaattcaaatgtccatttaaaaattagcatcaggggctgggcacagtggctcacacctgtaatcctggcactttgggaggctgaggcagcgggtggattgcttgagttcaggagttcgagaccagcctgggcaacatggcaaaaccccgtcactataaataatataaaaattagctgggcatggtggcacacacctctagtcccagctgcttaggaggctgaggccagagggatcagttgaacctgggatgctgaggctgcagtgagccacgatcacgccactgcactctggcctgggtgacaaaggaagtccctgtctcaaaaaaaaaaaaaa

SEQ ID NO: 5608 - DNA, 610 bp, Homo sapiens
tacggccgggtgtggtggctcatgcctgcaatcccagcgctttgggaggccgagtcaggtggatcacttgaggccaggagttggagatcagcctggcaatagagcaaaaccccatctctactaaaaatacaaaaactggctgggcgtggtggcatgcacctgtaatcccagccacctgggtggctggggcacgagaatcgtttgaactcaggtggcggaggaacctagaaaacagagaggcagatggaacctagaaagcaaagagaaaacagcagcaggtaaagttgaagaggtaggcaggaacagagaaaatgcagccatgcatatcaggaaactcgccaaccagtatataaggacaaatattgactgcaggactagatattatttaaccccttattctgaactacctaaaccagaatataatccctgtgcagatggcgaccacattttcagtagattctcaaacaacttccacgcaacatctagcacgtgacaaattctgtacacacacacacataaatatactatttcctcaaattcaaacttttctaaaaacatccaaactacctaccttagttgggattaaacatatatttagtaacattgaatc

SEQ ID NO: 5609 - DNA, 609 bp, Homo sapiens
cctggtccctggggaatcagtttatggagagaagagagtctcgatttcggaaggagatgacaaaattgagtaccgagcctggaaccccttccgctccaagctagcagcagcaatcctgggtggtgtggaccagatccacatcaaaccgggggctaaggttctctacctcggggctgcctcgggcaccacggtctcccatgtctctgacatcgttggtccggatggtctagtctatgcagtcgagttctcccaccgctctggccgtgacctcattaacttggccaagaagaggaccaacatcattcctgtgatcgaggatgctcgacacccacacaaataccgcatgctcatcgcaatggtggatgcgatctttgctgatgtggcccagccagaccagacccggattgtggccctgaatgcccacaccttcctgcgtaatggaggacactttgtgatttccattaaggccaactgcattgactccacagcctcagccgaggccgtgtttgcctccgaagtgaaaaagatgcaacaggagaacatgaagccgcaggagcagttgacccttgagccatatggaagagaccatgccgtggtcgtgggagtgta

SEQ ID NO: 5610 - DNA, 623 bp, Homo sapiens
tggcagatagcacattgacagtgaggatggggaacagtttgacaacatgactgatggagtagctgagcccatgcatggcagcttagccggagttaaactgagcagccaacaggcctaagtgccaggttccctggcgttggtgacatgctgcagcctggaactccgatctccagtgtgactgcaaagctgtcttctcactggtactgccttgtgagtactggttggactgtggggcatgtggccgctgcagttccagtggttatttctaagtctatgacaggacaggctgttcttgcttcagaaccttctctgacagacacggtaactaaatgtgaaaaaccaataagctggtgactcatgaatacacacgaggaaaagcagaggtttattttatctgccttttcaacatttctttccctctgtgaaatgattggtcagatgtctttgagaagtgttaaactaattcacatggtagtgtagggccaacatacaagctaccagtctaatgtgtatagtagactttgggaaaagcggttttttttcatgtattcattctgaatagttgaaatgtatatttgtacagtcttttagacctattcaagtgatgctcatgatcctgttac

SEQ ID NO: 5611 - DNA, 640 bp, Homo sapiens
attgtgcagacagaactgctgaaggagcatatggcaaaggaggaggtcctgcaggatcctgtgttgaagcagttcaaatcagccttctcatctgcggaaaccacagaattgagtggcaaatgtgtggtggctttggcaacagatcccaatatcctgagcctgagtggtaaggtgctgccatcctgtgaccttgctcgacgctatggccttcgggatgtggacggccgccccgtccaagactatttgtctttgagctctgttctctcacacgtgtccggcctgggctggctggcctcctacctgccctccttcctccgtgtgcccaagtggattattgccctctacactagcaagttctaaccctcctggtctgacactacgtctctgcttgtcttctcatttggacttggtggttcgtcctgtctcagtgaaacagcagcctttcttgtttacccatacccttgatatgaagagaagccctctgctgtgtgtccgtggtgagttctggggtgcgcctaggtcccttctttgtgccttggttttccttgtccttctttttactttttgccttagtattgaaaaatgctcttggagctaataaaagtctcatttctctttcaaaaaaaaaaaaaaaaaaaaa

SEQ ID NO: 5612 - DNA, 506 bp, Homo sapiens; identical to SEQ ID NO: 1276

SEQ ID NO: 5613 - DNA, 175 bp, Homo sapiens; identical to SEQ ID NO: 1277

SEQ ID NO: 5614 - DNA, 564 bp, Homo sapiens
actgcatggccaggcaggcactatttaccaactaacacagaggagatcggtactgtgatcctgagtgcagctgtgcgggtggcctcaggggagcccccaccacaaagcacacttgaatagtgtgccacatcagccatgcgtggtggctcatgcccgtaatcccagcactctggaaggcggaggcgggcagatcccttgaggtcagaagttcaagaccagcctggccaacacggcaaaaccccatctccactaaaaatacaaaaattagccaggcgtggtggcacacgtttacctgtgtaacaaacctgcacatcctgcacatggaccctggaacttaaaataaaagttgaaggggaaaaaaaagagaatatttcagaagcagagtgcctgggcattgctcaatcagaacagatgctgagccaggtgcagtggcttacatctgtaatcccagcagtttgggagaccaaggcgggtggatcacttgaggtcacgagtctgagaccagcctggccaacatggctaaaccccgtctctactaaaaaatacaaaaagtagccggatgtg

SEQ ID NO: 5615 - DNA, 485 bp, Homo sapiens
gagtttgagaccagcctgggcaacctggcaaaactgtctctacaaaaaaatacaaaaattagccaggcattggtggcgcatgcctgtaatcccagctgctcgggaggctgaggcaggagaatcgcttgaacctgggaggaggaggtgggagtgagctgagatcgtgccattgcactccagcctgggcaacaagagccaaactgtctcaaaacaaaaataagtaaaccctgataaagtgtttttttccatcaggcagtcatactttgatacaaattggtttaatgaggcccagccttcttgccagagataccaaaaccactgtgggaaatgttttgactggataaaacactcttcagtgaggtgctatagtgaagatttctacagagagcaatgggaatcagcacctaggggtcaaggaagaagcacttggctgggcacggtggctcatgcctataatcccagcactctgggagcccaaggcagga

SEQ ID NO: 5616 - DNA, 288 bp, Homo sapiens
ggcgtgttctgtgcaggtgccgacctgaaggagcgggaacagatgagtgaagcagaggtgggggtgtttgtccagcgactcccgggcctgatgaatgacctcgttctgtgataagaccgatgactcacccagggggatggaggaggatgacccagggcagttctctcagagagggagttctggctcttcagcttttgtgtccccccccacgctgagggttcaagcctggccattcccaagcagttaagtttccccaagcctgctttcaagttttgacaattgctgtta

SEQ ID NO: 5617 - DNA, 417 bp, Homo sapiens
aggggggtgagattgtctccggaggcagacaacaggccagtggaacccagtcagaataagggagccttttgaggtgggtagaattgtttttggtcaaaaaagaggtgagatgatcaattagagtgattttgttgtgaaacttataaaatgcctctgacatcaagtctgggaacagatctttgtgtattaaccatagagagtgtgtttgaatcattgtataatgtctccggggcacttttatttaatatgcttatttatttatttacttatttgaattttagaggtgagacttgctatgttgcccaggctggacttgaactcctggacataagtgatcctcctgcgtagctggggagacaggcgtgagcagcttcacctggggcatgtttggttttttaaaaattatttacttggagg

SEQ ID NO: 5618 - DNA, 253 bp, Homo sapiens
cttttcaggaaaatgggaaaaccgtggctcccccaaaatgtatctggggttccctgaaatttgaaagactgtcggtctctctacttgttcaagccccttggcccttccttcagttctgcttttgccacatgtgtctaaaggggaatgggcaggcttttgagattgttactcagcattaatgtaaagacttgacagagagatcctctttttgattgccattccaaaatgggaatatatctcattcttttaggtt

SEQ ID NO: 5619 - DNA, 752 bp, Homo sapiens
  misc_feature 517, 528, 559, 571, 580, 629, 675, 676, 684: n = A,T,C or G
aaacaaacaggtttattgataagcaggaatgccgtccagcatacagtgcaaactttcattgtcttgggatcaacacacacacacaagggaaccaaggccccacagagtctccaaattcatcgcttcccggctctgccctgtgatgccaaggaagcctgaggttctcccaggactgtccaccagggggcaggtgcgctccatcatgtcctcatgtgggtccaatgtgggcagaaacctggccagtcccagcagtctgactttttttttctttaagagacagggtctcactctgttgctcaggctggagtgtagtggcgcgatcatagctcgctgcagcctcaaactcctgggctccagtgatcctcccctcagcctcctgagtacaggtgcacgtcactgcagccagccagtctgacatcttgattccagggtggaaaacccttcttgtctccatggtaatggctgggctctcccaccctccaatagttcagctgccaagctcaagtccagtggaatntatcaacaatntatcaccctgcccctgctctgctagacaatntcatgccttctnctttatccncatgctcctgagactgagcctttccaggagcccctcaacctgcttcctnccagaaatccggcaaggctacactggttcccctctgcaggcccctnngccctggnaggggaggctgactctaaatggggagaaatcccagctcagtggcttcaaggggcagcattcaacttac

SEQ ID NO: 5620 - DNA, 780 bp, Homo sapiens
  misc_feature 594, 688, 748: n = A,T,C or G
agtccatccaccttcatatcctttattgggagacgaatatacaaaataaaactcattgctatataagcaaatactggtgatttggcgactgtagcagacacttgtgtatactgaactcagcgctgaagtggagaagatgctgggatccagacactggtctgtgcctcctcattagatctctttggtgctcactctcttggtcttttcagctgtttcctgatgcttttggagctcctggacatatctggtcatctcctcctctgtctgggtctgggcccccttctgattctttccgtcacaggtcatggctgtacagacccaatttccacaggcacagacacagcggttacagtccacctcggtctcagctccatctgcatacgtttcatcctccagggcacacttcttctcaggagggttgaaagatgggttgaggcacttgagaaactcttggaagctgagtttccaatcagcattttcatcagacagttcaatgagagcatcaacacagagtcccctaagcaacttgttgttctcctggtctggatacgttgtaatattgatggcagcttcattctgttccacaaacttcangaattcactggagtccaggcgagaatcaccattatcaaagttcttaaaatacttgtctaggattcactgtaggtgctgcctttagagaaccagncaatctggatgatctcagcttccagccactggatgatgcgacgtcgagctcatcacgctngactgatagcaaacacatgggctggcagagga

SEQ ID NO: 5621 - DNA, 473 bp, Homo sapiens
tttttttttttttttttttttttttacaattcctgtaagagaggctagtcaggagggacaccctcaagtttaaatccccacacttacttacttactgctcatccgtcactttcgctaagtgagattaataattcagtagctggtccagaacgcacagcttgggaacgcagaggcccaggcctcatgtaatttcccactcccgtaactgaacgtgctgacccatgttgatgtctgccttcatccaggtggcaaatcagacatgctacgctgcccccttcaaacgagttcctcgtgttaggggcaaaggtcacagccaaactctgccactgacagccagtgccttggcctggatcctctctgtggatgcaggcctacccctcctcagtccagcctcatctactagaccagcttggccattcacttttcggatgtctgtgagcacaggactgcagactgaactctcactcaagttc

SEQ ID NO: 5622 - DNA, 504 bp, Homo sapiens
tttttttttttttttttttttttttagagacataggctcttgctctgttgcccaggctggagtgcagtggcccagtcacagctcactgcagccttgagctcttgggcacaggagatcctcctgcctcagcttcctgagtagctgggactacaggcaggtgccaccacacttggctaacttttgtatttttggtagagacagggcctcagtgtgttgctcaggctggtctcaaactgggctcaagtgaagattccttttataaggctgaataatattccatgtgtttttatttatttatttcaaactaatgcagtttattataacaagaaggaaatcaagctttacagtaattatagtcactaagctgaaaaatcacctacaaaagtcatggcaataacttatttacagttaaaaaagagaatatcaagatcttgctctcatagtaaggtaaactagacatgtacacaatcttatgatgccaagaaactgaatatataaaaatag

SEQ ID NO: 5623 - DNA, 502 bp, Homo sapiens
ttttttttttttttttttttttcgaaacttaagtaaactttattttcaaaatgcttcaggtacaaaagaaaacaatggcaaagtctaacaataattaacaaaccagctcttgagcggcagagtgctccagggatgagaggggctggggatggaaaggtggttgggagacacaacatttttctagcttcagaaagtcagggagcccagatcacagcctgaacatcatggtattggttacggattctttacaaaggtgtttacctctctcatgaggtcttcttgtttggttacttcctcagaaaaatcatcattgacatccaacaccagcactggaatgttcatcagagcctcaaagtggagcctgtcactgtacacagacctctcaaagatctgtactggcttcctggcctgtaagagtttctcagggaagggctccagctgtactttcaggcggctcaaaaaggaaaatgcctggaatgtgtaggaccatcgtgctggctcc

SEQ ID NO: 5624 - DNA, 146 bp, Homo sapiens
ttttttttttttttttttttttgaacagatcaacaaatctttattaatagaaacagacagatggacagagaatgcagcaggggctgtgtgaaaactgtgatatgtgtgtgtgtgtgtgtgtgtatatgtgttgtgtgtgtgtaaaa

SEQ ID NO: 5625 - DNA, 588 bp, Homo sapiens
aacgtccatccacggagcctcaaaggctaaaaataatcatccctttcaatagttcctgttgtgaggaccattaacaaattataagagaaagcattcctcacttgtagaaactccatgaaaacagacatgtgtttacttatctgcaaccctgtgttaggaggagggtgatgagacactttactgtttgaatcaggaagtgctgacagtgaagggaggagctcttcataattatacccggagagcaggcaagacagccacatgcaagtggcctggcctggctgggtttggtacagaggggattagggcagattcaaacctcactggtcccccgtcccagcacttctgtgctgtctgcagttactaagcacttttcctgtttaagttgttgctgttttcattcccgcaaaagctcagccagcctctagcccaaaattgtctctgtttattggacagttggaaatgtcactgtggccccacagaccttgttgtcaagcaggctgctacgcttttattctaaagcgtctttcatctgatttcctccaccatctggaaccttctggattcttccccttatgggtagtgatgggc

SEQ ID NO: 5626 - DNA, 630 bp, Homo sapiens; identical to SEQ ID NO: 1287

SEQ ID NO: 5627 - DNA, 465 bp, Homo sapiens
ttttttttttttttttttttgggtaacatgcaaaactttacttctctccccattcccagagcattgtgtcggaagaggtgagggtctcggctccatgcagtcatttggggcccctgggtctgtggcactgccatctttaacgcatggcatccaaatctaccatggactagaacagtaaaaagaacagattacttaagctggaggtagcttccatctcgcccaccaacacaggcttgggcagaactcacaggtgcaaggagaccttgggctgtaatttggctgtgtgcccaggaaaaggagaaacacggcattagtgagcaacgacattctctgccagtttcctgttgtaaaactctttcaaatttccacgcctactcttaggtgatctaatccaaatctgaactggcccacttgtccataaacatggcgaaaacttagaagctgctgagccctgcccacccagct

SEQ ID NO: 5628 - DNA, 467 bp, Homo sapiens
agtagacgaaggcggcggcgatggcggcggggatagtggcttctcgcagactccgcgacctactgacccggcgactgacaggctccaactacccgggactcagtattagccttcgcctcactggctcctctgcacaagaggaggcttccggagtagccctcggtgaagccccagaccacagctatgagtcccttcgtgtggcgtctgcgcagaaacatgttctgcatgtccagctcaaccggcccaacaagaggaatgccatgaacaaggtcttctggagagagatggtagagtgcttcaacaagatttcgagagacgctgactgtcgggcggtggtgatctctggtgcagtaaaaatgttcactgcaggtattgacctgatggacatggcttcggacatcctgcagcccaaaggagatgatgtggcccggatcagctggtacctccgtgacatcatcactcgatac

SEQ ID NO: 5629 - DNA, 464 bp, Homo sapiens
atacttggcaaaagattcttgctgtcagcatataaaatgtgcttgtcatttgtatcaattgacctttccccaaatcatgcagtattgagttatgacttgttaaatctattcccatgccagaatcttatcaatacataagaaatttaggaagattaggtgccaaaatacccagcacaatacttgtatatttttagtaccatacagaagtaaaatcccaggaactatgaacactagaccttatgtggtttattccttcaatcatttcaaacattgaaagtagggcctacatggttatttgcctgctcactttatgtttacatctcccacattcataccaatatacgtcaggtttgcttaaccattgatttttttttttttttaccaagtcttacagggattattttacgggtttccatgtatctcactttgggctgtattaaaaaaacctcctttttaaaaatcta

SEQ ID NO: 5630 - DNA, 460 bp, Homo sapiens
tactgtgaatctgaaataagtggtctcaagagaagcattctccttgggaaggtgtttcagatcatcttgctcacaggggaccaaagtcacaaaagcccttcagaaaaatgcaggaagaagaggaggaaagttggagcgccagcagtgaccttaccatttcaataagtgaagatgatctgattttagagagcccagaaccacagccaaatccaggtggcaagatggagggagaagatggaatagaggccttaaaattaatccatgctgagcaagaaagagttgccctatccactgaaaaaaattgtattttgcaaaccctaagctctcctgattcagaaaaggaatcctccactaacgcaccaacaagagaacctggacaaacaccagactcagacgtaccgagggcacaggtgggtcagcatgttgccaccttgaaagaacatgataattctgtcaaaga

SEQ ID NO: 5631 - DNA, 544 bp, Homo sapiens
tttttttttttttttttttttttttagagagacagtttttgccatgttgtcccagctggtctcaaactcctaggctcaagtgatcctcccacctcagcctcccaaagtgctgggattacagctgtaagccaccacactcggccaaaaatatcaacttaattgtcatatgaatagcttctgtgtggcaaaaatggttaagacaatagaaataaaagatttaaggttgtgataattcatgtaacaaatgtatacatagttacacctgaaatatttttgaacagctttgtacctctatcttgtcaacagtgacagagaaagagatgataaatggtaatgaacaaacaaatacattttgaatgctgcagctgccaggatgtatcttagtgagaactaaaccttcctttttgtaaatcagtgagattttggtggtagcttgttctgcagcataatttagcatctttctatctctgaagtcagtcagttatggagtatagttaattctacagaaatatctgtttaatctgctttctttttcttctaccct

SEQ ID NO: 5632 - DNA, 230 bp, Homo sapiens
ttttttttttttttttttttttccgtaaaatgtaatataaagagttttagctgtgtcttgattttcctgcattttcatttcccaaaataatgaaacaaaaatctttggaaataaagaaacaaaaggtttggataaagaacagcccaggtgagtgacaaccagcctccagatagcacaggtaagtgttgtagaagctgtaagtgtagctggagcacatggaaaaagtgtgc

SEQ ID NO: 5633 - DNA, 438 bp, Homo sapiens
ttttttttttttttttttttttgtagtgcattttttagtagttccaactactaatcatcaactttgttttttatctacaacctttatttcacttacttttgagatggagtctcgctccgtcgccaggctggaatacaatggcgcaacctcagctcactccaatctccgcctccagggttcaagcaattgtcctgcttcagcctcccaagtagctgggactgcaggtgcatgccactgtgcccagctaatttttgtatttttagtaaagatggcatttcaccatgttggtcaggatggtctcgatctcttgacctcgtgatctgcccaccttggcctcccaaagtgctgggattacaggcatgagccaccacacccagccatttcatttactcttgagtatcataatactttatatggacatggaattctaggttggta

SEQ ID NO: 5634 - DNA, 597 bp, Homo sapiens; identical to SEQ ID NO: 1294

SEQ ID NO: 5635 - DNA, 502 bp, Homo sapiens
ttttcgctgactacattcagcccgtctggtaaacttgtccagattgaatatgctttggctgctgtagctggaggagccccgtccgtgggaattaaagctgcaaatggtgtggtattagcaactgagaaaaaacaggaatccattctgtatgatgagcgaagtgtacacaaagtagaaccaattaccaagcatataggtttggtgtacagtggcatgggccccgattacagagtgcttgtgcacagagctcgaaaactagctcaacaataccatcttgtgtaccaagaacccattcctacagctcagctggtacagagagtagcttctgtgatgcaagaatatactcagtcaggtggtgttcgtccatttggagtttctttacttatttgtggttggaatgagggacgaccatatttatttcagtcagatccatctggagcttactttgcctggaaagctacagcaatgggaaaggactatgtgaatgggaagactttccttg

SEQ ID NO: 5636 - DNA, 291 bp, Homo sapiens; identical to SEQ ID NO: 1295

SEQ ID NO: 5637 - DNA, 588 bp, Homo sapiens
tacggccgggagggaggtgtccctgagaaggaaagaaggaaggtaaccccatcatatctctttggaaacatgctaatgacagatctcctggcaaacacaatcatcatatttactagtgggagagatttatctctgaatgcttttggcagaatacacctggtttgtctaggattgctgttgggaatcaaacctggaatctatggatttatgtggcatggctctttggaaaatgtcatctaagctctgttaactattggagtgtaaaatggagatgtttcatgaacgaagcaactcccttctgttagagacctcatgtattaatggaccaaagcatgtagtcatgcatattctcatgtgacaagaaagacctggggagctgtatgtgtgtcctcaaacctcttccgacttctcccatgcctttcagtgacatctgtccttggaattattagtaaagcttgattctgggtaagagctctgatatgtatgattcagatttgacattctgataggacattgagggattttttttttcctgaagttgaattttaacattgccttttgatttttattttaaggaaaggttgaaac

SEQ ID NO: 5638 - DNA, 571 bp, Homo sapiens
aagtcttagttttttaaactggcacataaaacactttttgctgttatttttatttatgtcaatactgcagagtatctttatgccttattcaagtggattctgagcctgtacgtcacaatgtaaacactggaggttcactcacctacgcactcacccaccacctctgaaagaaacagaaactgcagagaaagacagcatcttagctcattttgtttttaaatgaggttttagacgcttgccacttcctaagggaaatcctaaaacagagcaagtgatgctcccaggtatcactgtgaacttttttctttcaaagtgtgaatttttacactggctttttcatttttttaaagtaattgaagcttgtggctttacaacttagtgttttttgctatccagataacaagtttcattgtttagaacccagtgacacttaataggtagataaattgtcctttaaaatgtcccagatgatatacacaatatggtacatttgtgctctctctctctgtttttctctctttctctttctagttagatcaagataacgatgacttgtaccctccctgattct

SEQ ID NO: 5639 - DNA, 633 bp, Homo sapiens
aggtcacagctcgctaattgtttttccaagtctcaaggctttttcttggcatgtccagacaacctatccagttttactccctcctacccttacgcttatatcatcttattgccaaccataccacagtccttctttctgaacttgatttttgttactcagctaggagtagcctttccttttttaagggggtaggagttcccaagtcttacaactcaggtcccagcttaaactcctctgtcttgaagatgacttccttggctgcttcaacacctattaggctttcttttcttgacctcccggagaatgcattgggtaagattcagttttctacccaaatttaatgtgtctgtatttgtgtgcaacacacaaacttcattatttttatttgaactcttggctgtgcttgcatatgtgaaagtgatatttacaaattttggaacacatctttcaatacaatttgtgtccattatatacactgtactatgctatagggcatggagtatacagctgtaatagagtgaaggacacattgtctaatattgtagctttgtgtgtacaagtcccataagagactgtttaaaaaagtcttttagaaatttcactgggcatggtggctcacacctgtaatctcag

SEQ ID NO: 5640 - DNA, 593 bp, Homo sapiens
ctgacgccgggaccgggaccgccgccgccgccgccaccatgagtgatcagcagctggactgtgccttggacctaatgaggcgcctgcctccccagcaaatcgagaaaaacctcagcgacctgatcgacctggtccccagtctatgtgaggatctcctgtcttctgttgaccagccactgaaaattgccagagacaaggtggtgggaaaggattaccttttgtgtgactacaacagagatggggactcctataggtcaccatggagtaacaagtatgaccctcccttggaggatggggccatgccgtcagctcggctgagaaagctggaggtggaagccaacaatgcctttgaccagtatcgagacctgtattttgaaggtggcgtctcatctgtctacctctgggatctggatcatggctttgctggagtgatcctcataaagaaggctggagatggatcaaagaagatcaaaggctgctgggattccatccacgtggtagaagtgcaggagaaatccagcggtcgcaccgcccattacaagttgacctccacggtgatgctgtggctgcaggccaacaaatctggctctggc

SEQ ID NO: 5641 - DNA, 603 bp, Homo sapiens
cagttgcgcaataaaagctgacagagcagtccaacaccccgcttctcttgcctcttactgcaagaatgtctgaggagtcttactttgaatctaaaacagaggagtcaaacagtgcagagatgtcatgtcagatcacagcaacaagtaacggggagggccatggcatgaacccaagtctgcaggccatgatgctgatgggctttggggatatcttctcaatgaacaaagcaggagctgtgatgcattctgggatgcagataaacatgcaagccaagcagaattcttccaaaaccacatctaagagaagggggaagaaagtcaacatggctctggggttcagtgattttgacttgtcagaaggtgacgatgatgatgatgatgacggtgaggaggaggataatgacatgggtaatagtgaatgaaagcagaaagcaaagtaataaaatcacaaatgtttggaaaacacaaaagtaacttgtttatctcagtctgtacaaaaacagtaaggaggcagaaagccaagcactgcatttttaggccaatcacatttacatgaccgtaatttcttatcaattctacttttatttttgcttacagaaaaac

SEQ ID NO: 5642 - DNA, 631 bp, Homo sapiens
gcttctccctgagggcccaccagcctgtgctgtacaccccgttagtccctgatcccaaccttctccctcctgccagcacaccgatgcacacaccggaagtggcgagcccaagccctggggacaggtgtagggagaaaagcagccccaggcctcagactcgcttcccatcctggcatagagtgggggatggctggagggtgtctataggtacagcccgctctggctgctgccaggtgggcccctgccaggggtcctcacccctgtccaccctgtgcctggctgtccctgcacccagatacagcaacatggcctgtacccagcagagtggtggcaccaccatggttacagcggatgccccgagactctgcttggtaaacgtggcagagcagaatgggaggctggaccctgaggaagggcccctctcctggcatctgtctcttgctacctaagcctgtgcctctccctaaagagctgcctccctgctgccgagccctggtctggccacgagccactactgcctcccacaggcaccactgcctcccgctgctgcccacaggtggtgccgccaatgggcagtgccctcaggccgaagcctcaatcccccatctgagccaggcctaatcctctaata

SEQ ID NO: 5643 - DNA, 589 bp, Homo sapiens
ctatacggtgaaaatcagtaattatggatgggatcagtcagataagtttgtgaaaacctacattaccttaactggagttcatcaagttcccactgagaatgtgcaggtgcatttcacagagaggtcatttgatcttttggtaaagaatctaaatgggaagagttactccatgattgtgaacaatctcttgaaacccatctctgtggaaggcagttcaaaaaaagtcaagactgatacagttcttatattgtgtagaaagaaagtggaaaacacaaggtgggattacctgacccaggttgaaaaggagtgcaaagaaaaagagaagccctcctatgacactgaaacagatcctagtgagggattgatgaatgttctaaagaaaatttatgaagatggagacgatgatatgaagcgaaccattaataaagcctgggtggaatcaagagagtagcaagccaaaggagacacggaattttgagactttaaagtcgttttgggaactgtgatgtgatgtggaaatactgatgtttccagtaagggaatattggtgagctgcatatataaatttgacagatagctatttacatag

SEQ ID NO: 5644 - DNA, 626 bp, Homo sapiens; identical to SEQ ID NO: 2576

SEQ ID NO: 5645 - DNA, 569 bp, Homo sapiens
ccaagtaatgattagcaaatacagtacacataaaacatgggcatttgttctggaaagggctttctcctgctgatattgcagatagtttcacaggtcacagaaccttaaaaaggatttaaagggcatgtcttgtgtagcatttgttcctttgaaaatgatgctcctttcccattttttagtaattgaagaggatagaaaggttttctcattgcttacgtttcactgaattctctgcagccccttttcccacagatgtttcagccaaacctgtatggagggaggtgacatggcatggcttgctgtttaaaacagctacggtattttgtgcttcccttttgagtgtgtcaaggtgaacaaaaggagagcctctagaacgcatgggagggaatttgggacaggaccttttgcatgctgggggaaactgacaggactcagtgaggaaagaattttgtttgtgttttcttctctctctttctctgcagagcgcatgatctatatcaacatgcttcctggttatactaaagaatctcagctagtggtgatctaccagtttctgtgaggattattac

SEQ ID NO: 5646 - DNA, 458 bp, Homo sapiens
tttgaggacagggactatgtcttatgcaatcactattattgtcctgttacctagcatgggacacgtcacaacgcatatttgttcaatgaatgaatgaatgtcttctaaaagactcctctgattgagagaccatatctataattgggatgtgaatcatttcttcagtggaaaaagagcacaacggcacaaccttcaaggacatattatctactatgaacattactactgtgagactctttattttgccttctacttgctctgaaatgaaaccaaatcaggccgctgggttccacaagtcaatatatgttggatgacgattctgatgccttattgggaactgtgagacttatctggtatgagaagccagtaataaacctttgacctgttgtaaccaatgaacattatgagtatgttaatatgatgtaaattgctatttaagtgtaaagcagttctaagtt

SEQ ID NO: 5647 - DNA, 424 bp, Homo sapiens
tatttctcttctgtgagtaatgagtttcattatttcatttattttggtgctatttttgtttgtttgtttgtttattgttttttttttcttttttttggagacagaatcttcctctgttgcccaggctggagtgcagggatgtgatctcagctcgctgcaacctttgcctcctgggttcaagtgattctcctgcctcagcctcccgagtagcagggattacaggcatgcaccaccacacccggctaatttttgtatttttagtagagacagagtttcaccgttttggccaggctgatctcagattcctagcctcaagtgatccgcctgcctcagcctcccaaagtgctgggattacaggcatgagccaccacaccctgccaattttggtgctatttttaaattaggatatcactgggaaagggaa

SEQ ID NO: 5648 - DNA, 539 bp, Homo sapiens; identical to SEQ ID NO: 1301

SEQ ID NO: 5649 - DNA, 555 bp, Homo sapiens
ggcgcttgccagcgtgttggagagaccgctaccggtgaaccagcgcgggtttttcggacttgggggtcgtgcagatctgctggatctaggtccagggagtctcagtgatggtctgagcctggccgcgccaggctggggtgtcccagaagagccaggaatcgaaatgcttcatggaacaaccacactggccttcaagttccgccatggagtcatagttgcagctgactccagggctacagcgggtgcttacattgcctcccagacggtgaagaaggtgatagagatcaacccatacctgctaggcaccatggctgggggcgcagcggattgcagcttctgggaacggctgttggctcggcaatgtcgaatctatgagcttcgaaataaggaacgcatctctgtagcagctgcctccaaactgcttgccaacatggtgtatctgtacaaaggcatggggctgtccatgggcaccatgatctgtggctgggataagagaggccctggcctctactacgtggacagtgaagggaaccggatttcaggggccaccttctc

SEQ ID NO: 5650 - DNA, 523 bp, Homo sapiens; identical to SEQ ID NO: 1303

SEQ ID NO: 5651 - DNA, 105 bp, Homo sapiens
tgaaaatacggagtagcttgggaggtgtggacgcatgctaaaggaacttgtggaggacagtgtcaagctacttccctgtggatctctttcagtgaaaatgactga

SEQ ID NO: 5652 - DNA, 560 bp, Homo sapiens
tctctttttcttgtctcactgcactgactagcatcttcagaatgatgctgaatggttagagtggacatcattgcctggttctggacattagctgtaggtttttcgtagagtaggttgaggaaataaattctcctctgttcctgtttgctgagagtttttgtcatgaatgggtgttgaattttgtcaaatgcttttcctgtgtctgttgagataatcatttggtacttctccttaattttgttaatatagggaaataaattcacgtttcaatgtaaaccaaccttgcattcctaggataaactccaattggggtttctattttttattaaagaatttaattcttattaaatatttatatgttcataaggaatatttgtctggaggtttatttaatgtttttgtctgggtttgtcattaaggaatgctggcctcctaaaatgaagtgaaaagtgttccctcttgttttcttgaggactttgtatatgattggtctttgattaagtctttagttccctagtgaagtcacacagacctgaaattttctttgcaggaaattaatt

SEQ ID NO: 5653 - DNA, 352 bp, Homo sapiens
atggtattttttccattttacaaaggtagaaggtaaggcttagagaggtagagaaattctctttatatcatattagtaatgattagtagcttaatatttatttagcacttagtatctatcaaatacttaaaatactttagttatttatatgcattatctcatttaatccttacaacacccttatgaagtaggtgcttataaggctattatctcattttacagatgaggaaatgaatgcacacatatatttagtgacttgctcaaggttcatagctagtaagtagagctgaaaaacaaacgtggagaattggactccagagcctttattcctctgaattgcctcctgtatgat

SEQ ID NO: 5654 - DNA, 96 bp, Homo sapiens
tcctgcccctagacccttgagccactattcataactcccctgcccttgtctgctctaaggagtttctgaactccttcatctctccttagctacctt

SEQ ID NO: 5655 - DNA, 639 bp, Homo sapiens
agctgcacctcctccaccacctgttcccaggggccgtggtgttggaccacctcggggggctttggtacgtggtacaccagtaaggggagccatcaccagaggtgccactgtgactcgaggcgtgccacccccacctactgtgaggggtgctccagcaccaagagcacggacagcgggcatcagaggatacctttgcctccacctcctgcaccagaaacatacgaagaatatggatatgatgatacatacgcagaacaaagttacgaaggctacgaaggctattacagccagagtcaaggggactcagaatattatgactatggacatggggaggttcaagattcttatgaagcttatggccaggacgactggaatgggaccaggccgtcgctgaaggcccctcctgctaggccagtgaagggagcatacagagagcacccatatggacgttattaaaaacaaacatgaggggaaaatatcagttatgagcaaagttgttactgatttcttgtatctcccaggattcctgttgctttacccacaacagacaagtaattgtctaagtgtctttcttcgtggtccccttcttctcccaccttattccattcttaactctgcattctggcttctgtatgtagt

SEQ ID NO: 5656 - DNA, 551 bp, Homo sapiens
aaaccgtcatgtttctggggagtcacctcagctggcagttaccaccgtgttggaaagcagcctcaggaccggccacctccatcactggcgtcaccatgggggctgtgctgggtgtcttctccctcgccagctgggttccatgcctctgtagcggtgcctcatgtttgctgtgtagttgctgtcctaacagtaagaattccacggtgactcgcctcatttatgctttcattctcctcctgagcactgtcgtatcctatatcatgcagagaaaggagatggaaacttacttgaagaagattcctggattttgtgaagggggatttaaaatccatgaggctgatataaatgcagataaagattgtgatgtgcttgttggttataaagctgtgtatcggatcagctttgccatggccatctttttctttgtcttttctctgctcatgttcaaagtaaaaacaagtaaagatctccgagcggcagtacacaatgggttttggttcttcaaaattgctgcccttattggaatcatggttggctctttctacatccct

SEQ ID NO: 5657 - DNA, 578 bp, Homo sapiens
cggtttgtcttgtgaccgcgggcggccgctgcttctttcccgagcttggaacttcgttatccgcgatgcgtttcctggcagctacattcctgctcctggcgctcagcaccgctgcccaggccgaaccggtgcagttcaaggactgcggttctgtggatggagttataaaggaagtgaatgtgagcccatgccccacccaaccctgccagctgagcaaaggacagtcttacagcgtcaatgtcaccttcaccagcaatattcagtctaaaagcagcaaggccgtggtgcatggcatcctgatgggcgtcccagttccctttcccattcctgagcctgatggttgtaagagtggaattaactgccctatccaaaaagacaagacctatagctacctgaataaactaccagtgaaaagcgaatatccctctataaaactggtggtggagtggcaacttcaggatgacaaaaaccaaagtctcttctgctgggaaatcccagtacagatcgtttctcatctctaagtgcctcattgagttcggtgcatctggccaatgagtctgctgagactcttgacagca

SEQ ID NO: 5658 - DNA, 547 bp, Homo sapiens
taggcaagcacttctgggccttccagctccagggaaaagacttcgtccctgacatcgtcaccatgggcaagtccattggcaacggccaccctgttgcctgcgtggccgcaacccagcctgtggcgagggcatttgaagccaccggcgttgagtacttcaacacgtttgggggcagcccagtgtcctgcgctgtggggctggccgtcctgaatgtcttggagaaggagcagctccaggatcatgccaccagtgtaggcagcttcctgatgcagctcctcgggcagcaaaaaatcaaacatcccatcgtcggggatgtcaggggtgttgggctcttcattggtgtggatctgatcaaagatgaggccacaaggacaccagcaactgaagaggctgcctacttggtatcaaggctgaaggagaactacgttttgctgagcactgatggccctgggaggaacatcctgaagtttaagcccccaatgtgcttcagcctggacaatgcacggcaggtggtggcaaagctggatgccattctgactgacatgga

SEQ ID NO: 5659 - DNA, 560 bp, Homo sapiens
acatcatggctgggaatcttactctttcatctgataccttgttcagatttcaaaatagttgtagccttatcctggttttacagatgtgaaactttcaagagatttactgactttcctagaatagtttctctactggaaacctgatgcttttataagccattgtgattaggatgactgttacaggcttagctttgtgtgaaaaccagtcacctttctcctaggtaatgagtagtgctgttcatattactttagttctatagcgtacttgcatctttaacatgctatcatagtacatttagaatgattgcctttgattttttttttaaattctgtgtgtgtgtaaaatgccaattaagaacactggtttcattccatgtaagcattaaacagtgtatgtaggtttcaagagattgtgatgatttttaaattttaactaccttcacttaatatgcttgaactgtcgccttaactatgttaagcatctagactaaaagccaaaatataattattgctgcctttctaaaaacccaaaatgtagttctctattaacctgaaatgta

SEQ ID NO: 5660 - DNA, 172 bp, Homo sapiens
tacggccgggcgggtgccgggagcttccctttctcagcgcggcgcgaaggtggctcgccgtcagcgcctgcttccctcgacctcgtcctcctccccgctccggaggagctgcgagatgtggcgcctctgactccacttctccccgcccctgtcaccgagagggggaacgagc

SEQ ID NO: 5661 - DNA, 593 bp, Homo sapiens
tatgggcgagaggagagtgccgagcaggtgccacccccagctgaggctggccaggcccccactggccgacctgagcacccagcacccccgcctgagaagcatctgggcatctactccgtgttgcccaaccacaaggctgacgctgtattgagcatgccgtcttccgtgacctctggcctccacgtgcagcctgccctggctgtctccatggacttcagcacctatggggggctgctgccccagggcttcatccagagggagctgttcagcaagctgggggagctggctgtgggcatgaagtcagagagccggaccatcggagagcagtgcagcgtgtgtggggtcgagcttcctgataacgaggctgtggagcagcacaggaagctgcacagtgggatgaagacgtacgggtgcgagctctgcgggaagcggttcctggatagtttgcggctgagaatgcacttactggctcattcagcgggtgccaaagcctttgtctgtgatcagtgcggtgcacagttttcgaaggaggatgccctggagacacacaggcagacccatactggcactgacatggccgtcttctgtctgct

SEQ ID NO: 5662 - DNA, 613 bp, Homo sapiens
ctggggctgcggctgctctatgctgtgaatacccactgccacgcggaccacattacaggctcggggctgctccgttccctcctccctggctgccagtctgtcatctcccgccttagtggggcccaggctgacttacacattgaggatggagactccatccgcttcgggcgcttcgcgttggagaccagggccagccctggccacaccccaggctgtgtcaccttcgtcctgaatgaccacagcatggccttcactggagatgccctgttgatccgtgggtgtgggcggacagacttccagcaaggctgtgccaagaccttgtaccactcggtccatgaaaagatcttcacacttccaggagactgtctgatctaccctgctcacgattaccatgggtccacagtgtccaccgtggaggaggagaggactctgaaccctcggctcaccctcagctgtgaggagtttgtcaaaatcatgggcaacctgaacttgcctaaacctcagcagatagactttgctgttccagccaacatgcgctgtggggtgcagacacccactgcctgatctcacttctgtcagatgctcccatccactattaatgcactaggtggga

SEQ ID NO: 5663 - DNA, 504 bp, Homo sapiens; identical to SEQ ID NO: 1310

SEQ ID NO: 5664 - DNA, 660 bp, Homo sapiens
  misc_feature 112: n = A,T,C or G
gccggggtgaagtcttcgtcttaatgatggtggagaagttgatttagaccttggaaattatgaaagatttttggatattaatctttataaagacaacaataccaccacgggngaagatatatcagcatgtgatcaataaagagaggcgtggtgattacctggggaaaacagtgcaagttgtccctcacattactgatgctgtccaggagtgggttatgaatcaagccaaggtgccggtggatggcaataaggaagagccccaaatatgcgttattgagctgggaggcaccattggagacatcgaaggaatgccgtttgtggaggcgtttagacaattccagtttaaggcgaaaagagagaatttctgtaatatccacgttagccttgtcccacagctcagtgctaccggagaacaaaaaaccaaacccacccaaaacagcgtccgcgcactgaggggtttaggcctgtctccagatctgattgtctgccgaagttcaacgcccattgagatggccgtgaaggagaagatttctatgttttgtcacgtgaaccctgaacaggtcatatgtatccatgatgtttcttcccataccgagttcctgtgcttttagaggaacaaagcattgtgaaatattttaaggagagattgcacctgcccat

SEQ ID NO: 5665 - DNA, 676 bp, Homo sapiens
gcaggtggtggtgaagtcctaaccagtagcctccgctgacactgctcctgtaagggaggggaaaggacacatcattcccccagtgccagtccaggttcctggaacgtacacagtctccattgacagtgtgagagggggagggtcaccactgatttttaaaatctcattttaatatttcagatatttccaattataagtaactttaatacttcatatgtttacttttttggttatattccttttagatctacagatatatttagttttttcatactagttttaacaaagctcagagcttacaattttgtctggtgttgtagcgtcacatttgagaactgctaatttgcttttcagatgtgagaagaagagaataattgcaaagtgtgctgtagatgaaagagtctaatgcttttgtagatattttgtgaaaggcaatgaaagtataggtctggttttttaaaaaatggaaatagatggtgcttacattcctacttgattcttcaatttataacaacccaattataaatattactttttgttccagattttttacagaatcaagtgtatgtttgtataaggctacattggcatgagcattagaatgtcaaaatattcacatttccttttcaaatttaggatgtagtttattacatttctggaattatgcatatgcgga

SEQ ID NO: 5666 - DNA, 580 bp, Homo sapiens; identical to SEQ ID NO: 1312

SEQ ID NO: 5667 - DNA, 510 bp, Homo sapiens
gtcctggtttcggggaggggagccaaactgctccaggacctgactctgggctagggcatgaactggtcctggcccaggcagacagcactgatgagggcacctacatctgccagaccctggatggtgcacttgggggcacagtgaccctgcagctgggctaccctccagcccgccctgttgtctcccgccaagcagccgactatgagaacttctcttgcacttggagtcccagccagatcagcggtttacccacccgctacctcacctcctacaggaagaagacagtcctaggagctgatagccagaggaggagtccatccacagggccctggccatgcccacaggatcccctaggggctgcccgctgtgttgtccacggggctgagttctggagccagtaccggattaatgtgactgaggtgaacccactgggtgccagcacacgcctgctagatgtgagcttgcagagcatcttgcgccctgacccaccccagggcctgcgggtagagt

SEQ ID NO: 5668 - DNA, 645 bp, Homo sapiens
tctggaaactacagtctatgctttgaagcgcaaaagggaataaacatttaaagactcccccggggacctggaggatggacttttccatggtggccggagcagcagcttacaatgaaaaatcagagactggtgctcttggagaaaactatagttggcaaattcccattaaccacaatgacttcaaaattttaaaaaataatgagcgtcagctgtgtgaagtcctccagaataagtttggctgtatctctaccctggtctctccagttcaggaaggcaacagcaaatctctgcaagtgttcagaaaaatgctgactcctaggatagagttatcagtctggaaagatgacctcaccacacatgctgttgatgctgtggtgaatgcagccaatgaagatcttctgcatgggggaggcctggccctggccctggtaaaagctggtggatttgaaatccaagaagagagcaaacagtttgttgccagatatggtaaagtgtcagctggtgagatagctgtcacgggagcagggaggcttccctgcaaacagatcatccatgctgttgggcctcggtggatggaatgggataacagggatgtactggaaagctgcagagggccattgtaagtattctgaattatgtcatcta

SEQ ID NO: 5669 - DNA, 574 bp, Homo sapiens
tttccagacaaggaggaaaatgatggggtactgtgcccagggattaggggagctgagggtaagtactcttctgacttttcccccacaagctgctaaaaagatcattgcttttcgttatattttggactggtatacctggctaatcagcattcactggcaaacagcactgtgaggaagacagctgcctaaggcctgtttgtcaccctggaagggaagcagcagagaggtagaagtatcctgagagaagaaaatagtgtcaagagggagaaagcagcagctcccatcaagcccttaccacatgctgtgcctggactttggtatctcatcactttgggtgaagaaactcaggctcaagaagttaatctctcttgattaaaccccttgctttgagcctcagtgaatttgtttcacaacccattagacagacagttgtaggtgaggtgactacattgctacgggctcattcagttgctggactgaaagccatttggagctccagctgatagggattatgcagctccacatgagtgggttgggtcagtcatgtctgtggaatgagatgggtggaatgaga

SEQ ID NO: 5670 - DNA, 565 bp, Homo sapiens
tccttcttgtttaatatctctttacctcagtcctacattttgattctctggaggagattttagcttgtcttaaaaagccaaatttggagtcatcaagcctgctgaacctgatggggcagctttttgaacagctttctggaagtaagaacttcagttgaaaagccctttgatcgcttcagcccgggacatgcccttcagatggcttattctcagtaaagctttatgtagactgtgacactgtatatgtgtgactcgtacaactttgacgtgtttctgaagtggtttaatcgtatttgttattagcttctttgtggaaatgcaatttttatactaaaaacattgcttatttgcaatgcaatatgttataaatttgttgcttatattactggtattagtcttagcctaatgaacctaattatttttctttctgtattctttgcttcctcaaatagcatctgcagcaattggaatgagaaatccagatatgtgtttcaagtagtacattgcctgaatacaaatcacttgacacagtattgtatataatccctgatcctatttgtttcat

SEQ ID NO: 5671 - DNA, 498 bp, Homo sapiens; identical to SEQ ID NO: 1317

SEQ ID NO: 5672 - DNA, 615 bp, Homo sapiens
tacggccgggcgcggtggctcacgcctgtaatcccagcactttgggaggccgaagcaggtggatcatgaggtcaggagattgagaccatcctggctaacacggtgaaaccccatctctactaaaatacaaaaaattagcccagcgtggtggtgggcacctgtagtcccagctactggggaggctgaggcaggagaatggcatgaacccgggaggtggagcttgcagtgagccaagatggtgccactgcactccagcctgggtgacaaagcgagactccatctcaaaaaaagaaaaaaaagaaagcattgggaaagcctaaatggtctacaggccacttggaagagaagtgacacaactctcagaaagggaaagaatgaatgaatgaaagaatgtgctttctggggaggaacagtcagcatttttgataatttctgagaggcaggtcagtagagtagttaagaccatgaacgctagggccagattctgcttcttcatatttttacagccttgggaaagttattctctctgtgccacactttgtttatctgaaacatgaagacaactacagcatcttctttacagagttcttctaaaaattaaatgagttaattttt

SEQ ID NO: 5673 - DNA, 545 bp, Homo sapiens
gagtactcggagctggatgaggatgagtcgcaggctccctatgaccccaacggcaagccagaaaggttttactacaatgtggagtcctgtggctctctgcgtcctgaaaccattgtcctgtcagccctctcaggattgaagaagaaactgagtgatttacaaactcaattaagccacgagatccagagtgatgtgctaaccataaattgactgcagcttgcctgcttcagcaaaaacggagattcaggccagcagctggatatgggggtctctcttcagactcttctcgtttctgagaatctagtctactgttggttgagcttcttggcaggacatcagtaccaactagaagtgggtcatagatagattaccagggatgcagtggtgtttaggcaggataggtctttactggccctgactgctgttaataattggcagcagtgctccccagatcccagaaggtccctgctggagtgtttccagtgcacctgtagggaaccaactagacttctctcctggttagtccagctctttactctaaaccc

SEQ ID NO: 5674 - DNA, 456 bp, Homo sapiens
tacggccgggtggcaagccaggtaacataaatgtgtgaaaaagtaaagataactaaaaaatttagaaaaataaatccagtatttgtaaagtgaataacttcatttctaattgtttaatttttaaaattctgatttttatatattgagtctaagcaaggcattcttacacgaggaagtgaagtaaattttagttcagacataaaatttcacttattaggaatatgtaacatgctaaaacttttttttttttaaagagtactgagtcacaacatgttttaaagcatccaagtcccatataatccaactatcatggtaaggcctgaaatcttttaacctaccaaagcctaaatgagacaccgaattaacattaaaatttcagtaactgactgtccctcatgtccatggcctaccatcctttttgaccctggtttccagggacctatgtcttttaatact

SEQ ID NO: 5675 - DNA, 547 bp, Homo sapiens
tacggccgggtgacaaaggtgagacactcacctagaacagtgccgtgctgctgctgggaagttgctttacacaacacaggccacatgggaaaggccccagcagccttcagctccttcctttctccttaaagagcaacagggcttattcttgtttttcttttttcaaaagtgtggcctttgggctctgccatctggggtgtggtgtggtatgtgggaagaagttcagaggaaccgttggaaacgacgttaggcattttaccttttcagtaacattttatacatctacttgtcaatgtatttgagacattcacagccaaaagcctgggactctttgtgaaggtcctcctcacctctatctttctttctctctctctcaaactttccttaaagttctcattgcctttgcactgcttctgtgaacagtctttgtctcctccccacctttggtgggaagtgcggggcagtcctggtcaagacactcatgccctggcaatgtggctgccagagaatgttgttgctaacccaccagtttcttgttgatttggag

SEQ ID NO: 5676 - DNA, 565 bp, Homo sapiens; identical to SEQ ID NO: 1323

SEQ ID NO: 5677 - DNA, 622 bp, Homo sapiens
cggccggggatgttcttgtctttgactatacaaaacatccttctaaaccagatccttctggagagtgcaacccagacttgcgtctccgtggacatcagaaggaaggctatgggctttcttggaacccaaatctcagtgggcacttacttagtgcttcagatgaccataccatctgcctgtgggacatcaatgccgttccaaaggagggaaaagtggtagatgcgaagaccatctttacagggcatacggcagtagtagaagatgtttcctggcatctactccatgagtctctgtttgggtcagttgctgatgatcagaaacttatgatttgggatactcgttcaaacaatacttccaaaccaagccactcagttgatgctcacactgctgaagtgaactgcctttctttcaatccttatagtgagttcattcttgccacaggatcagctgacaagactgttgccttgtgggatctgagaaatctgaaacttaagttgcattcctttgagtcacataaggatgaaatattccaggttcagtggtcacctcacaatgagactattttagcttccagtggtactgatcgcagactgaatgtctgggatttaagtaaaattggaga

SEQ ID NO: 5678 - DNA, 300 bp, Homo sapiens
cacttccctcgttattttctctcattttttgatgagaggaaaatttgaaacattattcttgttgttgttggtaatagcataatgacagtgggaggggtacaaggggataagaaaaatgtcatgatttttttccggtcctgccacatgtaacacttactctgttacctaaattttatagttagatcatatccaatctacttattaaactgtgttctatttaccagtggagtttttctgcagtggttgcgtttcactgtaaggataatggagttcctctcctctgctttcctcagaggatgg

SEQ ID NO: 5679 - DNA, 565 bp, Homo sapiens
tttttttttttttttttttttttgagatcaaggccatggggccagagatgagtccgttttaattgctggggaaacagggaggggccttggaaatagctccccccaccccactccccacgtgtcccatccagtttgggcaggaagccactttccctagaacagttcactgctgggatcctgtgaagaaccgctgtggagggcagcagctggacgagggcacaggacctcagagaacactgatgcgctccgccagcccctgcatgtcgtggtcctgtggtggacaggccccaccgagatccctgtccgtgggcagcccagacccaggcagcggatgctctgctgcaaactgctcccagcgcgcgtcgtcactctcatgcgtgatgtatcgctctcccatcttcccctccagctctcggaggtcctgccacgtctggtactcctgtaaccaggggtggctgagagatttgtccacgctgtagcgtttgcgcatcttcacctgcagcaggttgttgatgaggtcaatggctccagctgagatgtggctccaggggctggccgggtacat

SEQ ID NO: 5680 - DNA, 509 bp, Homo sapiens
ttttttttttttttttttttttttttttttttttttttttttaagaccctcatcaatagatggggacatacagaaatagtcaaaccacatttacaaaatgccagtatcaggcgggggcttcaaagccaaagtgatgtttggatgtaaagtgaaatattagttggcggatgaagcaaatagtgaggaaagttgagccaataatgacgtgaagtccgtggaagcctgtggctacaaaaaatgttgagccgtaaatgccgtcggaaatggtgaagggagactcgaagtactctgaggcttgtaggagggtaaaatagagacccagtaaaattgtaataagcagggcttgaattatttggtttcgggtgctttctattagactatggtgagctcaggtgattgatactcctgatgcgagtaatacggatgtgtttaggagtgggacttctaggggatttagcggggtgatgcctgttgggggccaatgccctcctaattggggggtaggggct

SEQ ID NO: 5681 - DNA, 429 bp, Homo sapiens
ttttttttttttttttttttttttgctttcttctggagggttattttggataaaatagttgaagacagactacaatgagacattgtaaaataagactagaaaataatttaagagcgtattttaagcacgggattccgacacactcataaacgtgtttgctcccagctcttacaaaagaaaataaggtttttttccatcaaaaacaacccagttacaccagtaaatcttcccagttctgaaaatctgaagcaactgatactccattaaatgtggaaacactgtctactcaaaatatttgtaatattatgcagtgacaaaaatttcccacacctatatagggttaaccatagttttcagcaaagcaacaagggctttacttattttgtctttttcagtttatacagagctccaatttcatgaaaccatact

SEQ ID NO: 5682 - DNA, 124 bp, Homo sapiens
tttttttttttttttttttttgtggagccagcttaccaacataacactttgctgatattttgttcatttgtccccctaagttcatgaaggaaaatggtctatagttttcttgcagtgttttttg

SEQ ID NO: 5683 - DNA, 349 bp, Homo sapiens
aataaacttaaaagatatccacccattttgtcagatttatttattctttagcaatttaagtattaaaatcacagtttttgtctcaatccttaataatactatattcattatatttcatgtttagctttctcatggagaaaaagaaacacaggcataaacctatatactatccacctgctggttctgcaacatgattataataaagtgttactgacacttgaacaatttctatgatgtcggcagagatttcaacaagagtgattattaagtagctagccttataagtcaagagttatgatctttgatccactgctcaatccatttcaagatctgatctacattattttct

SEQ ID NO: 5684 - DNA, 523 bp, Homo sapiens
atgaatactttattagagacataacacgtataaaataaatttcttttcatcatggagttaccagattttaaaaccaaccaacactttctcatttttacagctaagacatgttaaattcttaaatgccataatttttgttcaactgctttgtcattcaactcacaagtctagaatgtgattaagctacaaatctaagtattcacagatgtgtcttaggcttggtttgtaacaatctagaagcaatctgtttacaaaagtgccaccaaagcattttaaagaaaccaatttaatgccaccaaacataagcctgctatacctgggaaacaaaaaatctcacacctaaattctagcagagtaaacgattccaactagaatgtactgtatatccatatggcacatttatgactttgtaatatgtaattcataatacaggtttaggtgtgtggtatggagctaggaaaaccaaagtagtaggatattatagaaaagatctgatgttaagtataaagtcatatgcctgatt

SEQ ID NO: 5685 - DNA, 508 bp, Homo sapiens
aaagtccaattccaaagccagaccagaagattctatcccccgcagcgctctcctttgagcaagccgagctctccttgttaccgtgttctgtctgtgtcttcaggagtctcatggcctgaacgaccacctcgacctgatgcagagccttctgaggagaggcaacaggaggcattctgtggccagccaaaaggtaccccgatggccaagcaattcctctgaacaaatgtaaagccagccatgcattgttaatcatccatcacttcccattttatggaattgcttttaaaatacatttggcctctgcccttcagaagactcgtttttaaggtggaaactcctgtgtctgtgtatattacaagcctacatgacacagttggatttattctgccaaacctgtgtaggcattttataagctacatgttctaatttttaccgatgttaattattttgacaaatatttcatatattttcattgaaatgcacagatctgcttgatcaattcccttga

SEQ ID NO: 5686 - DNA, 441 bp, Homo sapiens; identical to SEQ ID NO: 1330

SEQ ID NO: 5687 - DNA, 527 bp, Homo sapiens; identical to SEQ ID NO: 1332

SEQ ID NO: 5688 - DNA, 467 bp, Homo sapiens; identical to SEQ ID NO: 1333

SEQ ID NO: 5689 - DNA, 564 bp, Homo sapiens
catgttaaaggtttatgaagccaggctcactgaggaggaaactgtctgcctggacctgtataaagtggaagcttaccgctgtggactgaagaaaataaaaaatgacttgaacttgaagaagtcgttgttggccactatgaagacagaactacagaaagcccagcagatccactcacagacttcacagcagtatccactttatgatctggacttgggcaagttcggtgaaaaagtcacacagctgacagaccgctggcaaaggatagataaacagatcgactttagattatgggacctggagaaacaaatcaagcaattgaggaattatcgtgataactatcaggctttctgcaagtggctctatgatgctaaacgccgccaggattccttagaatccatgaaatttggagattccaacacagtcatgcggtttttgaatgagcagaagaacttgcacagtgaaatatctggcaaacgagacaaatcagaggaagtacaaaaaattgctgaactttgcgccaattcaattaaggattatgagctccagctggcctcatacacctc

SEQ ID NO: 5690 - DNA, 493 bp, Homo sapiens
ttttttttttttttttttttttctgaaaggctcactcttgttcctaatagaaagacttagatggtatttcttcagatcataaagcaagttgtacttttaatgatggaataaaaattataaaagtaaaacgtggcttttcctccccattctttttttccttttttagatgatgaattcaggaaaagaccagtctaggccaaatttatctcttgttaaccttcagggatatggagtacgccaagtatgttagtacaaagtcaaatttggatgatgtagtcattttttgctaattccattattagaaacattagataatatggtagtatctaaagaatacagctttaaaaatagtatgcaccttcactatcaagactgtaaggcaaaatcaacttgtgcccacgactgaacttttgaaatagaaaattttgttatatccatgttagccaggctggtcttgaactcctgacctcaaatgacccgcccgccccgacct

SEQ ID NO: 5691 - DNA, 545 bp, Homo sapiens; identical to SEQ ID NO: 1335

SEQ ID NO: 5692 - DNA, 453 bp, Homo sapiens
ggtgataagatcctttcggtaaatggccaagacctaaagaacctgctgcaccaggatgctgtagacctctttcgtaatgcaggctatgctgtgtctctgagagtgcagcacaggttacaggtgcagaatggacctataggacatcgaggtgaaggggacccaagtggtattcccatatttatggtgctggtgccagtgtttgccctcaccatggtagcagcctgggctttcatgagataccggcaacaactttgaaaaacttgctctctttcaatactcccaatgaagatacatttcactcaccctccacccctgctattctgccatgtctttccctctctctgcatagccagatttgaagtgactgatacccaccccaaaccttgctgttcacagtctccaattcttcatattctaatgggaaagtaaaggtattgtttgaaggaaaactga

SEQ ID NO: 5693 - DNA, 348 bp, Homo sapiens
acttgaggtcagaagttcaaaaccagcctggccaacatggtgaaaccccgtctctgctacaaaaattagccaggcgtgatggtggatgcctggaatcccagctactcaggaggctgaggcaggagagttgcttgaacccgggaggcggaggttgcagtgagcagagatggcgccactgcactccagcctgggtgacaagagcaactccgtctcccaaaaaaaaaaaaaaatttgcaaccaaagggggggggcatttaaaaacctttttaaacccagtccctaaaaattaaaagccttaaaccggggggggctttttaaaaccttaaaaccattaacccttggccttgg

SEQ ID NO: 5694 - DNA, 419 bp, Homo sapiens
gctgtaccctcccggtggagtcgggagggagggaggcagggaaggggacagggggctgcacctgtaataagcccttgttcccatgcacactagcaaagaaaggagagggagctttccccgatgaccctgctggaccacccccatgctcctgtgctggtgaggccgatggagagggatgtgggcataggacacgtctcaagatttccattttacaggcagccggacctgtcttcaggtcccttccttgttgacagacatgggtacaccagaggaagctgggcgctcggcctctgtgcagcctcatctcctgcaatctgagtattgaaaactgggcttttacttcgcacacctcaacacggacttccatgggaatccaggtcacagcaaagcagtcctgggcctacattctcctttaagca

SEQ ID NO: 5695 - DNA, 485 bp, Homo sapiens
tagattaaaatcataatgcatgactaaaaactccttggatttatttcccattttaaaatttttagcggtaagttcagatttataatctttctctagacttccatggtctgaatgttgcctgctgaagtagcaacctaaaaagtatcccctgcttatgcttctccagttggccctccatgtccaaaggcttcgcatctgtgattcagcccactgtgggtcaaaaatatttggggaaaaaaatggatggttgcgcctttgctgaacatgtacaaacttttttttgtcattaaacaatatagtataacaactatttacaaagcatttacattgtattagctattataggtaatctagagatgatttaaagtgtatggtaggatgtgcacaggttatatacaaatactacaccattttctataagggacttgaacatcatggactttagtatcctagggggttcttggaacccatcacccataggggca

SEQ ID NO: 5696 - DNA, 608 bp, Homo sapiens; identical to SEQ ID NO: 1340

SEQ ID NO: 5697 - DNA, 520 bp, Homo sapiens; identical to SEQ ID NO: 1342

SEQ ID NO: 5698 - DNA, 648 bp, Homo sapiens
aagcgtgcgaactggtggcagtgagagacttcggcggacatggctcccagcgtgccagcggcagaacccgagtatcctaaaggcatccgggccgtgctgctggggcctcccggggccggtaaagggacccaggcacccagattggctgaaaacttctgtgtctgccatttagctactggggacatgctgagggccatggtggcttctggctcagagctaggaaaaaagctgaaggcaactatggatgctgggaaactggtgagtgatgaaatggtagtggagctcattgagaagaatttggagacccccttgtgcaaaaatggttttcttctggatggcttccctcggactgtgaggcaggcagaaatgctcgatgacctcatggagaagaggaaagagaagcttgattctgtgattgaattcagcatcccagactctctgctgatccgaagaatcacaggaaggctgattcaccccaagagtggccgttcctaccacgaggagttcaaccctccaaaagagcccatgaaagatgacatcaccggggaacccttgatccgtcgatcagatgataatgaaaaggccttgaaaatccgcctgcaagcctaccacactcaaaccaccccactcatagagtactacaggaaa

SEQ ID NO: 5699 - DNA, 520 bp, Homo sapiens; identical to SEQ ID NO: 1344

SEQ ID NO: 5700 - DNA, 661 bp, Homo sapiens
tacggccgggagaacactggaacgccttcgaaaagatatgggttctgtagccttggatgcagggactgccaaagacagcttatctcctgtgctgcacccttctgatttgatcctgactcgaggaaccttggatgaagaggatgaggaagcagacagcgatactgatgacattgaccacagagttacagaggaaagccatgaagagccagcattccagaattttatgcaagaatcgatggcacaatactggaagagaaacaataaataggagactttagcacacttcacttgtttctagaagtccagaattttggacctccacgtgaaagaactgttcttacctctgagctgggggctcccataagggataattttcctcagagtagcaaagtttctcttattagagaaatcttgtgactcagatgaagtcagggatagaagacccttggacctggcaggttaatgctgattattccttggcctttcccttgtatttatgcaaggaaggatatactgagctgatactcttccaagcctacaacttcaagttttatcatttgaactcaagtacttttgctgctgaggaatggaatcaaaagaacatagtctcctggtaaccacctcagatctctattattaggctagatgtatagcctctact

SEQ ID NO: 5701 - DNA, 355 bp, Homo sapiens
agcgggaggcgcgatcggtccggtcggtggctccccgcggcggggccgggcccgatctcgggcgggaaccgagcgcagagccggtagcgggaaggatgaccacgctcacacgacaagacctcaactttggccaagtggtgaccgatgtgctctgcgagttcctggaggcggctgtgcatctcatcctctacgtgcgcgaggtcaaccccgtgggcatcttccagaaacgcaggaagtacaacgtgccggtccagatgtcctgccacccggagctgaatcagtatatccaggacacgctgcactgcgtcaagccactcctggagaagaatgatgtggagaaagtggtggtggtgat

SEQ ID NO: 5702 - DNA, 587 bp, Homo sapiens
tacggccgggtgcgatggctcacgcctgtactcccagcactttgggaggccgagacgggtggatcatttgaggtcaggacttcgagaccagcctggccaacgtggtgaaaccccatctctactaaaaatacaaaaattagctgggcatggtggcgtgtgcctgtaatcccagctactctggaggctgaggcacaagaatcacttgaatccaagtggatcacttaaggtgaagagttcgagaccagcctggccaacatggtgaaacctcgtctctagtaaaaatacaaaaataagccaggcacggtgatgcacgcctataatcccagctactcaggaggctgagacacaagaatcgcttgaacccgggaggcagatgctgcagtgagacgagatggcaccagtgcactccaccctgggcgacagagcgagactctgtctccaaaaagaaagaaaaatattgtggcactggggcatcaacttgattgaacgtccagaggattatagtctgctgtatatggccatccttggttttaccagtttttcagagctcagtctggggaaaagaaaaaaaaaattatacttcccct

SEQ ID NO: 5703 - DNA, 520 bp, Homo sapiens
gggctggtgaggaatggagccggtaggctgctgcggcgagtgccgcggctcctccgtagacccgcggagcacctacgtgttgagtaacctggcggaggtggtggagcgtgtgctcaccttcctgcccgccaaggcgttgctgcgggtggcctgaatgttcgcatcttaccacatacagttctttacatggctgattcagaaactttcattagtctggaagagtgtcgtggccataagagagcaaggaaaagaactagtatggaaacagcacttgcccttgagaagctattccccaaacaatgccaagtccttgggattgtgaccccaggaattgtagtgactccaatgggatcaggtagcaatcgacctcaggaaatagaaattggagaatctggttttgctttattattccctcaaattgaaggaataaaaatacaaccctttcattttattaaggatccgaagaatttaacattagaaagacatcgactcactgaagtaggtcttttagataaccctg

SEQ ID NO: 5704 - DNA, 568 bp, Homo sapiens
aggctgacccgcggctgattgagtccctctcccagatgctgtccatgggcttctctgatgaaggcggctggctcaccaggctcctgcagaccaagaactatgacatcggagcggctctggacaccatccagtattcaaagcatcccccgccgttgtgaccacttttgcccacctcttctgcgtgcccctcttctgtctcatagttgtgttaagcttgcgtagaattgcaggtctctgtacgggccagtttctctgccttcttccaggatcaggggttagggtgcaagaagccatttagggcagcaaaacaagtgacatgaagggagggtccctgtgtgtgtgtgtgctgatgtttcctgggtgccctggctccttgcagcagggatgggcctgcgagacccaaggctcactgcagcgcgctcctgacccctccctgcaggggctacgttagcagcccagcacatagcttgcctaatggctttcactttctcttttgttttaaatgactcataggtccctgacatttagttgattattttctgctacagacctggtacactctgatttt

SEQ ID NO: 5705 - DNA, 557 bp, Homo sapiens
atatggagagggtatcatcttatttcgtccttcacatctcactaacaagtttgaggacaagactgtggcatatacagagcaaaaaatgaccagtggcaaaattaaaaagtttatccaggaaaacatttttggtatctgccctcacatgacagaagacaataaagatttgatacagggcaaggacttacttattgcttactatgatgtggactatgaaaagaacgctaaaggttccaactactggagaaacagggtaatgatggtggcaaagaaattcctggatgctgggcacaaactcaactttgctgtagctagccgcaaaacctttagccatgaactttctgattttggcttggagagcactgctggagagattcctgttgttgctatcagaactgctaaaggagagaagtttgtcatgcaggaggagttctcgcgtgatgggaaggctctggagaggttcctgcaggattactttgatggcaatctgaagagatacccgaagtctgaacctatcccagagagcaatgatgggcctgtgaaggtagtggtagcag

SEQ ID NO: 5706 - DNA, 514 bp, Homo sapiens
tatttcataatagaagatcttataatccaaggctgagagtttttccagtcttttgtttacatcagaagactccatcttcttggtaaactgaataaaacatagtttgttttgtgccaaaaatgataagatgataaaactgtctgtgagaagagcatcactgatggtgtctgagatgagcttccccaccaggcttctgtcaatcaccactttctccagctgcggcccagaaaggcttagagacaccagcacacctgaaccaaaaaggagctgacagatatatttgttcttccatttgctcagcacacaccgactgttttgcatcagctcctccaactctttgagcgagtctcggagtttttctgggcgtctgtttttgagcgtccaaggataatctcgtgactctgccagcttctgcttcttttctaagttaccgtgctctgtcgctggtggatctttcttgtcataatactggtagatcccaatgtctctatccgcaatgtgtaaggtattcttc

SEQ ID NO: 5707 - DNA, 665 bp, Homo sapiens
cggctgtgtcggtgtatgctccaccagttggaggcttctcttttgataactgccgcaggaatgccgtcttggaagccgattttgcaaagaggggatacaagcttccgaaggtccggaaaactggcacgaccatcgctggggtggtctataaggatggcatagttcttggagcagatacaagagcaactgaagggatggttgttgctgacaagaactgttcaaaaatacacttcatatctcctaatatttattgttgtggtgctgggacagctgcagacacagacatgacaacccagctcatttcttccaacctggagctccactccctctccactggccgtcttcccagagttgtgacagccaatcggatgctgaagcagatgcttttcaggtatcaaggttacattggtgcagccctagttttagggggagtagatgttactggacctcacctctacagcatctatcctcatggatcaactgataagttgcctcatgtcaccatgggttctggctccttggcagcaatggctgtatttgaagataagtttaggccagacatggaggaggaggaagccaagaatctggtgagcgaagccatcgcagctggcatcttcaacgacctgggctccggaagcacattgacctctgcgtcatcagcaagt

SEQ ID NO: 5708 - DNA, 665 bp, Homo sapiens; identical to SEQ ID NO: 1348

SEQ ID NO: 5709 - DNA, 588 bp, Homo sapiens
tacaatgtgggtgagcataacctatttcctggcccaatagacaactctgggctattttcagatcctgagagtcagaaccttgaaagaacacttaattgatgaattggactatgtattggtccctaccgaggcgtggaataaactactaaactggtacggctgtgtagaaggccagcaacccatcgtcagaaaagttgtggagcatggcctgtttgtcaagcactgcaaagtcgaggtgtatttgctggaactgaagctctgtgagaacagtgaccccaccaatgtgctgagttgccatttcagcaaggcagacaccattgcaaccatcgagaaagagatgcggaagctattcaacatccctgcggagcgtgaaacacggctctggaacaaatacatgagcaacacctacgagcagttgagcaaactagacaacactgtccaggatgctgggctataccagggtcaggtgctagtaattgagcctcaaaatgaagatggcacatggcccaggcagaccttgcagtcaaagtaagagaattttttctcccttgttgtaggctcacatgtgcaaaagagacagtctttcct

SEQ ID NO: 5710 - DNA, 723 bp, Homo sapiens
gccggggcccgcccggctgctcctggcgctgtgcgaggccgcgggctgcgggagtgccctgctctggcctcgcttgttgctcttcggggactccatcacccagttttccttccagcagggtggatggggagcatcgctggctgacaggctggtcagaaaatgtgatgttctgaatcgtggattttcaggttacaataccaggtgggccaaaattatccttccaagattaatcaggaaaggaaacagtttggacatcccagtagcagttacaattttctttggggccaatgacagtgcactaaaagatgagaatcccaagcagcacattcccctggaggagtacgctgcgaacctaaagagcatggtgcagtacctgaagtccgtggacatccctgagaatcgagtcattctcatcacgccgaccccaccttgtgaaacagcctgggaagaacagtgcatcatacaaggttgcaaactaaatcgcctgaactctgttgttggtgaatatgccaatgcgtgtttacaagtggcccaagactgtgggactgatgtacttgacctgtggaccctgatgcaggacagccaggacttctcatcttatttatcagatggactacatttgtctccaaggggaatgaatttttgttctcgcatctctggcctttgatagagaaaaaggtctcttctctacctttgctgcttccttactggcgggatgtagca

SEQ ID NO: 5711 - DNA, 606 bp, Homo sapiens; identical to SEQ ID NO: 1351

SEQ ID NO: 5712 - DNA, 671 bp, Homo sapiens
ttcttcactgcctctggcatggatgagatggcagttgaattcctgcatgaactgaatgttccatttttcaaagttggatctggagacactaataattttccttatctggaaaagacagccaaaaaaggtcgcccaatggtgatctccagtgggatgcagtcaatggacaccatgaagcaagtttatcagatcgtgaagcccctcaaccccaacttctgcttcttgcagtgtaccagcgcatacccgctccagcctgaggacgtcaacctgcgggtcatctcggaatatcagaagctctttcctgacattcccatagggtattctgggcatgaaacaggcatagcgatatctgtggccgcagtggctctgggggccaaggtgttggaacgtcacataactttggacaagacctggaaggggagtgaccactcggcctcgctggagcctggagaactggccgagctggtgcggtcagtgcgtcttgtggagcgtgccctgggctccccaaccaagcagctgctgccctgtgagatggcctgcaatgagaagctgggcaagtctgtggtggccaaagtgaaaattccggaaggcaccattctaacaatggacatgctcaccgtgaaggtgggtgagcccaaaggctatcctcctgaagacatctttaatctagt

SEQ ID NO: 5713 - DNA, 601 bp, Homo sapiens; identical to SEQ ID NO: 1353

SEQ ID NO: 5714 - DNA, 440 bp, Homo sapiens
ctaaagaaaatgtacatatatgccatggaataccatgtagccatcaaaaatgaaatcatgtcctttgcagcaacatggatgcagctggagtttattatcttaagtgaattaatgcaggaacagaaaaccaaatattgcatgttctcacaagtgggagctaagcattgggtacacatggacacaaaggggaacaatagacagtggggcttacttgagggtggagggtgggaggagtgtgagggtacaaaaactacttaccaggtactatgttcactacctgagtgacaaaatcatttgtataccaaattgctgtgacacaatttgcccatttaacaaacctgcatgtgtaccccaaacctaaaataaatgttggaattaaaataaaactcatattaaagttttaaaaaagggctttgtattaggtaattttacctaaacgt

SEQ ID NO: 5715 - DNA, 620 bp, Homo sapiens; identical to SEQ ID NO: 1354

SEQ ID NO: 5716 - DNA, 627 bp, Homo sapiens
ccgggggggtcttttgcggctgcagcgggcttgtaggtgtccggctttgctggcccagcaagcctgataagcatgaagctcttatctttggtggctgtggtcgggtgtttgctggtgcccccagctgaagccaacaagagttctgaagatatccggtgcaaatgcatctgtccaccttatagaaacatcagtgggcacatttacaaccagaatgtatcccagaaggactgcaactgcctgcacgtggtggagcccatgccagtgcctggccatgacgtggaggcctactgcctgctgtgcgagtgcaggtacgaggagcgcagcaccaccaccatcaaggtcatcattgtcatctacctgtccgtggtgggtgccctgttgctctacatggccttcctgatgctggtggaccctctgatccgaaagccggatgcatatactgagcaactgcacaatgaggaggagaatgaggatgctcgctctatggcagcagctgctgcatccctcgggggaccccgagcaaacacagtcctggagcgtgtggaaggtgcccagcagcggtggaagctgcaggtgcaggagcagcggaagacagtcttcgatcggcacaagatgctcagctagatg

SEQ ID NO: 5717 - DNA, 590 bp, Homo sapiens; identical to SEQ ID NO: 1355

SEQ ID NO: 5718 - DNA, 568 bp, Homo sapiens
caaaacctggcgtcgctcaaagtagcaccgtcgtctgcgtgatctgcttggagaagcccaaataccgctgtccagcctgccgcgtgccctactgctcggtagtctgcttccggaagcacaaagaacagtgcaaccctgaaactcgtcctgttgagaaaaaaataagatctgctcttcctaccaaaaccgtaaagcctgtggaaaacaaagatgatgatgactctatagctgattttctcaatagtgatgaggaagaagacagagtttctttgcagaatttaaagaatttaggggaatctgcaacattaagaagcttattgctcaatccacacctcaggcagttgatggtcaacctcgatcagggagaagacaaagcaaagctcatgagagcttacatgcaagagcctttgtctgtggagtttgcagactgctgtttaggaattgtggggccatcccagaatgaggagtcttaagatggattattgtgctgcttgctcaagcgtgtgcttgactcctggaacctgcctgctccctctcccagaccagctagtttggggctggggagctc

SEQ ID NO: 5719 - DNA, 448 bp, Homo sapiens
tgttcatttatgcactcatatgatcatttactcattaataaatattgattaaatgcctgccttatgacaggcactgtgctacatactggaagtatgaaagtaaatggtaccaatatatagtcccaatccctgatacctatatgatctagttgagaaagtggacatgaaaatttttaaaaaatatttgcagcatggctaggctttaatagagacacactgcatggctcagtctcagcacactacttctaccacgcaggtctttttcacttaactccatctggacagctttgttctaaatgactaaatttattttttgaaaagtctacacccctccagaattagttagaaaagaatagctagtttctgcatctcacttagctctcgtgtctaagcattttttccagctcttcccagactcttgagtttgagtttgaccatctttaaagct

SEQ ID NO: 5720 - DNA, 610 bp, Homo sapiens
cctttttagggagtccaggtacagtcgccgcgtgcggagcttgttactggttacttggcctcatggcagtccgagcttcgttcgagaacaactgtgagatcggctgctttgccaagctcaccaacacctactgtctggtagcgatcggaggctcagagaacttctacagtgtgttcgagggcgagctctccgataccatccccgtggtgcacgcgtctatcgccggctgccgcatcatcgggcgcatgtgtgtggggaacaggcacggtctcctggtacccaacaataccaccgaccaggagctgcaacacattcgcaacagcctcccagacacagtgcagattaggcgggtggaggagcggctctcagccttgggcaatgtcaccacctgcaatgactacgtggccttggtccacccagacttggacagggagacagaagaaattctggcagatgtgctcaaggtggaagtcttcagacagacagtggccgaccaggtgctagtaggaagctactgtgtcttcagcaatcagggagggctggtgcatcccaagacttcaattgaagaccaggatgagctgtcctctcttcttcaagtcccccttgtggc

SEQ ID NO: 5721 - DNA, 587 bp, Homo sapiens; identical to SEQ ID NO: 1357

SEQ ID NO: 5722 - DNA, 499 bp, Homo sapiens; identical to SEQ ID NO: 1358

SEQ ID NO: 5723 - DNA, 546 bp, Homo sapiens
cttgcgagtggagtgtccgctgtgcccgggcctgcaccatgagcgtcccggccttcatcgacatcagtgaagaagatcaggctgctgagcttcgtgcttatctgaaatctaaaggagctgagatttcagaagagaactcggaaggtggacttcatgttgatttagctcaaattattgaagcctgtgatgtgtgtctgaaggaggatgataaagatgttgaaagtgtgatgaacagtgtggtatccctactcttgatcctggaaccagacaagcaagaagctttgattgaaagcctatgtgaaaagctggtcaaatttcgcgaaggtgaacgcccgtctctgagactgcagttgttaagcaaccttttccacgggatggataagaatactcctgtaagatacacagtgtattacagccttattaaagtggcagcatcttgtggggccatccagtacatcccaactgagctggatcaagttagaaaatggatttctgactggaatctcaccactgaaaaaaagcacacccttttaagactactttatg

SEQ ID NO: 5724 - DNA, 606 bp, Homo sapiens; identical to SEQ ID NO: 1359

SEQ ID NO: 5725 - DNA, 441 bp, Homo sapiens
gtggaaatcgactgcaatttgggaatttccaatgagtttgtggtgctcctggacttacgcaccaaggaggtggtgttcaactgctactgcggggatgtcattggctggactccagactcctccacactcaaaatcttctatggacgaggagaccacatcttcctacaggcgacagaaggttctgtggaggacataagggagatagtgcagagactgaaggtaagggagagagcccggcgatagggcggcgatttgtatggtttcggcctcaggaaccactgaaatacttccctagcccagtcagttaggctaagacacgcactggcccggagagaatcacagttgtcacttacaaactagacatcttgtgggttctgtagctaggttcttcctctggaaggtttgtgccagagatctgtggatcttcatgctattacctcg

SEQ ID NO: 5726 - DNA, 628 bp, Homo sapiens
tggcaagggacttttttacaatttttattttattttctagtaccagcctaggaattcggttagtactcatttgtattcactgtcactttttctcatgttctaattataaatgaccaaaatcaagattgctcaaaagggtaaatgatagccacagtattgctccctaaaatatgcataaagtagaaattcactgccttcccctcctgtccatgaccttgggcacagggaagttctggtgtcatagatatcccgttttgtgaggtagagctgtgcattaaacttgcacatgactggaacgaagtatgagtgcaactcaaatgtgttgaagatactgcagtcatttttgtaaagaccttgctgaatgtttccaatagactaaatactgtttaggccgcaggagagtttggaatccggaataaatactacctggaggtttgtcctctccatttttctctttctcctcctggcctggcctgaatattatactactctaaatagcatatttcatccaagtgcaataatgtaagctgaatcttttttggacttctgctggcctgttttatttcttttatataaatgtgatttctcagaaattgatattaaacactatcttatcttctcctgaact

SEQ ID NO: 5727 - DNA, 346 bp, Homo sapiens
ttttagattatggtaacaatatataatgcctggcataggcagattcaagaaagtttttgattctaaggactttatgactttacccaggcttttttttctgtgagttttctattttcagagtgttggtctgcattatatctaagagactagaagctgcctgatagactaactgcatctggtcccttggaaataatttatcaagtcaacatcgactgctgtggggttctagatttagccatgctgtttattcctcattttgtttctgcagttgtctgagtgctgatctttctttctttctttcttttttttttttggaaaacattttctttttttcccccaggggggg

SEQ ID NO: 5728 - DNA, 570 bp, Homo sapiens
tacggccgggtatttgacagcacagcagggtgactatagtcaataatttcattgtacgtttgaaaataactaaaagtataactggattgtttgtaacacaaataaatgagaagagggataccccattttccatgatgtgattattaggcattgcatacctgtgtcaaaacatctaacgtatgccataaatatatatacctgctatgtacccataaagattaagaattaaaaaaaaataaaagccgaagggcctacagtgcagcaaggcagatgagatgcatccatggaaatgtgaaataacaagtcacagatgctatgagtcagaatgtgtgctgtaggaattcaaacccagaaagcttacttctaagaaggaaaggaaaggtgctgttggagctaagcctcaaaggggagctgaagtttgtatgtgctttttttttttcaaaggtccttgtttttccaaataaaatattgggcagtccaacaaactaaggggaaaaaattcaggcaacgtgacgtgaaggaaaaaaatttttgggtctaaaatgctcccaaaaagggtttgcctaaggg

SEQ ID NO: 5729 - DNA, 643 bp, Homo sapiens; identical to SEQ ID NO: 1367

SEQ ID NO: 5730 - DNA, 371 bp, Homo sapiens
tttctttttcagagatcagaaaaaaaagaaaaaagtcctgaaagaaatggtacagacttatttcaagataaattagaaaccaagtaaaatcagtgtatttttgctaggtacttaaaggactattttgtatcttttaaattatctgttcatcttttaacttgctcatatttataaccttttcacgatgaatgatattagaatacatgactaattatacagaataattttctttttaatttcatttataggagaacctttacaaatagatcacttggtttttgtagtccatgggattggaccagcttgtgatctccgctttcgaagcattgtacagtgtggtaggtttgcaaagcatgtgagagaatattaat

SEQ ID NO: 5731 - DNA, 441 bp, Homo sapiens
cggccgggtgtggtggctcatgcctgtaatcccgcactttggtaggctggggtgggtgggtcacttgaggctatgagggcgagaccagcctcacctacctggcaaaatcctgtctctactaaaaatataagaattagccgagtgtggtggcacacagctgtaatcccagctactcaggaggctgaggcatgagaatcgcttgaacctgggaggcagaggttacagggagccaagatcacaccaccgcactccagcctgggtgacagaggagactctgtattcaaaaaaaaaaaaaggggccctcccccaaattttttcttttttaaaaaaaaacaaaaaaaaatgccttttaaagaaaaaagggtggggaaatttcccccaaaaaccgttttttaaaaaagggccccaaccaattttaaaatttgattttcaaattaaaaa

SEQ ID NO: 5732 - DNA, 816 bp, Homo sapiens
acagtacaaagtttgaaaattttattggaaaataagtacagtctattgatccgtgatgcatgctgtacatgaatttggtgctttaatatacaaaaaatttggcttctgctgcaaaattatataaacaggttaaaaaaaactccttcatcaactagtacaaacataatttatcaaaaatgtcatttaaaaaatggctcaataccttttattgcaaataagaaaggcaagagagggaaaatataaattgtgctaaaccagttttaacaaccggtaattaaatattttgttgcatttgcaaactcttcttcaacacttagggcatctttaaaaaaatgccataaaaaactgcaagaaaatctaattaatgtggaaggcattaaaagttttttgttttgttttagtggggacaataagtcaaaggaagttcacggggaactaggaatgtgtcttcttcctccagaattcaacccttggaagatggggaataactttgcacttatctgtttggatcttcctccacccacgcttatccattgattcgtgtcactccttagatttcagcctgcattctacttgtaattcttggtcatcatcacgcccactctctgggccagttttgtcactaacctaagtttccataattggcttgctttcgtagccctatggcagctgacccattttcgggatgtcagacaaaatcatcctgccaatttagtttggaaagcaccactgtggctttcaagacgggacaacccgtccccagggctccctgtcgtagtctgtgtgtcaaaggaaagctatggcccgtttgtggga

SEQ ID NO: 5733 - DNA, 567 bp, Homo sapiens
  misc_feature 490, 511, 543, 551: n = A,T,C or G
tcaccaggaaccgtttatggccccacccgccccactcagagctgctgagcaatctgctctatcctctgcagcgtctcctctgattctagctgctccaggctgagcagggacaggcccagctgatcctcccggtggaagggctgtgccatctgccgcaggaagtacttggccacctggacaccctcatccacggtcaggttgaggttggcatctgtgaggtgctcctggatccagcggggcagcttcccccgcttgtccccacgggcaaaccgcttgtcggcaaagaccatgaggccgtagtccgtcttgcccctgatggcccgacccacacactgggccgcgtggcgcatggcatcgaaggtaagaaagtcattctcacgaatctggaactggtcccgcaggtattccagccgcgccttgagaatgcggctctgtgtgtagacgtaggggacgccaaacatgatgacggccccgccgtagtggtgcacanagtcgattcccctcgacactntgccccgggccactgacagcaggatggccccngcgccatnctcgcaggccctctgg

SEQ ID NO: 5734 - DNA, 667 bp, Homo sapiens
ggtttcttgttttttattattggcgtcagctaggactatacgtggccttaaacgtcatgcactgatggacagaagagaaaaaaggatgaaaaaaaagacaaaggaggggaaagaggagcagcagtgaaaatttgtaataaaaactcttcttaatttataggtaagttttggcatttttaaatccaacgccccctcccaccccctaaagttccaaccaaagtgagagggtcacagggtgacccggccaggtgttctgcacttccttacaggctgctgtcagaggcagcttgtgggtttaattcttttgtatgtgttttacatttttcactttctttaaataattgcttcttgactcttagacgttccggttcacgggggtgacataattgcggggaaacatgccggtctgcccgtggcaagctcctttccaccagttggggtctgagttatccatgacatggataaaatctccccggcggaagcccagctctccatcctcctggggatcaaagtcaaagagggcctggacgtatgtcggctgctgtggcacctgttctatgtcccgcaggaatatctgctggtttctggagacagatgtagatctgtgataatccaccagctcattcaaagaattgaactcaccacccagaagagtacttccgggctc

SEQ ID NO: 5735 - DNA, 270 bp, Homo sapiens
ttggtaagttttttatatttttttcgtaggggttttatttaaatgtcctttgaagtatgcttgaggagggtgacgggcggtgtgtacgcgcttcagggccctgttcaactaagcactctactctcagtttactgctaaatccaccttcgacccttaagtgtcatatgggctatcgtagttttctggggtagaaaatgtatcccatttcttgccacctcatgggctacaccttgacctaacgtctttacgtgggtacttgcgcttactttg

SEQ ID NO: 5736 - DNA, 133 bp, Homo sapiens
ttttttttttttttttttttttttgcaggcaccaagatttttatttacccaccttcctgctttcttttaacattataggccaaattattctctttttgacccagggttgtgaaaggaaccatctggttataaa

SEQ ID NO: 5737 - DNA, 441 bp, Homo sapiens
ttttttttttttttttttttttttccagtgccgccgcctttattcccagaccctcgagctccacagccacacagacacttagctttcagagggcacaggaaggaaaagggacctggtgaccctcccagcacaccccatagccaagacagacccagcagcagcacctcagggtcagcctgggtgcccctgcccaggggccactgtgaccgcagacaccaggaggccaggcctggttgctggggacccccttggggggcccggcagtatcctaggcccaaagagctggtgccatcttgaagctgattcagggaagaggccaggctggacggtaggggtaggtgtgagaagctccccagcgtgtccaggccacgggagcagcaagggtctgcggggagcccatgctggatggggtggggctgcccctgtcctgtatcctgacca

SEQ ID NO: 5738 - DNA, 458 bp, Homo sapiens
ttttttttttttttttttttttttgagacagagtcttgctctgtcgccaggctagagtgcagaggcgcgatctcggctcactgcaacctctgcctcctgggttcaagtgattctcctgccttagcctcccgagtggctgggactacaggtgtgcaccaccacatccacctaatttttgtatttttgatggagatgagatttcaccatgttggccaggatggtctggaactcctggcctcaactgatccatctgccttggcctctcaaagtgctgggattataggcatgagccactgcatgaggtcttaaaatatattgaaagcaaaaatactctcgtaactgaacatacccaggcaatctctctcacctcaacatggacaacagtaaacaggagttatttatgttgtggatctgaagccagttcttaccttgagaagtctagtctgctctttaaaatc

SEQ ID NO: 5739 - DNA, 217 bp, Homo sapiens
ttttttttttttttttttttttttcggggggctctaagtctttattggggagaatacccacccaccttccctcactgcagacgatagacacactcagtgtcagggtagggtggcaggttcagctggtacttcttttccagagcaggtggcacaaaacgaccccccaggtaatggtagcgaccggtaaactgggttgcagattttttgggggctgtga

SEQ ID NO: 5740 - DNA, 596 bp, Homo sapiens
tttttttttttttttttttttttgagtcaataatgtattatacatcttagatttatacatttcatatatgcctttaaagcttcaattaacagttcaatacaaaatttaaaaacaaatatatgcagcagtggttctcaggcacagaactgaggaggagactggagcaagtcttttccctagcatacatacagtgaatactatgaaccatgagagtggtatgtttccttctgacctagctgcctttttgattgaattttgttacaatgaacagctttaataggtatgatattgctaactggaaacaatgagatttaaaataaattgataacctgtattttcttgaagtctttaagacctaaaatgattacttttctcctaatagagctccagaatcatccaatgaaaataatattgtccataaagcatctagagtatctgcctaagaaccactgcccagggttattcaatgtcttcaggcctcacaggatgaggtaatggtatgatggatttcttctcagtatccctggaaagtgctttcctcatatcataagcgtcctcatcaggctccccgttgctggtcgaatagtactctatga

SEQ ID NO: 5741 - DNA, 193 bp, Homo sapiens
ccaggagtaatcttttatacaaccggttccttcaaacaataatgaaatattcattagcaacagaaattcactgctcctccaacacagttctcaagataattactgatgatatgactcagctgaatctcacaggaatctctccctctctctctctctctctctctctctctctctctctctctctctctctctc

SEQ ID NO: 5742 - DNA, 539 bp, Homo sapiens
ttttttttttttttttttttttttttagctgagacacgttctcactctgtcacccaggctggagtgcagcgccatgacctcagctcacagtagcctcaacctccttggctcaagcaatctcacccatttcagcctccagagtagctgggaccacaggcatgggccaacacacctggctatttttttttttttttttttttttggagagatggggtctctctgttacccaggctcctaacaccattttaaaaagataacaatatttgacaatatatcattaactgccacatgaaaggccttgataaatgctatggtcagaaggaaaagacacattttagctagaatgatcagaaaatcagagccaagatgggcatggggatagagtgggaatgttagctatgccagtaataagaaagaatacctgcataaactggaaataggaaagggaggagaaaggggcaggataaaaggctggcaagcaaaggtaaattccaaggatagtgattaggctaatctcagaaaaacataagaagagaatt

SEQ ID NO: 5743 - DNA, 104 bp, Homo sapiens; identical to SEQ ID NO: 2952

SEQ ID NO: 5744 - DNA, 577 bp, Homo sapiens
tttttttttttttttttttttttagaagagacggggtttcgtcatgttggccaggctggtttcgaactcctgacctcaggtgttccacctgctttggcctcccaaagtgttgggattacaggcgtgagccactgtgcccagccatgcaattcttaaaattacattcttaaaaaaaaaaaattgcattttggctacactttggacatatatggttctctgcatacaggtctcacaggtttctgatgcaaactaaaaagcagtacaaatctggtaaaatctgattgtctgaagcctctcaatctttctgctccttttgggaggtgggggtagaacaggggaataggatttgaagcaggagcgtcatcagtatggaacaatgcagtataaagcatgaaagctgagcaaacagtcagatctggacaagcttctttctctttgttgccaagtttggagtaaaaaatgcctcatcatgtcatggttgtgaagattggactaaatcatgtatgtaagctgcctaacaccgtgcctgatacatagtatatgttcaagaaaagtgaggtattttcattccccttct

SEQ ID NO: 5745 - DNA, 495 bp, Homo sapiens
ttttttttttttttttcttttttggaagccaaatagagttctcctgcataaatatctcacctaaatatttctcttacaaagaatttttcctgttaaaggtgtttgagagacatttaactagtgatattgtaattggcctgtgctcaggggaaacattgatcaataagtcactatgaaaatgttgccatggttttaatggcaaagcacccctgaaaacaagtagctatgtgcctctataacagaatacatggtcctgacgccttattgctttttggagataaacaaaatcattttgttcaaacataagaccaacagtgaataaatataataaacaggttagaatattagctttggggggacgggggatagcggggaaatgaagaactgaaacatgcatatgcacacacatgcatgcatgcacacaccttttttacaccttcaatgtacaacagagtagcttgggtttttacatccctggctaaactacagctgatg

SEQ ID NO: 5746 - DNA, 281 bp, Homo sapiens
ttttttttttttttttttttttactttggctactggggcctcaaggttaggttaatgttaagttgtagttttccttagtcaggagttaagacaccaactgtcttaccctcccattagcttggcacatattcttttactcttgttttaatgttctttcacttaagctataaggtttgtttgtgcttttgtcagtaggaacggcattattaaatattactgagtcacatcagagaaccattaatctagttgtaaagaacatggtgccaaggcggtcattttgt

SEQ ID NO: 5747 - DNA, 514 bp, Homo sapiens
tttttttttttttttttttttttgggagacaaaaaaaaattttattgccataaattaatccagtaggtatatttgagaaagcacgcatcagttggttagggcaataagcgcctctaccacgttgcccatgtgttcccgcaaactgcgttctgctgctgctcgagatatctccatctcagtcattattagctccagatcttccttcttgatagtgacttttgccagttctttctcccgctcctgtttggctttctgctcccgggaccttctgtctccaatcacagacatggccgtctccagattggaactctggatctccttctcctctgcatagtcggtgacccgctccaagtccgccgcaccgctgtcatgtttccgtggcttctccggaggccgctctggtccactggtctcagtctccaactccagctccacatccccctcggtcgccatatctatttcaccacgccgccgcataagccccacctcacgccgacttccggcaactgacaca

SEQ ID NO: 5748 - DNA, 493 bp, Homo sapiens
tgagagacagaggcagcgtgtttgagctgctggtgcggtggtcagcgcgatgcccaaggccaagggcaaaacccggaggcagaagtttggttacagtgtcaaccgaaagcgtctgaaccggaatgctcgacggaaggcagcgccgcggatcgaatgctcccacatccgacatgcctgggaccacgctaaatcggtacggcagaacctggccgagatggggttggctgtggaccccaacagggcggtgcccctccgtaagaaaaaggtgaaggccatggaggtggacatagaggagaggcctaaagagcttgtacggaagccctatgtgctgaatgacctggaggcagaagccagccttccagaaaagaaaggaaatactctgtctcgggacctcattgactatgtacgctacatggtagagaaccacggggaggactataaggccatggcccgtgatgagaagaattactatcaagataccccaaaacagatt

SEQ ID NO: 5749 - DNA, 465 bp, Homo sapiens
tttttttttttttttttttcttttttttataagaaatgacactacagaactgcaatactggtccaacactcttgtctttactcttcttttaaagcaagaaacagaatgcgagtaatcagaaagcactagcaggcatcagttaatccaagatactagctcttagttccaaaagcacttgcaaagaaaaccttttggggggaaggggtggagagggatggaagcactccataataactggaatccctcgagtgtgtatgccaagtctcatgaggctattttttgaatttatcctttacttggtcatggtttttttccctcaaatacaatttttcttttgactttttttcctcaaagtataaaaagtatgaaatataaacaagctcttgcactgcacacttagaagtgtacaattcaagcattatagagctatctacacactgataaatcccatcgaatcttggataa

SEQ ID NO: 5750 - DNA, 334 bp, Homo sapiens
ttttttttttttttttttttttttttcgcactgttgtttcacattctcacagccctcagcacaggtcacgtcccagcccagctctgggactttggttcagggctcaaagcctctggtctgggctgatcgaaaacctcctttgaccctgtggcagtaggcggaccttggctcttctcgtccttacccagagctcagggcagtgccccgtgcagtcgccccacttccacgaaggcctccacgcagcggtcaatgtcttcctcgctatgcaccgctgagatctgtacccggatccgggccttgcccttggggaccacggggtagctgaacccgatga

SEQ ID NO: 5751 - DNA, 460 bp, Homo sapiens
tttttttttttttttttttttcaagactattttcctgcgcctcatctgccctcagagagaatgatccccacagtgatgaggggtcagcactctgaaagccagttgacgccagacaagctgctggaacagctggggcacagctccgcctctcctccagcccctcggtcccatgaggccaaacaatgaggacagaggggctgaggggtgtgtccagggcccagtcccacctcagcaggaaggtggcgtcagcactcgcagtcccagcctcacgccgcatcgcagtcccaggggatcttcacacagggagggtgagctggttaagaaggcgggtgatcctccccccggatgcttcgatacttagccatgtcttccggaaatactttagaaagttcttgaatcaacaggcttttaaatttcttcatggtgtcgatcttgcctttaacttgctcatttttagcta

SEQ ID NO: 5752 - DNA, 466 bp, Homo sapiens
ttttttttttttttttttttttaaacatttttaccttaactatgaggcaggaaggataatcttcagggaaatgtatcaagttccaagtagttaaagtgattcctttaaatcactattattgggatcctaatcagaaaaattaattttctgctagatatgataaggtggtgcttttagagttggaaaattttcaaaaattcttctaatcttgggccagtaaagatacattttccttacaaactaaatgcatacactttgggagagaatcattggcagaagccacttacctccagctccttagaaggaattccttgatctagcaaaccccgcaggactcgaatgactgattttaagttggcacccgtgtatttaccagagggaagcactttgacgacagggagtacagcgagctcatcgtttgtcagaaaggaatgatctaataggaagacagcaatttaaaaacagt

SEQ ID NO: 5753 - DNA, 295 bp, Homo sapiens
tttttttttttctttttttttttttttgtagagacggggtttcaccacattggccaggatggtctccatctcttgacctcacgatctgcccaccttggcctcccaaagtgcctgggattataggcgtgagccactgcacctggcctcagtgaagtttttccaaacctcctgattagaccaattccctgttatatttatttattcattcctctaacaaacatctatggagcacctaacgtgtgtcagatactgttcttgctactggagacagagcaatgaccacaatcaaagcttt

SEQ ID NO: 5754 - DNA, 524 bp, Homo sapiens
ttgtttaatcacattttaacataaatcatctattccggattacaattttatgtggtccactatcagccccattttatgagggaacccaggattggagacgttaaatgccttgcctaacgtcacttagcaagtaagtcacaaagacagggaatggtggtctgactctagaatctcttatccctgtgtcatgctgggaactgtgagtattctgtccccatgacacaggaggccctgacaagacaattttagctcatgtgactgggactttacagcttaaagaatgaatctttaacacatgctagaattaacatatttgatattagttatccttcacagctgtcacactcttggaaggccattcggtccaataaagctacacaaaacatttctggcataagccatgttaaaaaataatcttatctcagtacatacgccacacttaaaacacacatacacagagacttcaacactcaatttactcatcaaacttagttccattagacacctggtctttaaaaaagcct

SEQ ID NO: 5755 - DNA, 632 bp, Homo sapiens
aggagccaagaggcggcggtggtcgcactctccttgaggcgccggttgccggccacaacccttggcggagcctgcctgcaggcctcccgaggagcccagacagctgcagccacagctccccgtatcaagaaatttgccatctatcgatgggacccagacaaggctggagacaaacctcatatgcagacttatgaagttgaccttaataaatgtggccccatggtattggatgctttaatcaagattaagaatgaagttgactctgctttgaccttccgaagatcatgcagagaaggcatctgtggctcttgtgcaatgaacatcaatggaggcaacactctagcttgcacccgaaggattgacaccaacctcaataaggtctcaaaaatctaccctcttccacacatgtatgtgataaaggatcttgttcccgatttgagcaacttctatgcacagtacaaatccattgagccttatttgaagaagaaggatgaatctcaggaaggcaagcagcagtatctgcagtccatagaagagcgtgagaaactggacgggctctacgagtgcattctctgtgcctgctgtagcaccagctgccccagctactggtggaacggagacaaatatctggg

SEQ ID NO: 5756 - DNA, 634 bp, Homo sapiens
tatccaaagtgtgtacatcagtaagatcataagcagtgatcgagatctcttggctgtggtgttctatggtaccgagaaagacaaaaattcagtgaattttaagaatatttacgtcttacaggagctggataatccaggtgcaaaacgaattctagagcttgaccagtttaaggggcagcagggacaaaaacgtttccaagacatgatgggccacggatctgaccactcactcagtgaagtgctgtgggtctgtgccaacctctttagtgatgtccaattcaagatgagtcataagaggatcatgctgttcaccaatgaagacaacccccatggcaatgacagtgccaaagccagccgggccaggaccaaagccggtgatctccgagatacaggcatcttccttgacttgatgcacctgaagaaacctgggggctttgacatatccttgttctacagagatatcatcagcatagcagaggatgaggacctcagggttcactttgaggaatccagcaagctagaagacctgttgcggaaggttcgcgccaaggaggccaggaagcgagcactcagcaggttaaagctgaagctcaacaaagatatagtgatctctgtgggcatttataatctggtc

SEQ ID NO: 5757 - DNA, 455 bp, Homo sapiens
gaaagtcttcagttactatttggcctttcctagatccaaacacggggactgcaaaaaaaggctgtgtgcatccgctgtctactccactgcctcctttgcaaaggcggatttccctgactgaaaaccatgttgcaggcccacagctgcctacagaaccgtcccaaaatatggcaaagaaacctattctgagcggtagggtctcaccatgttgcccaggctggtcttgaactcctggactcatcctaaagtgctggcctctcattccctgtctgtgcacacctaacggcaagggccagcctgtttcctcccggtcacctccaaatcttgctgcttttaattcaactcaaaggcctacccagggttgagttctcacccacctgtcccgccctgccttgttacctggaagcacagccttggggactgagcaggccctcactgtcactttaaaaagggaa

SEQ ID NO: 5758 - DNA, 596 bp, Homo sapiens; identical to SEQ ID NO: 1381

SEQ ID NO: 5759 - DNA, 549 bp, Homo sapiens
  misc_feature 354: n = A,T,C or G
aagctcatcatcctggaacactattctcaggcgagcgagtgggcggctaaatacatcaggaaccgtatcatccagtttaacccagggccagagaagtacttcaccctggggctccccactgggagtaccccacttggctgctacaagaagctgattgaatactataagaatggggacctgtcctttaaatatgtgaagaccttcaacatggatgagtacgtgggccttcctcgagaccacccggagagttaccactccttcatgtggaacaacttcttcaagcacattgacatccacccagaaaacacccacattctggatgggaatgcagtcgacctacaggcagaatgtgtngcctttgaagagaagatcaaggctgcaggtgggatcgagctatttgttagaggcatcggccctgatggacacattgccttcaacgagccaggctccagtctggtgtccaggacccgtgtgaagacgcttgccatggataccatcctggccaatgctaggttcttcgatggagaactcaccgaggtgcccaccatg

SEQ ID NO: 5760 - DNA, 474 bp, Homo sapiens; identical to SEQ ID NO: 1385

SEQ ID NO: 5761 - DNA, 484 bp, Homo sapiens
atcacacagatggagtagtagcttgtgctgctggactaataggggacttatgtacagcatttgggaaggatgtactgaaattagtagaagctaggccaatgatctatgaattgttaactgaagggcggagatcgaagactaacaaagcaaaaacccttgctacatgggcaacaaaagaactgaggaaactgaagaaccaagcttgatctgttaccattgggatgataacctgaggacccccactggaaatctcccatcttttgaaaaacctggaagtgaggagtgtgcacggatgctgaatgtttgggaatgagaggatgagtgagtgaggcttgaaaacacaccacattgaaaatcctgccacagcagcagccgcagccgccaacagcagcgctgttagtgagctaagtaagcactgacttcgtagaaaaccataacatcggccatcttggaaaagagaaaaacaatggagttacttatttaa

SEQ ID NO: 5762 - DNA, 492 bp, Homo sapiens
gtcacctttctgctgtataatacagcgtaaccctacttgagacatttccatttaaattgctctgttccacatgtgttcatcctgtccttgctgtaactgtgtaggtgggtgacaacattttcgaactgtatatttgtcacctctgttagtctatctctaagaacacagccaataagacatcacttgacaagccattaccttattgaccaagactattttgtgaatcaaatgcaatgtgacttgaaaatcaaatcgtttcaatggtcatttaagttgttaattttaaaaaatggtcatttcagcttgatgcataagagcgttctttgcaggaacttcatttttgactacaaaggctttgaattttattttgctgcttgcagtaattttgttttctttttcttccagggtatatgagaaaatattgactcctatctggccttcatcaactgacctcgaaaagcctcatgagatgctttttcttaatgtgatttt

SEQ ID NO: 5763 - DNA, 537 bp, Homo sapiens
aaaccggtggcttctgattctacatattttgcttggtgcccggatggtgagcatattttaacagctacatgtgctcccaggttacgggttaataatggatacaaaatttggcattatactggctctatcttgcacaagtatgatgtgccatcaaatgcagaattatggcaggtttcttggcagccatttttggatggaatatttccagcaaaaacaataacttaccaagcagttccaagtgaagtacccaatgaggaacctaaagttgcaacagcttatagacccccagctttaagaaataaaccaatcaccaattccaaattgcatgaagaggaaccacctcagaatatgaaaccacaatcaggaaacgataagccattatcaaaaacagctcttaaaaatcaaaggaagcatgaagctaagaaagctgcaaagcaggaagcaagaagtgacaagagtccagatttggcacctactcctgccccacagagcacaccacgaaacactgtctctcagtcaatttctggggaccctgag

SEQ ID NO: 5764 - DNA, 532 bp, Homo sapiens
tttccctgttagacatgggcactccacagaaggatgttattatcaagtcagatgcaccggacactttgttattggagaaacatgcagattatatcgcatcccatggctcaaagaaagatgattatgaatactgtatgtctgagtatttgagaatgagtggcatctattggggtctgacagtaatggatctcatgggacaacttcatcgcatgaatagagaagagattctggcatttattaagtcttgccaacatgaatgtggtggaataagtgctagtatcggacatgatcctcaccttttatacactcttagtgctgtccagattcttacgctgtatgacagtattaatgttattgacgtaaataaagttgtggaatatgttaaaggtctacagaaagaagatggttcttttgctggagatatttggggagaaattgacacaagattctctttttgtgcggtggcaactttggctttgttggggaagcttgatgctattaatgtggaaaaggcaatcgaatttgttttatc

SEQ ID NO: 5765 - DNA, 637 bp, Homo sapiens
cggggccaggcccgcgagcaccctgctgcccgccagattgagctggacctgaaccggaccttccccaacaacaaacacttcacctgccccacctccagcttccccgacaagctccgccgggtgctgctggccttctcctggcagaaccccaccatcggctactgccagggcctgaacaggctggcggccattgccctgctggtcctagaggaggaggagagcgccttctggtgcctggtggccattgtggagaccatcatgcccgctgattactactgcaacacgctgacggcatcccaggtggaccagcgggtgctccaggacctgctctcggagaagctgcccaggctgatggcccatctggggcagcaccacgtggatctctccctcgtcaccttcaactggttcctcgtggtctctgcggacagtctcattagcaacatcctccttcgggtctgggatgccttcctgcacgaggggacgaaggtggtgtttcgctatgccttggccattttcaagtacaacgagaaggagatcttgaggctacagaatggcctggaaatctaccagtacctgcgcttcttcaccaagaccatctccaacagccgctgatgaacatcgccttcaatgacatgaa

SEQ ID NO: 5766 - DNA, 522 bp, Homo sapiens
tccctggctgacagaggaaccctggaaaattacttcgcgcttgatggagaaggacaaggccagagattgcccgattcctatggggataacctctgagaatgtggctgagcggtttggcatttcacgggagaagcaggatacctttgccctggcttcccagcagaaggcagcaagagcccagagcaagggctgtttccaagctgagattgtgcctgtgaccaccacggtccatgatgacaagggcaccaagaggagcatcactgtgacccaggatgagggtatccgccccagcaccaccatggagggcctggccaaactgaagcctgccttcaagaaagatggttctaccacagctggaaactctagccaggtgagtgatggggcagctgccatcctgctggcccggaggtccaaggcagaagagttgggccttcccatccttggggtcctgaggtcttatgcagtggttggggtcccacctgacatcatgggcattggacctgcctatgccatcccagtagc

SEQ ID NO: 5767 - DNA, 344 bp, Homo sapiens
ctgtatgtaccgaggtaaattattccatccagttgcatctctttttatcttcctctgttaaataatagtatactccacagagagctcctgtgagattaaatgagctatgcacgtgatgttattctgttacctaaaatggagaccagtgtttgtctaatggagtgtagtggttacagacacaggctctagtgctaggctatgtgttcaaatcttaattcagttattttttagctgtctggccctttcataagttattttgccatactgagccttggttccccatctgagaagttgaaatttaaaaaaatccctcttactgtgtcatcataaggactaactaattg

SEQ ID NO: 5768 - DNA, 647 bp, Homo sapiens
ccttctgctctttacattccttaagaagaaccgaaagaagaagcttatggtcttcttttcatcttgtatgtctgtgaaataccaccatgagttgctgaactacattgatttgcccgtcttggccattcatggaaagcaaaagcaaaataagcgtacaaccacattcttccagttctgcaatgcagattcgggaacactattgtgtacggatgtggcagcgagaggactagacattcctgaagtcgactggattgttcagtatgaccctccggatgaccctaaggaatatattcatcgtgtgggtagaacagccagaggcctaaatgggagagggcatgccttgctcattttgcgcccagaagaattgggttttcttcgttacttgaaacaatccaaggttccattaagtgaatttgacttttcctggtctaaaatttctgacattcagtctcagcttgagaaattgattgaaaagaattactttcttcataagtcagcccaggaagcatataagtcatacatacgagcctatgattcccattctctgaaacagatctttaatgttaataacctaaatttgcctcaggttgctctgtcatttggtttcaaggtgcctcccttcgttgatctgaacgtcaacagtaatg

SEQ ID NO: 5769 - DNA, 488 bp, Homo sapiens
cagaagagaagaatgtattgttgaactcccttcagaaagaagataagagcccagagacagggacagcagggggcagtagcacagcaagttattcagcaggagggggcttataggggaatgctaactcacctgcccacctgagaggaccagaacagacgtctgggcagacggctaaggatccctctgtcagcattcgctatttggcagcagtaaacaccggtgctataaaagctgatgacatgccacctgttcaagggaccgtggctgagcattcctttcttcctgctgagcagcaggggtctgaagacaacttgaaaaccagtaccaccaaatgtattactggccaagaatcaaaaattgctccttcccacacaatgatccctccaactacttacagtgtagctctgttggctcctaaatgtgagcaggacttgactataaagaatgattatagtggcaaatggactgatcaagcatctgctgagaaa

SEQ ID NO: 5770 - DNA, 658 bp, Homo sapiens; identical to SEQ ID NO: 1393

SEQ ID NO: 5771 - DNA, 630 bp, Homo sapiens
aacatagtgaaaccccatctctactaaaaatacaaaaatcagccgggcatggtggcgcacacctgtaatcccagctactctggtggctgaggcatgaaaattgcttgaaccagggaggcggagattacagtgagctgagatcctgctactgcactccagcctgggtgatagagtgagagactgtctcaaaaccaaaccaaaacaaaacattgtatataaataaatgttatagcttgttatatggcttttaaaatgtaaatatgtatcaggtagtttgtagctataacaagaagtgatatctctaaaatacgcactgttaatttgtagtagaatccattaaatgtctaaatttctttttatttaaaataatgcagaatttggctggggatggtggctcacacttgtaatcccaacactttgggaggccatggcggatggatagcttgagctcagaagttcaagacaagcctggcaacatggcaaaaccacgtctctaaaaagaatagaaagaaattagccgagtgggtggcacacacttgtagtctcagctcctcaggaggctgaggtgggagcatagcttgagcccaggaggcagaggtttcagtgagctgagatcatgccactgcactc

SEQ ID NO: 5772 - DNA, 459 bp, Homo sapiens
gcggctaccttactagctgttcggggagccgggccagcaccggcttgggggccggaggcgttcactccagactgggaaagccgagaagtctccactgggaccactatcatggccgtgcagtttgacgggggcgtggttctgggggcggactccagaacaaccactgggtcctacatcgccaatcgagtgactgacaagctgacacctattcacgaccgcattttctgctgtcgctcaggctcagctgctgatacccaggcagtagctgatgctgtcacctaccagctcggtttccacagcattgaactgaatgagcctccactggtccacacagcagccagcctctttaaggagatgtgttaccgataccgggaagacctgatggcgggaatcatcatcgcaggctgggaccctcaagaaggagggcaggtgtactcagtgcctatggggggtatgatg

SEQ ID NO: 5773 - DNA, 561 bp, Homo sapiens; identical to SEQ ID NO: 1395

SEQ ID NO: 5774 - DNA, 556 bp, Homo sapiens; identical to SEQ ID NO: 1396

SEQ ID NO: 5775 - DNA, 587 bp, Homo sapiens
ctggcgggcgcggggaaaaggcggcggcggcggcggcggctgcagctacgaacgggaccggaggaagcagcgggatggaggtggatgcagcagtagtccccagcgtgatggcctgcggagtgactgggagtgtttccgtcgctctccatccccttgtcattctcaacatctcagaccactggatccgcatgcgctcccaggaggggcggcctgtgcaggtgattggggctctgattggcaagcaggagggccgaaatatcgaggtgatgaactcctttgagctgttgtcccacaccgtggaagagaagattatcattgacaaggaatattattacaccaaggaggagcagtttaaacaggtgttcaaggagctggagtttctgggttggtataccacaggggggccacctgacccctcggacatccacgtccataagcaggtgtgtgagatcatcgagagccccctctttctgaagttgaaccctatgaccaagcacacagatcttcctgtcagcgtttttgagtcagtcattgatataatcaatggagaggccacaatgctgtttgctgagctgacctacactctg

SEQ ID NO: 5776 - DNA, 614 bp, Homo sapiens
ttgggagctggaactgaatgggacagaagcgaattagtgcggaaagttgccggggaaaaaacacggtcactttcaacattaacaacagcatcccaccaacatttgatggtgagggggaaccctcgcaagggcagaaggttgaagaacaggagcctgaactgacatcaactcccaatttcgtggttgaagttataaagaatgatgatggcaagaaggcccttgtgttggactgtcattatccagaggatgaggttggacaagaagacgaggctgagagtgacatcttctctatcagggaagttagctttcagtccactggcgagtctgaatggaaggatactaattatacactcaacacagattccttggactgggccttatatgaccacctaatggatttccttgccgaccgaggggtggacaacacttttgcagatgagctggtggagctcagcacagccctggagcaccaggagtacattacttttcttgaagacctcaagagttttgtcaagagccagtagagcagacagatgctgaaagccatagtttcatggcaggctttggccagtgaacaaatcctactctgaagctagacatgtgctttgaaatga

SEQ ID NO: 5777 - DNA, 589 bp, Homo sapiens
  misc_feature 490: n = A,T,C or G
gcttaaggacaccaggcaggcgcgacagccttcagcctctccctctgcggttttggccggttcctttaacttgccttcatctggggctgtttggtatttccacgtgccttgggcccgcccactgcagcctccatcttggaagcggccgccggcgcctagaactgtatttcagaaaaaagaaattacagttttagcatgcagaaaggaaaagggagaacaagccggatcagaagacgaaaactctgcggaagttctgaatcaagaggagtgaatgagagccacaagtctgaatttatagagctgaggaagtggctgaaagctaggaagtttcaagattcaaacttagcgcctgcttgttttccaggtaggatctagccttcagctgtcctgccctttcccacacgagagccaggtagacagcaggggccactcttgcaggtgggcctcagcagatattgtccttcagctggtttgcatgtgttccccttgngttggaggaggagtcccctgtgtatggccagttaattgcagagcagtgggcttcagcactgaactgaggtagactgacattcttctctggaacttgtgc

SEQ ID NO: 5778 - DNA, 442 bp, Homo sapiens
atcggcccaagccgcacctggacagcaagatgctggctgcctggaatggcttgatggtgtcaggctatgctgtgactggggctgtcctgggccaagacaggctgatcaactatgccaccaatggtgccaagttcctgaagcggcacatgtttgatgtggccagtggccgcctgatgcggacctgctacaccggccctggggggactgtggagcacagcaacccaccctgctggggcttcctggaggactacgccttcgtggtgcggggcctgctggacctgtatgaggcctcacaggagagtgcgtggctcgagtgggctctgcggctgcaggacacacaggacaggctcttttgggactcccagggtggcggctacttctgcagtgaggctgagctgggggctggcctgcccctgcgtctgaaggacgaccaggatggagc

SEQ ID NO: 5779 - DNA, 530 bp, Homo sapiens; identical to SEQ ID NO: 1397

SEQ ID NO: 5780 - DNA, 628 bp, Homo sapiens
ggtcgctggggcgcgtctttcccacccgaggccaccagggtgactgcgggattccgatctgcgccggagctgcgatgctagagcactcttgccacccccaccccacggacgtgttgcagtgatatcagaattttgcgtgcggtttacccgtgtttaacctctttgcgtctcgcttctgaatcgtatccacttgagcatcactagactgatctattttaacactggtggggggcagcgaggacatggttttaaactttaaaatgaaaatgtgaaactaggaatgttgctgtgagaccccttggacaaacagatttttgcactggggatagaacttgagccatttctgtcttggcctcgccactgacgtcccttctttcctgtggggacaggatggacagattcctggtgaaaggggctctagggggccttttgaggaagcaggaggagcaagagccaactggagaagagccagctgtgttgggaggagacaaagaaagcacaaggaagaggcccaggagagaggccccagggaatggaggccactcagcaggccctagctggcggcacattcgggctgagggcctggactgcagttacacagtcctgtttggcaagctgagcagatgag

SEQ ID NO: 5781 - DNA, 559 bp, Homo sapiens
tacggccgggtatgcctcatgatattgttgcatctgaagatgggactgtgtacattggagatgctcataccaacaccgtgtggaagttcaccttgactgagaaattggaacatcgatcagttaaaaaggctggcattgaggtccaggaaatcaaagaagccgaggcagttgttgaaaccaaaatggagaacaaacccacctcctcagaattgcagaagatgcaagagaaacagaaactgatcaaagagccaggctcgggagtgcctgttgttctcattacaacccttctggttattccggtggttgtcctgctggccattgccatatttattcggtggaaaaaatcaagggcctttggagattctgaacacaaactcgagacgagttcaggaagagtactgggaagattagaggaaagggaagtggaggcttaaaccttggtaatttctttgcaagccgtaagggccacagtcgaaaagggtttgaccggcttagcactgagggcagtgaccaagagaaagaggatgatggaagtgaatcagaagaggagtattcagca

SEQ ID NO: 5782 - DNA, 605 bp, Homo sapiens
ctgccaagttagcaatgaatgtttcccatttcttcttagtttatggactttccataaactcaggatggcagtttggttggttggagaaggatatggtgatggcgggagttacaatacattacttataggggaagataggcttttgaaaggttaaagcttaaatgtgagagtggaaaagggatgaatgaatgaacatgatgaggtgagagggaagaggtaaagggaaaaggagaacaagaaactcttctctgcgtggcacctgggatgaatggtttctggggacatccctgatggcagttttgtggagaggtgcaaagctttatgtgttaagaaatgagctgtaggctcagtgcagtggctcacgcctgtaatcccagcactttgggaggccgaggtgggcggatcatgaggtaaggagttcgagagcagcctggccaacatggtgaaaccgtgtctctccaaaaaatagaaaaaacatccctgtatggtggtgagcacctgtagtcccagttactcaggaggctgaggcatgagaatcgcttaaacctcggaggcggaggctgcaatgagctgagatggtgccactgcactccagcctgggtgac

SEQ ID NO: 5783 - DNA, 552 bp, Homo sapiens
aggtctgcgaggctaagtgtctccgcggcgcacctcgcggcgagaatccggaggagaaggagactgcaaggataggcccaggaaaacgaagagatggagcagcctatgcagaatggagaggaagaccgccctttgggaggaggtgaaggccaccagcctgcaggaaatcgacggggacaggctcgccgacttgcccctaattttcgatgggccatacccaataggcagatcaatgatgggatgggtggagatggagatgatatggaaatattcatggaggagatgagagaaatcagaagaaaacttagggagctgcagttgaggaattgtctgcgtatccttatgggggagctctctaatcaccatgaccatcatgatgaattttgccttatgccttgactcctgccatttatcatgagattaatactgtgattcccgctgttttctttttccttgcattttcctaatatgcctttactgatccgtttgctgtgaaccctatgttatttccatgtgtcaagtgggtcttgtgttgccagcttctatttgaag

SEQ ID NO: 5784 - DNA, 576 bp, Homo sapiens
caacaagttccattaatgcttaagctaataatgtaggttgggttttctgttactttcaactgcaggaggcttacctgttacaacagactctctcaattcaatttcacccaagttaagaatcaattaggactcaacaacaaaaagacaaatgacccaatttaaaatgagcaaatgttatgaatagacatttccccaaagaaggtgtacaagtagccaataaactcttgaaaagatgttcaacgtcattaatcattaagaaaatgcaaatcaaaaccacaatgagatataactttacaccccctaggatggctgtaataaaaaatatgaacaacaagtgttggcaaggatatggagaaattagaacccttgtaccttgctggtaggaatgtaggtggtacagccactttggaaaacagtctggcaggtcctcaaatgattaaacatagagttaccagctattctactcctaggtatatacccccaaaacatggaaatatatggccgcaaaaagttttgtacaagaatgctcatagtacttgtattcataacagcccaaaatggaaaacaactcaaatg

SEQ ID NO: 5785 - DNA, 99 bp, Homo sapiens
ataaatcacataggcagcctgctaaatggctatgataagcccttcagtggaaatagagatttagctgtgataatactgctaacttattgcacctgacca

SEQ ID NO: 5786 - DNA, 547 bp, Homo sapiens
cggccggggctggcaagaagaattttaaagcttaaaataggtggtaaatttgaagtatgagtgtgttccgagaaacataggcttttcaaaaaaatttttattcaaggcaaagcaaggaacatcttgagatatgtctcaagaatataaagatgtattattttaagccaaggagctgaaatatatctcagtttataaattcaggtatattctttttgtctccatggcaaccataacttttgaaccaaaaaaaattgtttttacatctttatgctgaaaatgtgtttagattaggaatatggtcgggctgaatttgctgttgctccctaaccaaatccacctcttgttttccttgtgagtccatggctaaatcaaagctgcccctgagaagagacttaatccaagcctgattgtactagtggcatcacttagaagtaggctttccctcttcctagtagatctcaatgttttataattccttgaaacagctgaaaattgggacaacatactttacgcaatgaacagtagttaaataggaaataaactagtt

SEQ ID NO: 5787 - DNA, 436 bp, Homo sapiens
cagggtggcatgcacctgtagtcccagttactcaggaggctcagatgacaggatctcttgaacgcatgcggtggtgcctgcagtgtgccatgatcatgccactgtactccaacctgggcaacagagcaagaccctatctcagaaaaaaaaaaaaaggcatggattttttagcctttttagttttaaaaaatcctttttatgaccttttttaatttagcctttttttaaaaatttggcccaaatattggctaatcacttttaaaaattaatttttagcctattccccccaaaaaacctttaaaaataaaaacctggagtttttcgggaaattctgttttttcgggggcctaatattaaaaatccctttttttgttgggatcccaaagggttccccattttataataacctcacttgggggggaaatttgggaaaaaa

SEQ ID NO: 5788 - DNA, 325 bp, Homo sapiens
tacggccgggctaatttttgcatttttaatagagaggggtttcaccatgttggccaggctggtctcgaactcctgacctcaggtgattcaacttccttggcctcccaaagtgctgggattacaggcatgagtcaccgcacccagccaagactgagctcttttaatgcccatataccgagggtagaaatctacaaaacatatgacctgcaaactgaatgatcaggaaaggatcctaaccaccagaatgggcaggcagagttgtaaaaaaacaggggatgagagtttccacccactacatgcgtctctgacatttctgcaggcaccc

SEQ ID NO: 5789 - DNA, 488 bp, Homo sapiens
tacggccgggcgtggtggctcacgcctgtaatcccagcactttgggaggctgaggcaggtggatcacctgaggtcaggagttcgagaccaacctggtcaacatggcgagaccccatctgcactaaaaatacaaaaattagccgggtgtggtggcttatgcctgtaattccagctactccagaggctgaggcacgagaattgcttgaaccccgggaggcggaggctgcagtggcaaaatgttgattttctaattctctcattctttttgtacttttttatctggaattcttctatggagacaaagtattctccattaattacttggcgaccttggggttctgcctggggacaggcgtggtggctcacgcctgtaatcctagcactttgggaggctgaggcaggcagatcacgaagtcaggagatcgagaccatcctgaccaacatggtgaaaccctgtctctactaaaatacaaaaaaaaaagtacccg

SEQ ID NO: 5790 - DNA, 544 bp, Homo sapiens
ctaattttgtatttttagtagagacggggtttctccatgttggtcaggctggtctcaaactcatgacctgaggtgatctgccagcctcagcctctccaagtgctggaattacaggtgtgagccaccacacccagccaggaaaaagctttaaagtggctattatactgttctctgagaggatgaactctctgaaagaagtaaaaagacagaaaatctcaacagaggaacaaaattaaaaaactacacaaatgacaaaaagcacattagaagacactcagtgtcattagtcattaggaaatgcaaatccaaaccaaagaagtgaaagatctccacaatgaaaaccataaaacattgatgaaagaaactggagaatgtcaaaataatggaaagataactccacggtcatggtttgaatcaatattgtttatctccttcaagaacaaaaaaagaaaaatgaaaaaagaatcaatgttgttaaaatgtccacaccaaatgaagaaatctatagattcaccaaaatccctataaaaatatcaataacatt

SEQ ID NO: 5791 - DNA, 540 bp, Homo sapiens
  misc_feature 438: n = A,T,C or G
agggaagagagggcccctcctgcagggcctcacctgggccacaggaggacactgcttttcctctgaggagtcaggagctgtggatggtgctggacagaagaaggacagggcctggctcagcgtgattctgggggtccacttgtctgtaatggtgtgcttcaaggtatcacatcatggggccctgagccatgtgccctgcctgaaaagcctgctgtgtacaccaaggtggtgcattaccggaagtggatcaaggacaccatcgcagccaacccctgagtgcccctgtcccacccctacctctagtaaatttaagtccacctcacgttctggcatcacttggcctttctggatgctggacacctgaagcttggaactcacctggccgaagctcgagcctcctgagtcctactgacctgtgctttctggtgtggagtccanggctgctaggaaaaggaatgggcagacacaggtgtatgccaatgtttctgaaatgggtataatttcgtcctctccttcggaacactggctgtctctgaagac

SEQ ID NO: 5792 - DNA, 367 bp, Homo sapiens; identical to SEQ ID NO: 1400

SEQ ID NO: 5793 - DNA, 214 bp, Homo sapiens
  misc_feature 27, 28, 31, 34, 41, 42, 44, 46, 49, 57, 60, 63, 73, 77, 80,82, 87, 89, 93, 96, 99, 103, 107, 114, 118, 121, 122, 125,129, 136, 143, 146, 149, 152, 156, 166, 174, 175, 182, 190,193, 199, 207: n = A,T,C or G
ctttctctttttttctttttttttttnnagncgnagtttcnntntngtngcccaggntgnagngcaggggccnaatnttngntaacnanaacntcngcntccnaggntaaagcnattntcnngcntaancctcccnagaagtnggnatnacnggcntatgccaccntgcccggnngattttngaattttnagnaaaaanggggtttntgcatgt

SEQ ID NO: 5794 - DNA, 605 bp, Homo sapiens; identical to SEQ ID NO: 1401

SEQ ID NO: 5795 - DNA, 596 bp, Homo sapiens
ttttttttttttttttttttttttactggctagaaatttttattatttgcgaggcagtaagtgctcttgagagcaggcacagtgctgggaacactaggccccttcgggacaaaccagggccttaaggaaaggggcttcggctttggcttgagggaaggcacataactgggacaggccctggccgggagtattcagaagccaagtgggttgctggtgaccacaccaccccgctccaccaaggccttggagatgcttttgaagttgcggtagagctcttgctgccaggggtcagactgcagggcggccatgccccctcggatccgagctgcagcctcgatacaccaggtgtcacagagcattttctcatgctgggccgtggggtgccctcactcagggatcttgaggccctcgagagaaccaccaccatggcatagaggtcgatggccccgtctgccagccgctgcagcagaaactgttcattgacaatccccttcttgtgttttatcagcttggcctccaccacagtggcaaactgctccagagcccgtactgccagctcgccactccgactcaactccgggtggacaagtccgctg

SEQ ID NO: 5796 - DNA, 514 bp, Homo sapiens; identical to SEQ ID NO: 1404

SEQ ID NO: 5797 - DNA, 385 bp, Homo sapiens
tttttttttttttttttttttttaatagagatgaggttttaccatgttggcaaggttagtctcaaactcctgacctcaggtgatctaccagcctcagcctcccaaagtgctgggattacaggcatgagccaccacgcccggccagaatgacaattcttaaacctacaatgacaacaccctatcccatgatgtctccattttcttgcacgggaactacaatgagaacagtgaccatctctatgtcctaccaagaaatagtcctgttcagtggacagcattatcagccttataaaaatatgaagctggaaagagacaccagtttttagctaccaaaaagtgttcagttttggttagagaacacctccaaaaaccagaaaaaaattag

SEQ ID NO: 5798 - DNA, 159 bp, Homo sapiens
ttttttttttttttttttttttttttggcgaaattaataataatatgaccactttaagagatacaatctatccctcaataaattggactctctgctttgtcctaaagagaatttctccgaaagtattacataaaaagttactaagtcaaaattcaagcc

SEQ ID NO: 5799 - DNA, 388 bp, Homo sapiens
aggggaggaaaggctgggccccgagtacaacggatgccttgggtgctgcctccgaagagactctgccgcagcttttcttctttttcctcatgccccgggaagacagtcattcttcagaattgtcaggctgggcaggtcaacttgtgttcctttcccctcacctgcttgcctccttaacgcctgcacgtgtgtgtagaggacaaaagaaagtgaagtcagcacatccgcttctgcccagatggtcggggccccgggcaacagattgaagagagatcatgtgaagggcagttggtcaggcaggcctcctggtttcgccactggccctgatttgaactcctgccacttgggagagctcggggtggtccctggttttccctcctggagaatg

SEQ ID NO: 5800 - DNA, 467 bp, Homo sapiens
tttttttttttttttttttttttttaggggtacaatttttttttttttttaaagatacagggtcttactctgtcataacagcctcaacttcccaggctcaagctatcctcccacctcagcctcccaagcagctgggactacaggtccatgccaccacgcccagtcaatactttttttttttttgtagagatggggtctccctgtatggcccaggctgctctcaaattcctgggttcaagcaatcctcctaccttggcctctcaaagtgctgcgattacaggggtgagccatcacacccatccttaccatttattaattggactttgggcctaataaaaaacaaacaaattgtaaaggtatatcagacctgggcaagattactgcatgctcagtgtgtagcaaactctctgatttaggtcaggtacaagtttatggtggaaatagtaaaaactaattcatttatctga

SEQ ID NO: 5801 - DNA, 495 bp, Homo sapiens
aagttggagatactcaggtggtggtttttaagcatgaaaaggaagatggcgccatttctaccatagtacttcgaggctctacagacaatctgatggatgacatagaaagggcagtagacgatggtgttaatactttcaaagttcttacaagggataaacgtcttgtacccggaggtggagcaacagaaattgaattagccaaacagatcacatcatatggagagacatgtcctggacttgaacagtatgctattaagaagtttgctgaggcatttgaagctattccccgcgcactggcagaaaactctggagttaaggccaatgaagtaatctctaaactttatgcagtacatcaagaaggaaataaaaacgttggattagatattgaggctgaagtccctgctgtaaaggacatgctggaagctggtattctagatacttacctgggaaaatattgggctatcaaactcgctactaatgctgcagtcactgtac

SEQ ID NO: 5802 - DNA, 64 bp, Homo sapiens
tgccttcataggttatatgccaagatagtatttgataagtcaatgacatttggatgttttcttc

SEQ ID NO: 5803 - DNA, 411 bp, Homo sapiens
tttttttttttttttttttttttacgacaaagtcttgctctatcacccaggctggagtgcagtggcgcaatctcggctcactgctccagcctgggcaacaagagtgaaactccgtctcaaaaacaaacaaaaacaaacaaacaaacaacaccaccaccacctcataattacaagattaagtacctttgaacatttgtttctgaacctaccacacgcaactgtcactttgcaggtgcttaataattgtgagcgaacattcaacaaacctcatttcataaacttccctactgaaatatagtggtcataggagaccagcagtttagctcatggcttctggtccttgctttgtattggaatactgcttctatctactgactcgtttaccctgggcttcagttccttctttgggct

SEQ ID NO: 5804 - DNA, 535 bp, Homo sapiens
agctagagcgaggtgtggcgggggcccacggcctgctctgcctcctctccgaccacgtggacaagaggatcctggatgctgcaggggccaatctcaaagtcatcagcaccatgtctgtgggcatcgaccacttggctttggatgaaatcaagaagcgtgggatccgagttggctacaccccagatgtcctgacagataccaccgccgaactcgcagtctccctgctacttaccacctgccgccggttgccggaggccatcgaggaagtgaagaatggtggctggacctcgtggaagcccctctggctgtgtggttatggactcacgcagagcactgtcggcatcatcgggctggggcgcataggccaggccattgctcggcgtctgaaaccattcggtgtccagagatttctgtacacagggcgccagcccaggcctgaggaagcagcggaattccaggcagagtttgtgtctacccctgagctggctgcccaatctgatttcatcgtcgtggcctgctccttaacacctgcaac

SEQ ID NO: 5805 - DNA, 555 bp, Homo sapiens
tttttttttttttttttttttttagacgaaactaccattaatgtgcttggttaattacgggcagagacgctgggagagggcctcggaccacaggagccagtatatgtgttgagacagaatggggcgggaggacctacacatgtctacagccatgcacatgctccttctccacagcacacccagccaagcatccacctagaaccccccactccacccactggggaagccaaaccctttaccccagtctgggccatgccaaaaggtccagggttcatgcccaggaagagtacttccttggggccctggcagtagcgagtcacgtagttgcgatgtggctcccatgcatactccacgggattgtagatgatgcccacaggctccgaaaactgcagctggctcagctcagcattgagccgaagctcctcctccaggaagctctcagccaagcttccagggcagggctggggctccatgggggcacctgcaggctcatggatggaccccagcaggaaagcctggggcatatgtccatgccgctgtcacatgacaggcact

SEQ ID NO: 5806 - DNA, 585 bp, Homo sapiens
aagtggagattagtgtgagccttgccaaagatgagcctgacacaaatctcgtggccttaatgaaggaagaaggggtgaaacttctaagagaagcaatgggaatttacatcagcaccctcaaaacagagttcacccagggcatgatcttacctacaatgaatggagagtcagtagacccagtggggcagccagcactgaaaactgaggagcgcaaggctaagcctgctccttcaaaaacccaggccagacctgttggagtcaaaatccccactcgtaagatcactcttaaggaaaccttcctgacgtcaccagaggagctctatagagtgtttaccacccaagagctggtgcaggcctttacccatgctcctgcaacattagaagcagacagaggtggaaagttccacatggtagatggcaacgtctctggggagtttactgatctggtccctgagaaacatattgtgatgaagtggaggtttaaatcttggccagagggacactttgccaccatcaccctgaccttcatcgacaagaacggagagactgagctgtgcatggaaggtcgaggcatccctgctcctg

SEQ ID NO: 5807 - DNA, 483 bp, Homo sapiens
cactgagtttgccttctatccgggatatccgggaacctaccagcctatggccagttacctggacgtgtctgtggtgcagactctgggtgctcctggagaaccgcgacatgactccctgttgcctgtggacagttaccagtcttgggctctcgctggtggctggaacagccagatgtgttgccagggagaacagaacccaccaggtcccttttggaaggcagcatttgcagactccagcgggcagcaccctcctgacgcctgcgcctttcgtcgcggccgcaagaaacgcattccgtacagcaaggggcagttgcgggagctggagcgggagtatgcggctaacaagttcatcaccaaggacaagaggcgcaagatctcggcagccaccagcctctcggagcgccagattaccatctggtttcagaaccgccgggtcaaagagaagaaggttctcgccaaggtgaagaacagcgctacccctta

SEQ ID NO: 5808 - DNA, 556 bp, Homo sapiens; identical to SEQ ID NO: 2587

SEQ ID NO: 5809 - DNA, 617 bp, Homo sapiens
aagcaggagctgcagaacctgcgcgatgagatcaaacagctggggagggagatccgcctgcagctgaaggccatagagccccagaaggaggaagctgatgagaactataactccgtcaacacaagaatgagaaaaacccagcatggggtcctgtcccagcaattcgtggagctcatcaacaagtgcaattcaatgcagtccgaataccgggagaagaacgtggagcggattcggaggcagctgaagatcaccaatgctgggatggtgtctgatgaggagttggagcagatgctggacagtgggcaaagcgaggtgtttgtgtccaatatcctgaaggacacgcaggtgactcgacaggccttaaatgagatctcggcccggtacagtgagatccagcagcttgaacgcagtattcgtgagctgcacgacatattcacttttctggctaccgaagtggagatgcagggggagatgatcaatcggattgagaagaacatcctgagctcagcagactacgtggaacgtgggcaggagcacgtcaagacggccctggagaaccagaagaaggcgaggaagaagaaagtcttgattgccatctgtgtgtccatcaccgtcgt

SEQ ID NO: 5810 - DNA, 627 bp, Homo sapiens; identical to SEQ ID NO: 1411

SEQ ID NO: 5811 - DNA, 564 bp, Homo sapiens
agtggagtgaggggtaacaagataacgaccgagacggtggagctccataagctaaagcttgccgaactaaagcaagaatgtcttgctcgtggtttggagaccaagggaataaagcaagatcttatccacagactccaggcatatcttgaagaacatgctgaagaggaggcaaatgaagaagatgtactgggagatgaaacagaggaagaagaaacaaagcccattgagctccctgtcaaagaggaagaaccccctgaaaaaactgttgatgtggcagcagagaagaaagtggtgaaaattacatctgaaataccacagactgagagaatgcagaagagggctgaacgattcaatgtacctgtgagcttggagagtaagaaagctgctcgggcagctaggtttgggatttcttcagttccaacaaaaggtctgtcatctgataacaaacctatggttaacttggataagctgaaggaaagagctcaaagatttggtttgaatgtctcttcaatctccagaaagtctgaagatgatgagaaactgaaaaagaggaaggagcgattt

SEQ ID NO: 5812 - DNA, 539 bp, Homo sapiens
aatctaactcagcggaattgtatccgtacaatacaagcacatgaaggctttgtacgaggaatatgtactcgcttttgtgggacttcttttttcactgttggtgatgacaaaactgtgaagcagtggaaaatggtatgggccaggctatggagacgaggaagagccattacatacaatattaggaaagacagtgtatactgggattgatcatcactggaaagaagctgtttttgccacatgtggacagcaagtagacatttgggatgaacaaagaactaatcctatatgttcaatgacctggggatttgactgtataagtagtgttaaatttaacccaattgagacatttctcttgggaagttgtgcatctgacaggaatatagtactgtacgatatgaggcaagctactcctttgaaaaaggttatcttagatatgagaacaaatacaatctgttggaaccctatggaagctttcatttttacagcagcaaatgaagattacaacttatatacttttgatatgcgtgcactggacactc

SEQ ID NO: 5813 - DNA, 486 bp, Homo sapiens
aaccatacatatgatactttggcctctcttttttagtgaaattatagcaagtctgcagggcatggtggctcatgcctgtaatcccagaaatttaagaggccaaggtaggaggatcgttggagcccaggagttcgagaccatcctgggcatgcaaaaaatttaagttgggatggtggcacccatttgtagtcccagctacctgggaggctgaggctagaggattgcttgagcctggagattgaagctgcaatgagctgtgatcgtgctcattgtggtgtgggagacagcacaagcctgtttttaaaaaaaaaaaaagccatatttatttatatatggcaaatcctcaaattgggaatgttatcaatactctaatacttctgactacctttattttaaaaatcacctgataatattaattagtattaccaatgttggtatttggggattattaaagggaggaagagttttataagttttattatcaat

SEQ ID NO: 5814 - DNA, 564 bp, Homo sapiens
gctccttcacctaccaaacgcaaagaccgctcagatgagaagtccaaggatcgctcaaaagatagaggggccaccaaggagtcgagtgagaaggatcgcggccgggacaaaacccgaaagaggcgcagcgcttccagtggtagcagcagtaccaggtctcggtccagctcgacttccagctcaggctccagcaccagcactggctcaagcagtggctccagctcttcctcagcatccagccgctcaggaagctccagcacctcccgcagctccagctctagcagctcttctggctctccaagtccttctcggcgcagacacgacaacaggaggcgctcccgctccaaatccaaaccacctaaaagagatgaaaaggagaggaaaaggcggagcccatctcctaagcccaccaaagtgcacattgggagactcacccggaatgtgacaaaggatcacatcatggagatattttccacctatgggaaaattaaaatgattgacatgcccgtggaaaggatgcatccccatctgtccaaaggctatgcgtacgtagagtttgagaat

SEQ ID NO: 5815 - DNA, 252 bp, Homo sapiens; identical to SEQ ID NO: 1413

SEQ ID NO: 5816 - DNA, 396 bp, Homo sapiens; identical to SEQ ID NO: 1414

SEQ ID NO: 5817 - DNA, 411 bp, Homo sapiens
tacggccgggatgaagatgatgctcagcagcaggggccacaggtccttgttgcccatgatggagtccaggtcgaacacctgggcgatgaggatgccgacgacgatgcccagctggtgcagggtgcccagggccccacgaagggctgtgggtgacacttcacccacatacatgggcacgaagcctgtggtcaggccgcagtacacaccgatgatgaagcggcccaggatcagcatctcaaaggacttgcccagtttcgagaagcccatgagcacggcggacacgaaggccggcaggttcatcatcagcattgaattccgcctggggacggggtcacaggtcaggccagtgcccacattccttgggctccgaggggctgggtcagaggtaataccctggaacaggcagataag

SEQ ID NO: 5818 - DNA, 111 bp, Homo sapiens
tgagtatcttacagcttgcctttttaatgttagtcacaatgtttttgtggtttgaagtttagtttaatgttggtgcagtgacgggaaatacacattatgctaatgttgatg

SEQ ID NO: 5819 - DNA, 499 bp, Homo sapiens
ggcgtcgggtacgcgcaccgttgcatcttcttcctttcgcggggtcctccgtagttctggcacgagccaggcgtactgacaggtggaccagcggactggtggagatggcgacgctctctctgaccgtgagttcaggagaccctccgctaggagctttgctggcagtagaacacgtgaaagacgatggcagcatttccgttgaagaagggaaagagaatattcttcatgtttctgaaaatgtgatattcacagatgtgaattctatacttcgctacttggctagagttgcaactacagctgggttatatggctctaatctgatggaacatactgagattgatcactggttggagttcagtgctacaaaattatcttcatgtgattcctttacttctacaattaatgaactcaatcattgcctgtctctgagaacatacttagttggaaactccttgagtttagcagatttatgtgtttgggccaccctaaaaggaaatgc

SEQ ID NO: 5820 - DNA, 588 bp, Homo sapiens
ctgtcagagctggagggccgggcaccgcggccatggagggtcaacgctggctgccgctggaggccaatcccgaggtcaccaaccagtttcttaaacaattaggtctacatcctaactggcaattcgttgatgtatatggaatggatcctgaactccttagcatggtaccaagaccagtctgtgcagtcttacttctctttcctattacagaaaagtacgaagtattcagaacagaagaggaagaaaaaataaaatctcagggacaagatgttacatcatcagtatatttcatgaagcaaacaatcagcaatgcctgtggaacaattggactgattcatgctattgcaaacaataaagacaagatgcactttgaatctggatcaaccttgaaaaaattcctggaggaatctgtgtcaatgagccctgaagaacgagccagatacctggagaactatgatgccatccgagttactcatgagaccagtgcccatgaaggtcagactgaggcaccaagtatagatgagaaagtagatcttcattttattgcattagttcatgtagatgggcatctctatgaattagatgggc

SEQ ID NO: 5821 - DNA, 329 bp, Homo sapiens
tatatatacttgtttagttaattaaacatatattcaacatttaaataactaagtggtacggaaataatgatgaaggtcacagtgtatattggttaaaaataaaataaatacgtttgtaggccaatttatggtacagcgctgtaacagaaccataaccgtgctgtgagagtactgaaaagggactgatgcagttgacttaaggaaggtcttagatatggtgacatttgagctagggtttgaaggatgaaaagattacagaggttgaaggcattgcagagaacaacatgtgtaaagcatatagtgtacactgggagattaggggacaattt

SEQ ID NO: 5822 - DNA, 589 bp, Homo sapiens; identical to SEQ ID NO: 1420

SEQ ID NO: 5823 - DNA, 525 bp, Homo sapiens
atgatgatgtgacggaaaaggtgaacctccagaacaatcccggggccatggagcacttccacatgaagcttttccgtgcccagaggaatctctacattgctggcttttccttgctgctgtccttcctgcttagacgcctggtgactctcatttcgcagcaggccacgctgctggcctccaatgaagcctttaaaaagcaggcggagagtgctagtgaggcggccaagaagtacatggaggagaatgaccagctcaagaagggagctgctgttgacggaggcaagttggatgtcgggaatgctgaggtgaagttggaggaagagaacaggagcctgaaggctgacctgcagaagctaaaggacgagctggccagcactaagcaaaaactagagaaagctgaaaaccaggttctggccatgcggaagcagtctgagggcctcaccaaggagtacgaccgcttgctggaggagcacgcaaagctgcaggctgcagtagatggtcccatggacaagaaggaagagtaag

SEQ ID NO: 5824 - DNA, 641 bp, Homo sapiens
tacggccgggagggggctccggggaccatggggctcctgaccattctgaagaagatgaagcagaaagagcgggagctgcgactgctcatgcttggcctggacaatgctggaaagacaaccatcctgaagaagttcaatggggaggacatcgacaccatctccccaacgctgggcttcaacatcaagaccctggagcaccgaggattcaagctgaacatctgggatgtgggtggccagaagtccctgcggtcctactggcggaactactttgagagcaccgatggcctcatctgggtagtggacagcgcagaccgccagcgcatgcaggactgccagcgggagctccagagcctgctggtggaggagcgcctggccggagcaaccctcctcatctttgctaataagcaggacctgcctggagcactgtcctctaacgccatccgcgaggtcctggagctggactccatccgcagccaccactggtgcatccagggctgcagcgccgtcaccggggagaacctgctgccgggcatcgactggctcctggatgacatttccagccgcattttcacagctgactgaaccactccagatgccccccatctagcagtccaggtccctcaaccttcaccaaacactac

SEQ ID NO: 5825 - DNA, 637 bp, Homo sapiens
agaaccgcctggggacagacgagtccaagttcaatgcggttctgtgctcccggagccgggcccacctggtagcagttttcaatgagtaccagagaatgacaggccgggacattgagaagagcatctgccgggagatgtccggggacctggaggagggcatgctggccgtggtgaaatgtctcaagaataccccagccttctttgcggaggggctcaacaaggccatgaggggggcaggaacgaaggaccggaccctgattcgcatcatggtgtctcgcagcgagaccgacctcctggacatcagatcagagtataagcggatgtacggcaagtcgctgtaccacgacatctcgggagatacttcaggggattaccggaagattctgctgaagatctgtggtggcaatgactgaacagtgactggtggctcacttctgcccacctgccggcaacaccagtgccaggaaaaggccaaaagaatgtctgtttctaacaaatccacaaatagccccgagattcaccgtcctagagcttaggcctgtcttccacccctcctgacccgtatagtgtgccacaggacctgggtcggtctagaactctctcaggatgcctcttctaccccatccctcacagcctc

SEQ ID NO: 5826 - DNA, 559 bp, Homo sapiens
ccgacggccacctcttccaagtggagtacgcgcaggaggccgtcaagaagggctcgaccgcggttggtgttcgaggaagagacattgttgttcttggtgtggagaagaagtcagtggccaaactgcaggatgaaagaacagtgcggaagatctgtgctttggatgacaacgtctgcatggcctttgcaggcctcaccgccgatgcaaggatagtcatcaacagggcccgggtggagtgccagagccaccggctgactgtggaggacccggtcactgtggagtacatcacccgctacatcgccagtctgaagcagcgttatacgcagagcaatgggcgcaggccgtttggcatctctgccctcatcgtgggtttcgactttgatggcactcctaggctctatcagactgacccctcgggcacataccatgcctggaaggccaatgccataggccggggtgccaagtcagtgcgtgagttcctggagaagaactatactgacgaagccattgaaacagatgatctgaccattaagctggtgatcaaggcactcctggaagt

SEQ ID NO: 5827 - DNA, 599 bp, Homo sapiens
  misc_feature 506: n = A,T,C or G
acccatccttaatacgatgatttttctgtcgtgtgagaatgaagccagcaggctgcccctagtcagtccttccttccagagaaaaagagatttgagaaagtgcctgggtaattcaccattaatttcctcccccaaactctctgagtcttcccttaatatttctggtggttctgaccaaagcaggtcatggtttgttgagcatttgggatcccagtgaagtagatgtttgtagccttgcatacttagcccttcccaggcacaaacggagtggcagagtggtgccaaccctgttttcccagtccacgtagacagattcacagtgcggaattctggaagctggagacagacgggctctttgcagagccgggactctgagagggacatgagggcctctgcctctgtgttcattctctgatgtcctgtacctgggctcagtgcccggtgggactcatctcctggccgcgcagcaaagccagcgggttcgtgctggtccttcctgcaccttnaggctgggggtgtggggcctgccggcgcattctccacgattgagcgcacaggcctgaagtctggacaacccgcagaaccgaagctccgagcag

SEQ ID NO: 5828 - DNA, 63 bp, Homo sapiens
gagggcaacatctttgtcaccaccacaggctgtattgacatcatccttggccggcactttgag

SEQ ID NO: 5829 - DNA, 601 bp, Homo sapiens
aatgcaggagtccagtacctctacttcagcaattacctacagattgatgaggaagaatatggtggcacgtgggagctcacgaaggaagggtttgtgacctcttttgccttgttcatggtcatttggatcatcttttacactgccatccattatgactgatggtgtacagctcccaagtgctccctatccagtccaaaggaccctcttgattacagcacaggaacttgatcgttggggaaccccagccccttggaacttggaagacccgtgtttcctggaccgcgaatcagtgtgttgggcatcagtgttttctgcaagggttgtgacctgaaactttttaaaaaccacccacctttggggaagcatttctgaatttatccatcaccaaccatttcttcttggataccatcaagtaacagctattatttgccaagtggagctgtcatttaatttgatgcacctctggattcagatgaaacattaaattgtcttcctcgattctccatcgggtgttagaggttttaaactatcaatggcatttcaagtcttctgaaacgcatggctgtatgtgccgtggtccatagcacagtacatgcagcat

SEQ ID NO: 5830 - DNA, 567 bp, Homo sapiens
gtgtaggcaaagaattcatgactaaaacctcaaaagcacaggcaacaagaacaaaaatagacaaatggaacataattgaactaaatagcttctgtaccacaaaaataaataaataatcaagtgaacaggcaacctattcactgggagaaacaaaaaccctgcagaatgggagaatatatttgcaaactatgcgtctgacaatggaccaatgtccagaatttacaaggaactcgaatagcctttctgactagtgtaaggtggtatctcattgcagttttcatgtgcatttttctgatgattaatgattttggacattgtttatatacctgttggccatttgtatgtcttcttttgagaaatgtttattcaggtcctttgcttatttttaattgtattatttattttcttgctgctgagcttttgagttccttatatattttagatacaaacccattatcagatgtatgatttacacatatttttataggataaaatatagaaaacaaattactaacgattatttaacctttttagataaatatatgcatctataaatatgttatttga

SEQ ID NO: 5831 - DNA, 578 bp, Homo sapiens; identical to SEQ ID NO: 1427

SEQ ID NO: 5832 - DNA, 586 bp, Homo sapiens
ggtactaccagatagaaattctgaaattggaaattggaggccaaagccttaatctggactgcagagagtataacgcagacaaggccatcgtggacagtggcaccacgctgctgcgcctgccccagaaggtgtttgatgcggtggtggaagctgtggcccgcgcatctctgattccagaattctctgatggtttctggactgggtcccagctggcgtgctggacgaattcggaaacaccttggtcttacttccctaaaatctccatctacctgagagacgagaactccagcaggtcattccgtatcacaatcctgcctcagctttacattcagcccatgatgggggccggcctgaattatgaatgttaccgattcggcatttccccatccacaaatgcgctggtgatcggtgccacggtgatggagggcttctacgtcatcttcgacagagcccagaagagggtgggcttcgcagcgagcccctgtgcagaaattgcaggtgctgcagtgtctgaaatttccgggcctttctcaacagaggatgtagccagcaactgtgtccccgctcagtctttgagcgagcccat

SEQ ID NO: 5833 - DNA, 627 bp, Homo sapiens
aggtttcagcggccgctgcgatgaccaaaataaaggcagatcccgacgggcccgaggctcaggcggaggcgtgttccggggagcgcacctaccaggagctgctggtcaaccagaaccccatcgcgcagcccctggcttctcgccgcctcacgcggaagctctacaaatgcatcaagaaagcggtgaagcagaagcagattcggcgcggggtgaaagaggttcggaaatttgtcaacaaaggagaaaaagggatcatggttttggcaggagacacactgcccattgaggtatactgccatctcccagtcatgtgtgaggaccgaaatttgccctatgtctatatcccctctaagacggacctgggtgcagccgcaggctccaagcgccccacctgtatgataatggtcaagccccatgaggagtaccaggaggcttacgatgagtgcctggaggaggtgcagtccctgcccctacccctatgaggggctccggtagcacctgggcacctgccgctggaagctattgggctggcagcaggacgactggctgtcctcctgcccacccacactgacggcatcttcccagttccccaaggcacgccttcttcccaggcagctctaacagccc

SEQ ID NO: 5834 - DNA, 513 bp, Homo sapiens
tagatcgctgagcgatactttcggcagcacctccttgattctcagttttgctggaggccgcaaccaggcccgcgccgccaccatgtttcgaaatcagtatgacaatgatgtcactgtttggagcccccagggcaggattcatcaaattgaatatgcaatggaagctgttaaacaaggttcagccacagttggtctgaaatcaaaaactcatgcagttttggttgcattgaaaagggcgcaatcagagcttgcagcccatcagaaaaaaattctccatgttgacaaccatattggtatctcaattgcggggcttattgctgatgctagactgttatgtaattttatgcgtcaggagtgtttggattccagatttgtattcgatagaccactgcctgtgtctcgtcttgtatctctaattggaagcaagacccagataccaacacaacgatatggccggagaccatatggtgttggtctccttattgctggttatgatgatatgggccctcacat

SEQ ID NO: 5835 - DNA, 584 bp, Homo sapiens
cccccgtcagcaggctggggtctgcccaccagggcctcccccgtctgcctttgagggtgcctgccatgccctgggggatcctggcatctttactggactggaagcaggagacagaacagtgtctgtcccggggtgacctcatcaggagaccgcccacatagagctggaccccgcagctgaagcggaaatgtgagacaggctggcacctccggaaaaactgcctttcagccttggtgttccgtgcaaggtgaaaagaaataggtcctcccagtttacagcttgaaatcaggctagtgagtggccctggagaccacgaggggagaatttaaaggccccggctggcagggtctaggtggctggcagaggcacatgcagaccctgcctggagcctgccctaggacgctgggcgggtcagtctccgtgcaggatgtgagcagcgtccctgggctctatccgcgaggtgccagtagcgtgtgcaggtacatacacgtgcgtgcacactgtgatgacacccggaaatgtctcaggatgttgaaatgtgtccttgggggcagaagtgtccccggttgagaatctgccccaga

SEQ ID NO: 5836 - DNA, 604 bp, Homo sapiens
accacggcttcaggtgagcgccgatggccggctgatcataagggaggaggcagacggcaacaagatggaggaagaggagggtgccaaaggcgaagatgaagagatggctgacccaatggaagatgtgatcatcaggaataaaaagcaccagaagctcaagcaccagaaagaggctgaggaggaggagctggagataccccctcagtaccaagctggaggctctggcattcatcgccctgtggccaagaaggctatgcctggggctgaatacaaggccaagaaagcaaaaggtgatgtgaagaagaaaggccggccggatccctatgcctacatccccctcaacagaagcaagctcaaccgcaggaagaagatgaagctgcagggacagttcaaaggcctggtgaaggctgcccagcgaggttcccaggtgggacacaaaaaccgcagaaaggatcgtcgaccctgaggcccagggcccctgggctgccctgtggtccagtctgaggccctttcagcccccaggctgccttgccaccagctccaggtgctcaagattctggcagagcctggactcaggatgacttggaactagggcttggctctc

SEQ ID NO: 5837 - DNA, 457 bp, Homo sapiens
ttctgtgggtggtatcattgcagggtatgtaatggtgatactgaataatcaatgaaaggttaaattaggagagtgtctaatgttttttaagaatgatttctgatcctcaagatttttgttttttaatttgatactctaaaggataagcttcagtaacctggaaaattgaactatatgttgtttaaatttttctttttggtgtaagcaagtgtacagtaggatgataaggtgttcatttctcgcctgccccccactgcctacactgaaacaaatttgctatggaagtaattttagggaagtactttagaaattgtactggtgctgattaagatatgcatcattcagttgtactgcagactctgagatcactaaatgccaatttaaatatatttaatctttctttaattaaaaggaatttgtacattaattccacccccttacacccatgacatacccc

SEQ ID NO: 5838 - DNA, 416 bp, Homo sapiens
tggccatggagactggcggcgtgatcgggatcgactttgggcatgcgtttggatccgctacacagtttctgccagtccctgagttgatgccttttcggctaactcgccagtttatcaatctgatgttaccaatgaaagaaacgggccttatgtacagcatcatggtacacgcactccgggccttccgctcagaccctggcctgctcaccaacaccatggatgtgtttgtcaaggagccctcctttgattggaaaaattttgaacagaaaatgctgaaaaaaggagggtcatggattcaagaaataaatgttgctgaaaaaaatggtacccccgacagaaaatatgttacgctaagagaaagttagcaggtgccaatccagcagtcattacttgcgatgagctactcctgggtcatg

SEQ ID NO: 5839 - DNA, 551 bp, Homo sapiens
aaagtgtacggcatgcgtatgtccacaaaccatatctttactcaaaatactatagtgattctgatgatgagcttactgtagaacaacgacgacagtccattgccaaagaaaaagaagagaggcttttaagaaggcaaatcaatagagaaaaacttgaagaaaaacgaaaacagaaagcagaaaagacaaagtcttcaaaaaccaagggtcaaggcaggagtagtgtggacttagaagaatcatcaacaaagagtttggaacctaaagccgccagaattaaagaagtccttaaagaacggaaagttttagaaaaaaaagtagccttaagcaaaaagagaaaaaaagattcaaggaatgttgaagagaactccaaaaagaaacagcaatatgaagaagattccaaagaaacccttaaaacaagtgagcattgtgaaaaggaaaaaatttcttcttcaaaggagctgaagcatgttcatgcaaaaagtgaaccaagtaaacctgcccggagactttcagagtctttgcatgtagttgacgaaaacaaaaatgaa

SEQ ID NO: 5840 - DNA, 634 bp, Homo sapiens; identical to SEQ ID NO: 1433

SEQ ID NO: 5841 - DNA, 347 bp, Homo sapiens
ggcttggtggtgcaagcctgtagtcccagctactcgggaggctgaggcagaattgcttgaacctgggagagggaggatgcagtgagcccagatcccaccattgcactccagcctggcgaaagagcaagactccatctcaaaaaaaaaataaataattttaaactattactcaaaactccagggttggagagcttattttggtaaatatactgaaaatgaagggggctaaagtaaggagaggaaagcccattaaaaataatccccagataaattgtgctaagctaaagaaaatatttattattctacaacggaaacttgtataataaatgttaaattactattttgcc

SEQ ID NO: 5842 - DNA, 203 bp, Homo sapiens
gtagaatgagagagcctctaaccaaaatgtaatcagagtatcaagaggagagcgtgtgtgaaaggattataggccatatttgaagaactgatggctgaaaatatcttaaaactgatgaaagatacccatactagttttgcaaaaatgttgtagcacatacctgaccaaaaaggaatagaatttgttcttcataattgataata

SEQ ID NO: 5843 - DNA, 346 bp, Homo sapiens
ggctaattttttgtatttttagtagagagtagagatggggtttcaccttgttagccacagatggtctggatgctgctgacctcgtgatccagccgcctcagcctcccaaagttctgggattacaggtgtgagccgcagcacctggccaggcttttagtttttaaatattaggtagaggtaatctatttgtaagataacagattttctagaacagaggcttcgaatggtggttgcatattggaatctctggggagcttgaaaaaaaaaaaaatactgatgcctaaattccattccaaaaattttgttatattggttctggggttggacttgggctttgaaggttaaa

SEQ ID NO: 5844 - DNA, 603 bp, Homo sapiens
agagatctgaagtgattttacctttatttccttcactttaggccaattgggaaatttcacagtgatttctggggtgggagcagaaggaaggctgtgttaagaatcatcggggctgtggcccagtcagcccgcggaggtgcaggcagggtgggccctcactggggcagctggaggagcacggactgccccgctggcaggtaggtgatgttccgagagcgtgagagctggtacgcgatgtcctctgcagcttccagcttgcgcagctcgatcaggccatcccctgcagtggccagtgagttggcaatcagctcagctgccttggagtcgccctcagcagagatgatggccgcctttttctgttgctcagccttttccaccacaaatctggccctctctgcttcctgctgagccacctgtttggcttccaccgcttctgtgaactccttcccgaaggtcagatgtgtcaaggacacgtcatccaggatgagcccaaaggtggcggctcgctctgtaagtcgtcgctcacctgcctggagaccagctctctctgggtgatagttctccagcatcaaagcgagccaccactgactttgagatctcagt

SEQ ID NO: 5845 - DNA, 769 bp, Homo sapiens
  misc_feature 587, 602, 612, 671, 734, 752, 769: n = A,T,C or G
ttgcaaatgggacaattttaattcaaccacaagtcaaatagaaagaagttaaaagaatgtttatgcaaacacatgagaaaagaagggtgcagatgagaatgggggttggggagagaaagaggaggagtaagaaaagagggaaaagcaagggaaagtaaaggaagaaagagaaagaggggcaggaagagagcggatttggcccaaggtcctatcttggccgcatctctctgcttcttccccctgatgcttggtttgttgacaacacagcatcctgtgcctggactcccaattagcttgttcctggactgtgccccaggtcctccctcaggagggcacatgctgtcagtccagaccaaactcacattaaataaatttcaatatacactgtacaagaatgccaggcccatccctcatctcactggctgcctgacccccaaaacaaagctcctccccagcttctctgtgcatcaagggacatctgagggccgaagaggaagggaaaggaatagcttggttcccaaatcggcctgccatgtccatatataaagctaggggcaccatgtgacacctccccacccccaggagcnccctgcatggaccangctggcttanggagagtgcccagcagcagagtcccctctgagcatcttgtcacgtcacctggtcatagncaagtcccttgtcactgagcctagcatcagccaggggtaggtggggagagcgttcaagtgcanggagtactcctggctctnctgagacactgacacan

SEQ ID NO: 5846 - DNA, 556 bp, Homo sapiens
ctctatctccatggaaagccgcttcatgtcagtatctttgaagtcgaaagcaggctgtcaccaatgaggttgaagcttggtatgtcaggaggcaacggtgctggaattgggttcatgggcgggtacgtgggcttggtggcaatctccaggagcttctgcttggctcttcgctccgcctcggtgcttcctgcaggtcctgcttcagctgatctgcctctttggccctcctctctgactcctcagccatcttcagtgccagcacctcggcttccagcaccttctgctccatcaggcgcttctcctcctccgtgcgaatcgctgtggccttgatgcgctgcatttcctgctcagcctctgcggccttctgggcagaagttttgcctcctcctcggtgatctgggccttttcagccaacaggtcagctgtctcctcagaccgcatcaatgcttcgttggccattgttgcttcttctttcatctgcagcagcatcctctccaactcatccctcgtgcgttcagcctctccctcatctgcttctctcgacgaggggtgcgct

SEQ ID NO: 5847 - DNA, 606 bp, Homo sapiens
  misc_feature 93, 106, 585: n = A,T,C or G
gcggccgcgccccgggagggctgttcgggccagcgcccttcggctgctccgcgctgacagcgccgggctggggcggggcggggggctttgcangccgccagtgtcnacatgctgctggaggaggttcgcgccggcgaccggctgagtggggcggcggcccggggcgacgtgcaggaggtgcgccgccttctgcaccgcgagctggtgcatcccgacgccctcaaccgcttcggcaagacggcgctgcaggtcatgatgtttggcagcaccgccatcgccctggagctgctgaagcaaggtgccagccccaatgtccaggacacctccggtaccagtccagtccatgacgcagcccgcactggattcctggacaccctgaaggtcctagtggagcacggggctgatgtcaacgtgcctgatggcaccggggcacttccaatccatctggcagttcaagagggtcacactgctgtggtcagctatctggcagctgaatctgatctccatcgcagggacgccaggggtctcacacccttggagctggcactgcagagaggggctcaggacctcgtggacatcctgcanggccacatggtggccccgctg

SEQ ID NO: 5848 - DNA, 415 bp, Homo sapiens
ttttttttttttttttttttttttggtttttttttttttttttttttttttttttccctttcaaaaactgactttattggcaaatgtggaaatattctgttaaacaatacagagatgatagtggtccttagggtaagcattaacaatattattcaaaatgttatatagagttcaactgtatacaataaagcatttattaaagtgtgtccaaagtgcttataaataaagcatcttcgaggcaggcggctcacttgaggttaggaggaaagcaaactggccaacatggtgaaaccccgtctctactaaaaatattttaaaaattacccaggcatggtgacccatgcctgtaatcccagctacttaggagcctgaggcatgaaaatcgcttgaacctaaaaggcctaggttgcagtga

SEQ ID NO: 5849 - DNA, 457 bp, Homo sapiens
tttttttttttttttcttttttttgagagtggagctgctttattgcccttggagcccgcgctctcggaggctgtcttctgtcgccaagggtcccggaccgagtacacggtggcagctggcttagttggtggacggcttggcccactcgacgttgaggatgaggtggtcgtagccaaagccggacaccccggcaatggcacgcgcagcatcctcgcggcggtggaagctgatgaaggcgaagcccttggattggccagtggtcttgtccttagccaggtagatgcgggagatggagccgaaaggccggaagagctcctgcaggtcggtctcacgcgtgtcctctgacaagttggtgacacggatggtggcgttgtcgtcggctctgcggttgggctgcatggactccccgcggcggctggccccgtcgcgcaggctcggcggcacatacttccctgtc

SEQ ID NO: 5850 - DNA, 548 bp, Homo sapiens
tttttttttttttttttttttttggtttattgaaagaaatgtttacaacatgacaccaacagaagggatcaaagtgtgtcgtgaaattgcgagtcttcattcctttttcttggttctttgtattcaaagatgctatttagtgtgttctgttcttcatcttctctcttgttcgttttccaggtctcttatttgaccctttcttgccaggcctcttgaggcctctgccatgagctgtcttggcccggaagctagatacatcatcatagctctcccgagtgttccactttgagcctttcttctttccaccaaaaccaaacttctggtttttataccgtcgtttagcactgggccccttcctcatctgctggcctttggctcctgccttcttgcgctgtgccagaggtttctgatctccctcaaggaaatccagtttatcagagaagcctttctgatatttcttaatagcattcatcatatgggctttctcctgctgcctcttctgaagaacctccgtttgcaccttcttcccgtatttcctaagtgctcgc

SEQ ID NO: 5851 - DNA, 519 bp, Homo sapiens
tttttttttttttttttttttctcatttaacttttttaatgggtctcaaaattctgtgacaaatttttggtcaagttgtttccattaaaaagtactgattttgaaaactaataacttaaaactgccacacgcaaaaaagaaaaccaaagtggtccacaaaacattctcctttccttctgaaggttttacgatgcattgttatcattaaccagtcttttactactaaacttaaatggccaattgaaacaaacagttctgagaccgttcttccaccactgattaagagtggggtggcaggtattagggataatattcatttagccttctgagctttctgggcagacttggtgaccttgccagctccagcagccttcttgtccactgctttgatgacacccaccgcaactgtctgtcccatatcacgaacagcaaagcgacccaaaggtggatagtctgagaagctctcaacacacatgggcttgccaggaaccatatcaacaatggcagcatcaccagact

SEQ ID NO: 5852 - DNA, 480 bp, Homo sapiens
ttttttttttttttttttttttttttcgcatctaacagtccattttcactgtttccaaataccatagcaacctcttgccctttgtgttacccctagagagatggcacccaatccccagggttgctctctgacttccaccattcactgacttttattgccagaggagctcccaggaatccacagttctggaagagaggggctctaagtctttattggggagaatacccacccaccttccctcactgcagacgatagacacactcagtgtcagggtagggtggcaggttcagctggtacttcttttccagagcaggtggcacaaaacgaccccccaggtaatggtagcgaccggtaaactgggttgcagattttttgggggctgtgagggagatgagcaagtctggctggatccctccagcatttcccttctccacgtcccatcctgagggaatgtcgatgctggcaatgggcacagtgagt

SEQ ID NO: 5853 - DNA, 567 bp, Homo sapiens
tttttttttttttttttttttttttctgggtaattacatttactgctcttttacatgaatggtatatcataaatacggcttaaaatttgtttgttattttcatttaacagatatcttgaacaaacttccatggtatatattatagctagaataacctcattctggaataatctatagtgtgaatgtaccataatttgcccaatcaagcagaactataatgtttggcatctgaatcagttgcaaagattgtaggttaattgcagttataaaaatagagcttggaaattgcaactgccccaagttcttcacggctcttatgcaaggctgtgtcctaaagccatagggaagtttagctttcagttgcctgtaacattaaggttgtttcatgattttttgaaggtttgtttcacaccatttccccccttaaatcatttaaccgaatggtatgtaacaggtgtagtttctaatgagttcttttcttcccctgtggctttagcatggcacattacacttctgtggatttaaagtccttgcccctcagatcagctttgctcctgaaattgcatc

SEQ ID NO: 5854 - DNA, 538 bp, Homo sapiens
tttttttttttttttttttttttaccaaacgattgcatttattataaacaagtgtacagaccctagactcagaaacacaacagatttgagctaagacagctctggtgaaacagtaatagagggaggaggaacacaaggtattcatgtctgggccagagctgccatccagggccccacaccccacctttggtccagatggcccattggcccaggtgtccctgctgccagaacaccgtggactggggtacaggagttgttgcatattccatgaggctggtgtcgggaagcagggactcacagttgccaggttgtccatctctgagccaatttccctccacaacccaggggtttcagtctcatatcaactgtcatgtttgaaacagaaaacaggcaaaatgtttggctaaaataaaatgaaaacactgcagggaagagaactgagtgtgctggtggacaggagccctgctcacctgtgggaagggcagggccagcaagggcagcagagctccctgggggcagctaggctgtgtgtgcatgt

SEQ ID NO: 5855 - DNA, 574 bp, Homo sapiens; identical to SEQ ID NO: 2610

SEQ ID NO: 5856 - DNA, 491 bp, Homo sapiens
ttttttttttttttttttttttttttggatttttagtagagatggggtttcaccatgttggccgggctggtctcctgacctcaagtgatccacctgccttggcctcccaaagtgctaggatgacaggcatgagccaccatgcccggcctatttttaaatttttcttaagacagagtcttgctctgtcacccaggctggagtgcagtggcgcaatctcggctcactgtaacctccatctcccaggttcaagcgattcttctgcttcagcttctcaaataggtgggattacgggtgcccaccaccaagcccggctaatttttaatttatggtagagacagggtttcaccatgttggctgggctggtctcgaactcctggcctcaggtgatctcccctcctcagcctcctaaagtgctgggattacagacctgagccaccacgcccggccgaataataggacttttaaaagtcctatttcttggctctgctatt

SEQ ID NO: 5857 - DNA, 547 bp, Homo sapiens
tttttttttttttttttttttttttttctttttttaaaaatttaaaataaaattttattttatcttatactcaagttcagacaatagcatgtggtgtacattcaaaatttttgacaggtacagagcacattaaaaaatgaagacatgatcaaggagatgtaagagacaaatagacaacaacattctccctgaatctggaaaaaagcaagcaataagatcacgaaaggcagctgtaaaacaggattattctgcatgtgttgcccacaactagggcaaggttatctctcatcacaagtacaaagccattgatgtcagtgtgtaacagagagaaaacagaagatttgtacagctgaggaaataaatggcagatgttacacaggaagcaatataacatggtcattaagtaactgtattcaaccatcaaatttaattttaaatcttggcacagtgcccacaagccgtgtgactttagtccccttgataatataaacttcatttctctcacttataataaagagacacaaatggtacctactccataaagtta

SEQ ID NO: 5858 - DNA, 438 bp, Homo sapiens
tttttttttttttttttttttttttccatctgggtacgtgaactagaacgtctcagcagtatttaaataaaagctgtaaggctccaacttcaactgaaatgcctcgggaatttgtaatcatgccctgaccttcccacctcgtctactccctctgcaacttctcattctcccttttctatcttggggtcaattttagcttgcaaggggcccatgtgctctggatcagagaacaaaggaaataagcttcatgctggccagggggtactagttacatcaaaagttctcaaacaggggtatatatcagatctcctgggccaagtgctaacatgaacttcagactcctggcccttcccctgtagaggcaaaagctccagtacaggaatctgcattttttttgtttgttttttgtttttgtttttgttttttgagagggagtct

SEQ ID NO: 5859 - DNA, 70 bp, Homo sapiens
gtgcagacacgcagtgctgatgagcccatgactacctttgtcttatgcaatgaatgtggcaatcgctgga

SEQ ID NO: 5860 - DNA, 517 bp, Homo sapiens
ttttttttttttttttttttttttttttaggcagggtctcactctgttacccaggctggagtgtaatggtgcgatcacagctcactgcagcctcaacttccctggctaaagcggtactcccacctcagactcctgagtagctgggaccacaggtgtgcaacaccacacctggctaattaaaaaaattttttttgaagagatggggtctcaccatgttgctcaggctgactcaaacttctggcttcaagtcatcctccttcctcagcctcccaacatgctgggattacaggtatgagccacgtgcccggcctaatgataaatcttgtatatttttacatatttacagagatcttgtgatttttctcaaaagccttataaattcaaggacctcgttctattgataagatttccaacaactagatgtccaaccgaatccaaaaacatgcagaactctcatattctatgaatctagcgattcaaccaacaggtcagaattcttacaaaaccctaaaaatac

SEQ ID NO: 5861 - DNA, 188 bp, Homo sapiens
tttttttttttttttttttttttttttttgcagctcactccaggtttatttcagggcagtttgagggtgggggacaaagacccccctccagctcctaaactgggtcacttttctcccaggtgaaggggaccatcctcatgggatcctatcgatgtgagagctttgtgtccaccaggtgtggctgggtg

SEQ ID NO: 5862 - DNA, 375 bp, Homo sapiens
aagaacattgaccgggagaccagccacgtcaccatggtggtggccgagctggagaagacgttgagcggctgccccgccgtggactccgtggtcagcctgctggacggcgtggtggagaagctcagcgtcctcaagaggaaggcggtggaatccatccaggccgaggacgagagcgccaagctgtgcaagcgccggatcgagcacctcaaagagcatagcagcgaccagcccgcggcggccagcgtgtggaagaggaagcgcatggatcgcatgatggtggagcacctgctgcgttgcggctactacaacacggctgtcaagctggcgcgccagagcggcatcgaggacctagtgaatattgagatgttcctgacg

SEQ ID NO: 5863 - DNA, 537 bp, Homo sapiens
gggtaggggttggcgctcaggcggcgactatggcgtatcacggcctcactgtgcctctcattgtgatgagcgtgttctggggcttcgtcggcttcttggtgccttggttcatccctaagggtcctaaccggggagttatcattaccatgttggtgacctgttcagtttgctgctatctcttttggctgattgcaattctggcccaactcaaccctctctttggaccgcaattgaaaaatgaaaccatctggtatctgaagtatcattggccttgaggaagaagacatgctctacagtgctcagtctttgaggtcacgagaagagaatgccttctatatgcaaaatcacctccaaaccagaccacttttcttgacttgcctgttttggccattagctgccttaaacgttaacagcacatttgaatgccttattctacaatgcagcgtgttttcctttgccttttttgcactttggtgaattacgtgcctccatgacctgaactgtgccgactccacaaaacgattatgtactcttctg

SEQ ID NO: 5864 - DNA, 536 bp, Homo sapiens
atatttttaaaaagttacatggggcttttttggttgtcctaaacttacaaacattccactcattctgtttgtaactgtgattataatttttgtgataatttctggcctgattgaaggaaatttgagaggtctgcatttatatattttaaatagatttgataggtttttaaattgctttttttcataaggtatttataagttatttggggttgtctgggattgtgtgaaagaaaattagaaccacgctgtatttacatttaccttggtagtttatttgtggatggcagttttctgtagtttttggggactgtggtagctcttggattgttttgcaaattacagctgaaatctgtgtcatggattaaactggcttatgtggctagaataggaagagagaaaaaatgaaatggttgtttactaattttatactcccattaaaaatctctaatgttaagaagaccttaaataaacatgattgatcaatatggcagatgatttacagtccattatatgacatttgtaagccactcaacact

SEQ ID NO: 5865 - DNA, 523 bp, Homo sapiens
ttttttttttttttttttttttccccacaaatcaattctcatgactgcacttcagagcttgtcctcttaaggtaatttgagtatgtttaaattaataacgtgacagtattcaaccagaaaataaataaatgaatatatatacacacacacacacacacacacacacgtgtatatatggctttgtgaatccagatgaagtcagttgttgagaaggtaggtgggcagatattaatagaattggtgttgtacaaaacaaggatgaaagaaaagtgaggtgaagaggatggagttgttgacaaggtaggtgggcagataataggattggtgttgtacaaaacaaggatgaaagaaaagtgaggtgaagaggatggttttgtagctggataggtaaaagggtaagctcttacgcaaagatgtattacagagcaaatctcaagttttctgactgcacagttcaaagtttcaactacacactttacctaacagttttgaaatattataaagctttattccattctaatat

SEQ ID NO: 5866 - DNA, 622 bp, Homo sapiens
ctgcagtttggggtgctacttctgcaccatcctccttttgctctgggtgtctgtcttcctctatggctccttctactattcccatatgccgacagtcagccacctcagccctgtgcatttctactacaggaccgactgtgattcctccaccacctcactctgctccttccctgttgccaatgtctcgctgactaagggtggacgtgatcgggtgctgatgtatggacagccgtatcgtgttaccttagagcttgagctgccagagtcccctgtgaatcaagatttgggcatgttcttggtcaccatttcctgctacaccagaggtggccgaatcatctccacttcttcgcgttcggtgatgctgcattaccgctcagacctgctccagatgctggacacactggtcttctctagcctcctgctatttggctttgcagagcagaagcagctgctggaggtggaactctacgcagactatagagagaactcgtacgtgccgaccactggagcgatcattgagatccacagcaagcgcatccagctgtatggagcctacctccgcatccacgcgcacttcactgggctcagatacctgctatacaacttcccgatgacctgcgac

SEQ ID NO: 5867 - DNA, 479 bp, Homo sapiens
aagtgaatctagctctgaaggcatggcgcgtacgaagcagactgctcgcaagtccaccggcggcaaggctccgcgcaagcagctggccaccaaggcggctcggaagaacgctccggccactggcggtgtcaagatatctccatcgctatcggcctggtacagtggctctccgcgagattcgccgctaccagaagtccaccgagctgctgatcagaaagctgccttttcagcgtctggtgcgtgagatcgcgcaggacttcaagactgacttgcgcttccagagctccgcggtgatggcgctgcaagaggcatgcgaggcctacctggtggggctctttgaggacaccaacctgtgcgccatccacgccaagcgggtgactatcatgcccaaggacatccagctcgcacgtcgtatccgcggcgagagggcttgagtctcaaggactcactgattacatacccaaaggctcttttcagag

SEQ ID NO: 5868 - DNA, 553 bp, Homo sapiens
agtgcttcgaactactgggagcgactgctacggaagcttccgcagagccggccgggctttcccagtcctccgtggggaccagcattagcagtacagggcccagccatgtttacagagccagcaaatgataccagtgtaagtaaagagaattccagccttttggacagtatcttttggatggcagctcccaaaaatagacgcaccattgaagttaaccggtgtaggagaagaaatctgcagaagcttattaaagttaagaacaacatagacgtttgtcctgaatgtggtcacctgaaacagaaacatgtcctttgtgcctactgctatgaaaaggtgtgcaaggagactgcagaaatcagacgacagatagggaagcaagaagggggcccttttaaggctcccaccatagagactgtggtgctgtacacaggagagacaccgtctgaacaagatcagggcaagaggatcattgaacgagacagaaagcgaccatcctggttcacccagaattgacaccaaagatgttaaaaggataacttcacagtaaatcatt

SEQ ID NO: 5869 - DNA, 565 bp, Homo sapiens
ccggcgggctcaggtctgtcggcttcccagcgtcgggcggagctgcgtcggagaaagctgctcatgaactcggaacagcgcatcaaccggatcatgggctttcacaggcccgggagcggcgcggaagaagaaagtcaaacaaaatcaaagcagcaggacagtgataaactgaactccctcagcgttccttccgtttcaaagcgagtagtgctgggtgattcagtcagtacaggaataactgaccagcagggtggtgtggccgaggtaaaggggacccaactgggagacaaattggactcgttcattaaaccacctgagtgcagtagtgatgtcaaccttgagctccggcagcggaacagaggggacctgacagcggactcggtccagaggggttcccgccatggcctagagcagtatctttccagattcgaagaagcaatgaagctaaggaaacagctgattagtgaaaaacccagtcaagaggatggaaatacaacagaagaatttgactcttttcgaatatttagattggtgggatgtgctcttcttgctcttggagtcagag

SEQ ID NO: 5870 - DNA, 538 bp, Homo sapiens
aggtgcctgggatgcttctccccttccgcgaggaagagatctaattgggtagggcgggtgtagactagcctgccgagccgcccgctggcacctgcagcctcctgggcgcccgccgggccccggcgagaaagttgttaaagggagcgaggtggttgttcctggggtccgaggcgcgcctctcacgccctgcccaacagaagccgcagtcccgtggggtctggagacgcagtttcctgttaatgacaataaatccctgctccccctgcctcagacatctgcgcagcgaaatcgagcctggccttgagggtccacaccgcgagggaagatgcgtgcgcccattccagagcctaagcctggagacctgattgagatttttcgccctttctacagacactgggccatctatgttggcgatggatatgtggttcatctggcccctccaagtgaggtcgcaggagctggtgcagccagtgtcatgtccgccctgactgacaaggccatcgtgaagaaggaattgctgtatgatgtggccgggagt

SEQ ID NO: 5871 - DNA, 602 bp, Homo sapiens
tcggagccgtctccaggagcccttagagaccgagtcccggcggcgacggcggggcagcgcaccggcaggcggattcattccacttaaaacctgaaaacattggaccacacaaagtcttactgatttcaggtaaaaacaataattgaagatgtccagcaaaacagcaagcaccaacaatatagcccaggcaaggagaactgtgcagcagttaagattagaagcctccattgaaagaataaaggtttcgaaggcatcagcggacctcatgtcctactgtgaggaacatgccaggagtgaccctttgctgataggaataccaacttcagaaaaccctttcaaggataaaaaaacttgcatcatcttatagtggaatagagaaacagctcctcgcctcttcccaacaacgcaaattatgagcagctccttgaagagatttaccttcagcttatttggtaaccactgctaataactaaaatgttctcagcttggaataatggactctgaagtctctattttccaagttgtcctttctcttaaaataccctttactgatttaatacagaataacaatcttattttccacttggtaactatggctttat

SEQ ID NO: 5872 - DNA, 526 bp, Homo sapiens
ctgcactggacgtgtttacggaagagccgccacgggaccgggccttggtggaccatgagaatgtcatcagctgtccccacctgggtgccagcaccaaggaggctcagagccgctgtggggaggaaattgctgttcagttcgtggacatggtgaaggggaaatctctcgcgggggttgtgaatgcccaggcccttaccagtgccttctctccacacaccaagccttggattggtctggcagaagctctggggacactgatgcgagcctggactgggtcccccaaagggaccatccaggtgataacacagggaacatccctgaagaatgctgggaactgcctaagccccgcagtcattgtcggcctcctgaaagaggcttccaagcaggcggatgtgaacttggtgaacgctaagctgctggtgaaagaggctggcctcaatgtcaccacctcccacagccctgctgcaccaggggagcaaggcttcggggaatgcctcctggccgtggccctggcaggcgcccctta

SEQ ID NO: 5873 - DNA, 545 bp, Homo sapiens
atttcatggtagacaggctagaaagtttgggtcagagtgaactggcttcaagacttaccttgaattgtcaaaattcttatgtggaacctcataaaattcgggacatacctgtaactattatggatgtgtttgatcagagtgcgctttcaactgaagctaaagaagaaatgtacaagctgtatcctaatgcccgaagagctcatccgaagacaggaggcaatttcccatacctgtgcagaagtgcagaggtcaatctttatgtacagatacatttgctgcaattccatggaaccaaatacgcggccattgacccatcaatggtcagtgccgaggagcttgaggtgcagaaaggcagccttggcatcagccaggaggagcagtagtgtgtctctcgctgtcaatgatgagttgacccggtgtgttcttgtatagtcagtggcatcagcacccgtcagccggccttttccttcaggttcgtcaggctcaccggttctcactgtgtctgggaagtaggactgatggtcatcttcatgacaggcggcatc

SEQ ID NO: 5874 - DNA, 479 bp, Homo sapiens
taagtgaaaggctgctgcagcaccgagaaaggaccgatgcaggaaggcaccaaacttggttctaatcttggctctgctaacaaattggtgtcattgcacaggtcacttcaattcttctgggcctcagtttccttagatagtcccataggtatcatttcagatatttcccaatgcgatactgttcccacttcatttactgttgccctaacttgagagagcttgaagttagaaagagatttatacacaaaacaccagcaggagcgatttcccttttttgcaaaatatctttataatttcagttaaacatgtattttcttaagatttgtggctttgtaataactcttgcaatgtcagcagttttcctcggaaaaggaagcatttcttaattagagcatacccacaagatactcccaaatagttaatattttatattctggaacttattcctatctgtttgaaatcgaatgtagtcaggaatt

SEQ ID NO: 5875 - DNA, 650 bp, Homo sapiens
agagacaggtggggtactcgggaagctggagcgggccggcggtgcagtcacgggggagcgaggcctgctgggcttggcaacgagggactcggcctcggaggcgacccagaccacacagacactgggtcaaggagtaagcagaggataaacaactggaaggagagcaagcacaaagtcatcatggcttcagcgtctgctcgtggaaaccaagataaagatgcccattttccaccaccaagcaagcagagcctgttgttttgtccaaaatcaaaactgcacatccacagagcagagatctcaaagattatgcgagaatgtcaggaagaaagtttctggaagagagctctgcctctttctcttgtaagcatgcttgtcacccagggactagtctaccaaggttatttggcagctaattctagatttggatcattgcccaaagttgcacttgctggtctcttgggatttggccttggaaaggtatcatacataggagtatgccagagtaaattccatttttttgaagatcagctccgtggggctggttttggtccacagcataacaggcactgcctccttacctgtgaggaatgcaaaataaagcatggattaagtgagaagggagactctcagccttcagcttcctaaattct

SEQ ID NO: 5876 - DNA, 334 bp, Homo sapiens
atgcggcgcgccgcgcgtgaacctccttggcctgggcgaggctgggtggaccaagcaagtcaggagtgtggacatgttttctgagcaggctgcccaaagggcccacactctactgtccccaccatcagccaacaatgccacctttgcccgggtgccactggcaacctacaccaactcctcacaacccttccggctaagagagcgcggatttagccggcagtatgcccacatttatgccacccgcctcatccaaatgagacccttcctggagaaccgggcccagcagcactgtggcagcggagtgagagtgaaaaagctgagtgaactgcagcct

SEQ ID NO: 5877 - DNA, 644 bp, Homo sapiens
gggagctgagcgtggaggcctcatgatggggcaccctggcatgcattatgccccaatgggaatgcaccctatgggtcagagagcgaatatgcctcctgtacctcatggaatgatgccgcagatgatgccccctatgggagggccaccaatgggacaaatgcctggaatgatgtcgtcagtaatgcctggaatgatgatgtctcatatgtctcaggcttccatgcagcctgccttaccgccaggagtaaatagtatgggtgtagcagcaggtacagcatctggtgcaaaatcaatgtggactgaacataaatcacctgatggaaggacttactactacaacactgaaaccaaacagtctacctgggagaaaccagatgatcttaaaacacctgctgagcaactcttatctaaatgcccctggaaggaatacaaatcagattctggaaagccttactattataattctcaaacaaaagaatctcgctgggccaaacctaaagaacttgaggatcttgaagcaatgatcaaagctgaagaaagcagtaagcaagaagagtgcaccacaacatcaacagccccagtccctacaacagaaattccgaccacaatgagcaccatggctgctgccgaagcagcagctgctg

SEQ ID NO: 5878 - DNA, 483 bp, Homo sapiens
gcgctcgggtgaggagctggtggcgtcggcaggttcgaggcgattcgagctccagctaggatgatcgaggttgtttgcaacgaccgtctggggaagaaggtccgcgttaaatgcaagtatccactggcagccgagaggcagtggtacccgcaggggtgcttggcgtgaggcaggcaactcaatctgtgttgtcggatggttttagttaaacccgggagagggggcggatggggtcctggcagatggtattctgccctagaatgtcctcttcctcgttctaccgcttccatttgccttaactgctctgcgcccagcacggatgataccatcggggaccttaagaagctgattgcagcccaaactggtacccgttggaacaagattgtcctgaagaagtggtgagtgcagcggtagagccactgggtggactggactaggccggaaggttttggttgggggagcgctgcaggcagccctttgctt

SEQ ID NO: 5879 - DNA, 454 bp, Homo sapiens
ctcagtctcatgtttcttgggctcttgacccttgctttgccttagctaccacctcatatagtaacagattaccagcaggtttgtatgattcctctgcttgagatcaattagccatatgttcagaatccctggcctataacaacacttctgtgctttaaaaaccccatgccacaatgactgttaaaagggctaggcgatgtagtctggtaggtttgtgaagttaactgtctgaaaaacttggatcaatggactagaaaaagctgctgggtaaattgctcttcttctgatggactgtatagagacactgtttttcatcttgcctgtccagaagcgtactctgtggccaagcaagtgtacttgccgcatgattggcagtgtctcttcatggcttttcatgaaacagcagcaagtgctacacagtaatttatcagtttgcatttgcctcccattattg

SEQ ID NO: 5880 - DNA, 500 bp, Homo sapiens
tacggccgggattgaacgagcaggctattctttggagaaggttttgggattcaattgaaggaaattgataagaatgaccacttgtacattcttcttagcaccttagagcccactgatgcgggcatactgggaacgactaaggactcacccaagctgggtctgctcatggtgcttcttagcatcatcttcatgaatggaaatcggtccagtgaggctgtcatctgggaggtgctgcgcaagttggggctgcgccctgggatacatcattcactctttggggacgtgaagaagctcatcactgatgagtttgcgaagcagaagtacctggactatgccagagtccccaatagcaatccccctgaatatgagttcttctggggcctgcgctcttactatgagaccagcaagatgaaagccctcaagtttgcctgcaaggtacaaaagaaggatcccaaggaatgggcagctcagtaccgagaggcgatggaagcagatttgaa

SEQ ID NO: 5881 - DNA, 456 bp, Homo sapiens
tgcaggtaggtcattaacaccacttcttttcatctgtaccacaccctggtgaaacctttgaagacataaaaaaaacctgtcagagatgttctttctaccaatctatatgtctttcggttatcaagtgtttctgcatggtaatgtcatgtaaatgctgatattgatttcactggtccatctatatttaaaacgtgcaagaaaaaaataaaatactctgctctagcaagttttgtgtaacaaaggcatatcgtcatgttaatagatttaaaacatcattcgtataaaatattttaattttcttgtatttcatttagacccaagaacatgctgaccaatgtgttctatatgtaaactacaaattctatggtagctttgttgtatattattgtaaaattattttaataagtcatggggatgaacatttgattattacaatttagttttcagtaatcaaaa

SEQ ID NO: 5882 - DNA, 347 bp, Homo sapiens
ctgagtgtgaagtcagcagagctgttactgtggcaacctaatattgtgacctccatcttgaagagtctgcacatttaagctggggatagcgtttcttgacttctgtgaggctccggcaggggaagaggaagcattttaatacatatgcctctcttttacaaaaaagaaaaaaaaatcatcgtaggccctaacatgtaccatgttgacaaaaatgccagatcaaatggatttgagaaataagcccaattcaaggctggctcagccctccacggggcctctcagggaaaggaattcctttatgttcttggaagcccttttctagaaaagccattccattcatacctttg

SEQ ID NO: 5883 - DNA, 578 bp, Homo sapiens
gagtttttccgtgctgtgtaggggctaacaatggacacccagaaggacgttcaacctccaaagcagcaaccaatgatatatatctgtggagagtgtcacacagaaaatgaaataaaatctagggatccaatcagatgcagagaatgtggatacagaataatgtacaagaaaaggactaaaagattggtcgtttttgatgctcgatgaatgctgggaattcagaggaatgtcttcacttatacttggatttgctctctccccatttctgattgtcgtatagctttcgattttgcttacagtagttcccccttatcttcgggagatacattccaaggtccccagtgaactcctgaaacctcaaacagtaccaaacctttatacactgttttttccatatatatatacctatgataaagtataatgtataaattaagcatagcaagagattaataataatgtaatagaacaatgataacatactataataaaagttatgtggatgtggttggtctctcttgctttcaaaatatcttcttgtacagtactcacctattttagaatgtggttgactacaggta

SEQ ID NO: 5884 - DNA, 618 bp, Homo sapiens
ggggccttttggctctctgaccgcaccatggcggttggcaagaacaagcgccttacgaaggcggcaaaagggagccaagaagaaagtggttgatccattttctaagaaagattggtatgatgtgaaagcacctgctatgttcaatataagaaatattggaaagacgctcgtcaccaggacccaaggaaccaaaattgcatctgatggtctcaagggtcgtgtgtttgaagtgagtcttgctgatttgcagaatgatgaagttgcatttagaaaattcaagctgattactgaagatgttcagggtaaaaactgcctgactaacttccatggcatggatcttacccgtgacaaaatgtgttccatggtcaaagaatggcagacaatgattgaagctcacgttgatgtcaagactaccgatggttacttgcttcgtctgttctgtgttggttttactgaaaaacgcaacaatcagatacggaagacctcttatgctcagcaccaacaggtccgccaaatccggaagaagatgatggaaatcatgacccgagaggtgcagacaaatgacttgaaagaagtggtcaataaattgattccagacagcattggaaaagacataga

SEQ ID NO: 5885 - DNA, 490 bp, Homo sapiens; identical to SEQ ID NO: 1451

SEQ ID NO: 5886 - DNA, 628 bp, Homo sapiens
gccagttagttttactagtggatcccaaatccaaagcagtgtagtggtgattggtcagtgactaaccaggcagctaagaagtcttaggcagcagcccagacatgtatagaggggcagttagagggagaacaggggtgggaaagggagcaaggggcagatagctcagcaaggaaagaatgggctcagaaaaaggagggctggctggaggagtgaggggcagcttaagtttggggagggtagaaacgccgtttccttgggaactggagtgcagtatgagctgggtgtcacttggctctgaacatactggctttgctgtaatgcttgaaaaggcgttggtatcttcattttacagttcattaacccaagtacgttttcttatttaaatgacaactttggtgctttaaaatgaggtaccactttttaaagctagctgtgtcgagttaaagaaaaaatcagcagttttttctcccagaaatgtaattgccaaacactattcatccccatcttaagttttacaaggtgatgtaatcagcttgttgtagtgatgctggccaaatggtgctcagcaggtgagaacaaaaaaaccccagatttcagtgaactaatacacagcttgagcgtttccatg

SEQ ID NO: 5887 - DNA, 542 bp, Homo sapiens
gaagcgcgcccccggggccggtcccggagggctcgatccgcatctacagcatgaggttctgcccgtttgctgagaggacgcgtctagtcctgaaggccaagggaatcaggcatgaagtcatcaatatcaacctgaaaaataagcctgagtggttctttaagaaaaatccctttggtctggtaccagttctggaaaacagtcagggtcagctgatctacgagtctgccatcacctgtgagtacctggatgaagcatacccagggaagaagctgttgccggatgatccctatgagaaagcttgccagaagatgatcttagagttgttttctaaggtgccatccttggtaggaagctttattagaagccaaaataaagaagactatgctggcctaaaagaagaatttcgtaaagaatttaccaagctagaggaggttctgactaataagaagacgaccttctttggtggcaattctatctctatgattgattacctcatctggccctggtttgaacggctggaacaatgaagtaaatgagtgtgt

SEQ ID NO: 5888 - DNA, 469 bp, Homo sapiens; identical to SEQ ID NO: 1456

SEQ ID NO: 5889 - DNA, 536 bp, Homo sapiens
ttatatcctagcactattttacagcctaaggtgtgtgttagtctattcataaaaacatactgctgcatagagcaataatacctgccattatctaggtgtaataaaaaggtcccaagtggtcctctccaggtctttaattttccttttgaagataaagctccttctttcactttcatggttcaagatttttggaccttgcaagtgattgctattgaagtgtgccagatgtgagcagttgtgagcatagtactttaaaagaaggtgaaggagtgactttttcttccttattgtctcccctactaccatctgtagtttctacacatgtaacttttccaaaacagcaaggcatgggaagggataccagccagggccgccacagtccaggcatgggacttctgaagtgaggagatagagatgaaagcggcctgtattgataaatgacagatgatgaaaccaaggcctgctggaccaagattcaatgacttacccaaagctacacagcttgttggtggcagagttagctcccaatccccagc

SEQ ID NO: 5890 - DNA, 578 bp, Homo sapiens
tgggtggattgcttgagctcaggagttcaagaccagcctgggcaacataacgaaaccccgtctcgttatacaaaatacaaaaaagttagccaggcatagtggtatatgcctgtggtcccagctactcaggaggctgaggtgggaagaggatcgctggagcccaggaagttgaggctacagtgagtcaggatggcaccactgcactccatcctgggtgagagcaaaaccctgtctcaaacaaacaaaaataatagtaataaaaataaggagaagaaaaaatcagtatgtggagtggctattaggttagtgggagaagtctcaagaacaccatacaaaataatagaagggggatggaaggaaacaacttacaagaaaatgtacaaagcacttaaaatatttgagatgaatgagaatggatgagattgctgttgcttttctaacaggtcaatttcctcttctatcagcagagcacttgtgagtcagaatgtaaagggatgtgatgggatgaagttaatactgtgccctctacaagtgtaaagaaaagtctttgtttcttcttttttgtcttgagatgatct

SEQ ID NO: 5891 - DNA, 534 bp, Homo sapiens
catgtcactattaatcagaattcattcttgttattctctttaggaccttaggcaaatgcataaaatagatgaaaatatgtctttgacagtcccactgccgtaagaaaaaaaaagctgtgtacctttttttaatgtttctattctaatcttttcaacatctttgtaagcttgagacaactgattttaacataacttaatttggtactcgcttcttatcccttcttttcactcatactttctcctttttatgactccatcttctctatatttttgctccttttctttgtccccaccccctgtctcttttcacatcttcctttctttctcctattataagcttcttgaggttaggaattgtttcttttttatttctctagtctgtacagtgctgctgggttaaagtgctcagtggttaccaagacgtctgaataattcattattcgagcccagctctagtacaactattctatattaattttccttgctattttagcctgtattggtcttttgtatccccaaatttgtcattttggt

SEQ ID NO: 5892 - DNA, 528 bp, Homo sapiens; identical to SEQ ID NO: 1458

SEQ ID NO: 5893 - DNA, 396 bp, Homo sapiens
ataggaaagatctctatatggatctttatagatagatctaatatagaaagatctatattctgcatattttctcagtcatgataaacaggaacacttgaccagatcttctaccccacacagcatagataacatctcaaactcggtaaactgttattctaatagatttttttttttgaaacagggtcccaccctgtcactcaggctggagcacaggggggtgatcacagctcactgcagcctcgacctcctggactcaggtgatcctcccaccccaccctaatgagtagccgggaccacaggcatgcgccaccacatccagctaattttttttgttgtttttggagaaatgaggtctccctgtgttgcccaccctgttctcaaactctgggcttatcc

SEQ ID NO: 5894 - DNA, 521 bp, Homo sapiens
gcctccctctggcctcagtttcctcatgttgtagtagcggagcatggcccggaccgggcccccgagaccgccccgtgcaacctcaccgccagcctgggggcctcagcgactgggacgggaccaaggggctcggggattctccctgcccccggccctggtgcgtgactgaccctcctgttcccagggcccccagcgcaggccgggatgttcgtcctggtggaaatggtggacaccgtccggatccccccttggcagtttgagaggaagctcaacgactccattgccgaggagctgaacaagaagttggccaacaaggtcgtgtacaacgtgggactctgcatttgtctgtttgatatcaccaaactggaggatgcctatgtatcccctggggatggcgcatcacacaccaaagtccattttcgctgcgtggtgtttcatccattcctagatgagattctcattgggaagatcaaaggctgcagcccagaaggagtgcacgtctctctaggcttcttcgatga

SEQ ID NO: 5895 - DNA, 505 bp, Homo sapiens
cagcgtgtccgcgacctcacctttaggtcctgtgagggacggcccaggtggcaggatgtcctggtctggccttctccatggcctcaacacgtccctaacttgtggcccagctctggttccccggctctgggctacctgctccatggctaccccgaaccagatgcaccgcctggggccccccaagcggccgcctcggaagctgggccccacggaaggccggccgcagctgaagggtgtggtcctgtgcacgtttacccgcaagccgaagaagcccaactcagccaatcgcaagtgctgtcgagtgcggctcagcactggccgcgaggccgtctgcttcatccctggggagggccacaccctgcaggagcaccagattgtccttgtggagggcggccgcacccaggacctgccaggcgtcaagctcgccgttgtgcgtggcaagtacgactgtggccacgtgcagaagaagtgacggctgggggcacagtgggctgggcgcccctgc

SEQ ID NO: 5896 - DNA, 624 bp, Homo sapiens; identical to SEQ ID NO: 1461

SEQ ID NO: 5897 - DNA, 448 bp, Homo sapiens
tataaattctcattgtatcctcccatctgtccactgaggaagattatcaaatggatcttcatccaatggatgcataaactttcctacttacttgtagtggcaaagctggctttcaagtacaagtttgttggctccattacctatgctcctattatccgcttctgtcccgcaacaaagtagctcacttaggcgtatgaccacatgcattatgatagtttcccaccaccatattgaataataaaagctttggccaaagcttttttaaagtaggagaaacattggatgtatatgttttgcattgccatttgatttcaaattaatcaggaagaattagtgattttaatgagcagtaaagtggtgcaataaagcagaaagaaaaatgttcagccagaagtgaaagactagtaaaaaaagaaaaaaaaatatttgtacatatgatctaatttag

SEQ ID NO: 5898 - DNA, 624 bp, Homo sapiens
tggcgagggtctcacgtcgtgggcttgctgaccaccttgaacttcggagacggtccagacaggaacaagacccggacattccaggccacagtcctgggaagtcagatgggattgaaaggatcttctgcaggacaactggtccttatcacagccagggtgaccacagaaaggactgcaggaacctgcctatattttagtgctgttccaggaatcctaccctccagccagccacccatatcctgctcagaggagggggctggaaatgccaccctgagccctagaatgggtgaggaatgtgttagtgtctggagccatgaaggccttgtgctgaccaagctgctcacctcggaggagctggctctgtgtggctccaggctgctggtcttgggctccttcctgcttctcttctgtggccttctctgctgtgtcactgctatgtgcttccacccgcgccgggagtcccactggtctagaacccggctctgagggcactggcctagttcccgacttgtttctcaggtgtgaatcaacttcttgggccttggctctgagttggaaaaggttttagaaaaagtgaagagctggaatgtgggggaaaataaaaagcttttttgcccacaaaaa

SEQ ID NO: 5899 - DNA, 624 bp, Homo sapiens
tgactgctgtagttcagaagaggtttggctttccagagggcagtgtagagctttatgctgaaaaggtggccactagaggtctgtgtgccattgcccaggcagagtctctgcgttacaaactcctaggagggcttgctgtgcggagggcctgctatggtgtgctgcggttcatcatggagagtggggccaaaggctgcgaggttgtggtgtctgggaaactccgaggacagagggctaaatccatgaagtttgtggatggcctgatgatccacagcggagaccctgttaactactacgttgacactgctgtgcgccacgtgttgctcagacagggtgtgctgggcatcaaggtgaagatcatgctgccctgggacccaactggtaagattggccctaagaagcccctgcctgaccacgtgagcattgtggaacccaaagatgagatactgcccaccacccccatctcagaacagaagggtgggaagccagagccgcctgccatgccccagccagtccccacagcataacagggtctccttggcagctgtattctggagtctgaatgttgctctctaaagacctttaataaaattttgtacaaaaaaaaaaaaaaaaaaaaaaaaa

SEQ ID NO: 5900 - DNA, 623 bp, Homo sapiens; identical to SEQ ID NO: 1462

SEQ ID NO: 5901 - DNA, 563 bp, Homo sapiens
tacggccgggtggagtggctcacgcctgtaatcccaacacttctggaaactgaggaggatcatctgagcccaagagttcagagacgagcctgggcaacatggcgagaccccgtctctacaaaaaaattttaaaaatcagctgagtgtggtctcactagcttatggtcccagctactcgggagactgagatgggaggatcgcttgagagttcaaggctgtagtgagctataatggagccactgcactccagcctgggcgacagtgagaccctgtcaagaatactccaatacaaaagtacaaagaaagatagatgaaatcatgtaaaaaaaaatggtaaagttcaatggtaatgataggaattcaagcaggtgtaaaatgaaaaaagactatcccaatgaagtcagggtatgggaaacaatgtcactgactctccgggattgtcaacaatcacaatttgggaatattggcatcactgtcaaaatgtgcatacttttaaacctatcattcttatgagcgggaatttatcctgatgaaataactagacaaatatgcgactattcatt

SEQ ID NO: 5902 - DNA, 557 bp, Homo sapiens
tacggccgggtactccaggacttagaatagtgcctaaagtgctgcagccaaagacagagcggaactatgaaaagtgggcttggagatggcaggagagcttgtcattgagcctggcaatttagcaaactgatgctgaggatgattgaggtgggtctacctcatctctgaaaattctggaaggaatggaggagtctcaacatgtgtttctgacacaagatccgtggtttgtactcaaagcccagaatccccaagtgcctgcttttgatgatgtctacagaaaatgctggctgagctgaacacatttgcccaattccaggtgtgcacagaaaaccgagaatattcaaaattccaaatttttttcttaggagcaagaagaaaatgtggccctaaagggggttagttgaggggtaggggtaagtgaggatcttgatttggatctctttttatttaaatgtgaatttcaacttttgacaatcaaagaaaagacttttgttgaaatagctttactgtttctcaagtgttttggagaaaaaaatcaaccctgcaatcactttttg

SEQ ID NO: 5903 - DNA, 543 bp, Homo sapiens; identical to SEQ ID NO: 1463

SEQ ID NO: 5904 - DNA, 432 bp, Homo sapiens; identical to SEQ ID NO: 1464

SEQ ID NO: 5905 - DNA, 530 bp, Homo sapiens; identical to SEQ ID NO: 1465

SEQ ID NO: 5906 - DNA, 564 bp, Homo sapiens
tgtttctgcatggtaatgtcatgtaaatgctgatattgatttcactggtccatctatatttaaaacgtgcaagaagaaaataaaatactctgctctagcaagttttgtgtaacaaaggcatatcgtcatgttaataaatttaaaacatcattcgtataaaatattttaattttcttgtatttcatttagacccaagaacatgctgaccaatgtgttctatatgtaaactacaaattctatggtagctttgttgtatattattgtaaaattattttaataagtcatggggatgacaatttgattattacaatttagttttcagtaatcaaaaagatttctatgaattctaaaaaatatttttttctatgaaattactagtgcccagctgtagaatctaccttaggtagatgatccctagacatacgttggttttgagggctattcagccattccattttactctctatttaaaggccgtgagcaagcttgtcatgagcaaatatgtcaagggagtcaatttctgaccaatcaagtacactaaattagaatatttttaaagtatgt

SEQ ID NO: 5907 - DNA, 407 bp, Homo sapiens
ggcacgaggagagagagaagaggtacacatagggctataatcatagatcgaacacctttaaagaaacacgaagaacagctggaattagaaattaataaaatggccaagattggtaataaggaagcttgcgcagttttatccaaacaacttgtgcatctacggaaacagaagacgagaacttttgctgtacgttgaaaaggtacttctatgtatacacaaacaaaagtgatgaagtcccaaatgaagatggctggagcaatgtctaccacagcaaaaacaatgcctgctgataacaagaagatggatccacaaaagacattacaaacaatgcagaatttccagacggaaaacatgaaaatggaaatgactgaagaaatgatcaatgatacacttgatgacatctttga

SEQ ID NO: 5908 - DNA, 300 bp, Homo sapiens
gagacacccattgaggggaagaacatgtcctttgtgaatgatcttacagtcactcaggatgggaggaagatttatttcaccgattctagcagcaaatggcaaagacgagactacctgcttctggtgatggagggcacagatgacgggcgcctgctggagtatgatactgtgaccagggaagtaaaagttttattggaccagctgcggttcccgaatggagtccagctgtctcctgcagaagactttgtcctggtggcagaaacaaccatggccaggatacgaagagtctacgtttctggc

SEQ ID NO: 5909 - DNA, 230 bp, Homo sapiens
tttttttttttttttttttttttttttattttttttttttttttttttttttttttttttttttttttcggaggcttttcattatcacagaacacaccccctgtaatgggtgcaaaaaggaaatgaggggtggaaggaaaggaagtctaattgggaaaggctggatgggcacttcatttcttctctttcttcttatccttttcattcatggccaggatcatcatgagttt

SEQ ID NO: 5910 - DNA, 558 bp, Homo sapiens; identical to SEQ ID NO: 1467

SEQ ID NO: 5911 - DNA, 384 bp, Homo sapiens
tttttttttttttttttttttttaaggcctggcttcttctgctgcgacacctgctgcttcattgaggtacttgttaccaactttgctttcaaaccattttaggtgcacaaaaacttcactgaagtgctcccgatcaaaatctgatagtttcacaaggtatttctcaaatcgaggtaagttgaggtgcccactttcattaatataacccccaagttctggcaggatggtaacatatgttccataaagaagaggcagtgcatcatgattaatatgtaaatgaggtagatgagggataaaatcattaccaacaagaaaccccatcaaaatccaatcatctattatcctttcaatatcatatttaaatgtgatcttttcttttaatac

SEQ ID NO: 5912 - DNA, 422 bp, Homo sapiens; identical to SEQ ID NO: 1470

SEQ ID NO: 5913 - DNA, 442 bp, Homo sapiens
ttttttttttttttttttttttttggcctatttactgaaagtttaacgaaataaaaaatagaataataaaacattcaaggaccaagggataatcaaaaccaagtacatttgaaaaagaacaaaatagaactttgctatactccataatgataaaataaaaatccaaaaataagatgtaacattcaaaaccttatatgcacttgactacagaaccactactatgtcaataaataactgacagaattagaaggagaatttcaaatttacaattgtagggtaacctttcaatattctgtatgagtgttaaattctcatattacaagcaaagaaaaatgctaatggttttctaggatttgaacaagacaataagcaaatttgatctatgattaccttcatttgacacagaaaacatcccttctttttttcaaagcacacgttggac

SEQ ID NO: 5914 - DNA, 492 bp, Homo sapiens
ttcaaccacaagtatttattgatggatcgaagatacaattttaatggaacaataaggcacaaccgtggattaaaacactttgctatacagccaaaaggggggaaaatctataaccttaggaactttatgccaatcaagaagcctctaaagtacctctctaatagatcagtatcagacattcttcccttttacataattcctatattacatcacttaatcataaaatctgactgatacttcataaagaattcctcattcatttatatttgagccatccagcctggctactcccctgttctccacccttttccatcactttgcagtggtattttttagcaatcttcaatagttttccaaagcaaggaaacaagcaagcaagcaatgagtcagaaagtcaaccaaaggcagatgtgtggctaaatacactcatagagacatacattaggatagcaatagcctgattcacttaagtctaaactaagctgacttggc

SEQ ID NO: 5915 - DNA, 463 bp, Homo sapiens
gatgctccgggtcaatgagtaccgctttgcttgggtggaagcagatggggtaaattgcataatgggagtgttgagtaacaagtgtggctttcagctccagtatcaaatgattttttcaatatggctcctggcattcagtcctcaaatgtgtgaacacctgcggcgctataatatcattccagttctgtctgatatccttcaggagtctgtcaaagagaaagtaacaagaatcattcttgcagcatttcgtaactttttagaaaaatcaactgaaagagaaactcgccaagaatatgccctggctatgattcagtgcaaagttctgaaacagttggagaacttggaacagcagaagtacgatgatgaagatatcagcgaagatatcaaatttcttttggaaaaacttggagagagtgtccaggaccttagttcatttgatgaatacagttcagaacttaaatct

SEQ ID NO: 5916 - DNA, 589 bp, Homo sapiens
ttttttttttttttttttaagaaaaatacagtttatttcaggcttacagtaactttcatagcactgctgtgctccgttcgttcatctgtttggttgtccaaagtaccaggctgctagggtgggcccagaaactgctcccttgtaaactctgaagctgagctcccagaaggctgattctaaggctactactcacaggtcaagccacagattaagcagtaaggtattatttattaagatcttaagcctcacccctgaactcaaatgggatgggataaggagtaaggaaagaggttagaggagacagaaaacaaagcccagctcttccaagctcaccacctagccaaggtcttcgaattcctgagggaacccaggactggaggctgggctgaaggaaggcagcattcctgggaggttccaagttctgggcaggggtacagagctgttgcgtgtgtgtggggtggggtaagggagaggctccagagctactttcattcacattttcaactattctctcttccacttgcatgttcatctcaccattcctgacccagccagccccctatcactgagtactgctgctgctgctgat

SEQ ID NO: 5917 - DNA, 440 bp, Homo sapiens
tctggacctcccctgaccactgggtccgccccggccccttgcagagtttccctcatcccgtccttctcccctcacggttctggggccgcccaacctgttccggcaccacctcccgccaggagaggtccccgaaccacgaggacaagctaagtgcggtggatatgggaatctaaataaatacgaaattggggtttccaaagcgttttcacaggtcagtctcataaacgtatcgtgagctgttttacgttcacagaaacttcagtgatcttttccagggtggaacagccagccccaggttcatttgctgggactggaattcacctcctctgagtcatgctggttatttaaataacgtttacaaacctttgttcactaaaccaggttttcagcattcagtatcgcatgttggtttttaataaagcgatgtcatttcttgcagt

SEQ ID NO: 5918 - DNA, 349 bp, Homo sapiens
tttttttttttttttttttttgagggaaaagttttaaatttttaatgaaaaagacttagaacaatgtattatttacatgtaaataagaaaagagagcagaatccccatatcctcttcaaaggaagggagacggcaggccatttatgagaagaaagtccatataaaccctattaagtagaatctggatctaaatacttccaaacaggagtacacagcaggtgaacagtctccctcatcccactgatctgctgcttcagataagatcagcaacgttcatcggcatctcatcaatctgagtggaatagtactgctcgatatctctgaggatgcggatgtcgtcattctttac

SEQ ID NO: 5919 - DNA, 566 bp, Homo sapiens
ttttttttttatttttttttttgggacaacgtttcactctgttgcccaggctggagtgctatggcacaatctcagctaactgcagcctccacctcccaggttcaagcagttctcctgcctcagcctcccaagtagctgggattacaggtgcccgccaccatgcccgactaattgtttgtatttttagtagagacggggttttaccatgttggccaggctggtctcaaactcctgccctctagtgatttgcccgcctcggcctcccaaagtgctgggattacaggggtgagccactgtgcctgtccagcagaactttttaaaacttggctttgttgcccaatagggagaggttttatttttcttattttgaataatgacttgaattttgttaaaatgataaacaattgaagcagtaaagacaaaaattcacttaatctcaccatcagaaaaaaaaaatcattgcttaatattaagtggcattattccagacattcatgcatgtcagcagatagaaagtctgatacctagatagaaacaattcttgaaaatagcattaccatgtaatt

SEQ ID NO: 5920 - DNA, 582 bp, Homo sapiens
tttttttttttttttatcagataagagctcagcctttattgtgggctcagaagggcacaagagcagaacatgcagaggactggcagcactctggcctggccatcaggccaaggcaggcagcagcaggcacccatgcagctgcagcagcctcacttgctgcacttcctgggggagcatttgcactccatggcattgagaacctcatggtacacaacagagccattggtgcagtgcagggccacctgcatgggctccgtccgtgtcggagagcagcaggagcactggtcctgcacatcgttgatgtcaatggagtacatggctttgctggcacatttgccctggcagtagtggatatccacctctacttcagacttacagcttcccaccttgacatactgcagcctggcagtgatgtcgttgcactcaggctcctcacatgtgtcacagcaggtgcctggaatttacataattttacctccctcagccagacacttgtgttcatcaaagggtgggcagcctgtgaccctcttctcccagaagtactctcctctctcattgaccttgcagaagtgagtatcacag

SEQ ID NO: 5921 - DNA, 611 bp, Homo sapiens
tttttttttttttttttttttttttaaatttcttttaaattattttatttttgtataagctaaaaggaaatttacacactgaaatttcaaaagaccttgggcatgcacattaaccttgttagaggttcttctacatgtctctcttttttccataggaatttccccaaacatttaaaacccatagttttcactgtatatacagcctaaaccatagcaatctatgattatgtcattttacactgtgcaaaatcctcaaaaaatagtggtacaatagaacaaaaaaatcagtaacaagtaaattccattgtaagacgttcatataatttggtccttctctgaatcatactgattttaaacagacacaatctctttaaacccctccaatcaagttctgacaatgatccataaccaatactaccaatcaatactcatcattaataatcataatggctatagcaataaaactaggaatagccccctttcacttctgagtcccagaggttacccaaggcacccctctgacatccggcctgcttcttctcacatgacaaaaactagcccccatctcaatcatataccaaatctctccctcactaaacgtaagccttctc

SEQ ID NO: 5922 - DNA, 592 bp, Homo sapiens
tttttttttttttttttttttttttttagatcacaggaattttaaattgcagatcagtcatgctacttggggtgatcagaaagacttgaacacttaccaagtgaataattttattaaggtcctgaaggtgagtgtccggaggtgctgggtaaaacacatcacaggtaagaaatgggaaacctacctcagcatttctgaaaggcacaatctatggaagggaaacctagcgtaataaaaccctcactggatgtacatggaaaggagtatggtgagctatttcctttttaaaggatgagacctccataaattggcccctcggattctggtgattcccgccgcaagcgcaaatgctccagtgtgttatgaaaatgtttgttaatctgctctgtttcttcactggattcaagattcgggaggtcttctcgaatcttttggataagctggtttaaaacctgaattgttgccgcatcattttccttttcataaaaatagatatatctgttcagaatttctataaaaagctgcacttgtagagaggggtccatgcactgatttgctatttttagagctttttttaggcactccattaccc

SEQ ID NO: 5923 - DNA, 433 bp, Homo sapiens
tttttttttttttttttttttttttttggtctcaaaacatccccatttaatagccactcaggaagggtccatcatgcctgtctagatcattaacaggaagatggcacagatacacaccccaccagatccgtgtggcagagttcatgaataagagaatgcccagggggtcaggatgagagttggggcttccagatgcaaccacctctccctacttggagatgctctttccattaccagctcaagaatctggtcttgttgactaaggaaagaggcagtttccttacatgtttgctgaaataaacacacataaagtcctccatccgacaagagttgctgatcttcagtgcctttctaccaaaagattttcttacaaatgtccttctctcctcaaatctgagcacatcttgtgtttttttaatcagtaaaaaggtca

SEQ ID NO: 5924 - DNA, 566 bp, Homo sapiens
ttttttttttttttttttttttttacctgtccatagactttattatttggaagggggaagaggaggtccttggcactggttgggatggaagccccaggggcaaaggtttaggagttccagggctcagctgtcactgggcagggcaggcacaccggcaagggcaggcagcaggcgtgtatatatgtccaccccacggaggaacacagcctcatgcagccgttcatcgtggtcgtgcagcagcacaggtgtgcggttcatgggtgagaagcctagagctgggacccccaccgcgcggatatagcggttgtcagtggcagcaggcatgatctcaggctccagagtgaggttcatatccttgcagacccggctaaaagctgcccaccaagggtttgagtcatcagtaggtgtcacttgggggtgcatccacttctgagcaaactctagggtgaccccctcgccagctgcctggcaccagctctgcagctgctcctcaaaagccttgaagtccacatccggtgccacacggaagtcaaagctggcgctcatggtggcaggtatcacgttat

SEQ ID NO: 5925 - DNA, 527 bp, Homo sapiens
tagttggaactttctgttccctatggagaggcttccctacacagggcctgctattgcagaatgaagccatttagagggtgaaggagaaatacccatgttacttctctgagttttagttggtctttccatctatcactgcattatcttgctcattcttcagttctctactccctcttgtcagtgtagacacaggtcaccattatgctggtgtatgtttatcaaagagcacttgagctgtctgaagcccaaagcctgaggacagaaagaccctgatgcaggtcagcccatggaggcagatgcccttgctgggcctgggggttttccaagccctcagctggtcctgaccaggatggagcaagctcttcccttgctcatgagctcctgatcagaggcatttgagcagctgaataacctgcacaggcttgctgtatgacccctggccacagccttccctctgcattgacctggaggggagaggtcagccttgacctaatgaggtagctatagttgcagcccaaggacagttc

SEQ ID NO: 5926 - DNA, 83 bp, Homo sapiens
gcaccccaccatgagaggagccggtgcttttccatagctccctgatggtctgagggacccacccctgccccactttaccatag

SEQ ID NO: 5927 - DNA, 609 bp, Homo sapiens
  misc_feature 548: n = A,T,C or G
attgagtccctgaccaaggacaaggtccaggccggggacgtgatcaccatcgacaaggcgacgggcaagatctccaagttgggccgctccttcacacgcgcccgcgactacgacgctatgggctcccagaccaagttcgtgcagtgcccagatggggagctccagaaacgcaaggaggtggtgcacaccgtgtccctgcacgagatcgacgtcatcaactctcgcacccagggcttcctggcgctcttctcaggtgacacaggggagatcaagtcagaagtccgtgagcagatcaatgccaaggtggctgagtggcgcgaggagggcaaggcggagatcatccctggagtgctgttcatcgacgaggtccacatgctggacatcgagagcttctccttcctcaaccgggccctggagagtgacatggcgcctgtcctgatcatggccaccaaccgtggcatcacgcgaatccggggcaccagctaccagagccctcacggcatccccatagacctgctggaccggctgcttatcgtctccaccacccnctacagcgagaaagacacgaagcagatcctccgcatccggtgcgaggaagaagatgtggag

SEQ ID NO: 5928 - DNA, 592 bp, Homo sapiens
ccttctacaagttctgcaccctactgggcgggactacggctgatgccatgtgccccatcctggagtttgaagcagaccgccgcgccttcatcatcaccatcaattctttcggcacagagctgtccaaagaggaccgtgccaagctctttccacactgtgggcggctctaccctgagggcctggcgcagctggctcgggctgacgactatgaacaggtcaagaacgtggccgattactacccggagtacaagctgctcttcgagggtgcaggtagcaaccctggaaacaagacgctggaggaccgattctttgagcacgaggtaaagctgaacaagttggccttcctgaaccagttccactttggtgtcttctatgccttcgtgaagctcaaggagcaggagtgtcgcaacatcgtgtggatcgctgaatgtatcgcccagcgccaccgcgccaaaatcgactactacatccctatcttctagcgtcctggcccaaggctctcaattgcactctttgtgtgtgtgtgtgtgtgcgcgcgtgtgtgtgcgtgtgtgtgtatgtggtctgagacaagcctgtggctcacctgcct

SEQ ID NO: 5929 - DNA, 472 bp, Homo sapiens
cctttcactttacggcgagattaagctcagggtcaagttctgagcaaaaagtgtcaaggagcctttttgcaaccccctataatattgaaacagattctgtgccctttaaaggagataataactaacatctggggagcgctttacaatttagaaaaggcctttcacacacaggcctgtttcatcttcacaacaatcttataaaacagatatattgttcccatttcccaaataatgaaacggaagcgccgaaaatatctcctatagggctcttcaaactgtggtcaacttagtaaatgatgttgacagtggaagtgtgatcattttattttcctgcctttggaattgaagattgtaattttgcaaaaattttgttgaagatgatgtagctttggttcagagagctggagtacagtggcgccatctcagctcgccgcaacctccacctcctgggttcaagcgattctcctgcctc

SEQ ID NO: 5930 - DNA, 621 bp, Homo sapiens
gtgggcgggggaaacttttccagaaagtttccaatatgacgttttcataagttgaaaaaactctccttagtgcttattttctaacttaaaattcacctggaactttaaatgggaaaggattcttttaattgtggattataggcataatactgtttgcatctgaattttctgtaagtgaataatagtttaatagaggaactcatgatttgtactattgaatgattaaactaagtatgaagtgataccattcagcatggcatcaggtcattgcagttttagttctgtgtaacacaagcactcactgaaattccagtttctaggattagtgtaggagcctaacgtgcttctactgttttaatgggttaatcctggattacttaacaatttatgtcaattgcactggtttaatttgttgctaaagaaataatgccctgggtttagtaacaaatacagctcaactattcttgaatatattttgaaaaaaaaatgtatgtaacctaccttttgtaaacgttccatttcttttttccctcatttttgactcttaaaggtgcaatttattactgaattgggatttctggcagcacagaactgctttttattttggggtctgtgagtttc

SEQ ID NO: 5931 - DNA, 461 bp, Homo sapiens
atggtccagatgatgtacagcatggtctggctctgcagtctccaggagaagttctcacaaacggatatcctgatcctaatgacagcggccatctgccacgatctggaccatcccggctacaacaacacgtaccagatcaatgcccgcacagagctggcggtccgctacaacgacatctcaccgctggagaaccaccactgcgccgtggccttccagatcctcgccgagcctgagtgcaacatcttctccaacatcccacctgatgggttcaagcagatccgacagggaatgatcacattaatcttggccactgacatggcaagacatgcagaaattatggattctttcaaagagaaaatggagaattttgactacagcaacgaggagcacatgaccctgctgaagatgattttgataaaatgctgtgatatctctaacgaggtccgtccaatggaagtcgc

SEQ ID NO: 5932 - DNA, 524 bp, Homo sapiens; identical to SEQ ID NO: 1476

SEQ ID NO: 5933 - DNA, 443 bp, Homo sapiens
catatcaaggttcctgattcagcactttgctcttttaataacaaatcgtccaaagatctcaaagtaagggttttttttttagcttccattcttccgcagacttggtcatcgacctatttttgttgaagaatgaaaggcaatgacaagtttaacataaacaaattcgtgaattcttgttcattttgcattcctgcagtcagtgctaatccgtcgttcttaatcaggagttctgccaggtttaaggtcacctgcactcccagccaagtggtgatgtatgcctcccactctctgcaaggttttcctcatttttatattcatttattcatcattcattcattcacctaactttcattaaatagctgcaccatcccaggccctgtgcggagcatcgggaatacaaagatgagataaaacattgtccctgcccccgggggctcacatgc

SEQ ID NO: 5934 - DNA, 606 bp, Homo sapiens
attgcgagagccagagagaacatccagaaatccctggctggaagctcaggccccggggcctccagcggcaccagcggagaccacggtgagctcgtcgtccggattgccagtctggaagtggagaaccagagtctgcgtggcgtggtacaggagctgcagcaggccatctccaagctggaggcccggctgaacgtgctggaggagagctcgcctggccaccgggccacggccccacagacccagcacgtatctcccatgcgccaagtggagccccccggccaagaagccagccacaccagcagaggatgacgaggatgatgacattgacctgtttggcagtgacgatgaggaggaggacaaggaggcggcacagctgcgggaggagcggctacggcagtacgcggagaagaaggccaagaagcctgcactggtggccaagtcctccatcctgctggatgtcaagccttgggatgatgagacggacatggctcagctggaggcctgtgtgcgctctatccagctggacgggctggtctggggggcttccaagctggtgcccgtgggctacggtatccggaagctacagattcagtgtgtggtggagga

SEQ ID NO: 5935 - DNA, 594 bp, Homo sapiens
atagtacgtggatgtcagtgagacagcatgagagccagcagtcatcaaagcgttccacgtttgaagttagcaactgcttaaagttatgccctattaaaattgctttctcaaaagtttgggttagtttcaaatgtgatattttggagggaaggtaaagtaggtatctttcaggtcgtgataatgagctcctatgaaaggatgcaatataatgacccgcttttctagaaagttcataatcagctctggaacaagcacacttgattcctcactgtgcttcagaatgagattaagatcagatgttggaacgtgctatgctgtagcgtgtctggaaacaaagtacacaaacctggctacggtgatgagttagcttctgcttactacctgtgacaacccaagtgggtgacactagtgaaccttctccagtctgcaggctggcatagaaggctcttagattatattgggcagcttgcaatctgccgaagcagtgacttgcatttccacacttggcttgagcactcaacccagaaggcgaagatagcttttggttgtaggcggcttcctgtatgggatatccctcggtaagggtaaaggagc

SEQ ID NO: 5936 - DNA, 617 bp, Homo sapiens
ccggggaaaagaaaatcggtgtatcctatctgccccaatagctgagctgtagcatttgggctggcctgccttatcagaaaccaagcttatgaagatcttctcccagcaggtccatagcagtaggcttaggatgcagtatatggggccgcatttaaaaggagggaaagattgtttggtgctggaacattccagggaaaaggagactggaatgaaaggtctgaaattatcttctcaattggactccttccagaaaggtggccgtgcctctaagcatgtttttcccagtatgccctaggcctccccccatggtgttttcatatgaggtactactgtgaaggatctggttcctcattcactgtttgacaagtctttcatgtgtggagttactcttctcatgcccaattttcatttgagtttagtggcttaaccaaacaatgactcctcattccagcggtgacagaagagaaagggtcatttacatcaggaaagaggtcttgtatctgggagtagagagctaaccatggagcacagtggctggtgggtgacttagtctgatggtttgtggaccatagaagtcttcacctctggtttgaggtgcagggctgtcttttgtactg

SEQ ID NO: 5937 - DNA, 570 bp, Homo sapiens; identical to SEQ ID NO: 1481

SEQ ID NO: 5938 - DNA, 480 bp, Homo sapiens
tacctgagtggcatgcctgaatgcaagtttgggatgaatgacaagattgttattgaaaagcagggcaaaggcacagctgatgaaacaagcaagagcgggaagcaatcaattgccattgatgagtgcggactaactacgttgtgcgactcagcaagtttgactctgaacgcagcatcagctttatcccgccagatggagagtttgagcttatgaggtatcgcacaaccaaggacatcatccttcccttccgggtgatcccgctagtgcgagaagtgggacgcaccaaactggaggtcaagggggtcatcaagtccaactttaaaccctcactgctggctcagaagatcgaggtgaggatcccaaccccactgaacacaagcggggtgcaggtgatctgcatgaaggggaaggccaagtacaaggccagcgagaatgccatcgtgtggaagatcaagcgcatggcaggcatgaaggaatcgc

SEQ ID NO: 5939 - DNA, 625 bp, Homo sapiens
ccaggggccttcgaggtgccttaggccgcttgccatgctctcagaatcgctgccgccatggctagtcagtctcaggggattcagcagctgctgcaggccgagaagcgggcagccgagaaggtgtccgaggcccgcaaaagaaagaaccggaggctgaagcaggccaaagaagaagctcaggctgaaattgaacagtaccgcctgcagagggagaaagaattcaaggccaaggaagctgcggcattgggatcccgtggcagttgcagcactgaagtggagaaggagacccaggagaagatgaccatcctccagacatacttccggcagaacagggatgaagtcttggacaacctcttggcttttgtctgtgacattcggccagaaatccatgaaaactaccgcataaatggatagaagagagaagcacctgtgctgtggagtggcgttttagatgccctcacgaatatgaagcttagcacagctctagttacattcttatgatatggcattaaattatttccatatattatataataggtccttccactttttggagagtagcaaatctagcttttttgtacagacttagaaattatctaaagatttcatctttttacctcatatt

SEQ ID NO: 5940 - DNA, 589 bp, Homo sapiens
gcctgtgatcccagctactcaggaggctgaggctggagaatcggttgaatcagggaggttgaggctgcagtgagccgtgatcctgccactgtactccagcctgggtgataaaatgagaccctacctcaaaaaaaattcacaacaaaacaaaaaatatacaagcaatatcctgtacagtgctcactcttctttttcttgtgatgatgaaaaatgataaaccgtgtgtgcaaagagatgacgtgatgaagcgggacagctcaggatttcatcacactactctgaaaggcacataatttaaaacttatgaattgtttatttctggaattttctatttaatatttttgaaccatagttgaccacaggtaactgaaaccacagaaagcaaaaccacagataagtagggactactgtaaaaagagaaatagttccataactttcaatgttaacttttttagccccaaagtttagaagattcagaggagaaagattttcccagtcaaaaagcttctgcccaaactcagacttttcagatatcttgttgaaggcaaatttccatgttatttcaatggcaaatggcagacccttggac

SEQ ID NO: 5941 - DNA, 581 bp, Homo sapiens
tacggccgggatgggaggatcacttgagcccagaagtttgagaccagcctgggcaacatagtgagaccccgtctctgtaaataattttaaaattagctgagtgctggtacatgcctgtagtcccagctgcccaggaggctaaggcaggagcattgctagagcccaggagtttgaggctgcagtgagccgtgatcacaacactgcagtacagcctgagtgacagagtgagcactggcaaattttaaaattttctgtaaagactcactatgttgcccaggctagccttgaactcctggcctcaagcagtcctcccatattggcctctcaaggcgctgggattacaggtatgagctactgtgctggccaagagagaatttttcttattcacaaataatgttcacagtaagaatttacttaaaatttttttaaagtaaaaagaactggctgggcacagtggctcacgcctgtaaatcccagcactttgggaagccaaggtgggtggatcacttgaggccaggagtttaagaccagcctggccaacattgcaaaagcccatctctactaaaaatacaaaattagcc

SEQ ID NO: 5942 - DNA, 80 bp, Homo sapiens; identical to SEQ ID NO: 1484

SEQ ID NO: 5943 - DNA, 644 bp, Homo sapiens
atagtgatgttatgtctaaactaggttttctttctgagagaagcacaagtcccataaattcttctccacctcgctgctggtctcccacagatccaagagctgaagaaatcatggctgctgcagaaaaagaggcaatgctttttaagggtcctaatgtatataagaagactgttaattctcgtataggaaaaactagtcgcgcaagagcacagattaagaaatcaaaagcaaagcttgctaatccctctatagttactaagaaaaggaacaaacgaaatcagacaaataaactagtagatgatggaaaaaagaaaccaagagcagaacaaaaaacaaatgagaaaggtacatcgagaaagcatataacacttaaggatgaaaaaataaaatctcagtctggtgctgaggttaagtttgtactgaaacaccagaatgtgtctgaatttgcaagtagttctggaggctctcaactactttttaaacagaaagatatgccactaatgggctctgctgtagatcatcccctttctgcttccctacccactggaattaatgcacaacagaagttatctggctgcttttcttctttcttagaaagcaagaagtctgtagatttgcagacattccccagttcacgagatgat

SEQ ID NO: 5944 - DNA, 530 bp, Homo sapiens
gaggaccgcctgtgccacggaggcggaggttgcagtgagccgagatcttgccactgcactccagcctgagcaacagagagatcccgtctcaaacaaaacaaaacaaaaccaacaaaatattctttatatggcatgttaaattctgcagagaaagtacaagaaagaaaatgagagaaaaaaggagaattatagatattcagaaaacagatcaatccaaaaacaaattttaatgaaaaagtagatcaccaattataaaatcctccatgtatctcaaacctttagtgactatcgcaggaaagccatgctatttacaagtgattgaatttcaataaagctgccgtatcatttgcaggatcttcactctcaaatttacaactatgtgaagtgggcatatgactcaatgagactaacaggcttcaaaattcagtaagttcaaaatcatgtttcggtatgacagcaatgtctctttctctgcctttacagaataaatctttaatagtaattgacttaggtctggggcggaggctcat

SEQ ID NO: 5945 - DNA, 497 bp, Homo sapiens
ggagtgttgagcgggctaagaagtatatccttggaaatcctctgaccccaggagtcactcaaggccctcagattgacaaggaacaatatgataaaatacttgacctcattgagagtgggaagaaagaaggggccaaactggaatgtggaggaggcccgtgggggaataaaggctactttgtccagcccacagtgttctctaatgttacagatgagatgcgcattgccaaagaggagatttttggaccagtgcagcaaatcatgaagtttaaatctttagatgacgtgatcaaaagagcaaacaatactttctatggcttatcagcaggagtgtttaccaaagacattgataaagccataacaatctcctctgctctgcaggcaggaacagtgtgggtgaattgctatggcgtggtaagtgcccagtgcccctttggtggattcaagatgtctggaaatggaagaaaactgggagagtacggtttccatgaatataca

SEQ ID NO: 5946 - DNA, 611 bp, Homo sapiens
  misc_feature 41: n = A,T,C or G
gtgccactgcactccagcctgggcgacacggcgagctccgntctcgaaaaaacaaaacaaaacaaaacaaaaaacgaggatatcttttcaaagcagatacaattaaaggaaaattctctagggatagttcaagttgctgtgatggctttatctgctaaaattttagttaagctagcagataatttatgagcaagttcatgatacatggaattcaggttatgtgtagactgaaagctctctgggctgacacctctctgggcagacaccacattattcctgtatctgcagctcttaggacagtggttaacacataattggtattcaataaatgctttttcactgaatgaatgaatttttagtgaataaagaataaataaagtgttgaagtagcccaaaggactttaaaatttacattttctttttctgtagatcacttgataggtacattgttggatgtaattaaaataagacgggctctatatgtctacgaataggacagtagttaataaacaatgatgcatttacacaaaggtataccatgaatctatacaaaggaatgaagatttcgtgtgtctgtatgtatgactatatggtgattatataaagaaaag

SEQ ID NO: 5947 - DNA, 606 bp, Homo sapiens
agctgcctcattagtattcgtacccacgaggcggcgcagcgggccctcggggacagcgagcgtcgcggccatggcttatcactcgggctacggagcccacggctccaagcacagggcccgggcagccccggatccccctcccctcttcgatgacacaagcggtggttattccagccagcccgggggatacccagccacaggagcagacgtggccttcagtgtcaaccacttgcttggggacccaatggccaatgtggctatggcctatggcagctccatcgcatcccatgggaaggacatggtgcacaaggagctgcaccgttttgtgtctgtgagcaaactcaagtattttttttgctgtggacacagcctacgcggccaagaagctagggctgctagtcttcccctacacacaccagaactgggaagtgcagtacagtcgtgatgctcctctgcccccccggcaagacctcaacgcccctgacctctatatccccacgatggccttcattacttacgtgctcctggctgggatggcactgggcattcagaaaaggttctccccggaggtgctgggcctgtgtgcaagccagcgctggtgtgggt

SEQ ID NO: 5948 - DNA, 552 bp, Homo sapiens
ccacctctaagtagcgctggtatatggtcaaatgaatgaaccacctggtgctcgtgcccgggtagctctgactgggctgactgtggctgaatacttcagagaccaagaaggtcaagatgtactgctatttattgataacatctttcgcttcacccaggctggttcagaggtgtctgcattattgggccgaatcccttctgctgtgggctatcagcctaccctggccactgacatgggtactatgcaggaaagaattaccactaccaagaagggatctatcacctctgtacaggctatctatgtgcctgctgatgacttgactgaccctgcccctgctactacgtttgcccatttggatgctaccactgtactgtcgcgtgccattgctgagctgggcatctatccagctgtggatcctctagactccacctctcgtatcatggatcccaacattgttggcagtgagcattacgatgttgcccgtggggcgcaaaagatcctgcaggactacaaatccctccagggtatcattgccatcctgggtatggatga

SEQ ID NO: 5949 - DNA, 300 bp, Homo sapiens
gaggcagaggttgcagtgagccgagattgcaccactgcactccagcttgggtgataaaataaaataaaatagtcgtgaatcttgttcaaaatgcagattcctcagattcaataatgagagctcagactgggaacagggcccaggaatctgtgtggtacaaacctgcatggtgtttatgcacacagagatttgagaaccattgttctgaatgctgcttccatttgacaaagtgccgtgataatttttgaaaagagaagcaaacaatggtgtctcttttatgttcagctcataatgaaatct

SEQ ID NO: 5950 - DNA, 606 bp, Homo sapiens
tggttgttggctctgaatttgcttgctgaagacacatattttgggtatactgtaaaaatgttgaaaaaatacagaggagctcctgggggccgtattctgtatttaccttgtgatttaggtttgcttgaaataccctcataaacataaatagtgatatatgctttaatgtttttatgtttaggaaagaggtgaaattagattctgagaatacttttaccaggaaaaattccccaaacatatataagtttttccttaccttttctagtacattcacaaccttcttcatctgcactgggatggtgatctggaaatgtgaatcatagaaaatggcaggcaatagaggtgtgactggcatacgcactgtcaaaattactaaacctgtgttgtctgggacatctaagatggaatcaagttacataaagtttagttaaattcaggaaggatttgttcacctctatgcattagatgtcatattgaaatagtatgtgaaaaggaaaatcttgcctggactcacaatttttatttactgttataatgtcatctatgctgttcaattatagtattatttgaaaggaatacatgaaaaaaaaataggcacagtttgta

SEQ ID NO: 5951 - DNA, 589 bp, Homo sapiens
cgaggcggcggtcaggtgccgaacccacggccaggcttccgtggccagcagccctagaggaatggccatcctgtccctgcgagcccctgggccctggcaggcgatgcaggtgggatgctatggaatatgatgagaagctggcccgtttccggcaggcctacctcaaccccttcaacaagcagtctgggccgagacagcatgagcagggccctggggaggaggtcccggacatcactcctgaagaggccctgcctgagctgccccctggggagccggaattccgctgccctgaacgcgtgatggatctcggcctgtctgaggaccacttctcccgccctgtgggtctgttcctggcctctgacgtccagcagctgcggcaggcgatcgaggagtgcaagcaggtgattctggagctgcccgagcagtcggagaagcagaaggatgccgtggtgcgactcatccgcctccggctgaagctccaggagctaaaggaccccaatgaggatgagccaaacatccgagtgctccttgagcaccgcttttacaggagaagacaagagcgtcaagcagacctgtgacagtgtaacac

SEQ ID NO: 5952 - DNA, 598 bp, Homo sapiens
acatacattgatagggtcagcaaattcccaaaatatccaactgtgcggcatgggaattcttcctgaacactgtattatagacatcacgtcagaaggccaggttatgctgactcctcagaagaacaccagaacatttgtaaatgggtcatctgtctccagtccaatacagctacaccatggggacaggatattatggggaaacaatcatttcttcagactcaatttgcctaaaaagaaaaagaaagcagaacgagaggatgaggaccaggatccctccatgaagaacgagaatagttctgagcagctggatgtagacggagactcctccagcgaggtgtccagtgaagttaactttaattacgaatacgcacagatggaggtcaccatgaaggccctgggcagcaatgatccgatgcagtccatattaaacagcctagaacaacagcatgaagaagaaaaacgatctgcactggagcgccagaggcttatgtatgagcacgaattggagcagctccggagaaggctgtctcctgagaagcagaactgccggagcatggacaggttttctttccactcgcccagcgctcagcaacgctta

SEQ ID NO: 5953 - DNA, 643 bp, Homo sapiens
ccggggttgagtttattactagtaccacaaacctgctccacacctggatggggtgcatgtagtctttggactggttatttctggttttgaagtaatcgaacaaattgaaaatctgaagaccgatgctgcaagcagaccatatgcagatgtgcgagttattgactgtggagtacttgccacaaaatcaataaaagatgtttttgagaaaaaaaggaagaaaccaactcattcagaaggctcggattcctcttccaattcctcctcttcttcagaatcatcttcagaaagtgaacttgaacatgagagaagcagaaggaggagacataagaggaggccaaaagttaaacgttctaagaagaggcgaaaggaagcaagcagttcaggagagccaaggaataaacatgcaatgaacccaaaaggtcactctgagaggagtgataccaatgaaaaaaggtcagttgattccagtgctaaaagggaaaaacctgtggtccgcccagaagagattcctccagtgcctgagaaccgatttttactgagaagagatatgcctgttgttactgcagaacctgaaccgaagattcctgatgttgcacccattgtaagtgatcagaaaccatctgtatcaaagtctggacggaag

SEQ ID NO: 5954 - DNA, 567 bp, Homo sapiens
ccacaccaccatacagcctgtcaaatttgagggataactaaagagactctctacaaaggaataacagctggattacagctcacgcctgtaatcccagcactctgggaggccgaggcaggccatttgagtcaggagttcgagaccagcctggccaatatggcgaaaccccatctctacaaaaaaatacaaaaattagcaaaaaaatataaaaattagaactcatcaccagcaagcccgcactacatggttaaaggatggccttcagaaggaaccagatggaaatatggatctaaagaggaatgaagagcactggagatgcttcttcctatggaaaaaaggaattggaaggaggcagtaaatgaggccacatggataagaaagaaagggagagagagaagtatcaatgccttttgtagtgacagcatctctgtttaagggcttagacgcgaagtccaagattctggtttgaacggacaatcatttctcacgaaacctatctaagttatgctttagatcaactctttagagactgatttcttttttctctttttttttaaaaaaaaaact

SEQ ID NO: 5955 - DNA, 520 bp, Homo sapiens
gagaattgaaatgtatatctcctttggcataatgagccttggcttactttccctcctggcagtcacttctatcccttcagtgagcaatgctttaaactggagagaattcagttttattcagtctacacttggatatgtcgctctgctcataagtactttccatgttttaatttatggatggaaacgagcttttgaggaagagtactacagattttatacaccaccaaactttgttcttgctcttgttttgccctcaattgtaattctggtagagacggagtttcaccgtgttagccaggatggtctcgatctcctgacctcgtgatccgcccgccttggcctccaaagtgctgggattacaggtgtgagctaccgcgcccggcctattatcttgtactttctaactgagccctctattttctttattttaataatatttctccccacttgagaatcacttgttagttcttggtaggaattcagttgggcaatgataacttttatgggcaaaaacattcta

SEQ ID NO: 5956 - DNA, 268 bp, Homo sapiens
cacatttgctcctatctttcgcctccttaggatcgctcaggcccctctgtgtccactgtaactttcccagagtcggtcccaaagctcactggaccctctagatgttccctgtggccctgggggctccatggtcaaatatgtgagtgtcacatcctgtattttatggtgagtcacatgttacaccagtgcacaataggctctgacgtttcctgcaataaagaggtctgttgaactgggcccaatccggcatttttcatgcttacttgac

SEQ ID NO: 5957 - DNA, 585 bp, Homo sapiens; identical to SEQ ID NO: 1492

SEQ ID NO: 5958 - DNA, 612 bp, Homo sapiens
agcaagcaggaagtgaactgagggccaccctgggaggaagccgactaggcgaattcacttactgaccggcctgggctgctctgagacatggaggaagccagtgaaggtggaggaaatgatcgtgcgcggaacctgcaaagtgaggtggagggagttaagaatattatgacccagaatgtggagcggatcctggcccggggggaaaacttggaacatctccgcaacaagacagaggatctggaagccacatctgagcacttcaagacgacatcgcagaaggtggctcgaaaattctggtggaagaacgtgaagatgattgtccttatctgcgtgattgtttttatcatcatcctcttcattgtgctctttgccactggtgccttctcttaagtaacagggagcctctcccacctgcccttctcttcagggacaaccctccataaatgtgtgccaagagggtctcctttcctgtcttcctctacagagaatgctgctcggtcctcctacccctcttcccgaggccctgctgccatgttgtatgccccagaaggtaccttggtcccccggaaggagagaaaaaagagagatggactgtggctgcatttcttgggt

SEQ ID NO: 5959 - DNA, 580 bp, Homo sapiens; identical to SEQ ID NO: 1493

SEQ ID NO: 5960 - DNA, 614 bp, Homo sapiens
ttgttttgtttttatttttaaatgaagtttccatctgtacacgttaagaaaataaacaaaacaacaggaagccattctctgtgtatcctccttggaggcaggaaggatggatctgccgataggcacacaacagcacacagccagggctcatgggagtgagtgcccgtcacctcacgaaggtcatgggcctaaaacatacggaggctccatagaaaatgctccagctggctttgcagtcatgcataaaggtgaggacacttaattcaaggcatctgggggctggtgtcaccgcacatgaagagtagtgcccatgctgtcccacgagcttccttgggaaaagggaaaaacaaatcttttcctcaaatagaattgtcgcaggaaagagccatgacattttattcactgtttaatcatcgggtggcaggatttctttgaagtagaatctgcatataaataaaaatgaggcagcaaattggttacaaggcttcacagattttttgaaaagaattccacaattttgaaacactatcactgaattcatgtaaattttggtaaaaatatgaattatacagtggtttaaattatgatatttaagaaacactgaacaaattata

SEQ ID NO: 5961 - DNA, 577 bp, Homo sapiens; identical to SEQ ID NO: 1494

SEQ ID NO: 5962 - DNA, 127 bp, Homo sapiens
tgaaggcctttgtggtctgataccaacccctgtgtcccaattataaattctccttttcttctttacctaggttaaagtgttggattcataattctcacttcaggaagactgaaaaccagactttatt

SEQ ID NO: 5963 - DNA, 386 bp, Homo sapiens
tacacacattatattatatatatgtatatacacaccttatattgtatatatataaatcaatgcgtacgtgccttatatacatgtgtatatgtgtgtatgtatgtgtgtgtatatatatatatagagagagagagagtgagagagatttgtaatcatttctcttctctctcatatgctaccaccgcgctgataagcccacaggaaaaacaatggagaggggtgtgtgaaagagtggaagagctgaaagacacacactgtccttgaggagaagtacaaaagcacgcccccaaagcccagaggagatgaaatacacacacccatcattgggaatttaaaaatcctgtgctaaaagttaccaaaacaaaacataaacaaaaaaaaattaa

SEQ ID NO: 5964 - DNA, 489 bp, Homo sapiens
gactgtgcatgatgtttattagtgatgacagtgaggtgaggcaggggcttgtggagcatgctctgtaggtcacacactaaagccataaggcaagagtagccggggagacaggtcctctgtgccctgtctctccccatctaaccctaacctaacaagcggcagctatgagtcagggaacaaagtctggagcccggttctccaaagatgtatgagggacaagaacagaaatgacaggatgcagggcaaaagaatgagaaaggcaaggaggcccccctaagttctctgctacacatgccctccttccccaaacccccatccaggttggctcccatctgccacttggcttcaccatgctcctggtccctggtcctgtcacatgttaagaagcttcctggcagggtgaggagagcccttccctccaagagcttcagctgtgagctctctctggcccgagcgtggccagcctgctgctccagtcttggatgtggc

SEQ ID NO: 5965 - DNA, 797 bp, Homo sapiens
  misc_feature 431, 462, 476, 783: n = A,T,C or G
cagtgcgggcctgcgcccagtcccggctgtcctcgccgcgacccctcctcagccctgggcgcgcgcacgctggggccccgcggggctggccgcctagcgagcctgccggtcgaccccagccagcgcagcgacggggcgctgcctggcccaggcgcacacggaagtgcgcttctctgaagtagctttggaaagtagagaagaaaatccagtttgcttcttggagaacactggacagctgaataaatgccgaatctaaatataaaagaggactgcaatgccatggctttctgtgctaaaatgaggagctccaagaagactgaggtgaacctggaggcccctgagccaggggtggaagtgatcttctatctgtcggacagggagcccctccggctgggcagtggagagtacacagcagaggaactgtgcatcanggctgcacaggcatgccgtatctctcctctntgtcacaacctctntgccctgtatgacgagaacaccaagctctggtatgctccaaatcgcaccatcaccgttgatgacaagatgtccctccggctccactaccggatgaggttctatttcaccaattggcatggaaccaacgacaatgagcagtcagtgtggcgtcattctccaaagaagcaggaaaatggctacgagtataagaagattccagatgcaacccctctgcttgatgccagctcactggagtatctggttgctcagggacagtatgatttggtgaaatgcctggcttctattggagacccccagaccgagcangatggacatgatat

SEQ ID NO: 5966 - DNA, 487 bp, Homo sapiens; identical to SEQ ID NO: 1497

SEQ ID NO: 5967 - DNA, 489 bp, Homo sapiens
ttttttttttttttttttttttggtctgggaactttaatactgtgacaaagttctctaaaataggcaccttccccaccgtacctcatcgcccagggcaggcaggcagggcaggctagatctcgtaccgatacttgagcacgcctcctcctggtgcagaaagaaacctcttctgtaccgaaatacaagcagcagctgtggcctgggccaccaggtggagcatggggaacactctgggccctgggaggacgaagccagtgccactaggagcagactggctggggacggttgtccacacagactctggccccatctgggtgggcttgcagcaggcgtcctgggccagaggaggggccctggcatctatccaacaccaggacctctctttaggcctaggccaaactcttcagaagtcacgacacacagatgtgggccccggtcacgcctcatgagctgtctctgggaagaaaatctcccggcatcgctgcacc

SEQ ID NO: 5968 - DNA, 555 bp, Homo sapiens; identical to SEQ ID NO: 1502

SEQ ID NO: 5969 - DNA, 573 bp, Homo sapiens
cagagcagttctttgaaactattctcaagttttgaacagaaagccatgctgttaaagcgccaggcttttgctgtcttcagtggagaacttgatcaataccacctttaccttccactgatacaagaacgcctgacagacaatctcagagttggacagacatccatagttgctgctcagatgcttctttttttcagagttttgctgctaagaatatctcctcaacatttgacttcattgtggccaataatggtctctgaattgattcagacattcacacagcttgaagaagatctaaaagatgaagatgagtcattgagaagcaccaacaaagtaaacagaacgaaagtttcagtcccggatgcaaatggaccctcagtgggggagataccccagagtgaactcatcttgtatttatcagcttgcaaattcttggacacagcgctttcttttccacctgacaagatgccattatttcaaatttataggtgggcatttattccaaaagtggacacagagggccctgccttcctgtcggatgtagaggagaatcaccaagaatgcaaaccccacact

SEQ ID NO: 5970 - DNA, 506 bp, Homo sapiens
ggaggaggagccgtgtgccctggcactgagcggccgcggccatggcgtacgcctatctcttcaagtacatcataatcggcgacacaggtgttggtaaatcatgcttattgctacagtttacagacaagaagtttcagccagtgcatgaccttactattggtgtagagttcggtgctcgaatgataactattgatgggaaacagataaaacttcagatatgggatacggcagggcaagaatcctttcgttccatcacaaggtcgtattacagaggtgcagcaggagctttactagtttacgatattacacggagagatacattcaaccacttgacaacctggttagaagatgcccgccagcattccaattccaacatggtcattatgcttattggaaataaaagtgatttagaatctagaagagaagtaaaaaaagaagaaggtgaagcttttgcacgagaacatggactcatctccatggaaacgtctgctaagactgcttccaat

SEQ ID NO: 5971 - DNA, 528 bp, Homo sapiens
tttttttttttttttttttttttttgggggggacaggaagtagaatttattggtgagtattaagaggggggcagcacattggaagccctcatgagtgcagggcccgccacttgtccagagggccacgactggggatgtacttgaccccacagccatctgggatgagccgcttttcagccaccatgtcttcaaattcatcagcattgaacttggtgaagccccacttctttgagatgtggatcttctggcggccaggaaacttgaacttggccctgcgcagggcctcaatcacatgctccttgttctgcagcttggtgcggatggacatgataacttggccaatgtgaaccctggccacagtgccctggggctttccaaaggcacctcgcatgcctgtttggagcctgtcagccccagcacaggacaacatcttgttgatgcggatgacgtggaaggggtggagccgcacccggatatggaagccatctttgccgcaactttttaccatgtacttattggcacaaattc

SEQ ID NO: 5972 - DNA, 411 bp, Homo sapiens
tttttttttttttttttttttcagaattctttaatgacatgatgttgagcatcttttcatatgcatatacatatgggtgaggtgtacgttcagagcttttgcccgcttttaatcaagttgtacatcttcatattgttgcattttaagagggtttttttttttggtatattttgggtcgcagtgctttatcagatatgtcttttgcaaatattttctcccagtctgtggctcgtgttgtgaacgtggctagttctcttgacatacatatcttttcccagtatgtaatcctgttgtgctttttttttttcctttagagacggaatcttgctcttgtcacccaggctggagtgcagtggcgcgatctcggctcactacaatctccacctcccaggttcaagggattctcctgcc

SEQ ID NO: 5973 - DNA, 513 bp, Homo sapiens
tttttttttttttttttttttagaggagaagagggaacaataataaaaatttcaggccacacgttgatgtccaaagatgctacaatatgtatctagaaaagtttccacattaaactgtatttcagtgtggccaggtttctaggcccactgcatttacatacttttcatgaacttagacataccataattttttgtgttttaccaaaatttgcctataaattaggtgctaatttatgtatcttcacacattacaggataatcctgagcatcacaaccctttccaactttcataattagagtatttgaaaggttagctttccaattatttttcccagttaaaattcatatttccatctccattttcttttctctcttaaggattcttgattttattctccagctcggaaatgccgagcactttgatttcccatgagatgcttttggaaactactttaatatccagattttatgatctgtaattttctaggttcataagaaaaacaaaggactatt

SEQ ID NO: 5974 - DNA, 622 bp, Homo sapiens
tttttttttttttttttttttttttcgccagggatattggtctaaaattctcttttttttgttgtgtttctgccaggctttggtatcaggatgatgctggcctcataaaatgagttagggaggattccctctttttctattaattgccttccaaccttgttataattatgccaaaagtcaaacttatttgacagaaccacaattctttgacagaactaaaaaaatcctcatagtagaattagattggaaacaaagattacacccagtaatcttttcccccccacaagacggagtcttgctctgttgcccaggctggagtacagtggcgtgatctcagctcgccgcaacctccgcctcccaggttcaagcgattctcctgcctcagcctcccaagtagctgggattaaaggcacccaccaccacacccagctaatttttgtattttttagtagagacagtgctttaccatgttggccaggctggtctggaactcctaacctcgtgatccacccaccttggcctcccaaagtgctgggattacaggtgtgagccattgtgcctggcccacccaataatcttaactgatcctcatcactttacacacacaacttttttttttttt

SEQ ID NO: 5975 - DNA, 448 bp, Homo sapiens
tagcttattgtggtgctggaaggggccagtctggagacagtcaaggtagggaagacatatgagctactcaactgtgacaagcacaagtctatattgttgaagaatggacgggaccctggggaagcgcggccagatatcacccaccagagtttgctgatgctgatggatagtcccctgaaccgagctggcttgctacaggtttatatccatacacagaagaatgttctgattgaagtgaatccccagacccgaattcccagaacctttgaccgcttttgtggcctcatggttcaacttttacacaagctcagtgttcgagcagctgatggcccccagaagcttttgaaggtaattaagaatccagtatcggatcactttccagttggatgtatgaaagttggcacttctttttccatcccggttgtcagtgatgtgcgtgagctggtgc

SEQ ID NO: 5976 - DNA, 558 bp, Homo sapiens
accttcgaagtgcaggtactagatgacaagaatgtgcgtcgtcgctttcgggcaagtaactaccagagcaccacccgggtcaaacccttcatctgcaccatgcccatgcggctggatgacggctggaaccagattcagttcaacttgctagacttcacacggcgagcatacggcaccaattacatcgagaccctcagagtgcagatccatgcaaattgtcgcatccgacgggtttacttctcagacagactctactcagaagatgagctgccggcagagttcaaactgtatctcccagttcagaacaaggcaaagcaataactggaattgtgactcgagggatagacccctggatgtgactcttctttttaaaaggaaactatgtggaggacgatgcaaaaacatatttatcttaatttgctctgctgtagttctgttatttatacttggtgttgcttgtcatggacaccggtgaacatgccgtaactctgtgactgcattgtaagtgcagtgggggtaagcagtcctgtgagtggcgcatgaacgctggagcttatt

SEQ ID NO: 5977 - DNA, 481 bp, Homo sapiens; identical to SEQ ID NO: 1508

SEQ ID NO: 5978 - DNA, 605 bp, Homo sapiens
gttctaggtgtcatggctgccccaagagtctaggtaagagtttgttcccgtggtgcggagggtcaaggcccacacccggaaacccagcgaggtaaagttgcgtcttggttgtagagacgacaacttctccgcttcctcggcgatggcggcgtccgggagcggtatggcccagaaaacctgggaactggccaacaacatgcaggaagctcagggtatcgatgaaatctacaaatacgacaagaaacagcagcaagaaatcctggcggcgaagccctggactaaggatcaccattactttaagtactgcaaaatctcagcattggctctgctgaagatggtgatgcatgccagatcgggaggcaacttggaagtgatgggtctgatgctaggaaaggtggatggtgaaaccatgatcattatggacagttttgctttgcctgtggagggcactgaaacccgagtaaatgctcaggctgctgcatatgaatacatggctgcatacatagaaaatgcaaaacaggttggccgccttgaaaatgcaatcgggtggtatcatagccaccctggctatggctgctggctttctgggattgatgttagtactc

SEQ ID NO: 5979 - DNA, 326 bp, Homo sapiens
tttaatgttttctgttataatgaataatatgtcaataaatttgggttcaagaaactaacaggatttcaggagggcaacggggaagataagcctgcaatgaacagctagctgtgttcctcccttacgtcggatagaaaagagggagaactattactgaaaaaaattaagaaggaagaaatatcaacatcaattttaaatgcatcacagcctcagattcggcgcagtgattatccttttttaaaaggatatgtacagtagcaactgctctttaataccatctctcaagccaagtcaacactagtttgaagaatctcctggtatgtcat

SEQ ID NO: 5980 - DNA, 637 bp, Homo sapiens
atcattgacaagccgcgagttattgaagtcctgcctcgtggggccacagctgctgttcttgctcctgacagttcaaatgcctcctctgagcctagctcgtgagatgaaagaacagaagttgtttggaccttagagccattgtccacaatcacggatggttctcaagagttgattgtaagaaatttccaaagaaggctgcctgcatagtggttccggctgccctttctaggtgattggaatcagcccatctaaagcagtctttatatgcattccgaggccagagtaacattttgaactttggggggatatttgttcatcacctgggtagaagaggagcaaaaatacctctgttttctcttgccaaagtaagatgaagctattccaggttgagggattcttctttgcacggggttgattaatttctgcacagggagtgagattattaaagtaacacacacacaaagtaaattgcaaaatgaaaaaaattagaagcaaatgagttttggaccaatattgttgataaatctaaattgttaagagagatcttataatgcaacatcaaattccttattcaattttactgaagtactggctctttcctgctctggacaagaattgagcaacttgtctgatgact

SEQ ID NO: 5981 - DNA, 421 bp, Homo sapiens
agtgactgtgggtctggaatggctggtgtacttgggaatgcactatcaggattttacagcaatgctgggaaatgacagggaaaatgacaggaatgaatctcaccagattttttatgtacgcggcagagccttgagttactgtgtttattttccaatcaagtgaagatatctcctacttctcctactggaacatctcagcttctgcagtgaagaaaaattcctgtgatagttcagttctttagtttttctatttgaaaaaaaaaaatcatttaaatgatcctttgttcacggctctccttaatgactgagtgaacagttcctatctgtatatttgactaaaccttttcctaagctatctctcatggttcctatgtttttttatcataattaaaagcaaaaccatctggatcacctaacagtc

SEQ ID NO: 5982 - DNA, 578 bp, Homo sapiens
cgccgcgtccgcaggaagaggcgcggggtgcaggcttgtaaacatataacataaaaatggcttccaaaagagctctggtcatcctggctagaggagcagaggaaatggagacggtcatccctgtagatgtcatgaggcgagctgggattaaggtcaccgttgcaggcctggctggaaaagacccagtacagtgtagccgtgatgtggtcatttgtcctgatgccagccttgaagatgcaaaaaaaagagggaccatatgatgtggtggttctaccaggaggtaatctgggcgcatagaatttatctgagtctgctgctgtgaaggagatactgaaggagcaggaaaaccggaagggcctgatagccgccatctgtgcaggtcctactgctctgttggctcatgaaataggttttggaagtaaagttacaacacaccctcttgctaaagacaaaatgatgaatggaggtcattacacctactctgagaatcgtgtggaaaaagacggcctgattcttacaagccgggggcctgggaccagcttcgagtttgcgcttgcaattgttgaagccctgaatgg

SEQ ID NO: 5983 - DNA, 571 bp, Homo sapiens
tctccaagtcagtgctttagaaattcccaataagcatttacaaaaaaccaacttcaactgaattctgcagaaataatggttatttgtgaacttgtctgatgatctcttcccatttatcagattaccttttccacaaaagaaagtctctaaaatatcacagatttacctagagggcaacatttagatacaggaaaattttacatagtgttttgtcttaggattagacgtgaccagattgatcctgtttgattttggagagatcctattctaacaaatactctaaaatgataaaattgaggtacaactctcttaaaagagtatggataactatattttctggattctggaggttgataaccatatgcacttaacattatattctataaacattaagtagtgccagttatgaaattcccagttcttactaaattgtattagcaggagctggtaattacttgtattatcacatgtaactaataatttgaactatacttgaaggaccgtgttgatgtcaggtatctacagcggttggaagatagcagtattattagcataagctgcatacgtaata

SEQ ID NO: 5984 - DNA, 575 bp, Homo sapiens; identical to SEQ ID NO: 1511

SEQ ID NO: 5985 - DNA, 535 bp, Homo sapiens
ggtcccagcgtcgctccggacgctgccaacctgttctccaccgtcgctcgacttccacctctaagactcccacgaaactcaggttgaataattcatcaaattacacaactgaactcaagacatggctgcccagtgtgtcacaaaggtggcgctgaatgtttcctgtgccaatcttttggataaagatatagggtcaaagtcagaccctttatgtgtgttgtttttgaatacaagtggtcaacagtggtatgaggttgagcgcacagaaaggattaagaattgcttgaatccccaattttccaagacatttattattgattactactttgaagtggttcagaaattgaaatttggggtttatgacatcgacaacaaaactattgagctgagtgatgatgacttcttaggggaatgtgaatgtacccttggacaaattgtttccagcaagaagctaactcgaccactggtgatgaaaactggcagacctgcaggaaaagggagcattacgatttcagctgaagaaataaaagataat

SEQ ID NO: 5986 - DNA, 561 bp, Homo sapiens; identical to SEQ ID NO: 1513

SEQ ID NO: 5987 - DNA, 537 bp, Homo sapiens
tacggccgggttcgggggctcagccttaatcccagcactttgggaggctgaggcgggtggatcacctgaggttgggagttcgagaacagcctgaaccaatgtggagaaaccccatctctacgaaaaatacaaaattagccgggcgtggtggtgcatgcctgtaatcccagctactcaggaggctgaggcaggagaatcgcttgaaccaggaggtggaggttgcggtgagccgagatcgcgccattgcactccagcctgggcagcaagggcaaaactccatctcaataaataaataaataaataaataaacaaacaaactgaggtgggagtggtaacacgtgcgtatagtcccagctactcaggaggctgagagaggaggatcagttgagtacagaagctggaggctgcagtgagctataactgcacacttcagcctgagcgacagggcaagaccctgcctccaaaaaataaaggcagattttacggccacaggcgcagccagacagcagttgcctgccaaatgagctcccttggcct

SEQ ID NO: 5988 - DNA, 592 bp, Homo sapiens; identical to SEQ ID NO: 1514

SEQ ID NO: 5989 - DNA, 609 bp, Homo sapiens
tacggccggcttctattgacttgggttaatcgtgtgaccgcggtggctggcacgaaattgaccaaccctggggttagtatagcttagttaaactttcgtttattgctaaaggttaatcactgctgtttcccgtgggggtgtggctaggctaagcgttttgagctgcattgctgcgtgcttgatgcttgtcccttttgatcgtggtgatttagagggtgaactcactggaacggggaggcttgcaagtaaaatcttaaaaccacctattttaaactgatgacaagttaactctgattacaaagaaaaggcaaaaatgcaaactagcacagagaaaactaagaaaactttacattgtatattattgcaaaattataaaacaagaaggaaatttgaaagctatttgaccatttacttttaattaagacctcttttatcaggttttaagtatcacatttggaagacgattttctccattattctgtttctccaataactcaattgactccaaaaatgatcatcagcagatgcctagatagtttataatcccatataaatactgaattcttctattacaagcttgaggggatattgcttgaaaattgctctatg

SEQ ID NO: 5990 - DNA, 609 bp, Homo sapiens
aggagaagcgcatcactgaggcagagaagaacgagcgtgtgcagcggcagctgctgacgctgagcagcgagctgtccctggcccgagatgagaataagaggacccacaatgacatcatccacaacgagaacatgaggcaaggccgggacaagtacaagacgctgcggcagatccggcagggcaacaccaagcagcgcatcgacgagttcgaggccctgtaacagccaggccaggaccaagggcagaggggtgctcatagcgggcgctgccagccccgccacgcttgtgtctttagtgctccaagtctaggaactccctcagatcccagttcctttagaaagcagttacccaacagaaacattctgggctgggaaccagggaggcgccctggtttgttttccccagttgtaatagtgccaagcaggcctgattctcgcgattattctcgaatcacctcctgtgttgtgctgggagcaggactgattgaattacggaaaatgcctgtaaagtctgagtaagaaacttcatgctggcctgtgtgatacaagagtcagcatcattaaaggaaacgtggcaggacttccatctgtgccatacttgttctgtatt

SEQ ID NO: 5991 - DNA, 564 bp, Homo sapiens; identical to SEQ ID NO: 1516

SEQ ID NO: 5992 - DNA, 569 bp, Homo sapiens
tctgctgagtccgcagcactcagactacgtgcacctctgcagcaggtgcaggcccagttgtcacccctccagaacatctccccacggattctggcggtattgactcttcagattcagagtctgatatcctgttgggcattctggacaacttggacccagtcatgttcttcaaatgcccttccccagagcctgccagcctggaggagctcccagaggtctacccagaaggacccagttccttaccagcctccctttctctgtcagtggggacgtcatcagccaaactggaagccattaatgaactaattcgttttgaccacatatataccaagcccctagtcttagagataccctctgagacagagagccaagctaatgtggtagtgaaaatcgaggaagcacctctcagcccctcagagaatgatcaccctgaattcattgtctcagtgaaggaagaacctgtagaagatgacctcgttccggagctgggtatctcaaatctgctttcatccagccactgcccaaagccatcttcctgcctactggatgcttacagtgactgtggatac

SEQ ID NO: 5993 - DNA, 496 bp, Homo sapiens
tacggccgggcagcagagccgagtggcacagatttcagctgtgcccctggataaaaggggtgatggcagccaacaacaccagctatggggactctttgccaccttcgccattctgggagtaagctctcagctacgctgtgagcagtcaaagcaccgattcactgagcccagattgtatccgtctctggctatgcagggaggatctattaagccccttagttctccaccgacgggtggggcaccacttcccactgagtggcatctaatggataatgggcattcccccagtaggaagatttggaagccgatcccaacacacacacacgcatgcacgcacacacacgcgcgcgcacacacacacacacatgcaagcacgtcagctgcagtcccagggaggcaaagacagttatcaaaaggagagggttttccagacaaatattccagaagcatattcccacaagaaaagaagagactgggcagacaaaacaatagtgtc

SEQ ID NO: 5994 - DNA, 694 bp, Homo sapiens; identical to SEQ ID NO: 1520
  misc_feature 108, 128: n = A,T,C or G

SEQ ID NO: 5995 - DNA, 660 bp, Homo sapiens
tgttttatgctgaatgacttggctatccaaagcttctagtctagaggtctgttggttgaagcagactttccagtttgttgaaataatacgaagctgactagcttacgtgaatgatgttgccctcatttgttttgggtgaggactcattactgcagtatattgatctcttcaccaaatgctttttctttttctgaataaatgctgtattagaggttctatttatatatgatttttaaaactttggtttccttctatccaccaaatactgtgaattgtttttccatttatttttcttagctaatgtaactttattcttcacttttttttagccctagacttcctagatttttctgtggcattctgtaggacattgtattgcttggaaaaaaaaagatcaaaatcattctggggcaaatgctctattatccttatttatgacaagagaataatgaaattcataagaaattaataacattcagatattgctataaatgtacttgagtcattttcatttggggatagtaataatggctgtggcagctttaatggagaaacctgtgttggcctctttttctggcattaggatctcttgtcatagaactattggtaaagtacaggtttgatagcagagttcctgaattcagcatatcatcagaattt

SEQ ID NO: 5996 - DNA, 647 bp, Homo sapiens
tggaaacatgcggctgtcggtcgctgcagcgatctccctggccgcgtatttcgccgtatgggcctcggtcccgagtcccgcatccatctgttgcggaacttgctcacagggctggtgcggcacgaacgcatcgaggcaccatgggcgcgtgtggacgaaatgaggggctacgcggagaagctcatcgactatgggaagctgggagacactaacgaacgagccatgcgcatggctgacttctggctcacagagaaggatttgatcccaaagctgtttcaagtactggcccctcggtacaaagatcaaactgggggctacacaagaatgctgcagttcccaaatcggagtttggatcgggccaagatggcagtgatcgagtataaagggaactgcctcccacccctgcctctgcctcgcagagacagccaccttacactcctaaaccagctgctgcagggtgtgcggcaggacctcaggcaaagccaggaagcaagcaaccacagctcccacacagctcaaacaccagggatttaactggatctgaagagcctgcagcccttaatcagtacccatgatcacaggcctttggagcacttttactctctgagaagaactggagctagagatgtaaaatggacagtcttgat

SEQ ID NO: 5997 - DNA, 468 bp, Homo sapiens
tggttaaccctgcagaagtaacttctgtaaatatcatcagcagggcacattttctggtgaacgagccttcgttggttaaccctgcagaaagtaacttctgcttctggctgcacccacctctccactgtttccaaacagatattctccaaattagctccttttgggattcctacatctgctttatctacccagagctgtaccaagaagaaatctcaacccccaaaactctggggactccctgtctgcgaacctagtccaataattctgaacacacttggcagcttttacagggactaggcacagaatcctccctaatcctggaccactgagggcctctcccactccattcctgcctgtagaagctgagttctcaccaactgcctgctccctgctgtcctgccacacatgacagcttcattgtccactgttgctgccggaaaataaccgttttccttaaatatctgcatc

SEQ ID NO: 5998 - DNA, 555 bp, Homo sapiens; identical to SEQ ID NO: 1523
  misc_feature 487: n = A,T,C or G

SEQ ID NO: 5999 - DNA, 562 bp, Homo sapiens; identical to SEQ ID NO: 1524

SEQ ID NO: 6000 - DNA, 641 bp, Homo sapiens
gctttacccagtcacccgcagggtggccgacgggcgaagaacgacaggctgaacagctgtccgcagcaggagagggcggggatgcgggccgcatggacacagaggaggccaggccggcgaagaggcccgtcttcccacccctctgtggggacgggctcctgagtgggaaagaagaaacaaggaaaattccagtcccagctaacagatacacaccattgaaagaaaactggatgaagatatttactcctattgtggaacatttgggacttcagatacgctttaacttgaaatcaaggaatgtagaaatcagaacttgtaaggaaaccaaggatgttagtgctctgacaaaagcagctgattttgtgaaagcttttattctcggctttcaggtggaggatgcacttgccctcatcaggttggatgacctcttcctagagtcttttgaaattacagatgttaaacccctaaagggagaccatctatccagggcaataggaagaatcgctggcaaaggaggaaaaaccaaattcaccatagagaatgtgacacggacaaggatagttttggctgatgtgaaagttacatccttggctccttccaaaaatcaagatggcaagaactgccatttgcaacctaatctt

SEQ ID NO: 6001 - DNA, 584 bp, Homo sapiens
acgagctcatcagccgcaggccattcaccatccctcagtgctgagaaccaaagtgcctagagaagggcaggaggaggatgacgacgatgaggaagacgatgctgacgaggaggctcccaagcccgaccattttgttcaggaccctgcagtgctgagagagaaggcagaagccaggcgcatggcctttctcgccaagaaagggtaccggcatgacagctcaacagcagtggccagcagcccccgaggccatgggcagagccgcgagacaacccaggaacgcaggaagaaggaagccaacaaggcgacaagagccaaccacaaccggagaaccatggccgaccgcaagaggagcaaaggcatgatcccatcctgagacctggtgcagggccagtggggaggcagcggcaccagactcaccaggccgcgctcccatcgcctggggcctcctcactaggggccccaagttcaactcaacccctcaacagcctcagctttgcagcccctgagaaggccgcctctcatctaccagccagccatgagcgccttcctgcagacacacggtgccttatgccacagccgaagat

SEQ ID NO: 6002 - DNA, 496 bp, Homo sapiens
cggtgaaggggcagaacaggcaggttccctcgacccaggaccccctgttcccaggctatggcccccagtgccctgtagacctggcaggccccccgtgcttgcgacccctatttgggggtctgggtggctactggagggccttgcagaggggcagagaaggcaggaccatgacatctagggcctctgaactttctccggggcgcagcgtgacggctggcatcatcattgttggagatgagatccttaagggacacactcaggacaccaacaccttctttctgtgccggacactgcgctccctaggggtccaggtttgccgagtctcagttgtacctgatgaggtagccaccattgcagctgaggtcacttctttctccaaccgcttcacccatgtcctcacagcagggggcatcggccccactcatgatgatgtgacctttgaggcagtggcacaggcctttggagatgagctgaagccacaccccagttggaagca

SEQ ID NO: 6003 - DNA, 608 bp, Homo sapiens
ttgccagcttctctgattgcccctttggatatccagggtgagctagcaacaggagggcatatttcattgccgattttgactgtaagtgcactctctgggcagacaaatcaatctgagagctggcaaccctcgggtaggatggtcactcacagcggcagtatttttcacctttccctttagagatcctggtgtaacaaaaaacgactgggtagagtatcagaagacctggctggcaggcaccagcctgaccccttacttcagggtggcctggggcagtgacaagacctctcttctccttattcttttcatctgtaaaatgtgaatcttttacagataagaacctttgtgccttttaatgggcacaagcccttcactgaattttgcatagagctgggatgaaacccaaaattgtggtttaaagcccactaaagaccatgcaactgaggctggcagagatgtggagaagaatctgggttttccaactccaactccaataccctttccactgcaaaaagcataaaaacgctcgtagtttccttgcctgacaagcctgtgttgagtttcgaaagcatgtgaaagcaggttgagcaggacagagctatggcatg

SEQ ID NO: 6004 - DNA, 445 bp, Homo sapiens; identical to SEQ ID NO: 1527

SEQ ID NO: 6005 - DNA, 565 bp, Homo sapiens
tggtcccagtgtccagccaccgcaaccccctgctggacctggctgcttacgaccaggagggccgccggttcgacaacttcagctctctgagcatccagtgggagtccaccaggtcagtgttggccagcatcgaggctgagctgcccatgcagctggtgtcccaggacgatgagagtggccaaaagaagctgcacggtttgcaggccattttggttcacgaggcatcaggaaccacagccatcactgccactgccactggctaccaggagtcccacctcagctctgccagaacaaagcagccgcatgaccctctggtgcctctgtcggcctccatagagctcatcctggtggaggacgtgagggtgagcccagaagaggtgaccatctacaaccaccctggcatccaggcagagctccgcatcagggaaggctcaggttacttcttcctcaacaccacaccgcagatgttgtcaaggtggcctaccaggaggccaggggtgtcgccatgcgtttgatgttggtctccagctgtcttgcaagaggatgctttctcagcgccgtgcct

SEQ ID NO: 6006 - DNA, 475 bp, Homo sapiens
ggcaggcaaactcacttgtaacccgggaggtggaggttgcagtgagcccagaatgtgtcattgcattccaacctgggtaaccaagcgcgactctgtcaaaaaaaacaaacaaaaagcaatatactgggtaatcgatgacagcataattcactattatgtagatcggagagcagaggattctgaatgcatgatcatatcattaacatttcaatacattactcataattactgatgaactaaagagaagccaagaaattatggtgatagttatattgacctggagaaatgtaaacccaaaagaaccgtacgatgagaaatgtgctaacacagtctataagggcatgcatgaataaaaataggggataaaacaggaaagtttttcaaaagctttctgtgcatgtaagtcaacttgtatcggttaatttttaaaaggttaatttacatgcaataaactgcacatacttcaatagcacat

SEQ ID NO: 6007 - DNA, 565 bp, Homo sapiens
tccggcagaagaaacatcacggaagcgcaagcgagacagcggcgccggctcctccaccccgaccaccagcacccgcagccgcgacaaggacgacgagagtaagaagcagaagaagcgcgggcggccgcctgccgagaaactctcccctaacccacccaacctcaccaagaagatgaagaagattgtggatgccgtgatcaagtacaaggacagcagcagtggacgtcagctcagcgaggtcttcatccagctgccctcgcgaaaggagctgcccgagtactacgagctcatccgcaagcccgtggacttcaagaagataaaggagcgcattcgcaaccacaagtaccgcagcctcaacgacctagagaaggacgtcatgctcctgtgccagaacgcacagaccttcaacctggagggctccctgatctatgaagactccatcgtcttgcagtcggtcttcaccagcgtgcggcagaaaatcgagaaggaggatgacagtgaaggcgaggagagtgaggaggaggaagagggcgaggaggaaggctccgaatccgaatctcggtcc

SEQ ID NO: 6008 - DNA, 613 bp, Homo sapiens
  misc_feature 432: n = A,T,C or G
tacggccgggcaccattgttatattagcaattcctggacttcatgaacagagcactcgttattctgcaattaaatgaaaataatggcatcgcttagctataaggaaggaaacgttcaagtgcagcctctgtataattaagcttaacattattatcaacagaaagtgattgtagttgtgttcagaggtgagaagagatatgccaccaaccatttgacctatcaaaagaaaatggcttttgtgatgtttgatgttcttcctaacaaccagctttgtgccttgcatggggcaggtgccattttctgcaccattttctctcttttccagctgttttaaagttctttctcatcagttctcatgactgcctttgtaacacttgtctgttttccatttttccttatgtcttcaccagcatctgttgtcctgctttttgntttatctttttctttctttggcgacaatctattttcttgactcagacacactggctttctgacataaaattaaaacaatccatttaatttttaactaaaacaggtgttgagtgattgaccctatcaagcagctccctacagaaacactcatttttatgctgttccctcttgggcttcatgc

SEQ ID NO: 6009 - DNA, 583 bp, Homo sapiens; identical to SEQ ID NO: 1532

SEQ ID NO: 6010 - DNA, 240 bp, Homo sapiens
gccccaggggctggcacctgatgactgttcctttccccgcgacaggtgtagccttcacagacctcccggtgagtactactattgagtcttcccctcctgggtttctgggggctgactgggatggggcacggtggtacctgcaagcgcagggtgtggagtctggttctttacccaaccaaggatgagcgccatgctgacagcttgagggtaccaggaggggcacttgttggccttcctctc

SEQ ID NO: 6011 - DNA, 480 bp, Homo sapiens
gggcaaaccatgaggttaggagttcgagaccagcctggcaaacatggtgaaaccccatctctactaaaaatacaaaaaaattagccaggtgtggtagcacatgcctgtaatccccgttactcaggaggctgaggccagagaattgcttgaacccaggaggtagaggttgcaatgagctgagatcgcgccactgcactccagcctgggcgacagagcaagactcagtttcaaaaaaaaaaggaaaatggaagccccctacattggaccaaaggaagtctgcagcttttacattaagcagactttacactcaattaggttcacctagtctgtttttcttctcatcttgggaaactagccatttccagacatctcttcgtccatataattgaagaaactaatgtctaataggtaaaaccctgtttctgtaatctcaggtgtaaattcaagccaagcagcctagggtatatataatttctcaaa

SEQ ID NO: 6012 - DNA, 465 bp, Homo sapiens
gcaagtttggggcctacatgcaggtgcacattcagaatgatgggcctgtgaccatagagctggaatcgccagctcccggcactgctacctctgacccaaagcagctgtcaaagctcgaaaaacagcagcagaggaaagaaaagaccagagctaagggaccttctgaatcaagcaaggaaagaaacactccccgaaaagaagaccgcagtgccagcagcggggctgagggcgacgtgtcctctgaacgggagccgtagctcaggaggcagaattcagtgtgttatcattgggcagaactggatcctgaaaaattcaagatgctaagcacctacactactttaagagtttggaactgaaacatgaagaggaagacagaaataagaatttgggaacctgaatagctctgcaaaaaaacaccaaaggaccgttttatcgttttctgttgttgctgtggtggagtgatgc

SEQ ID NO: 6013 - DNA, 508 bp, Homo sapiens
atgctaagccatgaccagtgaggagaagcaacagagcctgtctgtccccatgagcggagtctgtcctctgctcttctgcagtcaggtcacagcctactgcctgggggctctagtcattccagtggaagacgaatgtagcctgcgtggtgatgtgacaactgtttcctccctgaccccagaggatctggctctaggttgggatcaatcctgaatttcgttatgtgttaatttacttttattaaaaaagtatagtatatataatacaaaacaataacccttctggggtttcttgtggcggttgaaatagtcccacatgtggtcatcagaaaataagccattcctcataccaatataggatcagctccttgacctctgaggggcaggagtgcttcctggtgtgtgtattagaatcccttcctgccttgtttcatggcagtgaaatgcctcttggtcctgtccaagtgtatctttcactgatttctgaatcatgttctagttgcttgaccct

SEQ ID NO: 6014 - DNA, 573 bp, Homo sapiens
ctcaggtggagacagaagcatagcccctctccaccagccctactcctgcggctgcctgccccccagtctccccactccaccctgttagttttgtaaaaactgaagaattttgagtgaattagacctttatttttctatctggttggatggtggctttaggggaagggggaaaggtgtaggctgggggattgaggtggggaatcattctagctggtgtcagcccctcttcccttcctccattgcacatgaacatatgtccatccatatatattcatcagaatgttaatttattttgctccctctgttaggtccattttctaagggtagaagaggcaagtggtacggatgaggtctgataagaacccacggtggagagggagactcctgggcagccgttttcctcatcctttccctctcccagtccatttgcaaatgtggcctccatgtgggtgctagggacatgggaaaaaccactgctatgccatttcttctctctgttcccttcctcacccccgacggtgtggctgatgatgtcttctggtgtcatggtgaccaccccctgttccctgttct

SEQ ID NO: 6015 - DNA, 63 bp, Homo sapiens
tctcaaaataataaataataaaatagactcaaaattagcactatatacatacattttttaaag

SEQ ID NO: 6016 - DNA, 405 bp, Homo sapiens
gagcaggggccatgggcttcacagcatggcacacatgtgggaactgcagacattcctctcacagctagaactgaaacaaaccctcttgctaggggtggtccgtgtgaggtgtcatcctgtccccctcataattactaatagctggaactggcagcagcctctactgggcttttactgtgatgtgttcagttcatgtcctaggaagtcagcttttgccccaggtgggaatccttatttggcttaggactgatccacttccatgttacttacatctgtgggtttttgttgttgctgttagaaaatttgtggctggtgaaaacagcactcctttggctggagcacatgtgtccgtgcatgtacttgggtgtttccctccatcctttctgatatgaccaaaaatcaagt

SEQ ID NO: 6017 - DNA, 574 bp, Homo sapiens
tttttttttttttttttttttttccttgaataatcattttattaacaaatacaaacttgaaatgttggtgataaaatatatcaatattgaacaaaaatgtgtgtaaacagtaattctacaactgggaacatatcccagttttgttaattttggtgacgtcttcccaaccatgtctgatcttcagtatcttcttcctcaagcatggcaggaatagtatgcttttaaatatcaggacaacaattggaaggaaaacagctatcataaaagttggaggtgtataccatacaaattgttttatatctatccacttattccaggcaaaaatcaatgcgtgtattgtgcccagtagaagggaaacaattcctagcttgctctgaatatagtgaaattctctccatgtcaaagagtcactcacagatggaatagatgtcacagccaacagagccagtattgccaatcccacaattcccagagacacataaatctccattctccaaacatcatgctcaatccaggcatcttctttattttgttggacctgttgatatgcccagtttagcaacttgtatctgta

SEQ ID NO: 6018 - DNA, 413 bp, Homo sapiens
tttttttttttttttttttttttggattaaaaaagtgtattggatttccaatactaaataaaaacatgaaatcgtttttaaaaagccatagagtttacggcatcaactacagaaaaggccaaacaagtgtgtacagacgccagtcccagcagccctctgggcccctcccacaggcagtgcggcgacagacacaggtgttccaagtccccccgaggaagctgctgagcggcagctcaaccaggacactacaggacacacaatggtttagttttgaaaatcacaggaaaatgtaagaaaatgtattaaattgtgaaaaggtgcaatacagaatagctttcctttttcttaattttttaaaaaacccccaactttgaacagctattttatttaaaaataggcccctcccccacccg

SEQ ID NO: 6019 - DNA, 359 bp, Homo sapiens
ttttttttttttttttttttttttccttcattaaaaattttaagttacaaacattttgattgatagtcagtcatggtggtgcacctagtccttactctgaaaccaaatatcctgccatctggggactttcaccagccctgtcggttatcttaccgcaacaccaaagaggaggctcagccttccccagttccctgagttcacattgattcaattctacagctcactagacctgcccaagacaggaccaatcaatgtcccgggagggcagagagggtggtggggccacacttacccatatggaaagacagtattctcagatgagggcaggacttttttgtgggagaggacgcctagctttc

SEQ ID NO: 6020 - DNA, 356 bp, Homo sapiens
tttttttttttttttttttttttctcaatgagaatctcctgcacctaaatagctctgcatcaacctgcctctgtgcctcagattccaccattagtcagtcctctgaataaaggccttatatttctcaaaggtccttgctaaaatacgagcacataactgaggagattctcattgaggaaaaaaaatctgcttgtcaccatggagaacagaggatcagggcctaaaatgagtgctacacaagatggggacattttgatcagggaaagatgagaagagggatgtccattctgtgggctgctgtcctgggagggaggacctgaggagctgtatgagagaattaggaatttaggggaagc

SEQ ID NO: 6021 - DNA, 457 bp, Homo sapiens
ttttctttgttttttttttttttttaggagagatgaagttttgccgttttaactaggctggtctcaaactcctggcctcaggtgatctgcccacctcggactcccaaagtgctgggattacgcatgagccatcgcgcccggcctgcaatttgcttttaaagactttagcaaagaaataaaaaaggataaagtgaatgtggcatattctggaccactgctgaacctgcgtgagggatatacagttcattatgctattctctccacttctgtgtatatttcaatatttttataataaaaaattaacgccaaatttaattcctttatggagaattattttcttgttcagttttgttttttcttggcatttctatgcttggaattttctttctctgtagcacacaaaaatgtttcagcatatcttgaaaacttattctgcttctcaatgatatgcttgaac

SEQ ID NO: 6022 - DNA, 459 bp, Homo sapiens
gacataagaaaaacatagaaacataaaaacataagaaaaactattatttgttgtgatttgttctccctaatctatgaagtcggtagggtatctgtcataaagattcccctctagagtcgagaaaacagaggctcagagaggttaagtgtttttctcagggtcacacagcaaatacagaactccagtcttcttgctgtgtctcttaccctctgtcatcaggatgcaggggctgctgagctgagatgcctgcagatgagtaaactggcgggaagaaagacaccaacccaatagatctccatgtattttatatattttctcacctactcagtctagattttcaaacaacatacagaactttctgggatcttgtcatcattcagtgtactgtcctctggatcctctccaggagccgcccactccgcacacattttttttttctagttgtcataaacaaatttc

SEQ ID NO: 6023 - DNA, 62 bp, Homo sapiens
ttttttttttttttttttttttttttttgggattgagtccctccctgttgtccaggctggag

SEQ ID NO: 6024 - DNA, 551 bp, Homo sapiens
tttttttttttttttttttttgggacagggtttcactctgtcacccaggctggagtatagagtacagtggcaatcatagctcactgcaagcttcaacctcccaggctcagatgatcctcccaactcagcctcctgggtagctgggaccccagccatgtgccactgcatctggctaattttttaatcttttgtacacatggggttttgccatgttgccctggctggtctcaaactcctgggctcaaacaatcctcccacctcagcctcccaaagtgctgggattacaggggtgagccaccacacccggccccagctattttcattagaccatgaactccatgaggatggaaatgccctggtctgctcactagtataaatacaataccctgtatggtgccaatacaatagtataggttttcaataaatgtgtttattaaataaataaataacatgttggtagcctgataaaatttaatttcaagctaaatcgctttaaatggttatgaagatagaaagtaaaaacaaaaaaaccccatcaaaggtcaaattca

SEQ ID NO: 6025 - DNA, 557 bp, Homo sapiens
tttttttttttttttttttttggatagggacggggtctcgccatgttgcccaggctggtctcaaactcctggcaacaaagcaaacctgcttctgcctcccaaagtgctgggattacaggcatgatcccatgcctgtatacttataccacacctggccagtataagtattcattaagcttactattttatagactttataaaatcaatattttcacaacttcgtagttaaggagaaaactaggaacttggcttttcaaaatactttgtgttgcagtagtcgctgaatgttcatctatatcatttaattgggtatgcacctcaagaggaacatctgcttgaagaaaaaggaacgttctaagcactttctatacttgcaaaggcttcagaaatgttcactgttgctggttccatcacttactcctcatgcatatcatgattatcattgttgccttcttcatcgctatcaccacggctttctggttcaatttttacatcagttagcactcctgtagcaacttcaggatttggtaacttgggaaatagttaaattgctatct

SEQ ID NO: 6026 - DNA, 551 bp, Homo sapiens
tagagatggggtttcaccacgttggccaggctcgtctggaactcctgacatcaggtgatccgcccacctcggcctcccaaatttgggattacaggcatgagccaccgcgcccaacctcacactttttaaaaaaagagatgtgccattttgaataggggacagtcaaattttctgaataaatgtcttggaaaagactggtgatatgtgaggcttctaaattccctttctcttggcacaggcaactaaagtaaatatggaaaaagcttctgtatagcaatggaaacaatcaacaaagtaaggagacaacccacagaatggtagaaaatatgtgcaaactacccatctgacaagggattaataaccagaatatataaggagcttaaacaattcattagggaaaaatctaatactctgattaaaaatgggcaaaagatctgaatagacatttcttaaaagaaaacacacaaattgcaaacaggtatataaaaaggtgctcaacatcattatcatcagagaaatgcaaatcaaaactatgacatattgtctcgccc

SEQ ID NO: 6027 - DNA, 554 bp, Homo sapiens; identical to SEQ ID NO: 1548

SEQ ID NO: 6028 - DNA, 606 bp, Homo sapiens
agatgaagtgcgcacagggacctacaggcagctcttccacccggagcagctgatcaccgggaaggaagatgcagccaataattacgccaggggccattacaccatcggcaaggagattgttgacctagtcctggaccggatccgcaaactggcggatctgtgcacaggactgcagggcttcctcatcttccacagctttgggggcggcactggctctgggttcgcatctctgctcatggagcggctctcagtggattacggcaagaagtccaagctagagtttgccatttacccagccccccaggtctccacagccgtggtggagccctacaactccatcctgaccacccacacgaccctggaacattctgactgtgccttcatggtcgacaatgaagccatctatgacatatgtcggcgcaatctggacattgaacgtcccacgtacaccaacctcaatcgcctgatcgggcagatcgtgtcctccatcacggcctccctgcgatttgatggggccccgaatggggacttgacggaattccagaccaacctagtgccgtacccccgcatccacttccccctggccacctatgccccagtcatctc

SEQ ID NO: 6029 - DNA, 632 bp, Homo sapiens
gagaagcagctacccaagctccaggagcttccgaagaaacaggaccagagagggaaggtgacctgaaagtcacagaataattttttagagctgaacaagaatccaagcctgcaactgcagagacgagagatctttctgctgtctatactcttggaaagcacatcctaagatctttgcagattatcctgtggaaggaaaatgcctaaagtcaaaagaagccggaaagcacccccagatggctgggagttgattgagccaacactggatgaattagatcaaaagatgagagaagctgaaacagaaccgcatgagggaaagaggaaagtggaatctctgtggcccatcttcaggatccaccaccagaaaacccgctacatcttcgacctcttttacaagcggaaagccatcagcagagaactctatgaatattgtattaaagaaggctatgcagacaaaaacctgattgcaaaatggaaaaagcaaggatatgagaacttgtgctgcctgcggtgcattcagacacgggacaccaacttcgggacgaactgcatctgccgcgtgcccaaaagcaagctggaagtgggccgcatcatcgagtgcacacactgtggctgtcgtggctgctctggctg

SEQ ID NO: 6030 - DNA, 613 bp, Homo sapiens
tgctcctcaaaatagaaatgttgaaagagaaggaagttgacgtttaaaaaaagtagttgtgaaatagcagctgtttcttttagctctgatattcaataaaaataaaatttattttgcctttaattgtattttatttgcccatcatacataaaagtacttacattatatatgaaatattgtatatatcaggaacaagtgtaaagcttcatgaacaatttggagtgacttatagttttcttaatttaattatttttactttagtgtgctctaccagcagtttccactactatttaaaccttataaacatcttccagacattgaatatgactcttctgtttgtttaaccttgaattgtatctgtcttaggaatgaaaacaagattggtattttcataggaaaatttggtaatcttaattgcttggaatggactgtaattcaatttggaactttttttcagatatagtttgcccatataactatcctgtgttaaaaaacatgtggagtggggaggctgagcaggagaattgcttgaatccaggaggcggagtttgcagtgagccaagatcaccccactgcactccagcctggcgacagagcaagactccatatcgaa

SEQ ID NO: 6031 - DNA, 631 bp, Homo sapiens; identical to SEQ ID NO: 1551

SEQ ID NO: 6032 - DNA, 616 bp, Homo sapiens; identical to SEQ ID NO: 1552

SEQ ID NO: 6033 - DNA, 499 bp, Homo sapiens
tcacgggcaaggtcaacatcaagaaggaggagagaccccctgagaaggagaagagctccccggccaaggctgcgtcccccatagcaaaagagaataaagatttcccgaaaacggaggaagtcagcggcaaaccgcagaagaagggccctgaggccgagactgggaaggccaaaaaggagggaccgctggacgttcacaccccaaatggcacagagcctctcaaagcaaaggtcaccaatggctgtaacaacctggggatcatcatggaccactcaccggagccttccttcatcaacccgctgagcgctttgcagtccatcatgaacacccacctgggcaaggtgtccaagcccgtgagtccctcgctggacccgctggcgatgctgtacaagatcagcaacagcatgctggacaagccggtgtaccccgccacccctgtgaagcaggccgatgccatcgaccgctactattatgaaaacagcgaccagcccattgactt

SEQ ID NO: 6034 - DNA, 377 bp, Homo sapiens
accacacagacactgggtcaaggagtaagcagaggataaacaactggaaggagagcaagcacaaagtcatcatggcttcagcgtctgctcgtggaaaccaagataaagatgcccattttccaccaccaagcaagcagagcctgttgttttgtccaaaatcaaaactgcgcatccacagagcagagatctcaaagattatgcgagaatgtcaggaagaaagtttctggaagaaagctctgcctttttctcttgtaagcatgcttgtcacccagggactagtctaccaaggttatttggcagctaattctagatttggatcattgcccaaagttgcacttgctggtctcttgggatttggccttggaaaggtatcatac

SEQ ID NO: 6035 - DNA, 501 bp, Homo sapiens
gtgagcagctcctacccgatgcttggctcttgattctcagggtcgcggagaactggccgcgggcgtccggggccgggaacagaaagcgggacctgggggccatgggggatccggacagagaccgcgcttggacgtgcacgggcctggcgttcgctggtgctcagtatacggcgcggtgaggagcggcgagcacccggacgtcacctggcctggtagggaacggaacccggggcgcacaacgctatgggcggccctgccaggcctctgctccgagtacgggaaaccgcgattttaatgcggctcatcgcgaaagcttcgtcgttttgtctggctgtctttaacacttttgtgagaggaaaaattggcttgcaatacatctcgctggctgtttgcggctactatcagaagttgaattccaataattagctattttataaaggtaacgagaaaaaatacactatgtctgatgaagtttttagcaccactttggcatatacaaag

SEQ ID NO: 6036 - DNA, 507 bp, Homo sapiens
ggtgccgggagcttccctttctcagcgcggcgcgaaggtggctcgccgtcagcgcctgcttccctcgacctcgtcctcctccccgctccggaggagctgcgagatgtggcgcctctgactccacttctccccgcccctgtcaccgagagggggaacgagctctcgcccactcgccggaggagacggccctggactcccaaccccgccggcgaaaccatgagctccgtccagcagcagccgccgccgccgcggagggtcaccaacgtggggtccctgttgctcaccccgcaggagaacgagtccctcttcactttcctcggcaagaaatgtgtgactatgtcttcagcagtggtgcagttatatgcagcagatcggaactgtatgtggtcaaagaagtgcagcggtgttgcttgtcttgttaaggacaatccacagagatcttattttttaagaatatttgacattaaggatgggaaactattgtgggaacaagagctatacaataac

SEQ ID NO: 6037 - DNA, 650 bp, Homo sapiens
tacggccgggcacggtggttcatgcctgtaatcccagcactgtcggaggctgaggtgggtggatcacttgaggtcaggagtttgtgaccagcctggccagcatggtgaaatcccgtctctaataaaaatacaaacatggtgaaaccccgtctctaataaaaatacaaaaaattagcctggcgtggtggtgcaagcctgtaatcccagctactcaggaggcagagtcaggagaattgcttgaacccaggagccagaggttgcagtgagccgagatggcaccattgcaccccagcctggacgacagggcaacactctgtctcaaaaacaaacaaacaaacagaaacaataaatacgtattagcaccttctatgtgcaggttttggggacagacagggtggctttgaatcccagcttcaccatttgtacatttgtagctgtgtggtttgtacaagtcctttaaagatgaacctctctgagcctcagttttctcttctgcaaattggtgctaatactttctattttccaggattactgtcaggattaaagaggacacaattcacgtggcacgtaatagccactcaaccctcatgccatgaccctccatggcagctttgtgggggagacacgggtcatcacccaggccagctcag

SEQ ID NO: 6038 - DNA, 545 bp, Homo sapiens
ctgatgaacagaccttctgcccgcatgccttggggaatgtcttcgtcagtgagctgctggaaactctggcccagctgcgggaggaccggcaagtgcgtgtcctgctcttcagaagtggagtgaagggcgtgttctgtgcaggtgcagacctgaaggagcgggaacagattagtgaagcagaggtgggggtgtttgtccagcgactccggggcctgatgaatgacatcgcttcctcggcagtcatgggactgattgagaccacgcgagggctcctcccgggggcaggagggactcagaggctgccccgttgtctgggggtggccctggcgaaggagctcatcttcacgggccgacgactgagtggaactgaggcccacgtactggggctggtgaatcacgctgtggcccagaacgaggagggggacgccgcctaccagcgggcacgagcactggcccaggagatcctgccccaggcccccattgccgtgcggctgggcaaagtagccattgaccgaggaacggaggtggacattgcatctgggatg

SEQ ID NO: 6039 - DNA, 572 bp, Homo sapiens
gagctggactcctggtggtggacacgcccccggggacctccgatgagcacatggccaccatagaagccctgcgtccctaccagcccctgggggccctcgtggtcaccacgccccaggcggtgtccgtgggggacgtgaggcgcgagctgaccttctgtaggaagacgggcttgcgggtgatgggaatcgtggagaatatgagcggcttcacctgcccacactgcacggagtgcaccagcgtcttctccaggggcggcggagaggagctggcccagctcgccggggtgcccttcttaggctccgtgcccctggaccctgcgctcatgaggaccctggaggagggccacgacttcatccaggagttccccgggagccccgccttcgctgcactcacctccatagcccagaagattctggacgcgacgcccgcgtgcctcccctgactaaggccaccttgcagccgctttccagggccaccaagggctctgctccagcctctcagagaaacagaggcctgggctcggttcccgggccctgcaggggcaggcccaggcagcgtcagcgggagagct

SEQ ID NO: 6040 - DNA, 508 bp, Homo sapiens
atgtcatcgcctgcgacgtggaggctgactttgccgtcattgctggtgtttctaactggggaggctatgccctggcctgcgcactctacatcctgtactcatgtgctgtccacagtcagtacctgaggaaagcagtcggaccctccagggcacctggagatcaggcctggactcaggccctcccgtcggtcattaaggaagaaaaaaatgctgggcatcttggtgcagcacaaagtccggagtggcgtctcgggcaccgtgggcatggaggtggatgggctgcccttccacaacacccacgccgagatgatccagaagctggtggacgtcaccacggcacaggtgtaaccgtccatgttccgtgtgagcagagtccctaccaacgggcaggtctgcatccggggagaatgcagctgcttctggcgacaatcctgctagtaaacactggtcttcggtgagcaacgaacactcgcctggcctgggaaactgcatgcccactttctgggag

SEQ ID NO: 6041 - DNA, 464 bp, Homo sapiens
gttccttagaaaatctgttcaattttcctctatgatcaatgcatattaaaaccaatgtagagagctgaccagggacattgctttgttctactatatcacctttggggtagttaaatgaagtttttccaagtctgtgaaacaactaatcgtcattttttaaaacaattttactgtgttattattcctaaagtgtctctagaacttttctctttcaaggatagtggattgtggtaaggctaaatgtttaatgagtctctatgttaaagactgcacttatcttccaattaaccccaagaccactctggtatttttgtaaatccacagaagtattttgagtgaggcctaaagggtaagctgcaggcagcctgtgaaaagtgtaaaaagactaacctgctaacaaaccttgtgcaatgggacaaagaaagtttaatccgtattatggtaaatgcaggcttagtgtccca

SEQ ID NO: 6042 - DNA, 670 bp, Homo sapiens
tacggccgggactgaattgagagaatgaatgctctccacaatcaatgtcactaaaaaagcaactttctgaaataaaagagaactgtctacttttttctttgtcccttttttagcaagcagtttgcctctggtttaacaatatgaacatactttctttcccagctggagggatccgatcctaggaatattgatgtatgtgcaccccgtagattatacttttcagactagatggatttctaaatccaagatctaccaaatacttccacaattctaattaaaataagaagtttgggagtcagaaaccttttgccctagaggcttgccccaccatgtattaattttcaccattattccatttaactggggggactcatttttatttcctaaaaaaatctatatctggaaagaggtaccattctacagcatttctggcgaatcataaattaacctacagtaaatgacattaaggagatagctttgttctgtaaatggataggataccatatggctttgatgttagtgtgaagttaatcacaagctccataacaggccatgacatcatttcataataaattgcatgaacaaatgctgccgttatctgaacagcatgtgaattttggtacctataatctttagggaaaaatgaatataaaatattgagttaaaaaat

SEQ ID NO: 6043 - DNA, 455 bp, Homo sapiens
gggcggggtctgtagttagcggcgagagtgacaggaggacaggggttgtttcggcagtgacgcctggggagtgacgcaattgcacccctgtgcagtgatgtcacggcaggtgcggccagcgttccgagtcgaggacagttggcgacactgaaaattcagcgtctccgggagtctctctctttgtagtctttgcccagggccttgccaggcaaagggtagcccgacgaccagcagcctccgctacttctgggcgctcgctagaaatacagattctcgggccccaccccgacctacttggtcggtatctgtgatctgtgaacaggacctttaggtgatttgcatacactgtaaactgtgaaagccatcagtgtagtggaaggagcatagaatttagagtagagagacatggttttggaccctggttcctgctttccttgcttcatctgtgctgcctt

SEQ ID NO: 6044 - DNA, 246 bp, Homo sapiens
tatgaattgggttctccagtgactagaagaactggggtgtgtgaaagtattcgatgccaggagattcaaaaaggaagctctcaaagataagatcattttatggcacaattgagtctataaccagccctttaagcagtagtaaaaatgtcctttgtcatacttactagaaatactatgagtttttttttttttcttttaaaacggagtttccttttgtcccccaggttgaattgcaggggcccaatt

SEQ ID NO: 6045 - DNA, 415 bp, Homo sapiens
cgttgggagcgggagtgcagagcgtggtcgtggcggcggcggtgagaagagcgaggcggaggagggggtgccatggccgggcagcagttccagtacgatgacagtgggaacaccttcttctacttcctcacctccttcgtggggctcatcgtgatcccggcgacatactacctctggccccgagatcagaatgccgagcaaattcgattaaagaatatcagaaaagtatatggaaggtgtatgtggtatcgtttacggttattaaaaccccagccaaatattattcctacagtaaagaaaatagttctgcttgcaggatgggcattgttcttattccttgcatataaagtttccaaaacagaccgagaataccaagaatacaatccttatgaagtattaaatttggatcctggag

SEQ ID NO: 6046 - DNA, 636 bp, Homo sapiens
tacggccgggaagcaagtgttaaagaagacttagaagaagccaaagcaataatatctaagaaacaagtggaagccggtgtccgtgttaccatggagatggtgaaagatgccttggaccagcttcgaggcgcggtgatgattgtttaccccatggggttgccaccgtatgatcccacccgcatggagtttgaaaataaggaagacttgtcgggaacacaggcagggctcaacgtcattaaagaggcagaggcgcagctgtggtgggcagccaaggagctgagaagaacgaagaagctttcagactacgtggggaagaatgaaaaaaccaaaattatcgccaagattcagcaaaggggacagggagctccagcccgagagcctattattagcagtgaggaacagaagcagctgatgctgtactatcacagaagacaagaggagctcaagagattggaagaaaatgatgatgatgcctatttaaactcaccatgggcggataacactgctttgagaagacattttcatggagtgaaagacataaagtggtgaccaagatgaagttcaccagctgatgacacttccaaagagattagctcacctttctcctaggcaattataatttaaaaaaaaaaaaaa

SEQ ID NO: 6047 - DNA, 625 bp, Homo sapiens
agacttttccagataaggaacaaatgcgggttacaggttgggattggtgggagaaatgtttacagaatgggtaattaggagtgggaaggtatgaggaagttgaccttaagaacaaagaacaaggaagttaaactttgaagagaaacccatcatacctaacagtcttgtaagaaaggatgacaaagtgattgaacattgggtggggctaattttccttggccaattcacttagtaagataaggagctccaaatcatatttaagttgggagtcaattgattttacttaattcttgtgaggttcagttataagattcatcatactactaccatgagccatcctcagctccttgttacatgggcctgttaacatggcagctttgtctataagcaaacccaggagagaaagacatagcagagatggatgtttgaagtctataccttccaccccctttaaagagaaagtaacaccactccttttctgtgtcccttggggacactacctccatgtctggtcacatggctggactttacagcagataagcatactgtggcctgagaccatgattgtatgctttccttctgctgacctttacaatccctcaataaattgagctagcacagggaa

SEQ ID NO: 6048 - DNA, 524 bp, Homo sapiens; identical to SEQ ID NO: 1560

SEQ ID NO: 6049 - DNA, 353 bp, Homo sapiens; identical to SEQ ID NO: 1561

SEQ ID NO: 6050 - DNA, 640 bp, Homo sapiens
tttgttgaaaaaagaccagctttgtgaaggatgcacaggaacagtgtaacaagctgcggatgatgcattctaacatggagaccctctataaggagctgggcgagtacttcctctttgaccccaagaagttgtctgttgaagaatttttcatggatctttacaattttcggaatatgtttttgcaagcagtcaaggagaaccagaagcggcgggagacagaagaaaagatgaggcgagcaaaactggccaaggagaaggcagagaaggagcggctagagaagcagcagaagagagagcaactcatagatatgaatgcagagggcgatgagacaggtgtgatggacagtcttctagaagccctgcagtcaggggcagcattccgacggaagagagggccccgtcaagccaacaggaaggccgggtgtgcagtcacatctctgctagcttcggagctgaccaaggatgatgccatggctgctgttcctgccaaggtgtccaagaacagtgagacattccccacaatacttgaggaagccaaggagttggttggccgtgcaagctaatgtgggtcctgtgaccgcggcagctcctcagcggagccgcagactgtcctgccctgcagcatgtgcctaaaggctca

SEQ ID NO: 6051 - DNA, 451 bp, Homo sapiens
tggggcagttatgggaatggtccctccctgggttcctgtccctcacccactgccctggctctgagcagctggaaactcacccacaatccccaccacgatgtaacctagaatgaagagcaggaagaggacgcagcagatgacatctgtgcagcttctgagagagaaacgaaatgggaggctgagctaaggagacttggggaggtagggcttatggtctggaggggttaagggttagagagttgggtgatgctgcagcatgggcatcagtaggctttatttttatttttttattgcttttacttttttattttgagacagggtctcactctgtcacacagactggagtgcagtggtgcaatcttggctcactgcagcctctgcctcctgggttcaagcaattctcctgccttagcctcccgagtagctgggattacaggcgcgtgccactact

SEQ ID NO: 6052 - DNA, 599 bp, Homo sapiens
tgggagattgaaagaactctgtgagcagtatggcatatggcttcatgtggagggtgtgaatctggcaacattggctctgggttatgtctcctcatcagtgctggctgcagccaaatgtgatagcatgacgatgactcctggcccgtggctgggtttgccagctgttcctgcggtgacactgtataaacacgatgaccctgccttgactttagttgctggtcttacatcaaataagcccacagacaaactccgtgccctgcctctgtggttatctttacaatacttgggacttgatgggtttgtggagaggatcaagcatgcctgtcaactgagtcaacggttgctggaaagtttgaagaaagtgaattacatcaaaatcttggtggaagatgagctcagctccccagtggtggtgttcagatttttccaggaattaccaggctcagatccggtgtttaaagccgtcccagtgcccaacatgacaccttcaggagtcggccgggagaggcactcgtgtgacgcgctgaatcgctggctgggagaacagctgaagcagctgggtgcctgcagcggcctcacagtcatggatctggaagctg

SEQ ID NO: 6053 - DNA, 513 bp, Homo sapiens; identical to SEQ ID NO: 1563

SEQ ID NO: 6054 - DNA, 542 bp, Homo sapiens
aagaaaatgagatttgagagtagtatgtagcttagactctaaaataatatctgggagaagtttgaaagttaagcaagtgatgaattaataggattggtcggcagttcggagggcccatccgaaagtggaccgaaatggataggatagatgagttctccttggctgtcatagttcagtgtagagatgctcagagactaggagtcagagcacagtggacccagagggtttgacttggcagtatgatgaaaaattgtagtctgatgtgaatggtcagaagagagagagatggaatatttgaagattgtgagcaggaagtacatgctttttctcaagaaagatgatgacataggttgactgtgagggaatgtatagagatgtcatgacttaactagtgatttgagctccagaatgttaaatgtgcaagagacgtgtcatggagccccttctagtggcaatagttacagtaaagtaggggagacatgaaccaattaaacacacaaataattgaaagtcttaattgtttcactccatatgttattttt

SEQ ID NO: 6055 - DNA, 305 bp, Homo sapiens
cagtggcacaatctcaactcactgcaacctgccgtctcctgagtttcaagtgattctgctgcctcagccttccatgtttctgggactacagacatgcaccaccacacctggctaatgtttgtgtttttagtagaggtggggtttcgccatgttggccaggctgggctcgaactcctgacctcatgtgatccacctgccttggccttccaaagttctgggatttcaagcatgagccactgtgcccggccctgctgggattactttggtctgaaacccactggggaggaaggacaggcctcggaaat

SEQ ID NO: 6056 - DNA, 519 bp, Homo sapiens
ccgcgcctgcaccggcgacatcgcgtctataagctggtggaggacacgaagcatcggcccaaagaaaacctgaagctcatcctgacgcagtcggtggagaatgttggagtccggggtgacctggtctcagtgaagaaatctttaggccggaatcgactccttcctcagggactggctgtatatgcatcccctgaaaacaagaagctgtttggagaggagaaattgctgagacaagaaggaaaattagagaagatccagaccaaggcaggtgaggcgacagtgaaatttctaaaagctgtcgcctggaggtagggatgaagaacaatgtcaaatgggagctgaaccctgaaatagttgcccgccacttctttaagaatcttggtgttgtggtcgccccacatacattaaagttaccagcagagcctatcacacggtggggcgagtattggtgtgaggtgacggtaaatgggcttgatactgtgagagtgcctatgtctgtcgtgaactttgagaagccca

SEQ ID NO: 6057 - DNA, 577 bp, Homo sapiens
  misc_feature 517: n = A,T,C or G
tactcgacaccttgcgatccaaatacggagctggcatatacttcaccaagaacctcaaaaacctggcagagaaggccaagaaaatctctgctgcagataagctgatctatgtgtttgaggctgaagtactcacaggcttcttctgccagggacatccgttaaatattgttcccccaccactgagtcctggagctatagatggtcatgacagtgtggttgacaatgtctccagccctgaaacctttgttatttttagtggcatgcaggctatacctcagtatttgtggacatgcacccaggaatatgtacagtcacaagattactcatcaggaccaatgagaccctttgcacagcatccttggaggggattcgcaagtggcagccctgttgattaatctctacatcattttaacagctggtatggccttaccttgggtgaactaaccaaataatgaccatcgatggctcaaagagtggcttgaatatatcccatgggttatctgtatggactgactgngttattgaaaggactagccacatactagcatcttagtgcctttatctgtctttatgtctt

SEQ ID NO: 6058 - DNA, 571 bp, Homo sapiens
cagcaaggccgtgccctgggtgattctgtccgacggcgacggcaccgtggagaaaggcttcaaggccgaatggctggcagtgaaggacgagcgtctgtacgtgggcggcctgggcaaggagtggacgaccactacgggtgatgtggtgaacgagaacccggagtgggtgaaggtggtgggctacaagggcagcgtggaccacgagaactgggtgtccaactacaacgccctgcgggctgctgccggcatccagccgccaggctacctcatccatgagtctgcctgctggagtgacacgctgcagcgctggttcttcctgccgcgccgcgccagccaggagcgctacagcgagaaggacgacgagcgcaagggcgccaacctgctgctgagcgcctcccctgacttcggcgacatcgctgtgagccacgtcggggcggtggtccccactcacggcttctcgtccttcaagttcatccccaacaccgacgaccagatcattgtggccctcaaatccgaggaggacagcggcagagtcgcctcctacatcatggccttcacgctggacgggcgc

SEQ ID NO: 6059 - DNA, 534 bp, Homo sapiens
agatgctgtgtaactgttttaatacagcaaatagtaactctccaaatcctgttgcttttatgttaaataagataacaagaattggagcatgcaaagaatgggacttggataatgacttaagctttatatgtaaagaattttagaagatcttggtgctgctattcctgctggaggaatgaatagatggctgtttcagttaagctattagtaataaaagtgaacattgctcctatctgagcctacatacataacttgtgtgatttcaaattaaacttgcattatgtgttaattttcttgcatctaaaaaagcatagaattcctactcacacagctcagcaacaaccattttgatggtaacagttaatttctttcattagttttttaattcagggttctggatattaaattaaaatggcattcttaaagattttcttcaaaaagcaatcctaaatgaaagtgtgtaaattataagaagctggcgatcttttgatatgctgtttcacaggatcctgacactggagggcagctgtcttg

SEQ ID NO: 6060 - DNA, 482 bp, Homo sapiens
tttattggccacatgattaacttccttctccagctcctctttaatctctgaacatctgggggtgtggctaaaagttccaaccctctaaccatatgcttggtctgtctggcatggccagctcgtcctttcaaactatgtgagggcctaccttgagtcacccccaagtataaactcagatatagtccaaaggggcttcttatgaataacaaagacacttccattaatcaggaaattccaagcctctctaagctctgtaccaggaacaggagacaaagactagatttattcttcattatatgacagatacatttttatattttgcctctggttttagtaaagtttttgttgtgaagaacacaaatgccagatcaaatgagggggctgtaattagcaaggctgcaagggattgtgagcagtaagggagatagggattttactggaaatccgccaaaggaactggtatgtagctatgcctctcagta

SEQ ID NO: 6061 - DNA, 73 bp, Homo sapiens
gagattatagaaattgcactttattggatgcctgaccatattgctagtgtcaccataatctctcccccgtcca

SEQ ID NO: 6062 - DNA, 426 bp, Homo sapiens
tgaacagaaaaaataacagtgctgagagaaagctgttccttctacaaaaactgaaggatgctggcttggtttctgtcgccacagaacaagttaccaaacacaaatttggcagcttgtaacaacaagcatttacactctcacagtttctgtgggtcaggagtctggccatagcttagttctatcctctacttcaggtgtcacaggctgtagtcaaggtgttggctagggcacgctgtcatctggagctcaggtcctcattggtagaattgaatccattgtggttgtgggactgaaaccctgggctcttggaggctgcccctccccacgggcagttcattggctgcttgcttcttcagattggagaccatctcttcaggacggtgcggagggatggaaaaagggagaggcaaatggaaatcacaaaag

SEQ ID NO: 6063 - DNA, 620 bp, Homo sapiens; identical to SEQ ID NO: 1568

SEQ ID NO: 6064 - DNA, 489 bp, Homo sapiens
tcaggggttcaagaccagcctgatcagcatgctgaaaccccgtctctactaaaaatacaaaaagtagccgggtatggtggcgcgtacctgtaatcccagttacttgggaggctgaggcaagcgatcacttgaaccctggaggcagagtttgcagtgagccaagatcacaccactgcactccagcctgggcgacagagcaagactcccatctcaaaacacaaaaacaaacaaaaagaaccatgttactaaatagcctgggcctttcttattaagactagtaactcttttaaagactgttgatcaaaaaatttaagttcttaatgaaaatagaagaaactttaaggttatgtttctgctacttgggttcgataatagtggttctaaaattaggatattgtatttaagcatttgtagtgagctttgggaaattctgttctctaagaaaactttatgagctttaaagttatgtgggacattttgtctttcttt

SEQ ID NO: 6065 - DNA, 440 bp, Homo sapiens; identical to SEQ ID NO: 1569

SEQ ID NO: 6066 - DNA, 608 bp, Homo sapiens
ctaacttttgtatttttttgtagagatggggtttcaccatgttggcccaggttggcctctaacttctggcctcaggtgatccgcccgcctctgcctcccagggtgctgggattacaggtgtaagccatcacacctggccctagtgacaggtttttatgggtacttttagatgatctaagaaatcatgtgcatatatctttcagatttttattttgggaaaatgaaggtttctacaacatattgtttcagtgttcaaataaactgaaggactcaacattacatttgaactatatccttcctagtgggttagtgtgaaaaagagtttggctgattcctaaagctctgccagccctgcagtaatctccagggcctggttattgttcagacattccatggtgattcctgggaaggaagcttggctgctcagtttctgagtctggggtgagataatgttctgggaagggacatctgttctttggtgtaatctctcatggtgaaatctgctctgtacatcagacaattgcattgctaccaagtttcataccaaatatttgaaaggatggtattgaatctaaaaccaaatattagtttttattaaactcatggga

SEQ ID NO: 6067 - DNA, 589 bp, Homo sapiens; identical to SEQ ID NO: 1570

SEQ ID NO: 6068 - DNA, 650 bp, Homo sapiens
tacggccgggatgatggcgcgatgtaacacgagaaagcacataccaaggccaccacacaccacctgtccaaaaaggccttcgatacgggataatcctatttattacctcagaagtttttttcttcgcaggatttttctgagccttttaccactccagcctagcccctaccccccaattaggagggcactggcccccaacaggcatcaccccgctaaatcccctagaagtcccactcctaaacacatccgtattactcgcatcaggagtatcaatcacctgagctcaccatagtctaatagaaaacaaccgaaaccaaataattcaagcactgcttattacaattttactgggtctctattttaccctcctacaagcctcagagtacttcgagtctcccttcaccatttccgacggcatctacggctcaacattttttgtagccacaggcttccacggacttcacgtcattattggctcaactttcctcactatctgcttcatccgccaactaatatttcactttacatccaaacatcactttggcttcgaagccgccgcctgatactggcattttgtagatgtggtttgactatttctgtatgtctccatctattgatgagggtcggaaaaaaaaaaaaaaaaaaaaaaa

SEQ ID NO: 6069 - DNA, 216 bp, Homo sapiens
agtgacaggagtggaagcagctcccctgactctgaaatcaccgaactgaagtttccatcaataaatcatgactgatcttgtagcggatgattcttcaagagacccttcaagcttgggtagagtttacagctctgactttacactcggctttggagactttctttaaattatgtttttattaagattattttattatgcggaaaggtatttgggaaa

SEQ ID NO: 6070 - DNA, 428 bp, Homo sapiens
cttaaatgggggacagatgaagaaaagtttatcaccatctttggaacaccaagtgtgtctgatttgagaaaggtgtttgacaagtacctgactatatcaggatttcaaattgaggaaaccattgaccgcgaggcttctggcaatttagagcaactactccttgctgttgtgaaatctattcgaagtatacctgcctaccttgcagagaccctctgtgatgctatgaagggagctgggacagatgatcataccctcatcagagtcatggtttccaggagtgagattgatctgtttaacatcaggaaggagtttaggaagaattttgccacctctctttattccatgattaagggagatacatctggggactataagaaagctcttctgctgctctgtggagaagatgactaacgtgtcacggggaagag

SEQ ID NO: 6071 - DNA, 341 bp, Homo sapiens; identical to SEQ ID NO: 1571

SEQ ID NO: 6072 - DNA, 141 bp, Homo sapiens
taaatgaattgtaggtttttggcttgagccactgggaagatgaacctctgctgagatggagaagcctcaaaaatgaagataactaacctataaaaatttctgatatgccgtatatattgccagggtataatgattatatgg

SEQ ID NO: 6073 - DNA, 744 bp, Homo sapiens
  misc_feature 9, 609: n = A,T,C or G
agacagagnctagctctgtcatcctggcaggactgctgtggtgcaatcttgattcaacatccagtccaggatgttggcaatgtctgacttgagcgggtgcccggtgcaggtgtagacagtctcctctgtcaccttcccaaaggccatattggtgctctgcaaaatgttcagagccctacgcatgtctccactggaaagagtgactagtgctttcattccatcttcacttatatcaactttctcttcttccacgacatgttccaggcggggaaccatgagttcaggagtcaggggaccgaaccgaaacctcgtgcagcgggactgcaaggcagggatgatctttgacagatagttacagatgaggcagaatctggtattttctgtgaatttctcaattactcttctcaaggcattctgggcgtcctgagtcatggcgtctgcttcatccaagatcactagcttaaagcctttcttaaatattgtccttgtgctagcaaagctcaggatcggtcctcgaatgatgtctattcctcggtcatctgaagcattcagctccaagaccatggagccaaattctttgtctttatatagctgtttcgcacaagctangatggtagatgtcttgcctgttcctggggggaccgtagagaagcaagtgtggcagtcgggtcttcattgataaacttcctgaatggtcctcagaatgttctggagagaaaatgaatcattcaggtttttgcctcg

SEQ ID NO: 6074 - DNA, 535 bp, Homo sapiens
ctgtcgcccaggctggagtgcagtggcgcgatctcggctcactgcaagctccgcctcccgggttcacgccattctcctgcctcagcctcccgagtagctgggactacaggcgcccgctaccacgcccggctaattttttgtatttttagtagagatggggtttcatcatgttggccaggctggtctcgaactcctgacctcaagtgatccacccaccttggcctcccaaagtgctgggattacaggcgtgagccaccacgtccagcctggggaaggtttttgtaactgctgctgtgtggtagaatctgggcccttcaaggagcgggtggggtaggatagtgaggggaagcctcccaagctaggacaagagcaagcagaaacaggcaaatttgtgtaagttcaggttcaaggactctccatcctagctcatctccaaagagttgatgtactcccgaacccatttcttctctgggttgcacacacttagcgggtcttttcggtgacaaagacgactgctggggtggagcacttgcca

SEQ ID NO: 6075 - DNA, 509 bp, Homo sapiens
ttttttttttttttttttgctttcctaaactttattaaagaaaaaagcaataagcaatggtggtaaatctctagaacatacccaattttctgggcttcctcccccgagaatgtgacattttgatttccaaacatgccagaagtgtatggttcccaactgtactaagtaggtgagaagctgaagtcctcaagtgttcatcttccaacttttcccagtctgtggtctgtctttggatcagcaataattgcctgaacagctactatggcttcgttgatttttgtctgtagctctctgagctcctctatgtgcagcaatcgcagaatttgagcagcttcattaagaactgcatctcctgtgtcaaaaccaagaatatgtttgtctaaagcaacaggtaagccctcttttgtttgatttgccttagcaactgcatcctgtgtcaggcgctcctgaaccaaaatccgaattgccttaagcattaccaggtaatcatcatgacgctgaatctgaag

SEQ ID NO: 6076 - DNA, 560 bp, Homo sapiens
tttttttttttttttttttttgaggaacaattcttttattgtacattggagaaatagccctgtgtgctggttcaaggtgcaacatacagaatattgaattaagaaaagagggaacggggaagggaagggaaacctcttgaggtccaaagctgcaaacaaaaaatggtaaaagatttcctcacgcaagaggcatttttgcaaataccatgcaaaacaggcagctggtgtgccttaagagaatccctataaataacagaaaagacactccaagcattcctgtacgtggactcagagcacagagaaaagaaactaaaatgccttttggcatttcaagatatttggcactcttgtgattacatttttttacagtccattaaagagagtaaactgacataatattagagaaataaacaggctgctcacacaacagactgcaaggggaagttagaaaaagctcaagcatttttttctttgtttttcgtgtgtgtgtgtgtgtgtgtgtgtgtgtgtgtgtgtgtttttctggcataaaaaatgtgtccatttgcattaacttgggc

SEQ ID NO: 6077 - DNA, 240 bp, Homo sapiens
tttttttttttttttttttttttgggatcacaggctttattcctacaaccacagggcttgagcctgactggggcaagaaaacagagtttcatctgagaatgtctcttatgggctgggttctgttcaggggagggtgggaacagaggacaaggaagacaagctcctctggccctaggaacaaaacacatttactccttcaaagaagcagatgatctgaataccctctggagactgaatctg

SEQ ID NO: 6078 - DNA, 424 bp, Homo sapiens
ttttttttttttttttttttttgagatggagttttgctcttgttgcccaggctagagagcaacggtgcaatctcggctgactgcaacctccgtctccggggttcaagcaattcttctgcttcagcctcctgaacagctgggattacaggcgtgcgccatcatgcccagctaattttgtatttttagtagagatgggtttatacatttttaaagaatggacaatgatgcagatgatttgtgagcattttgatgagaaagtggtgattagaaggatacagcataaatttaattgtaaacatgcttatctagctaacctaatctgtttctgtagaattactggcatgggagattggatagatgcctaacctatctcaattttaagtaatgtgagcaagactttaaggtatacataatgataaaatgg

SEQ ID NO: 6079 - DNA, 360 bp, Homo sapiens
ttttttttttttttttttttttttgggggagggaagggacatagtttccagccagccccctctgcatctcacgtacccctacaaagcagaggtctccaggacagatcacccaagccatctccaggaggacaagccaagcccgttgcttttcccatccctccacaacaagcatccacagtcgaaaatcacagctggcctggagcacaaaaatggtgagataaagccaaagagtaggagaaggtggggtcttatttccaggtcaacaaaggattcagatgattgggctgacttggatgacttggatttcagtccatccctcagcaggattgacctgaaaaacaagaaaagacagagtgatga

SEQ ID NO: 6080 - DNA, 561 bp, Homo sapiens
tttttttttttttttttttttttagcgaacccacagttcagttttattcagagcaaagaaaaaagaaactttccatcatactagaagaaacttggccgtaaggtttgggatctgtgctcaaactacacatgcaatgaggacaatattctgctaatacaattgacttgctgctgcatttgtctactgtttgtctaatattaacaattataaacagagcagtgcaactagtatttggaacaatccctacagtgttacagtgtcaggcacaacatttcacttctcttcacaccactggttctctttgcgtacctgggcttcctcctcttcagtaaagtcatttttgatattgaaggtcttgcgaatctcctcaggagttttccccttgatcatattggcaacagtcttgcatgtaacatcaagcaaacctttgatgtctaagtagtttgcagccagaatgagttcaaaaagtgttccttggtcaactttcaggaattcttggtcccaaacagggataacatctgttcgcttttctttgttctcatcatcttcaggaggaggagg

SEQ ID NO: 6081 - DNA, 591 bp, Homo sapiens; identical to SEQ ID NO: 1579

SEQ ID NO: 6082 - DNA, 444 bp, Homo sapiens
ttttttttttttttttttttttttttatagagagggggtttcaccatgttggccaggctagtctcagactcctcctgacctcaagtgatccacccgccttggcctcccaaagtgctgggattacaggtgtgcaccactgcgcctagacaaaagccagacttttgtggtcctacaattgcaggtggattttgataaccatcttgaaagttactacaatgtacaggcttcctaggtatctctgtctcaatctagaagtgaacctattatcatttaaagacaccaaggttgtagggcttttacagcatgatccatgtctgaaatgacacatgttatttaagaacagaggtgctgtcagtggtaaaatatgacatgccaggaaaaacattcttgatggcttttatattgctgattaatgaagccaaggaactaggttcaaattatgtt

SEQ ID NO: 6083 - DNA, 314 bp, Homo sapiens
ccactccttgaaccagaacctcttttactttcttatgtagttcttctcttcctgtttttatatcctaaaactagtccagcgaccagcccatcgtagtagaagcgttggtgttcttcctaaaaggaattgtaaacatctcttggagagtgggttagccaccataaattgttttgggacttcggatacccccttccgcaaatgctatctagagatgctttaatttcatttcaattggttattgcatccctgatattttgaaactgttatgagtagaaaacattctggtttatgaacaatctgtttttcactatgaa

SEQ ID NO: 6084 - DNA, 538 bp, Homo sapiens; identical to SEQ ID NO: 1581

SEQ ID NO: 6085 - DNA, 376 bp, Homo sapiens; identical to SEQ ID NO: 1582

SEQ ID NO: 6086 - DNA, 478 bp, Homo sapiens
ttttttttttttttttttttttttacggggagacaagtttattgaggagcttgacacccctcttctgccctagcttgagagaacaactgcagcatttttttctttttctcttcccgatgaccatcttttgggctggcgggccaggcccctgggtgtctcccatatcgctgtctttagtgagactgaggatctggtataaggaaacagatcagctgcagccagtgggggcccctgcgttgggcctgggagagagaaggtcctgttcctgcctttcctgtggccccaggcactctcagctctgaagccaggctattgctcgacaccgcaggatgcccaggactccctggaaccaggagcaaatgggcgcagtcctttccccgtcagagccacccaccagcttccaggcttcctgcatcttccaggggtccagcctgtgggacgtcagcaggaatttcccatagcagcaccggtctagcgg

SEQ ID NO: 6087 - DNA, 562 bp, Homo sapiens
aaaaatgagaatccaaaagacaaaaatcaaagaacagatggggtctgtgactggatcttctatcattccaattctaaatccgacttgaatattcctggacttacaaaatgccaagggggtgactggaagttgtggatatcagggtataaattatatccgtgagttgggggagggaagaccagaattcccttgaattgtgtattgatgcaatataagcataaaagatcaccttgtattctctttaccttctaaaagccattattatgatgttagaagaagaggaagaaattcaggtacagaaaacatgtttaaatagcctaaatgatggtgcttggtgagtcttggttctaaaggtaccaaacaaggaagccaaagttttcaaactgctgcatactttgacaaggaaaatctatatttgtcttccgatcaacatttatgacctaagtcaggtaatatacctggtttacttctttagcatttttatgcagacagtctgttatgcactgtggtttcagatgtgcaataatttgtacaatggtttattcccaagtatgccttaagc

SEQ ID NO: 6088 - DNA, 419 bp, Homo sapiens
taaagcacccaggaagcaactggctacaaaagccgctcgcaagagtgcgccctctactggaggggtgaagaaacctcatcgttacaggcctggtactgtggcgctccgtgaaattagacgttatcagaagtccactgaacttctgattcgcaaacttcccttccagcgtctggtgcgagaaattgctcaggactttaaaacagatctgcgcttccagagcgcagctatcggtgctttgcaggaggcaagtgaggcctatctggttggcctttttgaagacaccaacctgtgtgctatccatgccaaacgtgtaacaattatgccaaaagacatccagctagcacgccgcatacgtggagaacgtgcttaagaatccactatgatgggaaacatttcattctcaaaaaaaaaaaaaaatt

SEQ ID NO: 6089 - DNA, 437 bp, Homo sapiens; identical to SEQ ID NO: 1585

SEQ ID NO: 6090 - DNA, 445 bp, Homo sapiens; identical to SEQ ID NO: 1586

SEQ ID NO: 6091 - DNA, 596 bp, Homo sapiens
tacggccgggattactgtgtgacatattattattttgatgtactacatattattgatccaggtcccccagtgtttcttgctttggttatttacttttttaaaaaataagatacattaaacacttatgcagtcattctaggaaatacatttgtcttaaccccagccaacactgggttgttattattgttttaatctgtaccaatttgatagacaaatagtgatatattgttttcattttatttctttgattacaatggaaagataagatgcatttaataactgttagactaattattagaagatggaaacctattctgtgtctccactgggaacaaaatttaaaatggacttaagtcaattacatagcatttgatttctcatttatgattattattttgatactaagagcagaaatcttaaagtatgagaaaccactcaagaatatttattatatgtcattaataaaattattttggcaatttattttcaagtgaattaatttatgtgtaaacagtaggtaaacataaaggcaatgtgtctggatgatggaaagaactttgcaatggggatagtagcaaaggaataaatgtttcatc

SEQ ID NO: 6092 - DNA, 637 bp, Homo sapiens; identical to SEQ ID NO: 1588

SEQ ID NO: 6093 - DNA, 463 bp, Homo sapiens; identical to SEQ ID NO: 1589

SEQ ID NO: 6094 - DNA, 535 bp, Homo sapiens
atttcttcagactaacatcttaaaacactgacctctatgaggtatttactgtgcaataactgattcatttttttcagagcttgaagcatccaatgatttttccctccactgctgttaattaatgtcacttccaatatataaaaactgttctgttgtaaaaaatataattgctcttaattcttggggaggttactaatagcagtaggatagaattttatgaggttacctacaactacttaatgtacttacactgtaagccttgttgctttacccaagacaaatgtaattttatcattgcttatgtagtatttttcttttggaaatgtgccttatgttaaacactatgtacttttactttttgcattgtccagacttctttattagatggagatgtttctttttctgtcttctagactaaatagagtatcatccaaataatggggcctatgacttgaatgaatagaaatgaataagctggtgtttgttttttcaaaatggaagtaatttagatttgttctcctcatacataaaatga

SEQ ID NO: 6095 - DNA, 121 bp, Homo sapiens
gattatggggtcttaaaggctgatgaaggcatctcgttcaggggcctttttatcattgatgataagggtattcttcggcagatcactgtaaatgacctccctgttggccgctctgtggatg

SEQ ID NO: 6096 - DNA, 349 bp, Homo sapiens
cctatagtcccagctactcgagaggctgaggctggagaatggcgtgaatgcgggaggcggagcttgcagtgagctgagattgtgccactgcactcagcctgggcgacagagcaagacccgtctaaaaaaaaaaaaaaaaagggaaaattttccttgcaaaaaaaaaaggtttaaggaaattttcaaattggggtaaacccagtggcccccccagggggcctttgtaaaaattcggaaataaattttggctcccaaattctttaaccctttttttgattaagggatgggattctttccttttaatccccaaaattttagggccccggccccttaaaatggccaaaaaaaa

SEQ ID NO: 6097 - DNA, 107 bp, Homo sapiens
gccagtgaagggagcatacagagagcacccatatggacgttattaaaaacaaacatgaggggaaaatatcagttatgagcaaagttgttactgatttcttgtatctc

SEQ ID NO: 6098 - DNA, 527 bp, Homo sapiens; identical to SEQ ID NO: 1591

SEQ ID NO: 6099 - DNA, 444 bp, Homo sapiens
gggaaggaatcgtggagcagccatgcccggacgtgtactggttcccactgctgtcagaacaaatgtgtgatgagctggtggcagagatggagcactacggccagtggtcaggcggccggcatgaggattcaaggctggctggaggctacgagaatgtgcccaccgtggacatccacatgaagcaggtggggtacgaggaccagtggctgcagctgctgcggacgtatgtgggccccatgaccgagagcctgtttcccggttaccacaccaaggcgcgggcggtgatgaactttgtggttcgctaccggccagacgagcagccgtctctgcggccacaccacgactcatccaccttcaccctcaacgttgccctcaaccacaagggcctggactatgagggaggtggctgccgcttcctgcgctacgactgtgtgatctcctccc

SEQ ID NO: 6100 - DNA, 491 bp, Homo sapiens
actgtgcagtgtttcatatgcatatttcacagtaaccttcagcaaaataccatcttttacctttaaaaaattttttagcacaagatggtgaccttagctcaactacagtggcttgactttggaatctttgaggaattaatgcgcaagaatttaaaataatcaggggaggacaaaatttgtgattcacacacatgaaagaacagactgtccaggcaacaagggatgcaaggcaaaggcaagtctaggtcctcagactttggagcacctgcgagaagattatactagggatgccacatagagcaaggatcctgtcatggcccacatggaacttcaatcaatatttcttgatgtgtccagtttttctagttgtccttagtgggggagttgatctgagtttctcagttagccattcctagaagtcccctgctccttccaaatcctagaattcgtgaattacaacctagggggacagattcttctttccatgctac

SEQ ID NO: 6101 - DNA, 472 bp, Homo sapiens
gcacaagtcaggtccggcacatgtttccgcggagcggacccagcaatgacggatgatatcacctcttcttctctggtgagagtctgaggatagagacttttttctcaccatgaatgtcaccccagaggtcaagagtcgtgggatgaagtttgctgaggagcagctgctaaagcatggatggactcaaggcaaaggcctcggccggaaggagaatggtatcactcaggctctcagggtgacactgaagcaagacactcatggggtaggacatgaccctgccaaggagttcacaaaccactggtggaatgagctcttcaacaagactgcggccaacttggtagtggaaactgggcaggatggagtacagataaggagcctttctaaggagaccacccgttataatcatcccaagcccaacttgctgtatcagaagtttgtgaagatggctacattgacttcaggtggagagaag

SEQ ID NO: 6102 - DNA, 75 bp, Homo sapiens
ccccagttaccagagactcgaacttccagacagagacccagggacaccccgaagcccacctgcaatctcccacct

SEQ ID NO: 6103 - DNA, 442 bp, Homo sapiens
aggttgggcgcagagaggctggggctgcggccaggcgtggggtgcgtcggtgggcggccgcagctgcgaggagctcactgcggtcctaaccccgccgcagctcctcggacgcaggtttaacttctttattcaacaaaaatgcggattcagaaaagcacccaggaaggttgaacctcgaagatcagacccagggacaagtggtgaagcatacaagagaagtgctttgattcctcctgtggaagaaacagtcttttatccttctccctatcctataaggagtctcataaaacctttattttttactgttgggtttacaggctgtgcatttggatcagctgctatttggcaatatgaatcactgaaatccagggtccagagttattttgatggtataaaagctgattggttggatagcataagaccacaaaaagaaggagacttc

SEQ ID NO: 6104 - DNA, 562 bp, Homo sapiens
atctgctctttaaaactaaggttgtatactttcattacagtaatacacgtcattcattaaattatcttgtggcttagctttacaaattcttaccgttacatgactttgggtgaatgacctcaccggtgtctatatcactcatgtgtaacatgagaggagtagattaaataaacgaaaggatttctttcaactccaaagctatgacaatgtattttcaagattgtgtacttcttagaacaggctcaataataatttttcacattatgaactttgcagtcaaagaataggttcttcttaacctaacaaatgactatcctttccacccaaagtataaacaggatcctgattaataaattgagttcaaagaatctctgccaagtgtgcaaaatcactgcctctgtttgtcggacattcattgcctctaagaattgatggaattgaaaataacctcattttactgggacctcagagaattaattatttaaattttttgctgctttaaacattaattttcttaatttacccatatatgttgctgataagagctgtaatattttgaatg

SEQ ID NO: 6105 - DNA, 504 bp, Homo sapiens
agttcgaatcgcggtgcgacgaaggagtaggtggtgggatctcaccgtgggtcccattagccttttctctgccttgcttgcttgagcttcagcggaattcgaaatggctggcggtaaggctggaaaggactcccgaaaggccaagacaaaggcggtttcccgctcgcagagagccggcttgcagttcccagtgggccgtattcatcgacacctaaaatctaggacgaccagtcatggacgtgtgggcgcgactgccgctgtgtacagcgcagccatcctggagtacctcaccgcagaggtacttgaactggcaggaaatgcatcaaaagacttaaaggtaaagcgtattacccctcgtcacttgcaacttgctattcgtggagatgaagaattggattctctcatcaaggctacaattgctggtggtggtgtcattccacacatccacaaatctctgattgggaagaaaggacaacagaagactgtctaaaggatgcctggatt

SEQ ID NO: 6106 - DNA, 523 bp, Homo sapiens
tacggccgggttccttttactttttttaaccttcccctaagcagcctgagggttgactggattggtgaggcccgtgtggctacttctgcggaagcagtgctgtagttactggaagataaaagggaaagcaagcccttggtgggggaaagtatggctgcgatgatggcatttcttaggacacctttggattaataatgaaaacaactactctctgagcagctgttcgaatcatctgatatttatactgaatgagttactgtaagtacgtattgacagaattacactgtactttcctctaggtgatctgtgaaaatggttcgctattcacttgacccggagaaccccacgaaatcatgcaaatcaagaggttccaatcttcgtgttcactttaagaacactcgtgaaactgctcaggccatcaagggtatgcatatacgaaaagccacgaagtatctgaaagatgtcactttacagaaacagtgtgtaccattccgacgttacaatggtggagttggcaggtgtg

SEQ ID NO: 6107 - DNA, 107 bp, Homo sapiens
ggaccctgtggcgcgctactttgggataaagcgtgggcaggtggtgaagatcatccggcccagtgagacggctggcaggtacatcacctaccggctggtgcagtagc

SEQ ID NO: 6108 - DNA, 270 bp, Homo sapiens
cacgtgcagccctggaccctgaaccccggcgtgcgtgggccgtgggccctcggggaaaggttccgtgcactcggggactccggtgaagcctgttcagccgtctgtgtcatgtggccatcttgagtctactctgtcgctcttgtgccctagcaccccgagaaccgtcagtttgagccagatggtgagtaataacctgtagcagtttggttgctggttaattctggattgtgaatctccatgtatctttgggacctgtcagccgtggcagtc

SEQ ID NO: 6109 - DNA, 428 bp, Homo sapiens; identical to SEQ ID NO: 2812

SEQ ID NO: 6110 - DNA, 452 bp, Homo sapiens; identical to SEQ ID NO: 1599

SEQ ID NO: 6111 - DNA, 363 bp, Homo sapiens
tatgatgggataggttgagggggctgggttcctccttcctctatgcaatgggggtcacggaatgtgacaatatgctgatgctccttggagtcagtaataaaatgaccgacagggaaagggataaagtgatgcctctgattatccaaggttttaaagacgcagctgaggaagcaggaacgtctgtaacaggcggccaaacagtactaaacccctggattgtcctgggaggagtggctaccactgtctgccaacccaatgaatttatcatgccagacaatgcagtgccaggggacgtgctggtgctgacaaaacccctggggacacaggtggcagtggctgtgcaccagtggctggatatccctg

SEQ ID NO: 6112 - DNA, 637 bp, Homo sapiens
gcggcaacacatggtgcacgtgtgctggcgccgcaacaccagcgtctccatggtggacttcagcatcgcagtggagaatcagttgtctggaaacctgctgaggaaattcaaaaacagcaacgggtggcagaagctgtgggtggtgttcacaaacttctgcctgttcttctacaaatcacaccaggacaatcatccccttgccagcctgcctctgctcggctactcgctcaccatcccctctgagtccgagaacatccagaaagactacgtgttcaagctgcacttcaagtcccacgtctactacttcagggcggaaagcgagtacacgttcgaaaggtggatggaagtgatccgcagtgccaccagctctgcctcgcgaccccacgtgttgagccacaaagagtctcttgtgtattgatggccggacacactcgtttccgcagtggctgctttcctggaagacgtttcctttcttctgtattaatgaggcctggtaaaattaacacctgtctgaaaatcaaaaacatggcttcccagcagctctcctgtctccacagccgcgttttttaaccccgacctctcagcgtctgaatgagcagcgctcccacctccagtcctggcatccgctgggggcgct

SEQ ID NO: 6113 - DNA, 444 bp, Homo sapiens; identical to SEQ ID NO: 1601

SEQ ID NO: 6114 - DNA, 550 bp, Homo sapiens
attaaatctgctcacaaaaagaagattcgccagagcctcaagttaagatggacaaacatgaacctcatcaggactccggagaagaagctgaaggctgtccttcagccccagaagagacaccagtggataaaaagccagaggtgcatgaaaaggccaagagaaagtccacccgtcctcattataaggaagagggagaagacgatgacctccagggtgtgggcgaggaattatcttccagccccccaagcagctgtgtcagcttggagacccttgggagtcacagcgaagaaggcctggatttcaagccctccccacccctctcaaaggtttccgtcattccccacgaccccttctatttcccacactatgaggttcccctggctgcagttttggaggcttatgtagaagacccggaggatctaaaaaatgaggaaatggatctcgaagagccagagggctatatgccagacctggactccagggaggaggaggccgatggctctcagagcagctccagttcctcggtgccaggagagagcctccccagtgc

SEQ ID NO: 6115 - DNA, 557 bp, Homo sapiens
gtgctgcagaaaacaggtggactgtttggattagcagtaggtctcatgcagttgttctctgattacaaagaagatttaaaaccgctacttaatacacttgggctctttttccgaattagggatgattatgctaatctacactccaaagaatatagtgaaaacaaaagtttttgtgaagatctgacagagggaaagttctcatttcctactattcatgctatttggtcaaggcctgaaagcacccaggtgcagaatatcttgcgccagagaacagaaaacatagatataaaaaaatactgtgtacattatcttgaggatgtaggttcttttgaatacactcgtaatacccttaaagagcttgaagctaaagcctataaacagattgatgcacgtggtgggaaccctgagctagtagccttagtaaaacacttaagtaagatgttcaaagaagaaaatgaataatgttaagccattcttggttggacctcatagcttattttagttaatcttttttttgtcttttagccttaccaccttttaaaaaatttgttattctc

SEQ ID NO: 6116 - DNA, 567 bp, Homo sapiens; identical to SEQ ID NO: 1604
  misc_feature 519: n = A,T,C or G

SEQ ID NO: 6117 - DNA, 52 bp, Homo sapiens
ggagtgggggacggcgcagcatcaagacttgcactgaaaatttctgctttga

SEQ ID NO: 6118 - DNA, 556 bp, Homo sapiens; identical to SEQ ID NO: 1605

SEQ ID NO: 6119 - DNA, 260 bp, Homo sapiens
gactgctgtaagacgagtgaacctggggccacttctgaaaacacagattgactgtagaggggacagtgcccgaagtgtgatcacaggtttcagaaagactggggcgcacagcttctacccagttatccactgaaaatccggtaaagccattcctaactatgccattcagttcaacaaataacgactgaatgtattcttgagttctggcgccgcgttacgtgctctggagtggcggaataaagccggcctcttaacttccg

SEQ ID NO: 6120 - DNA, 552 bp, Homo sapiens
atgaaggatcttattgggagggataaaatgttctaaaactgagtaatagttacagctacaccactgagggaagttactaaaatcactgaaatgtacacttgaaatgggtgttttatgatatgtaacatatgcctcattaaagttgttttaagaaaaggattccctgcctcccaaaccatcctttaagcattaaacatttttggaggctcataatcaacaggacagaataactacttagtgatgatttacagagtgaaatattttactgttttgtagtaagcacattttagtaactgtacactagtacaatgtttttaagattttatctcatttttgtcatattagcctaaaatgtttatttttatttaaaaagtagccaataggaaggtaagattggggagaaagctcagtaaatgtcacaaaagaggctcctagtaacacaatctgagggagctttttcttttgaaataaagatggtgcatctgcccctttacagatttctctcctgtcccctgggactggggaaggtgaatcccctgcctgacaccttgt

SEQ ID NO: 6121 - DNA, 589 bp, Homo sapiens; identical to SEQ ID NO: 1609
  misc_feature 509: n = A,T,C or G

SEQ ID NO: 6122 - DNA, 618 bp, Homo sapiens
tagtggtgtggctctctggacttaacgtcactctcagaggtcagaaccttggagatcagaactgattctcaccaggtgtgagaggtgtggtagcagattgcaatgctctgcacctcttccttgcaagtgagcaacttcaggctctctgggcagaggctggcccactgtagtttgcagacatgctctccagatggttttactaagtcccctctccctgatagggaatcctgctggaccagcgcagccctggtgtggagaggttaaaagacttgcacaggatcaccaagtcatgctgtagagccaggattcctagacccagggctctgcactctcaaggctggccccatgtgctcaaggggatctaatgtttgggctccaaactaaccatctcggagctgggctcctcatttactgccaaaccctcagcttatgtagctagaaagggccctggagtgagaaagcctggattttcaaattgatgctcccctactgactagctgtgccactctgggcaaatgctcttccttgagcctgtttccacacctgtaaagtggggatgatgatcctatctcactgcttttgtgaggattacaggaaagcacctgtcctggctctgta

SEQ ID NO: 6123 - DNA, 634 bp, Homo sapiens
tacggccgggtgtagtggctcatatctgtaatctcagtactttgggagatgaaggtgagaggactgcctgaggccaggagttcaggaccaacatgggcaacaccacaagaccccatctctacaaaaaaccttaaaaattagcttggcgtggtgtgcacctgtactatctactcaagaggctgtggagacagcatcacttgagtccgggagtttgaggctgcagtgggctatgaccatatcactatattccagtccaggtaacagtgacaatccgtctcttaaaaaataaaataaattgaaaaagaaaagggacattaagaagagcaggaggtgaaatagagggagagagagggccaggagagggaggaagaggaggaagaagaggagaaagaggagaagaaagaaaacctaaattcgaggaaactccagaattacctaaaactgaataatgtgctaagctatcacagaaactattttggcataattctgaatgaacctacataaggaataaagaaattgcaaaacaaattctcaatgcattaaataaattagctggtctaaacagaaacagatgtgaaacctggaaactactattaaaaataaaagaatgcagtagtctcgatgctgctcaccc

SEQ ID NO: 6124 - DNA, 597 bp, Homo sapiens
gagggcacccattctgaagaggaaggctttgccatggatgaggaggactctgatggagaactgatacctgggagctgtcagaagggacaaactgtccacccaaggaacagcctggcgatctttttaatgaggactgggactcggagttgaaagcagatcaagggaatccatatgatgctgacgacatccaggagagcatttctcaagagcttaaaccttgggtgtgctgtgccccacaaggagacatgatctatgaccccagctggcaccatccgcctccactgataccctattattccaagatggtctttgaaataggacagtttgacgatgctgaagattgagtgtggagctttctgccttgtaggtgggcgggcctccacgtcaagatctcttttcctgtcttggaggtgaaaagtcatatctgagaaaatgtttgcagtgacccctagtctggggtacacagaccagtgttccttattgacagtgttcaataaggccccgtcattctcgccagtctgttgttgttcttaatgggctcctccttgaaatgtgtgtgtgtttgtgtcaagaggagttgtgttctttgtaaataaa

SEQ ID NO: 6125 - DNA, 591 bp, Homo sapiens
tgacttggagtttatgaatgaacaaaagctaaacagatatccagcttcttctcttgtggttgttagatctaaaactgaagatcatgaagaagcagggcctctacctacaaaagtgaatcttgctcattctgaaatttaagcatttttcttttaaaagacaagtgtaatagacatctaaaattccactcctcatagagcttttaaaatggtttcattggatataggccttaagaaatcactataaaatgcaaataaagttactcaaatctgtgaagactgtatttgctataactttattggtattgtttttgtagtaatttaagaggtggatgtttgggattgtattattattttactaatatctgtagctattttgttttttgctttggttattgtttttttcccttttcttagctatgagctgatcattgctccttctcacctcctgccatgatactgtcagttaccttagttaacaagctgaatatttagtagaaatgatgcttctgctcaggaatggcccacaaatctgtaatttgaaatttagcaggaaatgacctttaatgacactacattttcaggaactgaaat

SEQ ID NO: 6126 - DNA, 415 bp, Homo sapiens; identical to SEQ ID NO: 1612

SEQ ID NO: 6127 - DNA, 613 bp, Homo sapiens
agagccaggcgtccctctgcctgcccactcagtggcaacacccgggagctgttttgtcctttgtggagcctcagcagttccctctttcagaactcactgccaagagccctgaacaggagccaccatgcagtgtttcagcttcattaagaccatgatgatcctcttcaatttgctcatctttctgtgtggtgcagccctgttggcagtgggcatctgggtgtcaatcgatggggcatcctttctgaagatcttcgggccactgtcgtccagtgccatgcagtttgccaacgtgggctacttcctcatcgcagccggcgttgtggtctttgctcttggtttcctgggctgctatggtgctaagactgagagcaagtgtgccctcgtgacgttcttcttcatcctcctcctcatcttcattgctgaggttgcagctgctgtggtcgccttggtgtacaccacaatggctgagcacttcctgacgttgctggtagtgcctgccatcaagaaagattatggttcccaggaagacttcactcaagtgtggaacaccaccatgaaagggctcaagtgctgtggcttcaccaactatacggattttgaggactcaccctac

SEQ ID NO: 6128 - DNA, 451 bp, Homo sapiens
cggccgggcacaatggcttatgcctgtaatcccagcactttgggaggcaggaggattgcttgagcccaggagttcaagagcagcctgggcaacatgacaagaccccatctcaattaaaaaaaaaaaaaaggggaaaaagaaaaaaggccgaaaagtaaaagtaaaaaataacctttttgtaaacccccccccgccaaaaaaaaaaaaaacctttatgatcttttttcatttttaaaaaaaaaaccttgtttttttcctaccccccaagggggacaaaggcttttttttcaagtttagctttaaacggggggaattttttttaataaagggtcttaaatcttttgcaaacattggtttttggatgtccaaaggggacctttttcccccaaaaaaaaaccccttcaagtgggctgcttttttttttaaaaaataattctttcttgaaaaaaat

SEQ ID NO: 6129 - DNA, 388 bp, Homo sapiens; identical to SEQ ID NO: 145

SEQ ID NO: 6130 - DNA, 296 bp, Homo sapiens; identical to SEQ ID NO: 1614
  misc_feature 64, 187, 195: n = A,T,C or G

SEQ ID NO: 6131 - DNA, 51 bp, Homo sapiens
cgataccatgcccacagatctgatgctcttgagctgggcctggggaaacat

SEQ ID NO: 6132 - DNA, 80 bp, Homo sapiens
gcaaagacaccaacggctcccagttcttcatcacgacagtcaagacagcctggctagatggcaagcatgtggtgtttggc

SEQ ID NO: 6133 - DNA, 108 bp, Homo sapiens
gtgccatcatcatgattctgggcttcctggcatgctgcggtgctataaaagaaagtcgctgcatgcttctgttgtttttcataggcttgcttctgatcctgctcctgc

SEQ ID NO: 6134 - DNA, 118 bp, Homo sapiens
caaccgcggccgggccaccgacaggtcctcgggcaggtctgaagacgtttaccagctgctatgaatatgtgctgggggagggcgctcatgcctgattgcacacctgcatcaacctgat

SEQ ID NO: 6135 - DNA, 542 bp, Homo sapiens
gaggtggagcaagatggctgtggagctgggcgtgctgctcgtccggccccggcccggaaccgggctgggtagagtgatgcggaccctcctgctggtgctgtggctggcgacgcgcggaagcgcgctctactttcacatcggagagacggagaagaagtgctttattgaggagatcccggacgagaccatggtcataggaaactaccggacgcagctgtatgacaagcagcgggaggagtaccagccggccaccccggggcttggcatgtttgtggaggtgaaggacccagaggacaaggtcatcctggcccggcagtatggctccgagggcaggttcactttcacttcccatacccctggtgagcaccagatctgtcttcactccaattccaccaagttctccctctttgctggaggcatgctgagagttcacctggacatccaggtaggtgaacatgccaatgactatgcagaaattgctgctaaagacaagttgagtgagttgcagctacgagtgcgacagctggtggaacaagtggagc

SEQ ID NO: 6136 - DNA, 545 bp, Homo sapiens
aaccctcgggcttgaggggaagaggctgactgtacgttccttctactctggcaccactctccaggctgccatggggcccagcacccctctcctcatcttgttccttttgtcatggtcgggacccctccaaggacagcagcaccaccttgtggagtacatggaacgccgactagctgctttagaggaacggctggcccagtgccaggaccagagtagtcggcatgctgctgagctgcgggacttcaagaacaagatgctgccactgctggaggtggcagagaaggagcgggtggcactcagaactgaggccgacaccttctccgggagagtggatcgtctggagcgggaggtagactatctggagacccagaacccagctctgccctgtgtagagtttgatgagaaggtgactggaggccctgggaccaaaggcaagggaagaaggaatgagaagtacgatatggtgacagactgtggctacacaatctctcaagtgagatcaatgaagattctgaagcgatttggtggcccagctggtctatgga

SEQ ID NO: 6137 - DNA, 574 bp, Homo sapiens; identical to SEQ ID NO: 1619
  misc_feature 58, 278: n = A,T,C or G

SEQ ID NO: 6138 - DNA, 588 bp, Homo sapiens
  misc_feature 363: n = A,T,C or G
gttttacaatactgaagttataggaaacaagcacaaaaggccattgggtggggctggatggagcatgatctggtcctttaaagtatgcagatcgcctgggaggcccagcctatggagattgggaggagagggagatgctggtgactggagatggtgagagcctgggctggggtagtttttagtcatgggcttatggaccctcccctcttctccagctagctcaggcctttaagaggcaggcccaagaagggaaccccaggaagccctagaagctccccagcgcctccatcccatggacccggatcccctgcaggaggggaagttgagcagtggcccaaagacacagtcgtcctcctggcttgnggcttgggttaccagggtccccaaggggctggcctggaaccagaggttctcataggacttggggcttggggtgaggcccgccaagaggggctgagtggagtcacagcggagatagtgccctggccctgggcttgtggggctgcccagcagctgcccataaaggacctgatcgcttgtgccagactgggattggggctgggtggaaactgctcttggtccccctcg

SEQ ID NO: 6139 - DNA, 631 bp, Homo sapiens
  misc_feature 624: n = A,T,C or G
catgcttccacacctttcttgctgaaggacaaagtacataaaatgccggtgtttggcttccagatctgaaggaagctgtttagtactctggcaggatcacatcttgctgtggaacttcaaaacccacagcagagcttccttgcccttctctgggagctgctacctcctccacagtcttcagcttctcctctgctaggccctcctctagttccaggtcagccacctttatcccatcctccactgccttgggcaccattttgggggcctcttcagcatttatatctgcacctttaactttctctaaggcttgcaccttcatcagctcagcctgtgcccccttaactgcggcttgggccccatcgccttgaattttctctccttctggaatagctttcatgtcctcgttgccatcttggattggagaagggtctcggctagccttgtggctctcctggatgctgccatggctgctgctggcacttcccaggcgggaagaggccaccacagccttcaccgctgccttaagcttacgccgggcattgaattcttggagcttcttttgagcggtattcatgtgtaccaaattggctgctttacctgtgacccacggatgctggagagctngaaatga

SEQ ID NO: 6140 - DNA, 208 bp, Homo sapiens
ttgaccacttcctgcacacccagctctgtgctgagtgctgatcttgtaaaataaaatgcatgtcacctgcgaaaaaaaaaaaaaaaaaaaaaaaaaaaaaaaaaaaaaaaaaaaaaaaaaaatattttggggggggaaattttttttttttttggggggggtttttttttttgggggggggggggtttttaaaaaagggggggggggg

SEQ ID NO: 6141 - DNA, 747 bp, Homo sapiens
  misc_feature 599, 621, 632, 658, 697, 726: n = A,T,C or G
tggtggttgctttgaactttatttgagaaaaacagaagataaatgtatcaaaagaacacacaggtggcgggggaggcacagccagtggcggcagcaggggtgggcatccgggctaaggctttacttggcggcagtctcatcggattttgcagcttctgggcccccaagctgggcccgcgactcgaaggtgactgggatggtgatctcgttggactgcgtggctagcttgggcatgggggcctccacggtcagtgtgccctcaggggacagggaggaggaaacttgggtggggtccacaccggggggcagcgtgtatttccgcgtgaagcaccgggagatgtagccatgctcgtcctgccgctcctcgtgcttgccggtgatctccaccacgccatccttggtcttgaccgtcagctcgtccggggcgaagtggttgacatccagggacacgcgccagcggtccgcagtgtgccggatctccgagaccccgctgctgagttgccggctgagcgcgcggctgtaggcgggcgccgccactgcggggctctcgatggcggcggggggcagggggcgcacgtagcctggccagctgctgccgnctaaccactgcgaccactcctncggcagccggngcagcccgaagcctggtcgaagagcngctatgcgggtaccagtcgcgggaggggtcccagctggnggcccgcaagagcgagaaagggacgcggngcttcgtcatgctggctgact

SEQ ID NO: 6142 - DNA, 554 bp, Homo sapiens; identical to SEQ ID NO: 1624

SEQ ID NO: 6143 - DNA, 527 bp, Homo sapiens
ggagtggtcaacacccagaacagatctctttaatcagaagagactggcagggggagaaacaagattgctttctggccatagtgagtccgaggaccgcgtttgcagctcccattcttcttgaggccaacaaaccaattcttctctgcatgcttcttggatatataggtgttgtaatggttctcctccagcctttccaggaacaaacattcctcatttggtgtctgtgagccgtataaaagcccgtcggtgtccatggccaagtactggccagtctcggtactctttatatacacctcccccacgctttccgcactgagctgcagctgaatgtgctggtcgctcctgtcccttgtcccatccactgtgccatccggaaggatcctcaggaagtggcccccgttgctacagtagaggagtttgggcttcttgtaattccctggaggcagattaaacttctcggtcagggctgtgaaggtggtgatttccccttcagccatggctcagcagctgctgcttgtggcgctttc

SEQ ID NO: 6144 - DNA, 355 bp, Homo sapiens
ggtttgtgcatccactctggaaccgctcgtgtgtggcctgtggcaatgacatcgccctcatcaagctctcacgcagcgcccagctgggagatgccgtccagctcgcctcactccctcccgctggtgacatccttcccaacaagacaccctgctacatcaccggctggggccgtctctataccaatgggccactcccagacaagctgcagcaggcccggctgcccgtggtggactataagcactgctccaggtggaactggtggggttccaccgtgaagaaaaccatggtgtgtgctggagggtacatccgctccggctgcaacggtgactctggaggacccctcaactgccccac

SEQ ID NO: 6145 - DNA, 607 bp, Homo sapiens
tcggcacgagcgacagatcctactggctggccagcgctgcgcccctccccatgatgccactctctgaagaggcgatccgcccctatgtcagccgctgtgcggtatgcgaggccccggcccaggcggtggcggtgcacagccaggaccagtccatccccccatgtccgcagacctggaggagcctctggatcgggtattcattcctgatggtgagtcccgtgcccttgaaaaccctggctcattcaccatttcctaacaccttctcccgccatttctctctggattggacagtaattctgagcactctgcgcttaggacataaggtcacggggactgttgcaaaccatagcctgttgggatgcagggccattatcttttaaaaacacttgtgattgattttgatcacattggtagaatttaaaagatgagtttgcttcagccatcggtgaaactggagccaatttgtgtgcatacttaccatgctgagtacgactccttttcagcgcttgtattttgttctttatggaataatctaaggaaaaatgttaagatcagacccaaacctgggtgtgtccctgattgggtctggggttgtctgtgtgtgtct

SEQ ID NO: 6146 - DNA, 304 bp, Homo sapiens
ccatcactgccatctgggaaacccggctaaaggcccaaccctggctcttcgacgcccccaagttccgactgcactcagacaccctggcgcatattggctctcgggggccacaactgctcctgcgcctgggccttacttgctaccgaaacttcctgggcaccaactggaccatctcagctgcctggctgcgacagcaaggtgccaccgactggggtgacacgcatgcctataaggcggacccactgaaggtgggcactacactaaccacagccgatgacttccttgacttcctgcgccgctcccg

SEQ ID NO: 6147 - DNA, 557 bp, Homo sapiens
ttcggcacgagggatgcgcgtcatccttctttcttcctctacagaagtggtgtctactatgaaccatcctgtactcagaatgtgaatcatggtgtacttgtggttggctatggtgatcttaatgggaaagaatactggcttgtgaaaaacagctggggccacaactttggtgaagaaggatatattcggatggcaagaaataaaggaaatcattgtgggattgctagctttccctcttacccagaaatctagaggatctctcctttttataacaaatcaagaaatatgaagcactttctcttaacttaatttttcctgctgtatccagaagaaataattgtgtcatgattaatgtgtatttactgtactaattagaaaatatagtttgaggccgggcacggtggctcacgcctgtaatcccagtacttgggaggccaaggcaggcatatcaacttgaggccaggagttaaagagcagcctggctaacatggtgaaaccccatctctactaaaaatacaaaaaattagccgagcacggtggtgcatgcctgtaatccc

SEQ ID NO: 6148 - DNA, 490 bp, Homo sapiens
  misc_feature 30, 381, 386, 415, 462: n = A,T,C or G
gggagcttcctgagcccctgctcacctttnacctctacccccatgtggtgggcttcctcaacattgatgaaagccagagggtgccagcgacactgcaggtcctccagacgctgcccgaggagaactaccaggtgcttcgtttcctgactgctttcctggtgcagatttctgcacacagtgaccagaacaagatgaccaacactaacctggctgttgttttcggccctaacctgctgtgggccaaggatgcggccatcaccctcaaggccattaatcccatcaacaccttcaccaagttccttctggatcaccaaggggagctgttcccaagcccggaccccagcgggcttctggaacctgggcccctgccccaccagcccnttctntggtaagcccgggtttggactcttcctcngggcatcaggggccatgaagcccctgggagagagatgttggagccanccttaggcatgctttgccccactttgtt

SEQ ID NO: 6149 - DNA, 623 bp, Homo sapiens
ttcggcacgaggccgggctcctcaggttcagacccgaccgttatccagtcggttcgtggagaggagaggtgcactttacaggtccccgatgaaccaagagaaccctccaccatatccaggccctggtccaacggccccatacccaccttatccaccacaaccaatgggtccaggacctatggggggaccctacccacctcctcaagggtacccctaccaaggatacccacagtacggctggcagggtggacctcaggagcctcctaaaaccacagtgtatgtggtagaagaccaaagaagagatgagctaggaccatccacctgcctcacagcctgctggacggctctctgttgctgctgtctctgggacatgctcacctgaccagaccagcccagccgtcctgtcctgccagctctgctgccacctctgacaggtgtgcctgcccccatctcttctgattgctgttaacaaatgactagctttgcacagacacctctaccttcagcactatgggattctagattaatgggggttgctactgtttaattcagtgacttgatctttttaatgtccaaaatccatttcttattgatctttaaagatgtgctaaatgacttttttg

SEQ ID NO: 6150 - DNA, 625 bp, Homo sapiens
ttcggcacgagggttcacctgccgcgtggatacaggggcctgaccttccagcagaatgcgtcctccatgtgtgtccccgatcaagacacagccatccgggtcttcgccatccccccatcctttgccagcatcttcctcaccaagtccaccaagttgacctgcctggtcacagacctgaccacctatgacagcgtgaccatctcctggacccgccagaatggcgaagctgtgaaaacccacaccaacatctccgagagccaccccaatgccactttcagcgccgtgggtgaggccagcatctgcgaggatgactggaattccggggagaggttcacgtgcaccgtgacccacacagacctgccctcgccactgaagcagaccatctcccggcccaagggggtggccctgcacaggcccgatgtctacttgctgccaccagcccgggagcagctgaacctgcgggagtcggccaccatcacgtgcctggtgacgggcttctctcccgcggacgtcttcgtgcagtggatgcagagggggcagcccttgtccccggagaagtatgtgaccagcgccccaatgcctgagccccaggccccaggccggtacttcgcccacagcatcctga

SEQ ID NO: 6151 - DNA, 561 bp, Homo sapiens
tcggcacgagggcaaccccagccccaatcacaaccccagcctcagccccaacccaagcctcagccccagcagctccacccgtatccgcatccacatccacatccacactctcatcctcactcgcacccacaccctcacccgcacccgcatccgcaccaaataccgcacccacacccacagccgcactcgcagccgcacgggcaccggcttctccgcagcacctccaactctgcctgaaaggggcagctcccgggcaagacaaggttttgaggacttgaggaagtgggacgagcacatttctattgtcttcacttggatcaaaagcaaaacagtctctccgccccgcaccagatcaagtagtttggacatcaccctactgaaaacttgcgattcttcttagttttctgcatacttttcatcacgatgcaggaaacgatttcgagtcaagaagacttttatttatgaacctttgaaaggatcgtcttgtatggtgaattttctaggagcgatgatgtactgtaattttattttaatgtattttgatttatgattatttattag

SEQ ID NO: 6152 - DNA, 602 bp, Homo sapiens
aatttggccctcgaggccaataattcggcacgaggatcaaatgcataagcccatcgatggtatacatgacaaggggattgtagaagacatccattgtggatccatgaagggcactggtatgcgaccacctcacccaggcatgggccctccccagagtccaatggatcaacacagccaaggttatatgtcaccacacccatctccattaggagccccagagcacgtctccagccctatgtctggaggaggcccaactccacctcagatgccaccaagccagccgggggccctcatcccaggtgatccgcaggccatgagccagcccaacagaggtccctcacctttcagtcctgtccagctgcatcagcttcgagctcagattttagcttataaaatgctggcccgaggccagcccctccccgaaacgctgcagcttgcagtccaggggaaaaggacgttgcctggcttgcagcaacaacagcagcagcaacagcagcagcagcagccgcagcagcagcagcagcagcagcaacagcagccgcagcagcagccgccgcaaccacagacgcagcaacaacagcagccggcccttgttaactaca

SEQ ID NO: 6153 - DNA, 502 bp, Homo sapiens
  misc_feature 2, 43, 82, 267, 372, 435: n = A,T,C or G
gngaccgctgccaatcactcccattgggtcgacagcggccatngaggaatggcatcaccagctgccggatgcggactgagantgagccatcttgtggtccccagtggtcagcggagaccccaaggaggatcacaactacagcagtgccaagtcctccaacgcccggagcacctcgcccaccagcgactccatctcctcctcctcctcctcagccgacgaccactatgagtttgccaccaaggggagccaggagggcagcgagggcancgaggggagcttccggagccacgagagccccagcgacacggaagaggacgacaggaagcacagccagaaggagcccaaggattctcttgggggacagcgggtacnattcccaagcacaagaagcgccagaactttccgccaaggccaggaaggtccccagcgacacantggcccctcaaaaagagacgcaccgaaaagccccccgagagcgatgatgaggagatgaaagaagcgg

SEQ ID NO: 6154 - DNA, 634 bp, Homo sapiens
  misc_feature 615, 616: n = A,T,C or G
aaagatagttaatttattataacatggtattacttcagttgttgatgttgcatatctttggaacacatgttggcagagaaaaaagaggccttcccctgatatattctgtcttaatcctgttttttaccctctgatagctgcatgacactcaaatggtatgtcttctattcagatgttcacagatgatgtgcaggaacagcaaacaagatgaaaaaaactaatgaaaactgctcagaaaaaagaaaaggtaaaaaggaccatctcatagagcaacgcattcctgtcactggaagtgttcagacaaagtgtagaaggtgacctgtgaatgctcatgtaccttaagccatgggtgattcagtgcttcataaacagtgatcctttcagctggatccagcatcagcatgcgacgtactaggtctttggcactttcagagatatggctccactgccttggattcatcttatattttcctttaataatgccttcaaacaatctttccttggttccgtaaaaaggcaaacaaccactgagcaggataaaaaggatcacaccgcacccccagacgtctacaggccttccgtaaggctctcttttgaccacttctggtgccatannaatgagtgttccaacacg

SEQ ID NO: 6155 - DNA, 770 bp, Homo sapiens
  misc_feature 289, 562, 667, 668, 684, 685, 707, 760: n = A,T,C or G
ctgacggactggccgagccggcggtgagaggccggcgcgtcgggagcgggccgcgcggcaccatgtcggccaaggtgcggctcaagaagctggagcagctgctcctggacgggccctggcgcaacgagagcgccctgagcgtggaaacgctgctcgacgtgctcgtctgcctgtacaccgagtgcagccactcggccctgcgccgcgacaagtacgtggccgagttcctcgagtgggctaaaccatttacacagctggtgaaagaaatgcagcttcatcgagaagactntgaaataattaaagtaattggaagaggtgcttttggtgaggttgctgttgtcaaaatgaagaatactgaacgaatttatgcaatgaaaatcctcaacaagtgggagatgctgaaaagagcagagaccgcgtgcttccgagaggagcgcgatgtgctggtgaacggcgactgccagtggatcaccgcgctgcactacgcctttcaggacgagaaccacctgtacttagtcatggattactatgtgggtggtgatttactgaccctgctcagcanatttgaagacaagcttccggaagatatggcgaggttctacattggtgaaatggtgctggccattgactccatccatcagcttcattacgtgcacagagacattannacctgacatgtccttnntgacgtgaatggtcatatccgnctggctgactttggatcatgtttgaagatgaatgatgatggcactgtgcagtnctccgtggcg

SEQ ID NO: 6156 - DNA, 369 bp, Homo sapiens
catacatttttcctggggctcgcacttgacaggcccaaacctttccaaatccgccttttcctaaaactctgtaatgtctaaatgggttctttgttacgggttgcctttccacccttttcctttgtaaaacctgaaaaaaatatgacctttttgggtattcttcaaagggtcccccttttaggaagttatgggcacctccaccctttataccctaagtttctccttttaaaacattcctaaaaggcttttttgaaagggttctcctccttaagtcccaatctacattttgtcacaacatctggaggtttttctggtaaaggggctgccaacttatcattgaaaaatctttttaaaattgacagcccacaa

SEQ ID NO: 6157 - DNA, 479 bp, Homo sapiens
  misc_feature 212: n = A,T,C or G
ccggctgcgccagagtccgcgcgatggagccccggccgcggcggcggcgcaggagtcgccccctggtcgccgccttcctgcgagacccgggctcgggccgcgtgtacaggcgcgggaagctgatcggcaagggcgccttcagccgctgctacaagctgacagacatgtccaccagcgccgtgttcgccctcaaggtggtgccgtgtggcggngctggggccgggtggcttcgcccgcagggaaaggtggagcgtgagattgccctgcatagccgcctgcgaccccgcaacatcgtggctttccacggacactttgctgaccgcgaccacgtgtacatggtgctggagtactgcagccgccagtctttggcccacgtgctgagggcgcggcagatcctgacggagccagaagtgcgcgactacctgcggggcctggtcagcggcctgcgctacctgcaccagcggtgcatcctgcaccgc

SEQ ID NO: 6158 - DNA, 560 bp, Homo sapiens
  misc_feature 13, 15, 18, 22, 346, 451, 515, 526: n = A,T,C or G
gagcagcggcgangncgnacgnatgcatcggacgacgaggaggagacgtaccggctctggaaaatccgcaagaccatcatgcagctgtgcacgaccgtgtaatctggtgacccaggtggcctccaccacgttctcccgtcctggggtgaggcttcctgtggcccagccgccccattcacctgtggatttgtgcgagatgcagcctcagaaggaacaaggcccccagaggacggtcacctgggggcagctggtgccgggtcttcacccagaccacgctgggtcccctctgttgggggtttggggtccgggtctcccaccaagccactgcttcctcctgggccctcgntttccacccctcgtcttccctccctcgggggccctgatgcgtggcggcccccgcccgggcctcggctcttttactccattcacagccgtgcacgcgctcaaagcnaacaggggtgcgaaaatgcaagctcttggaattctctcgttgttgtaagaagtttggtgttttnaaatggtaaanatgtttttaagaaataaaatttgcttgatacaga

SEQ ID NO: 6159 - DNA, 574 bp, Homo sapiens
  misc_feature 189: n = A,T,C or G
ttcggcacgaggaagatgatcagcacgtggaccgccgtgtgggtgaagatctgtgccagctgggcagggctgctcctctacctgtggaccctggtagccccactcctcctgcgcaaccgcgacttcagctgaggcagcctcacagcctgccatctggtgcctcctgccacctggtgcctctcggctcantgacagccaacctgccccctccccacaccaatcagccaggctgagcccccacccctgccccagctccaggacctgcccctgagccgggccttctagtcgtagtgccttcagggtccgaggagcatcaggctcctgcagagccccatccccccgccacacccacacggtggagctgcctcttccttcccctcctccctgttgcccatactcagcatctcggatgaaagggctcccttgtcctcaggctccacgggagcggggctgctggagagagcggggaactcccaccacagtggggcatccggcactgaagccctggtgttcctggtcacgtcccccagggaccctgcccacttcctggacttcgtgccttactgagtctcta

SEQ ID NO: 6160 - DNA, 415 bp, Homo sapiens
  misc_feature 384, 401: n = A,T,C or G
gcactgctaaatatggttgtctttattttctttttccttgcccagccctagttgccacccacatgcctccagcgatcaaggggaccagtctttcaggcaaggcccccatctggcctcctggctcctggagacagggtctgggctctccaggtcctggcctgcctcgtgctctggcagccaaggccccagaggctctcaagccacagaagctccctctcatttggaactccctgtgcttccagcaaatgccaaagcccctcagaacactccatcacaggcaggggtagggggacatgagggccctgcacccacattgcacctgggagagcctagctggtcctcactgaactcttcttgggactgccttgccccggtcaggccggnccagggcagatttgggntggttcagattctt

SEQ ID NO: 6161 - DNA, 501 bp, Homo sapiens
gaacttgcaccgaagctcactcgagaccccaaacctccaggcctgaggcccagccagcgcccaatggatgacaaaaagaagaaacggagtcccaagccctgcctggcccagccagcccaggccccaggcacactacggagggtccctgtgcctaccaaccacaacggctccttggccctaggacttcctcatctgccatcccccaagcagcgggccaagttcaagagagtaggcaaagagaagtgccgcccagtcctggctggaggtggaagcggctctgcaggcacgcccctgcagcactccttcctgaccgaggtgactgatgtctatgagatggaggggggactcctgaacctgctcaatgatttccactctggccggctgcaggccttcgggaaggaatgctcctttgagcagctggagcacgttcgggagatgcaggagaagctagcccggctgcacttcagcctggatgtgtgtggggaggaggaggacgatgaa

SEQ ID NO: 6162 - DNA, 305 bp, Homo sapiens
cggcacgagttgcctttctaaaagctgtaactgtctttctctgactaaattgtcctacatagatcatttcactttttttttttttttgggcaaatttttaaagggggcggaaaagttaaaaataaggggaacatcttgtcttttatggcccaaacaagaatgtttttcccaaaaaaaggcccccttctcaatacccccctcctaaaaaactaacggtttaatataagaaaagggtcctttaacgggcaaaaatcggttttaactggttccgaagggtaaccccccttttttccccccattttttc

SEQ ID NO: 6163 - DNA, 448 bp, Homo sapiens; identical to SEQ ID NO: 1635
  misc_feature 172: n = A,T,C or G

SEQ ID NO: 6164 - DNA, 561 bp, Homo sapiens
  misc_feature 176, 241, 399: n = A,T,C or G
ctgaggcgggccctgtgctgggggtggtagaaaggatgctgctgaggcagctggaggagtgggagtagctcaaaggggagggctgttggatgtatggggagctggcagagcaggtggcagtcactgggacaaggagggacttgcctctcttctcattattgtgtcctttgctttantgtcagtcctggacttgtgcaggcctgttttgtgtagatctgttttggaagatggcatggtctangtggttgaaggatgtagtagaaggatggatggtggaaggtggggacgttggtggctggctgaggtgcatgggccccacacaggacagctggagaatgggccgtccacttggcctcgttctgcgaggggctcatgggtctgaaagcccccacccactangcttgattgcatccctgttgtgccctttaagaaacatgtttccaccccacccccaaccttgtcccaagtgccctggactaaatttcctgtgccagtgactgcagttggccaagggacaatgtggaaaacccagtgtccatctttccaccctccctgatctcc

SEQ ID NO: 6165 - DNA, 521 bp, Homo sapiens
  misc_feature 188, 343: n = A,T,C or G
ccccagcagggacactgacgtcaggacccgagcctccagcctgagcctagctcagcagcccaaggacgatggtgaggggaggtggggccaggccccctgccccgctccaatcggtaccatcccctccctggttcccagtctggccggggtccccggcccccctgtgccctgttccccacctacctcanctgggtcaggcacagggaggggagggatcagccaaattgggcggccacccccgcctccaccactttccaccatcagctgccaaactggtccctctgtctccctggggccttgggttctgtttgggggtcatgaccttcctagtttcctgacgcanggaatacaggggagagggttgtccttccccccagcaaatgcaataatgccctcacccctcctgagaagagccccctccctgtggagcctgttacctccgcatttgacacgattctgctgtgaaccccgcaacctcctccccacctcccatctctccttccaggcccatccctggccca

SEQ ID NO: 6166 - DNA, 542 bp, Homo sapiens
agacaataaggccacagcactttatgtaggacagacacacagtattcccctagtattcatcccccctatcttttcttccccccactccacactatccatgcccacctccttgtaatccttctccagggcagtcatatcctcatgggccttggagaactcaccctcctccatgccctcacccacatatcagtgcccaaacgccctcttggcatacatcaggtcaaacttgtggtccaggcgggcccaggccatagtgatggctgtcatgttgctcagcatgcacatggcacgttgcactttaccaggtcactcccaggcaccacagtgggaggctggtgattgatatcaaccttaaagcctgtggggcaccagtccacaaactgaatgctgcacttggtcttgatggcagcaatggcagcgttgacatccttgggcaccacatctccatggtatagcaggcagcaggacatgtacttgccgtgccggggatcacacttcaccatctggttggcaggctcaaagcaggcattggtaatctctgc

SEQ ID NO: 6167 - DNA, 449 bp, Homo sapiens
ttcggcacgaggggagacaaagactggcttctggacttcctccctgatccccacccttactcatcacctgcagtggccagaattagggaatcagaatcaaaccagtgtaaggcagtgctggctgccattgcctggtcacattgaaattggtggcttcattctacatgtagcttgtgcagatgtagcaggaaaataggaaaacctaccatctcagtgagcaccagctgcctcccaaaggaggggcagccgtgcttatatttttatggttacaatggcacaaaattattatcaacctaactaaaacattccttttctcttttttcctgaattatcatggagttttctaattctctcttttggaatgtagattttttttaaatgctttacgatgtaaaatatttattttttacttattctggaagatctggctgaaggattattcatggaac

SEQ ID NO: 6168 - DNA, 639 bp, Homo sapiens; identical to SEQ ID NO: 1637

SEQ ID NO: 6169 - DNA, 650 bp, Homo sapiens
  misc_feature 407: n = A,T,C or G
ttcggcacgaggtgaagaagctgaaggcccgaatgcaccaggccatagaaagattttatgataaaatgcaaaatgcagaatcaggacgtggacaggtgatgtcgagcctggcagagctggaggacgacttcaaagagggctacctggagacagtggcggcttattatgaggagcagcacccagagctcactcctctacttgaaaaagaaagagatggattacggtgccgaggcaacagatcccctgtcccggatgttgaggatcccgcaaccgaggagcctggggagagcttttgtgacaaggtcatgagatggttccaggccatgctgcagcggctgcagacctggtggcacggggttctggcctgggtgaaggagaaggtggtggccctggtccatgcagtgcangccctctggaaacagttccagagtttctgctgctctctgtcagagctcttcatgtcctctttccagtcctacggagccccacggggggacaaggaggagctgacaccccaaaagtgctctgaaccccaatcctcaaaatgaagatactgacaccacctttgccctccccgtcaccgcgcacccaccctgacccctccctcagctgtcctgtgccccgccctctcccgcacactcagtccccct

SEQ ID NO: 6170 - DNA, 478 bp, Homo sapiens
agaaactgcttagatgacggggcctccttcttcaaacaggaatttctgttagcaatatgttagcaagagagggcactcccaggcccctgcccccatgccctccccaggcgatggacaattatgatagcttatgtagctgaatgtgatacatgccgaatgccacacgtaaacacttgactataaaaactgcccccctcctttccaaataagtgcatttattgcctctatgtgcaactgacagatgaccgcaataatgaatgagcagttagaaatacattatgcttgagatgtcttaacctattcccaaatgccttctgttttccaaaggagtggtcaagcccttgcccagagctctctattctggaagagcggtccaggtggggccgggcactggccactgaattatgccagggcgcactttccactggagttcactttcaattgcttctgtgcaataaaaccaagtgcttataaaatg

SEQ ID NO: 6171 - DNA, 650 bp, Homo sapiens
  misc_feature 82: n = A,T,C or G
tcggcacgaggatcccgtccatcaagtggtgcggagctgagggcgactacaacgtgatggtcatggagctgctggggcctancctcgaggacctgttcaacttctgttcccgcaaattcagcctcaagacggtgctgctcttggccgaccagatgatcagccgcatcgagtatatccactccaagaacttcatccaccgggacgtcaagcccgacaacttcctcatggggctggggaagaagggcaacctggtctacatcatcgacttcggcctggccaagaagtaccgggacgcccgcacccaccagcacattccctaccgggaaaacaagaacctgaccggcacggcccgctacgcttccatcaacacgcacctgggcattgagcaaagccgtcgagatgacctggagagcctgggctacgtgctcatgtacttcaacctgggctccctgccctggcaggggctcaaagcagccaccaagcgccagaagtatgaacggatcagcgagaagaagatgtcaacgcccatcgaggtcctctgcaaaggctatccctccgaattctcaacatacctcaacttctgccgctccctgcggtttgacgacaagcccgactactcttacctacgtcagctcttccgcaacctcttc

SEQ ID NO: 6172 - DNA, 647 bp, Homo sapiens
tcggcacgaggcacgatctcagctcaccacagcctcgacctcccaggctcaagtgatcctcccacctcagcctaccaagtggctgggactacaggcgtgtgccaccatgcctgggtaatttttgtatttttgtagagatagggttttgccgtgttgcccaggctggtctcaaactcctgggctcaagtgatctgcctgcctcaacctctcaaagtgctcaactcattgtttactgtcttttttcctagtaatcttaaaataatttgcctcacagaaatagagacagtaagtgtctgcagccagttcactgtttttggtaattcattggtcttcaggagttaagattttacattgtcacattttaatttttaagcctatttttcatctctgaaactttccttttctccttggttctggctatacttggactcaaactgatcagtgtgatcatgtccaaaacagcttggcctggaagaagtaggccttattttttcagcctaatagtgtcccatgcacatgctctttgtagcattcaagtgtttaacattggataaattaagaaggtcaagaatgttgttgaaacttcaaggtctcaaaaggaaatgatggggacatagaacaactgttggtgtaccaaaaaaaggtac

SEQ ID NO: 6173 - DNA, 614 bp, Homo sapiens
attttgttttttttcatttttctcaaaacatatatttacccctcctctcagtacatctttgagcacctttcccagaatctcaggaatgtatagacccccgccccacacttcatacccgccctaggccttggtgatgaggcccctcacagcttgtgcaatggcatccctgtcgataccaaacatcttcagcagctcagccggcttcccacttcttggtacccggttaactgccaggtgggtgacagtgatgccaggctcgcccactactgcactggacacagcctcaccaatgccaccttcataataatggtcctccacggtgaggatcctgcccttggtggcacgagcgctgtcgagaatgagttttctgtccaggggcttgatggtgaaggggtccagcacgcggatgttgatcttttctttcttcagcagttcggcagcggccaaggcctcgtgcagggtcaccccagccccgataacggtcacctggtcatccttgctcttcaggaccaccttggcttgtccgacctggaagtcctcattgttgttatagatgatggcattttctgggcggctggtccggatgaagcagataccctttgtattggcggcta

SEQ ID NO: 6174 - DNA, 115 bp, Homo sapiens
ccctgctcggcgtggccaccgccacctgcgcccgtcaacgacgagcccatcgtcatcgatgactatgggccggccccacctgcggccgcaagcttattccctttatgagggttaa

SEQ ID NO: 6175 - DNA, 585 bp, Homo sapiens
  misc_feature 440: n = A,T,C or G
tcggcacgaggagggtttcagaagctgccagaggaggagccagaaacagatctcagccccgggctcccagctgcccacctcataggtaaggacctccaagacctgaataagagtgtaaataatccgaaggttccagttctgctcgcccagagtccttcggctccatgattccagtgctcggtttcccacccgcttcacgaccttttgtcgctcgtgcccactcttacgctcgtccccgcagtgtagtttcttcttccctccggtgcaagcaaaagccggcctggaggtccccactacagcgttctgcaccccacatccgtgttccctcggcccccaactcgcactcatcccagaaacagcaccatccctcctcccccggcccggctcggctcccgcaggggctaaaagccgccacttccccagaagtcccaagcctttangatcgcattcccaagagcgcgtcggcccgtgtctccgcaggcgctccgctgaaggggcaggggctaggctgggagacgacgaaggaacaggcgtttctgacgagcgggacgcagttctcggacgccgaggggctggcgctcccgc

SEQ ID NO: 6176 - DNA, 581 bp, Homo sapiens
gcggccgcacgatcctaacattccaggtgtaagttacagagctcaagttcatctacaaaaaaagtaataaaaataaaatttaaaatggcaccttcatgttgccgtccaccccgttgtgctgctcgtagctgcgcttgcccaggatggtgggggagccgttgttgatgacgggggccaccttggcgggcgtcaggctgctgagcacgctggacacgcttttcacggggtcaggcttgggggggcgggggtgggtctcaagataccgaagcacggcttccagcggcttgcgtaccgcctgcttcagcaccagcgggctctgggaggcttcgggcagccgcgccgtgcactcggccttgatggcgcgctgttgatgggcaggtaggggtgccgcgagtgccacgggcgcaggatctcacggcacaggcgccgggcgatccgcgtcacttcgtcgtgtgcagatagaaagcctgcctggtcttcatggcaaacttggggctcccgctgctccgggctgggagggcgtggggactcatgttactgcggtttggtcctggcctctctccatctaaccgggttggaat

SEQ ID NO: 6177 - DNA, 602 bp, Homo sapiens; identical to SEQ ID NO: 1642
  misc_feature 173, 536: n = A,T,C or G

SEQ ID NO: 6178 - DNA, 135 bp, Homo sapiens
acacagatcgtccgatgcaacccaggcaccttgccccatggagcgctgcttgggaccgcccaccactccgggcccataccgaaacatctatgtctcaagcccaaaaggccatcttacccgactggggttggagtt

SEQ ID NO: 6179 - DNA, 376 bp, Homo sapiens
tcggcacgaggcggcggctgagaggcagcgaactcatctttgccagtacaggagctcgtgccgtggcccacagcccacagcccacagccatgggctgggacctgacggtgaagatgctggcgggcaacgaattccaggtgtccctgagcagctccatgtcggtgtcagaactgaaggcgcagatcacccagaagatcggcgtgcacgccttccagcagcgtctggctgtccacccgagcggtgtggcgctgcaggacagggtcccccttgccagccagggcctgggccccggcagcacggtcctgctggtggtggacaaatgcgacgaacctctgaacatcctggtgaggaataacaagggccgcagcagcaccta

SEQ ID NO: 6180 - DNA, 585 bp, Homo sapiens
ttcggcacgaggggatttgttgccactccttcccctgcccctggtgtgaacgagtccccgatgatgacctggggggaggttgagaacacacccttgagagttgaagggtcggaaacgccctacgtggacaggacacccggcccagcttttaagatcctggagccaggccgcagggagcggctgggtctgaagatggccaacgaggccgctgccaagaaccgggccaagaagcaggaagccttgcggagagtgacggaaaatctggccagcctcacccccaaaggcctgagcccagccatgtcgccagccctacagcgccttgtgagcaggacggccagcaagtacacagaccgggccctgcgggccagctacacaccatccccagcacgctccacccacctcaagaccccggccagtgggctgcagacccccacaagcacaccggcgcctggctctgccacacgcacccctctcacacaggacccggcctccatcacggacaacctgctgcagctccctgcccggcgcaaagcttcggacttcttttaaagccaggcctgggctgggctcatagacgcttcacag

SEQ ID NO: 6181 - DNA, 472 bp, Homo sapiens
gcgtcctctgagaggtgaaggagcactgtgtggtcagagggctgcgagctctctgtttgggttccgaggaagacagaatgggctgaactggaactgacctaaatgtcagcaagaggagtcgtccagcatgctctgcccaccccacgccgaggtgcactgaccatgagcctcaactcctccctcagctgcaggaaggagctgagtaatctcactgaggaggagggtggcgaagggggcgtcatcatcacccagttcatcgccatcattgtcatcaccatttttgtctgcctgggaaacctggtcatcgtggtcaccttgtacaagaagtcctacctcctcaccctcagcaacaagttcgtcttcagcctgactctgtccaacttcctgctgtccgtgttggtgctgccttttgtggtgacgagctccatccgcagggaatggatctttggtgtagtgtggtgcaacttctctg

SEQ ID NO: 6182 - DNA, 462 bp, Homo sapiens
  misc_feature 376: n = A,T,C or G
gataggcataaacgtgtttattaagtgaaacgtatcctttaaaaataaaaaagggaagcctgtatataaatgaagttgtggattcaactagccagaatttattctgacttgcaccaaaccacacaaaatcttttaaaagtctagttagtgtagtctaaatggacactccagagtctgttcttgaattccattgcaagagctccaacttcctactttcagaagggatggggatcaagatgagggttgtcacataagctaattttcaatatatatcaagtcttgtggggtccaggaacaaatactgtcattggttagtgtttaagtacatgagttgacttttctcctctctcacaccccaccttgccctggcaattgngtagggggaggctgtttatcctccaagagaggacggctggttcctcatctcagtttccgttctaaaccacagagtggtcattgctg

SEQ ID NO: 6183 - DNA, 435 bp, Homo sapiens
ggagacctcagagtgtaaagaaaggtttactccttgtatcatcccctccccgtggactgcttcaattctattggggacaggccagtccctggaggctgcaaggagccacaaacctttcccagctcacactctgcacccctcagtctctgctgctaaagaatcagactcaggtagatggggtgtccacagtctgtcctcattacccagtcataccgggtagcatggcccgagagagcccttatctctccccaccttaaaaccctcagcatctcggcaagagtacacagcagcattgaccagtgagttggcctcggccaacagtaggaagtacttttctacagccaggacattgcaggactcacagcctaaaccatccaggagcagtaccacctggcctggtgtccagcagaccacgaacgcccccaggatgatgac

SEQ ID NO: 6184 - DNA, 522 bp, Homo sapiens
  misc_feature 343: n = A,T,C or G
tcggcacgaggaaagaaaacgtatcttataatttttttaatttttgagacgttcatttaatgaattgtgcacgaatgaattctatatatataaaatatacatatatagctctatatttggggaggggcactgtctcttttttctctcatttttaaaatgaagtgttgttgcctttgtatgtggttcaaccatccagctcccagctggctaaactttgcctccagtggtcaaagatgggaaaagagtggggttggcaggagatggaaaacggaggtgccgccccagcatggggggcaggtcccccagtccaccctgcccctccccctgtggagaagacgcttanttgggggtgtgggtttgggctccattctggattcggcggttccgggggaggggtgggtctgtgccgattactctgtcttgtacgtttgttctgctgctcttcaatattgtatcaacgccaggaaaggggggtgaaaagcctcttttaccccccaaataaattgtcacattccgaagctg

SEQ ID NO: 6185 - DNA, 440 bp, Homo sapiens
tcactagtaatctgcataccacagctcactggctttcaccagcctcaactgtgtggcggaccccatcctctactgcctggtcaacgagggcgcccgcagcgatgtggccaaggccctgcacaacctgctccgctttctggccagcgacaagccccaggagatggccaatgcctcgctcaccctggagaccccactcacctccaagaggaacagcacagccaaagccatgactggcagctgggcggccactccgccctcccagggggaccaggtgcagctgaagatgctgccgccagcacaatgaaccccgagtggcacagaatccccagttttcccctctcatcccacagtcccttctctcctggtctggtgtatgcaaattgtatggaaaaagggctgtgttaatattcataagaatacaagaacttaggaagagtgag

SEQ ID NO: 6186 - DNA, 420 bp, Homo sapiens
gcccaacagacattttgctgctgctacaaagtctgcaaagaaaacaaaaaaagtgctaaagaaaaaacaccagatgagaaaaaagatgaaatagaaaaaataaaagcatatccctatatggaaggcgaacctgaggatgatgtctatttaaaacgcttatacccgagacagatatatgaggtggagaaagctgttcacttacttaagaaatttcaaattcttgactttactagtccaaagcaaagtgtttatcttgatttgacactggatatggcactgggaaagaagaaaaacgtggagccatttaccagtgttcttagtttgccatacccatttgcttccgaaatcaataaagttgctgtatttacagagaatgcatcagaggtcaaaatagcggaagaaaatggagctgcatttgca

SEQ ID NO: 6187 - DNA, 430 bp, Homo sapiens
ttcggcacgaggactttttttttttttttttttcccaccccacctttttttgttccacaaccctgtgccacccctaagggaattttttgccaaagggggggtaaaaaacctaagggccccttgggggaaaggccaaacaaagaaggttggaaccaccgggctcttttccaaataatccttaaaagggagccctcctaaccccccctccaggaaggggggggggcaaggggaatttcaggaatatgggctttaaaaatccagggggaaaccaaaaacccaaaagaattgggttggttccaatccccaaaatttaccataaaaatcccggcttttaactttcttataaaacaaatttgattcaaaaccctgtttgttaaccaggggaaggtttttgttttttgtaaaaccccagggggccccttttttaacc

SEQ ID NO: 6188 - DNA, 191 bp, Homo sapiens
tggtacgcctgcaggtaccggtccggaattcccgggtcgacatcatcatcatgatcgctcgacatcgatacgactttttttttttttttttttttttttggggggggggaaaagggggccccaaaaattttggattttcagggggggggtcaaatttaaaaaccccccttttggggttttttccaaaccct

SEQ ID NO: 6189 - DNA, 456 bp, Homo sapiens
  misc_feature 177, 400, 413, 434, 448, 456: n = A,T,C or G
aattggaaaaccttacaacccaagaaactcgagagatcttacatttccactataccacatggcctgactttggagtccctgaatcaccagcctcattcttgaactttcttttcaaagtccgagagtcagggtcactcagcccggagcacgggccgttgtggtgcactgcagtcaggncattcggcaggtctggaaccttctgtctggctgatacctgcctcttgctgatggacaagaggaaagacccttcttccgttgatatcaagaaagtgctgttaggaaatgagggaagtttcgggatggggggctgatccagacagccgaccagctgcgttttttccttacctggggctgttgatccgaaggtggccaaatttcattcatggggggggattttttnccttggcaggatncagttgggagggagttttttncccacggagggacnggggaggn

SEQ ID NO: 6190 - DNA, 473 bp, Homo sapiens
gacagagggggttttctaccggctccccatcatcgtactagggaggaagaagcgggtgagaaacaaaacttctttccattgtcctgcccgtttctgcggacttgttctgaggccgaggagcctgtgttggaagagatggtgatgggcctgggcgttttgttgttggtcttcgtgctgggtctgggtctgaccccaccgaccctggctcaggataactccaggtacacacacttcctgacccagcactatgatgccaaaccacagggccgggatgacagatactgtgaaagcatcatgaggagacggggcctgacctcaccctgcaaagacatcaacacatttattcatggcaacaagcgcagcatcaaggccatctgtgaaaacaagaatggaaaccctcacagagaaaacctaagaataagcaagtcttctttccaggtcaccacttgcaagctacatggaggttccccctg

SEQ ID NO: 6191 - DNA, 534 bp, Homo sapiens
gacagagggggcagttacaggatcctggggagcagagtgtctggatggaacctgagctgggtctctgactcacttctgactttagttttttcaagggggaacatggcaaaggtgttcagtttcatccttgttaccaccgctctgataatgggcagggaaatttcggcgctcgaggactgtgcccaggagcagatgcggctcagagcccaggtgcgcctgcttgagacccgggtcaaacagcaacaggtcaagatcaagcagcttttgcaggagaatgaagtccagttccttgataaaggagatgagaatactgtcgttgatcttggaagcaagaggcagtatgcagattgttcagagattttcaatgatgggtatgagctcagtggattttacaaaatcaaacctctccagagcccagcagaattttctgtttattgtgacatgtccgatggaggaggatggactgtaattcagagacgatctgatggcagtgaaaactttaacagaggatggaaagactatgaaaatggcttt

SEQ ID NO: 6192 - DNA, 505 bp, Homo sapiens; identical to SEQ ID NO: 1649

SEQ ID NO: 6193 - DNA, 558 bp, Homo sapiens
cacctgtccccgcagcgccggctcgcgccctcctgccgcagccaccgagccgccgtctagcgccccgacctcgccaccatgagagccctgctggcgcgcctgcttctctgcgtcctggtcgtgagcgactccaaaggcagcaatgaacttcatcaagttccatcgaactgtgactgtctaaatggaggaacatgtgtgtccaacaagtacttctccaacattcactggtgcaactgcccaaagaaattcggagggcagcactgtgaaatagataagtcaaaaacctgctatgaggggaatggtcacttttaccgaggaaaggccagcactgacaccatgggccggccctgcctgccctggaactctgccactgtccttcagcaaacgtaccatgcccacagatctgatgctcttcagctgggcctggggaaacataattactgcaggaacccagacaaccggaggcgaccctggtgctatgtgcaggtgggcctaaagccgcttgtccaagagtgcatggtgcatgactgcgcagatggaaaaaagccctcctctcct

SEQ ID NO: 6194 - DNA, 491 bp, Homo sapiens
gacagaggggactgggatcagccactgcagctccctgagcactctctacagagacgcggaccccagacatgaggaggctcctcctggtcaccagcctggtggttgtgctgctgtgggaggcaggtgcagtcccagcacccaaggtccctatcaagatgcaagtcaaacactggccctcagagcaggacccagagaacagggcctggggcgcccgtgtggtggagcctccggagaaggacgaccagctggtggtgctgttccctgtccagaagccgaaactcttgaccaccgaggagaagccacgaggtcagggcaggggccccatccttccaggcaccaagggctggatggagaccgaggacaccctgggccgtgtcctgagtcccgagcccgaccatgacagcctgtaccaccctccgcctgaggaggaccagggcgaggagaggccccggttgtgggtgatgccaaatcaccaggtgctcctgggaccg

SEQ ID NO: 6195 - DNA, 152 bp, Homo sapiens
agaatgtatttggtgtctgccatatctttgcatccttcaatgacacttttgtccatgtcactgatctttctggcaaacaaaccatctgccgtgtgactggtgggatgaacgtaaaggcaaaccgagatgaatcctcaccatatgctgctatg

SEQ ID NO: 6196 - DNA, 543 bp, Homo sapiens; identical to SEQ ID NO: 1652

SEQ ID NO: 6197 - DNA, 564 bp, Homo sapiens
caaaaccaatgaacctgtgtgggaggaaaacttcactttcttcattcacaatcccaagcgccaggaccttgaagttgaggtcagagacgagcagcaccagtgttccctggggaacctgaaggtccccctcagccagctgctcaccagtgaggacatgactgtgagccagcgcttccagctcagtaactcgggtccaaacagcaccatcaagatgaagattgccctgcgggtgctccatctcgaaaagcgagaaaggcctccagaccaccaacactcagctcaagtcaaacgtccctctgtgtccaaagaggggaggaaaacatccatcaaatctcatatgtctgggtctccaggccctggtggcagcaacacagctccatccacaccagtcattgggggcagtgataagcctggtatggaagaaaaggcccagccccctgaggccggccctcaggggctgcacgacctgggcagaagctcctccagcctcctggcctccccaggccacatctcagtcaaggagccgacccccagcatcgcctcggacatctcgctgcccatcgc

SEQ ID NO: 6198 - DNA, 520 bp, Homo sapiens; identical to SEQ ID NO: 1653

SEQ ID NO: 6199 - DNA, 575 bp, Homo sapiens
  misc_feature 313: n = A,T,C or G
tcggcacgagggcgagatggtggcggtgaaagccctcaagcagactgcggcccccagcaccgctcgggctggaagcaggagattgacattctgcgcacgctctaccacgagcacatcatcaagtacaagggctgctgcgaggaccaaggcgagaagtcgctgcagctggtcatggagtacgtgcccctgggcagcctccgagactacctgccccggcacagcatcgggctggcccagctgctgctcttcgcccagcagatctgcgagggcatggcctatctgcacgcgcagcactacatccaccgagacctanccgcgcgcaacgtgctgctggacaacgacaggctggtcaagatcggggactttggcctatccaaggccgtgcccgaaggccacgagtactaccgcgtgcgcgaggatggggacagccccgtgttctggtatgccccatagtgcctgaaggagtataagttctactatgcgtcagatgtctggtccttcggggtgaccctgtatgagctgctgacgcactgtgactccagccagagcccccccacgaaattccttgagctcat

SEQ ID NO: 6200 - DNA, 662 bp, Homo sapiens
gctctgctgctcctggggttcctgctggtgagcttggagtcaacactttcgattccaccttgggaagcccccaggagcataagtacaaagctgaagagcacacagtcgttctcactgtcaccggggagccctgccacttccccttccattaccaccggcagctgtaccacaaatgtacccacaagggccggccaggccctcaaccctggtgtgctaccacccccaactttgatcaggaccagcgatggggatactgtttggagcccaagaaagtgaaagaccactgcagcaaacacagcccctgccataaaggaaggacctgtgtgaacatgccaagcggcccccactgtctctgtccacaacacctcactggaaaccactgccataaagagaagtgctttgagcctcagcttctccggtttttccacaagaatgagatatggcatagaactgagcaagcatctgtggccagatgccagtgcaagggtcctgatgcccactgccagcggctggccagccaagcctgccgcaccaacccgtgcctccatgggggtcgctgcctaaaggtggatggccaccgcctgtgccactgcccggtgggctacaccggacccttctgcgacgtggacaccaaggcaagctgctatgatggccgcgggctc

SEQ ID NO: 6201 - DNA, 317 bp, Homo sapiens
tggatcccccgggctgcaggtcgagtttttttttttttttttggaatttttaacaaatcggtttaatgaagttcttattctggaaaaataatatcccactggggcacccttgttttttggtttggtccataatataaagaaccccattaccctttcctttaaaacaggcctttggatgttagtttttatcccaaaaaaaaaaccccaaacccaaaaaccaacccaccattccttaaaaatgtaggggaaaaaattaaggaaatccatttctttaggtaaaaaaattgggggttcaaaatccaaaaaatttaaaaacc

SEQ ID NO: 6202 - DNA, 579 bp, Homo sapiens; identical to SEQ ID NO: 1656

SEQ ID NO: 6203 - DNA, 106 bp, Homo sapiens
tccctttctgctgttcaccaccacccatgatccatctgtgtagtttctgaacagtcagcgattccaggttttaaatagtttgtaaattttcagtttctacacactt

SEQ ID NO: 6204 - DNA, 151 bp, Homo sapiens
tggatcccccgggctgcaggaattcggcacgaggttttgaagattatgccagtgcagaagcagacccgtgccggccagcgcaccaggttcaaggcatttgttgctatcggggactacaatggccacgtcggtctgggtgttaagtgctcca

SEQ ID NO: 6205 - DNA, 427 bp, Homo sapiens
ttaaaatattcatgccttttcctcatgacatgatatacaaatatcatgaagttaaagatagacaaattttactaactaaacaaactcatttttagcaaacaattgataaataccattaaaagacaaataacaaattagaagaaaatatttacatggtatatataacaaaaaattgatattcagaatgtatagagattatcaaataataaagaacttgcaaatcccagtgggaaaatgagcaaagaatacaaagaggaattgcacagaagaaaaagtatgcattatgtattaacaaatgaaaagttgcttcatctgtgtaatggccaaaatgtatgttaaaatataggacagcatttctccaatctcattggtaaactaaaaaatacatatgcacttcataaattcatatgtcacttcagcattttta

SEQ ID NO: 6206 - DNA, 562 bp, Homo sapiens
attgatgtgggacagcagccacaatgaggaactcctatagatttctggcatcctctctctcagttgtcgtttctctcctgctaattcctgaagatgtctgtgaaaaaattattggaggaaatgaagtaactcctcaatcaagaccctacatggtcctacttagtcttgacagaaaaaccatctgtgctggggctttgattgcaaaagactgggtgttgactgcagctcactgtaacttgaacaaaaggtcccaggtcattcttggggctcactcaataaccagggaagagccaacaaaacagataatgcttgttaagaaagagtttccctatccatgctatgacccagccacacgcgaaggtgaccttaaacttttacagctgacggaaaaagcaaaaattaacaaatatgtgactatccttcatctacctaaaaagggggatgatgtgaaaccaggaaccatgtgccaagttgcagggtggggcaggactcacaatagtgcatcttggtccgatactctgagagaagtcaatatcaccatcatagacagaaaagtctgcaa

SEQ ID NO: 6207 - DNA, 586 bp, Homo sapiens
  misc_feature 310, 360, 405: n = A,T,C or G
acaacgaggaacaggcttcggctcaggcacccgggccctggagcaagccctggagaagacgaaagccaacatcaagtgggtgaaggagaacaaggaggtggtgctccagtggttcacagaaaacagcaaatagtccccagcccttgaagtcacccggccccgatgcaaggtgcccacatgtgtccatcccagcggctggtgcagggcctccattcctggagcccgaggcaccagtgtcctcccctcaaggacaaagtctccagcccacgttctctctgcctgtgagccagtctagttcctgatgacccangctgcctgagcacctcccagcccctgcccctcatgccaaccccgccctangcctggcatggcacctgtcgcccagtgccctggggctgatctcanggaagcccagctccagggccagatgagcagaagctctcgatggacaatgaacggccttgctgggggccgccctgtaccctctttcacctttccctaaagaccctaaatctgaggaatcaacagggcagcagatctgtatatttttttctaagagaaaatgtaaataaaggatttctagatg

SEQ ID NO: 6208 - DNA, 367 bp, Homo sapiens
ccgaactcagcggaagactgtcctttccccgaaccctttcgctctaaggtactgaaggacctgccaagggtggaggggcggcctggagcctccctccctcccctggatctgcaggcactggacaaagagctggtacaccggcatggggaggaggtgacgccggaagatgtgctctcagcagctatgtaccccgatgtgtttgcccacttcaaggacttcactgccacctttggccccctggatagcctgaatactcgcctcttcctgcagggacccaagatcgcagaggactttgaggtggagctggagcggggcaagacgctgcacatcaaatccctggccgtgagcgacctgaaccgggccggcc

SEQ ID NO: 6209 - DNA, 503 bp, Homo sapiens
  misc_feature 248: n = A,T,C or G
cggcagcagcagtacaagtttctgccttcagagcttcgagatgagcactaaagaagcctcttctatttaatgcagacccggcccagagactgtgcgtgccactaccaaagccttctgggctgtcggggcccaacctgcccaaccccagcactccccaaagtgcctgccaaaccccagggcctggccccgcccagtcccgcagtacatcccctgtcccctccccaaccccaagtgccttcatgccctanggccccccaagtgcctgcccctccccagagtattaacgctccaagagtattattaacgctgctgtacctcgatctgaatctgccggggccccagcccactccaccctgccagcagcttccagccagtccccacagcctcatcagctctcttcaccgttttttgatactatcttcccccacccccagctacccataggggctgcagagttataagccccaaacaggtcatgctccaataaaaatgattctacctac

SEQ ID NO: 6210 - DNA, 653 bp, Homo sapiens
  misc_feature 541: n = A,T,C or G
tcggcacgagcttaaagaaaagcaaatgcagtcccagtcctctgaatgggtcagccccttagatggaggaggtgggacgtttgggcttgggggctcggcaaggcaagcaagacacaccagagctcttccctcgatgccagccattcatcgacagtcagcatgtcatccacaagtatttcctgccccgagcctatgctgtcgccatcccactggctgcaggcctcctgctgctcctgtttgtgggactgttcatctcctacgtgatgctgaagagcaagagagtgaccaagaaggctcagtgaaggtcccgcagggatgaggctgccagccccttctctgcttcccctccagcacagggaccaagtgggggagcctgcagaacctgtccaggcacagtggctcctcaagcctgcctgtcctgcagagtccccatggcatggagcttacacctgactgactggagccccctccccgactcccacttccagaagctaggagggagggatacctggaagactccggtcacctccttcttgctcanggcctaaaagatgctggtcctcccaacctcactctcaaactccctgccaccttttcccctgggttctgccgtcttgcctcacttcccctcctgtcacatgctgacgttggac

SEQ ID NO: 6211 - DNA, 452 bp, Homo sapiens
tcggcacgaggggcacagccggggcccggccccaacatgggcaagggtggtagaacagatgcacgagaaatccatcccctacagccaggagacccttgtggttgactagggctgggagcagagagaagcctggcgccctcggccctccccggcctttgcccttgctttctgaaaatcaagtagtgtggctactccttgtcctatgcacatcctttaactgtcccctgattctgccccgccctgtcctcctctactgctttattctttctcagaggtttgtgggttaggggaaagagactgggctctacagacctgaccctgcacaagccatttaatctcactcagcctcagtttctcccctgtctactttcttgatctgaagggctactaagggttaaggatcccaaagcttgcagagactgaccctgtttaagctttctatcctgttttct

SEQ ID NO: 6212 - DNA, 621 bp, Homo sapiens
ctttcctccttcccgcctgcctgtagcggcgttgttgccactccgccaccatgttcgaggcgcgcctggtccagggctccatcctcaagaaggtgttggaggcactcaaggacctcatcaacgaggcctgctgggatattagctccagcggtgtaaacctgcagagcatggactcgtcccacgtctctttggtgcagctcaccctgcggtctgagggcttcgacacctaccgctgcgaccgcaacctggccatgggcgtgaacctcaccagtatgtccaaaatactaaaatgcgccggcaatgaagatatcattacactaagggccgaagataacgcggataccttggcgctagtatttgaagcaccaaaccaggagaaagtttcagactatgaaatgaagttgatggatttagatgttgaacaacttggaattccagaacaggagtacagctgtgtagtaaagatgccttctggtgaatttgcacgtatatgccgagatctcagccatattggagatgctgttgtaatttcctgtgcaaaagacggagtgaaattttctgcaagtggagaacttggaaatggaaacattaaattgtcacagacaagtaatgtcgataaag

SEQ ID NO: 6213 - DNA, 499 bp, Homo sapiens
tcggcacgaggtttaaatgggccatcattttatgaatcagtcattagagaggtttgataatcttctttaatgttaaagtagttcaggctaatcttaatacatgtatttttattgctgaccagtcttgaatatatactggtttgatgattgatttgcccctctaaaaaaatttgaaacatatgacattggctgttttagataatactttgtgtcattaatcatttttgtccaattttacaaaatatatgtcaatcttgaacatatattactttataatatatgttactttataatatatgttcaggtgaactcttaacatatttttttcagtgaactctgttctcttgtgggttacagtttactttcattaaaaatggaataggatttcttatatatataaaatataaaaaatatgtggcaccaccattccctatttatattttagttgtgatttaaaaatgagatttgactaaaacatttatcatacatgatcatccat

SEQ ID NO: 6214 - DNA, 549 bp, Homo sapiens
  misc_feature 46, 53, 404, 445, 476: n = A,T,C or G
gagaaaacagggaactttagtataaataagaggtcctgcgggacanggaggancctgaggggcttccataatttaacactcttcaaaagcacagacaatagcaagggcagctggggtgggggccgggcgagggctggaccacccccggccctgcccactcaactgaggggcacactgcagacctggggctcttgtggcaggggcggggagtctctccccaggagtgaccagtcacatgctggggacagggatgagggtaacactgatgtttcagaggaagaggtcattgtacttggcagtgggtgggggacaaggctgaggccacaagggctattacatcgcccgtgtccgggcccagtctggggggccccaaattttgtgcaggtggggggacttgaacagtncatccatcatggttagtcctgttaatacgttgatctgtgangtcagcaaggaaggttatggctaagaagctnggggcattgggtttggggggcccatatccatggcttcaaacactgtgcactcggggaatttcctgtttggaag

SEQ ID NO: 6215 - DNA, 631 bp, Homo sapiens
tcggcacgaggactaaactgtctcgaagactagacaggaaggaaaaccttgaattactctcacataattccactccagatatctcaacagaaatgcatacaaaaagctcctattactccctcaaaaggcatctgagaccgagaatacttacaaatgtgtgcagcgtgtgataatgtggtacactgaagaacaaaagggcaaaagaaaaatgaggctttaacaggcacaatatctaggtcatttatccttggttaatgggtagaaaaacacaatgcggtagtgttagcaagggacacaaaggcactctggtgtcctgcagaccagcgctcgatgccagaaaccagtgtgtggaaaaacccatgtggaattgaaacagacccacttaagcacgcacgcgcgcacgcacggtctcaggagctactgatttgtggacccctttttgacctttggtatttaaagtaaaatataatttgagatctactgttttcacctttttatgtcacctgaaccaacacaaagccatatttccatccagttaaaaagcaggggaagggatgtggacgaaagtgtttcgtgtgtgttgccttcctccacacccttcccccaggacgtccgcacacagtccacctcc

SEQ ID NO: 6216 - DNA, 568 bp, Homo sapiens
tcggcacgaggtctgtgccagctgggcagggctgctcctctacctgtggaccctggtagccccactcctcctgcgcaaccgcgacttcagctgaggcagcctcacagcctgccatctggtgcctcctgccacctggtgcctctcggctcggtgacagccaacctgccccctccccacaccaatcagccaggctgagcccccacccctgccccagctccaggacctgcccctgagccgggccttctagtcgtagtgccttcagggtccgaggagcatcaggctcctgcagagccccatccccccgccacacccacacggtggagctgcctcttccttcccctcctccctgttgcccatactcagcatctcggatgaaagggctcccttgtcctcaggctccacgggagcggggctgctggagagagcggggaactcccaccacagtggggcatccggcactgaagccctggtgttcctggtcacgtcccccaggggaccctgcccccttcctggacttcgtgccttactgagtctctaagactttttctaataaacaagccagtgcgtg

SEQ ID NO: 6217 - DNA, 573 bp, Homo sapiens
  misc_feature 348: n = A,T,C or G
tcggcacgaggcgcctagtgacccagcactgcctgctcctccaccagccactgctgtacacctaaaactggtgcagccctttgtacgcagaagcagtgcccgcagcctgcaacacctgtgccgccttgtcatcaaccgtctggtggccgacgtggactgcctgccactgccccggcgcatggccgactacctccgacagtaccccttccagctctgactgtacggggcaatctgcccaccctcacccagtcgcaccctggaggggacatcagccccagctggacttgggcccccactgtccctcctccaggcatcctggtgcctgcatacctctggcagctggcccangaagagccagcaagagcaaggcatgggagaggggaggtgtcacacaacttggaggtaaatgcccccaggccgcatgtggcttcattatactgagccatgtgtcagaagatggggagacaggcaggaccttgtctcacctgtgggctgggcccagacctccactcgcttgcctgccctggccacctgaactgtatgggcactctcagccctggtttttcaatcccc

SEQ ID NO: 6218 - DNA, 464 bp, Homo sapiens
  misc_feature 15, 78, 464: n = A,T,C or G
ctggcgtgcggggcncgccagcaggccccgactattcgtgggcatgatcctgattctcatcttcgccgaggtgctcgnctctacggtctcatcgtcgccctcatcctctccacaaagtagaccctctccgagcccaccagccacagaatattatgtaaagaccacccctcctcattccagaacgaacagcctgacacatacgcacggggccgccgccccagttagttggtcttgtacatgcgcagtgtcctagtgcccatcgtctgtttccccggccttgcccccgcccgccccgtgccgtgggacatctgggcccactcatcgcccctccagggcccccggcgccccacccccttaggagtggtctgtgtatgcgggatggatttagaattgttcattttctctttaatgggatgtttatttattaaagatctgggctgtttcctgcgtctgggagggcccgn

SEQ ID NO: 6219 - DNA, 479 bp, Homo sapiens
agccgagccagccaagctctactccaggaagtgaaaatgtgctgcctcgagagccgctgattgccacggcagtgaagtttctacagaattcccgggtccgccagagcccacttgcaaccaggagagcattcctaaagaagaaagggctgacagatgaagagattgatatggccttccagcagtcgggcactgctgccgatgagccttcgtccttgggcccagccacacaggtggttcctgtccagccccctcacctcatatctcagccatacagtcccgcaggctcccgatggcgagattacggcgccctggccatcatcatggcaggcattgcatttggctttcaccagctctacaagaaatacctgctccccctctcccggacagacgccttgcccagggtgtgtttgctgagtgtcttgactaccgtgacaccacgcatggccagagctagcgtccctactgcctcccgactcctc

SEQ ID NO: 6220 - DNA, 505 bp, Homo sapiens
  misc_feature 392: n = A,T,C or G
ctgtgtcatgttcttcgggcccgtggtccccgacggctacggtgtctgctataaccccatggaggcccacatcaacttctccctgtcggcctacaacagctgcgcggagaccaacgccgcccgcctggcgcattacctggagaaggcgctcctggacatgcgtgccctgctgcagagccacccccgggccaagctctgagcccctaggactcaggcctgccaatgccacagccaagcccaccctgggatgggccacccaccagggctcagctccttggttccctcttccttggttccctcttccctggtccccccaaatctactgagccacggaccgcatcctccagggggcctgcaggccccagccaagtgccttccgtgggtcatcccancacctgccagggcccgacctggggctgagtgcagaggctgagcaggacgttaggcccgggcccctggcacgtcctccaccggtgcctcctctggggaagggaaccagccctcc

SEQ ID NO: 6221 - DNA, 498 bp, Homo sapiens
tcggcacgaggttttttttttttttttttgccgggcccaatttttaattggggggggggcttaaccccccccccccgtaacacaatttggggttaaaaatttgggaaaaaggggaaatttaaacctttggacgggcccccaaaaattggggaatcccccccccaaaaaagtttgccccccctttggggcccccccccaccccttaatttggaatttccggaaacccgaacccccgggcccccatttggaaaccccccaaaacaacccctccaattggaaaaaaccccacaaggcccccaagggggcccttgcccgtttaatttcccaagggttggacttccaaagggagggagaattggcccccaagggagggtttttggcctttttttcccggtactggcgaaaccctttccccccaaagggggccccccccttggccccccccctattggccccggggttggggggcccgggcccgggggccaaggaaactttttt

SEQ ID NO: 6222 - DNA, 551 bp, Homo sapiens; identical to SEQ ID NO: 1665

SEQ ID NO: 6223 - DNA, 185 bp, Homo sapiens
atgttgggatgggaaactggagtatccaacttgtgcaaaaagatataatcaatcataaaatgcacacctttattcataactttagtattaaatcagttcttaatttcatttttaagcattgctttactcctttctattcatacgtaaaattttggattaattagcgaaaatgtaattataagctg

SEQ ID NO: 6224 - DNA, 577 bp, Homo sapiens
  misc_feature 306: n = A,T,C or G
cggaacgaggaggacactgccacaggacgccttccctcccctcccctccagcccacccctgcacagcccctcctccttcccgcttttccccttctccctcctgctccaggcccaaggcgtgttggttttgccttctggtgcccatagtcccctggactgagtcccccaggccttccttcacccgacttccaaactcttccttgtggtatcagtttccttctcggaaatgagaaagctggaatcctggtccccagcaggagagcctagtcctcccccagcccctccagccaccagggtgtcctctangatgcagctgccagatccactcactctgctgcctccagcaggacccaaggccactttcaactcttatggggttctccacctgccccagagcttctcaagggagggtaagggggcaccctgagcccacaggacccctacttcacagctcacaggggcaggaggcagctcccctgcctccaggaccctgttgctatggtgacacagcgtttctaggacagaagggcctcccagtctccccccaccacccgtgcacgacttcctcaccaccccc

SEQ ID NO: 6225 - DNA, 510 bp, Homo sapiens
cggcacgaggctgaattgaaacgggcaggaaatagtctggcagcctctacagcagaagaaacggcaggcagtgcccatggtcgtgcccaggaggctgagcagctgctacgcggtcctctgggtgatcagtaccatacggtgaaggccctagctgagcgcaaggcccaaggtgtgctggctgcacaggcaagggcagaacaactgcgggatgaggctcgggacctgttgcaagccgctcaggacaagctgcagcggctacaggaattggaaggcacctatgaggaaaatgagcgggcactggagagtaaggcaacccatttggacgggttggaggccaggatgcgcagcgtgcttcaagccatcaacttgcaggtgcagatctacaacacctgccagtgacccctgcccaaggcctaccccagttcctaacactgccccacatgcatgtctgcctatgcactgaagagctcttggcccggcagggcccccaataaaccagtgtgaaccccc

SEQ ID NO: 6226 - DNA, 522 bp, Homo sapiens
gcgctcaacagattgtccatggaaatgcagaaattaatttcttatgtctttcagtcccttctttccactgaaaatcctatggatgaaacaaaattaggtaaaaggagaaaaggtttgctcttgacccattccaccgcgtcctcctccccgcccacctctgctcatgcctccacgatcaaatccccctcttcccctgccccggttatcagggccactcatgctccggttctctcctggtccggaaaatcctccagactcctgcccataaacacccatgctactggggtggtcctgtcggaatgaacctgaggaaagagtcacatctgtaagccatggaccagcatttacaccactgcctgatgtactttctcctggaatcacaaaatcctcaattccaaggcactaaccaaggcaccatcttctttacatcacgataaagcatccttaataggtaggctcttttaagttcaacaaaactgctggatcatcacagctgaaataaccttatatagttagcctata

SEQ ID NO: 6227 - DNA, 55 bp, Homo sapiens
aaaagcgaaagaataaaaaccggcacatcccgactggcatgtttgattatgactt

SEQ ID NO: 6228 - DNA, 137 bp, Homo sapiens
aaaaggggggaaagaaaaccatttttggggttttgcctttttccccaattttaaaaaaaagggacccaatttaaataaaggccaaggatcctcctcctggccctttaaggggctggaaaatttttatataacttttt

SEQ ID NO: 6229 - DNA, 507 bp, Homo sapiens
tcggcacgaggtgctaccaatcacatgcctatcatatagtaaaacccagcccatgacccctaacaggggccctctcacccctcctaatgacctccggcctagccatgtgatttcacttccactccataacgctcctcatactaggcctactaaccaacacactaaccatataccaatgatggcgcgatgtaacacgtacaaattacataccaaggccaccacacaccacctgtccaaaaaggccttcgatacgggataatcctatttattacctcacaagttattttcttcgcacgatttttctgatccttttaccactccagcctagcccctaccccccaactaggaaggcactggcccccaacaggcatcaccccgctaaatcccctagaagtcccactcctaaacacatccgtattactcgcatcacgagtatcaatcacctgagctcaccatagtctaatagaaaacaaccgaaaccaaataattcaagcactgcttattaca

SEQ ID NO: 6230 - DNA, 540 bp, Homo sapiens
gtcagatgaatgacttttaatccagccccacaccccaaggtggcagaggagtgatgctggagcccggggcaaaatgctggggcccgggacacggctgaaagttccgtcgtgctgcttatttttgggctcctaggtgttgcgcacaaccagcgactgctccagctcctgcctgcgctgctggatcttgcagtagaagtagcgactgacggcctcctgggaccagggctggtggtagaactcagcccggcgctcctcttcagggttgccggctacatctgtcatcaccttgaggtcccggctctgggagcggacgaggtcttggacatagcctttggggtctctggagaagcttagcatgaagtccctctggatcttgagctggtttatggactcaatcgtctcatggatcttactgtccagagcactgatctcctgctggttggccgtggataggaggaagctgctcatctgcccctttaatggctcctccacctccacgtcaatgtcatagcacgccgtcttcttctggtctgaagggtc

SEQ ID NO: 6231 - DNA, 372 bp, Homo sapiens; identical to SEQ ID NO: 1668

SEQ ID NO: 6232 - DNA, 295 bp, Homo sapiens
acctaaagctggttatgctggcgaacacccctacccttatattgcgggtccccacatgcacacagaactctgacacatgatcagctgcacttaagaaatcatcccatctaacttcattattcctcatggggtggggagatgctgaaaggggtattgtatatcccactgcactgatagggctcactcaactggatttgagttctggaacacacattatccccacccctcccccaacgtgggctgaccattcttagtcctttctgaagtgggaccttctactttctgtgaacaccca

SEQ ID NO: 6233 - DNA, 465 bp, Homo sapiens; identical to SEQ ID NO: 1669

SEQ ID NO: 6234 - DNA, 309 bp, Homo sapiens
tcggcacgaggttttttttttttttggggccccaaattttttttttggaaggaatgggtccaaataaaaaaacttaaggggatgtttgggcccaccttataaaaagggaaaggaaacccccaacttgcttgccctgctttgggaaccaggaaatcccccccacggttttgggaaaattaccccaaggttaacttttatttatcactgtctcccagggggggcttgcaaaaaaaattttcccccaacccaaattggggccctccctttttgcccaagtgggccacggggccccccatttttttgagggtt

SEQ ID NO: 6235 - DNA, 102 bp, Homo sapiens
tcggcacgaggggcacgaggattgtacctgtggcacatcaatccgcactgtttgtactctggctgaatctcatctttaaccaacattgacaaaggacctttt

SEQ ID NO: 6236 - DNA, 549 bp, Homo sapiens
cggcacgagggcgtccccacgctggaagggatcatccagcagctcgtcaacggcatcatcacgcccgccaccatccccagcctgggcccctggggagtcctgcactcaaaccctatggactacgcctggggggccaacggcctggatgccatcatcacacagctcctcaatcagtttgaaaacacaggccccccaccggcagataaagagaaaatccaggccctccccaccgtccccgtcactgaggagcacgtaggctccgggctcgagtgccctgtgtgcaaggacgactacgcgctgggtgagcgtgtgcggcagctgccctgcaaccacctgttccacgacggctgcatcgtgccctggctggagcagcacgacagctgccccgtctgccgaaaaagcctcacgggacagaacacggccacgaacccccctggcctcactggggtgagcttctcctcctcgtcgtcatcgtcgtcctccagctcgcccagcaacgagaacgccacaagcaactcgtgagcccacgtcggccgtcgggaaagcacg

SEQ ID NO: 6237 - DNA, 479 bp, Homo sapiens
cggcacgaggcggctcgaggccatggcaatgccttcttaaccaaaagtccttccccctttacaccacctcctcctcaaaaccttctcctcacggcacaagaaggcatctgccatcaccaccattgacacaagaagtggaccttaattccattggtgggccgcctgttcctccacgacaaaacacttctcaacatatgcctaaactccctgcgaaaacttacaaaatggagcacacacacccatccatgcacagagatggaccaccactgatggacaatgcccatacttgctgagttcctctgtactgggatgtatattaatcctagccccaaatccattgctagcaatggatgcactgaatgtgccagcactgaggagttaaaatgagaactccaaacactaacgactcttcttcaagatgcaacctaagacagtgaattgtaacctacatggaattatacaatggaaatggtattcca

SEQ ID NO: 6238 - DNA, 571 bp, Homo sapiens
tcggcacgaggcaggcagcacgtattagtaataaagggaaattttctacagataccaaagggaaaaccaacttctcggacacaggtgtataagccacccgcacttaaaaagtcaaattctcctggaactgcatcatcaggatcttcacgattaccgcagccaagtggcgctggcaaaactgttgtaggtgttccttcaggtaaagtgtcttcaagtagcagctctttgggaaacaaacttcagaccttgtctccctctcataaagggatagcagcccctcatgcaggagctaatgtcaaaccccgaaattccacaccacctagtttggcaagaaatcctgccccaggtgtgcttacaaacaaaagaaaaacatatactgagagctacatagccaggccagatggggactgtgcatcttcccttaatggtggaaatattaaaggcattgaaggacattcacctggaaacttaccaaaattctgccatgagtgtgggactaaataccctgtagaatgggccaaattttgctgtgaatgtggcattcgaagaatgattctatgaatagaatctc

SEQ ID NO: 6239 - DNA, 606 bp, Homo sapiens
ttcggcacgaggcgcagccttgccgccacctttattgggcactcagccctgaggctctacacacacgcgccgggggatgggaggggatggggtgtcactcggggcagggaccctctggcgggaggacgggtggctggtgataagagcatggccccagggcccggcgccttggcccccggaacgctctgtgaccctcgcagctgacctggcctaagggcgtgcagagtcgtgacctggaccacccgtgggtgaactggctccccaagttctgggctcacttgggggcattgaagggcacggcccgctggttcatggggttgtcaggagagcggagccactccttcttgagcagctgtttcagctgcgacagccgcatgttggggttctcttgtttgagccgcggcagctgggcttcctcaaaggctgtgaaggctgcccgcatgcgtctttctgggtgccggtcggccgcctcctccgccacgctgagcactgcaatggcgtcctcgatggtgcgcgcctccacgctgccctcctccagcacgcggcggttcacgttctcctccagcggcacctccagatggctcttggctttctcggctgtgtccg

SEQ ID NO: 6240 - DNA, 497 bp, Homo sapiens
gtatgaagctttgaggaagcaacagtcaaagaagggaacttcccgggaagatcagacccttgcactgctgaaccagtttaaatctaaactcactcaagcaattgctgaaacgcctgaaaatgacattcctgaaacagaagtagaagatgatgaaagatggatgtcacatgtacttcagtttgacgataaaagcagaaaagtgaaagatgcaagcatgcaagactcagatacatttgaaatctatgatcctcggaatccattgaataaaagaaggagggaagaaagcaaaaagctgatgagagagaaaaatgaaagaagatagtgtgagaataatgataaccagaacttgctggaaatgtgcctacaatggccttgtaacagccattgttcccaacagcatcacttaagggtgtgaaaagaagtatttttgaacctgttgtctggttttgaaaaacaattatcttgttttgcaaattgtggaatgatgtaagcaaatg

SEQ ID NO: 6241 - DNA, 592 bp, Homo sapiens
  misc_feature 532: n = A,T,C or G
tcggcacgaggctggtgaggtccaggagggagacccccgctactggcccccgagctgctgcagggctcctatgggacagcagcggatgtgttcagtctgggcctcaccatcctggaagtggcatgcaacatggagctgccccacggtggggagggctggcagcagctgcgccagggctacctgccccctgagttcactgccggtctgtcttccgagctgcgttctgtccttgtcatgatgctggagccagaccccaagctgcgggccacggccgaagccctgctggcactgcctgtgttgaggcagccgcgggcctggggtgtgctgtggtgcatggcagcggaggccctgagccgagggtgggccctgtggcaggccctgcttgccctgctctgctggctctggcatgggctggctcaccctgccagctggctacagcccctgggcccgccagccaccccgcctggctcaccaccctgcagtttgctcctggacagcagcctctccagcaactgggatgacgacagcctanggccttcactctcccctgaggctgtcctggcccggactgtggggagcacctccacccccc

SEQ ID NO: 6242 - DNA, 476 bp, Homo sapiens
gcccagaacagatttatttttctttagataaagttcatacagaatatgttacagtcaggagttctcagctttcaccaaaaggtcagaagttattgcagttgtgcccagtggataggatggaggaagggaaacttctagaaagctgcctgtgttcagagaaggaatcgtcaatgtttaaagttgtggggctgccctgcaaaggatgttccagctccatccacagccagagcctccgaccgactctcgcctttccggatctccttgtagccaaggctcgggtgggggttcagcactacagtggggccttcttcctcggggacagcctcctctccagcctcagcctcctcctcctctcccccctcctcttctctctttgcctgccaccctggctctgcactcaggcccttctctctgtccaccagaccctgagagaggccctcctgctccagctctccgctcttcccaccccggaagag

SEQ ID NO: 6243 - DNA, 648 bp, Homo sapiens; identical to SEQ ID NO: 1671
  misc_feature 290: n = A,T,C or G

SEQ ID NO: 6244 - DNA, 636 bp, Homo sapiens
tcggcacgaggattttattaatgctatcatctcgaccaagctcaaagcctacttattagaaacaatgaagttcacaataggtcataaggtctcttccttttctaaaattgaaagacaagaaatttagtgccaatattgtacagacagaaattccatgtatgagtctcaacaaagactacctttggctaaatgtctagaagcagagaagtaaagtgagcaaaatccagtgttgaggagtcatgacagtactttgatctttatatactctgaagcatttcttcaaacttttctacttttatttgtcattgatacctgtagtaagttgacaatgtggtgaaatttcaaaattatatgtaacttctactagttttactttctcccccaagtcttttttaactcatgatttttacacacacaatccagaacttattatatagcctctaagtctttattcttcacagtagataatgaaagagtcctccagtgtcttggcaaaatgttctagtatagctggatacatacagtggagttctataaactcatacctcagtggacttaaccaaaattgtgttcttctcaattcctaccacactgagggagcctcccaaataactattttcttatctgcagtattcc

SEQ ID NO: 6245 - DNA, 432 bp, Homo sapiens
attcggcacgaggtttttttttttttttttgaaaaaatatttacctttaaagaaacccccctccttggggtttaaacccaccaggacacaggccccccaaacactttaaattttttcctaacttttttggttaaaaaattggcccttaacaaaaacgggttgtttgggaacctttccttttccaaaaattttgtattaccccaatcgccccacttaattgaggggaccacccccatttttgtttttaccaaatttcccccgtgtttgttcattgcccaaagcccacattttgcaagggttaacagtggggcaaaaccttgggtccctttttaaggggaaaggtttaataccaattttccaaaagaacccgggggggttttggccaaatttaacccgggggggatgcaaaccaccagttttaccggggccgaa

SEQ ID NO: 6246 - DNA, 526 bp, Homo sapiens
tcggcacgaggagaaggagttgggggtgtatatctaactgtgtttttctatatggaaatatatgagcatcaagtgataacttcaataaggcctcaggattgtatttaaaatacctgttttgtgggacagcatgcctttgttttctttgcctgttggctttggtggctccaaacattttcattttacgctagctttcctgtcacccaggttgtgtgcattttttttttcatttgaactattgtttatcattattaatgatgttatctccaaatcccaaagccaaggaaatagccagtatgcaggacttgcagtaaatataagcattggtgttaacataggttaagttttgttagtgttcccagaaatatactgaattgagggataatgtagctttaaagaaattatgtttctttttaacatttggagaagccacctgtcctgggtccctattcttgagaaattcatcttttcatgcaaataacattgatgggggacaagactggatgattgacttctatcagtcagt

SEQ ID NO: 6247 - DNA, 504 bp, Homo sapiens
tcggcacgagggcgagatggaggtggacgcaccgggtgttgatggtcgagatggtctccgggagcggcgaggctttagcgagggagggaggcagaacttcgatgtgaggcctcagtctggggcaaatgggcttcccaaacactcctactggttggacctctggcttttcatccttttcgatgtggtggtgtttctctttgtgtattttttgccatgacttgttcgctgatatctaaattaagaagttggttcttgagtgaattctgaaaatggctacaaacttcttgaataaagaagacaggactctcaatagaagaatttcacatctccaagggacccttcctttcattttacactttgttactaatttgcagaactctattaattgggtaggatttcacccattcctagctaagttcttaaaattaaaccctttggttcgtgtttaaaaactttcaaacatctgatggctttacaggggctgaatataaaagcatttgtact

SEQ ID NO: 6248 - DNA, 517 bp, Homo sapiens; identical to SEQ ID NO: 1672

SEQ ID NO: 6249 - DNA, 618 bp, Homo sapiens
tcggcacgaggggcccaggtagatgaggcctggagcctggctggccgggccatgctgctggaggtgcagggcacacccgttcgtggtgttagggctggcatgccaagtgcactgcggttgtccaccaactccttcctggtttccctgatgtggccgtggggctgttcgccttcccctttgccatcatcatcagcctgggttctgcactgacttccacagccacctctttcttgcctgcttcatgcttgtgctcacacagagctccatcttcagcctcctgtccatggccatcaacaggtacctggccagccacagtcggctcaggcataaaagtttagtcactgggacccaaacaagaggggttactgctgtcctctgggtccttgcctttggcactggactgaccccattcctggagtggaacagtaaagacagtacctctaataactgcatggagccctgggatggaaccatgaatgaaagctgctgccttgtgaagtgtctctttcagaatgcggtacccatgagttacatggtatatttcagttttggggggtaagtcctgcccccactgctcgtaatgtggctgatctccatcaagttcttcacagtgactgc

SEQ ID NO: 6250 - DNA, 586 bp, Homo sapiens
ctgggactaagtgtaccagagaagggcttggactcaagcaagatttcagatttgtgaccattagcatttgtcaacaaagtcacccacttcccactattgcttgcacaaaccaattaaacccagtagtggtgactgtgggctccattcaaagtgagctcctaagccatgggagacactgatgtatgaggaatttctgttcttccatcacctccccccccccgccaccctcccactgccaaagaacttggaaatagtgatttccacagtgactccactctgagtcccaaagccaatcagtagccagcatctgcctccccttcactcccaccgcaggatttgggctcttggaatcctggggaacatagaactcatgacggaagagttgagacctaacgagaaatagaaatggggaactactgctggcagtggaactaagaaagcccttaggaagaatttttatatccactaaaatcaaacaattcagggagtgggctaagcacgggccatatgaataacatggtgtgcttcttaaaatagccataaaggggagggactcatcatttccatttacccttcttttctgact

SEQ ID NO: 6251 - DNA, 615 bp, Homo sapiens; identical to SEQ ID NO: 1673
  misc_feature 84, 493: n = A,T,C or G

SEQ ID NO: 6252 - DNA, 474 bp, Homo sapiens
  misc_feature 165: n = A,T,C or G
tcggcacgaggcctcccgcacgctgggttgcagctgcacaggtaggcacgctgcagtccttgctgcctggcgttggggcccagggaccgctgtgggtttgcccttcagatggccctgccagcagctgccctgtggggcctggggctgggcctgggcctggctgancagggccctccttggcaggtggggcaggagaccctgtaggaggaccccgggccgcaggcccctgaggagcgatgacggaatataagctggtggtggtgggcgccggcggtgtgggcaagagtgcgctgaccatccagctgatccagaaccattttgtggacgaatacgaccccactatagaggtgagcctggcgccgccgtccaggtgccagcagctgctgcgggcgagcccaggacacagccaggatagggctggctgcagcccctggtcccctgcatggtgctgtggccctgtctcctgcttcctct

SEQ ID NO: 6253 - DNA, 501 bp, Homo sapiens
ttcggcacgagggttactaggaacactggctgtctcccggggcctgggagaccatcagctcagagtcctggacacaaacatccagctcaagcccttcttgctctctgtgccacaggtgactgtgctggatgtggaccagctggagctacaggaggatgatgtggttgtcatggcaactgatggactctgggatgtactgtccaacgagcaggtggcatggctggtgcggagcttcctccctgggaaccaagaggacccacacagtctatctgcaggatggtcttcacaggttctcaaagctggcccagatgctgatacacagcacacagggaaaggaagacagtctcacagaggaagggcaggtgtcctacgatgacgtctctgtgttcgtgattcccttgcacagtcagggccaagagagcagtgaccactgaggattcagacactgtatcccagaactgctctagtgcccgggtgtggtctgggcatccctccagtgtg

SEQ ID NO: 6254 - DNA, 245 bp, Homo sapiens
  misc_feature 60: n = A,T,C or G
gcggccgcacgggggtgcgaggcgtctgtgggggcctgcgcttcggggcgagcgcacganaggctggcgcgcgccgatggaggatgctcactgcacttggctttcgttacctggtctgcccccgggctgggacttgtttgccgtcctcgacgcgatcggtggggctcgagctgcccgcttcggtgcacgccatttgccaggccatgtgctccaggagctgggcccggagcctagcgagcccgagg

SEQ ID NO: 6255 - DNA, 55 bp, Homo sapiens; identical to SEQ ID NO: 1675

SEQ ID NO: 6256 - DNA, 55 bp, Homo sapiens; identical to SEQ ID NO: 1676

SEQ ID NO: 6257 - DNA, 498 bp, Homo sapiens
  misc_feature 323: n = A,T,C or G
tcggcacgagggagtctccaacgctccccagcactgagggccaggtggtcaacaagcttctgtctggccccaaagagacccctgctgcccagagccccaccagaggcccctctgacaccaagagagcagacgtggctggaccccgaccctgccaacgctccctgtcggtgctcagcccccgccaaccagcccagaaccgagagtccaccccccttgccagcggaccttcctcattccagcgggctggctctgtgcgggatcgtgtccacaagttcacatctgattctcctatggctgctaggctccaggatggcacaccccangctgccctaagtcccctgacccccgcaaggctcctgggcccctccctcaccagcaccacccctgcctcctcctccagcggctcctcctctcggggccccagtgatacctcctcccggttcagcaaggagcaacgaggagtagcccagcccctggcccagcttcgaagctgccccc

SEQ ID NO: 6258 - DNA, 121 bp, Homo sapiens
ttgccacgaacccttatacacctgcacatgcatctcatgtcatcttcactggaccctggattagcctacattcttcaacatcccatttgaattgtttaatgactaaaccattgagcattct

SEQ ID NO: 6259 - DNA, 83 bp, Homo sapiens
acgacagaaggggactcccgagctctactgactcccaacagagcgcccaagaagaagatggccataagtggagtccctgtgct

SEQ ID NO: 6260 - DNA, 462 bp, Homo sapiens
gtcgacactagtggatccaaagaattcggcacgaggtcgcacgcgtgagacttctccgccgcagacgccgccgcgatgcgctacgtcgcctcctacctgctggctgccctagggggcaactcctcccccagcgccaaggacatcaagaagatcttggacagcgtgggtatcgaggcggacgacgaccggctcaacaaggttatcagtgagctgaatggaaaaaacattgaagacgtcattgcccagggtattggcaagcttgccagtgtacctgctggtggggctgtagccgtctctgctgccccaggctctgcagcccctgctgctggttctgcccctgctgcagcagaggagaagaaagatgagaagaaggaggagtctgaagagtcagatgatgacatgggatttggcctttttgattaaattcctgctcccctgcaaataaagcctttttacacatct

SEQ ID NO: 6261 - DNA, 521 bp, Homo sapiens
catgctcaatattgatggctacatctacacctggtaccaagagccgattttggagaaagactcgctccacccatactggatctagctgcattggcacataccccaacagaaattttgatgctggttggtgtgaaattggagcctctcgaaacccctgtgatgaaacttactgtggacctgccgcagagtctgaaaaggagaccaaggccctggctgatttcatccgcaacaaactctcttccatcaaggcatatctgacaatccactcgtactcccaaatgatgatctacccttactcatatgcttacaaactcggtgagaacaatgctgagttgaatgccctggctaaagctactgtgaaagaacttgcctcactgcacggcaccaagtacacatatggcccgggagctacaacaatctatcctgctgctgggggctctgacgactgggcttatgaccaaggaatcagatattccttcacctttgaacttcgagatacaggcagatatggctttctcctt

SEQ ID NO: 6262 - DNA, 381 bp, Homo sapiens
  misc_feature 8, 174, 292, 379: n = A,T,C or G
gccatggncctggtgctacacgatggacccaaggaccccattcgactactgtgccctgcgacgctgcgctgatgaccagccgccatcaatcctggaccccccagaccaggtgcagtttgagaagtgtggcaagagggtggatcggctggatcagcggcgttccaagctgcgctnggttgggggccatccgggcaactcaccctggacagtcagcttgcggaatcggcagggccagcatttcttgcggggggtctctagtgaaggagcagtggatactgacttgcccggcatngcttctcctcctgccatatgcctcttcacgggctatgaggtatggttgggcaccctgttccagaacccacagcatggagagccaagnct

SEQ ID NO: 6263 - DNA, 387 bp, Homo sapiens
  misc_feature 299, 324, 380: n = A,T,C or G
atctcaccaatttcaaatctgatctattcggcttagcgactgaagattgacgctgcccgatcgcctcggaagtcccctggaccatcacagaagccgagcttcgggtaactctcacagtggagggtaagtccatcccctgtttaatcgatacgggggctacccactccacgttgccttcttttcaagggcctgtttcccttgcccccataactgttgtggggtattgacggccaagcttcaaaacccctggaaaactcccccactctgggtgccaattgggacaacattttttatggcantttttttagttattccccacctggncccattttccttattaggggccgaaatatttttaaaaccaaattatcttggttttnccggact

SEQ ID NO: 6264 - DNA, 53 bp, Homo sapiens
tttgttcatgtcagtgagagcttcccacaccctggcttcaacatgagcctcct

SEQ ID NO: 6265 - DNA, 574 bp, Homo sapiens; identical to SEQ ID NO: 1682

SEQ ID NO: 6266 - DNA, 477 bp, Homo sapiens
  misc_feature 1, 6, 12, 22, 221, 251, 267, 283, 288, 329, 361, 443, 465: n = A,T,C or G
nttggnttgttntgccttttantgaaaaggtaagatcatgtgattggaagaacacaactgttggcttgggaagaggactttgctgctgaagtgttttctaccttctgagtgtgtttaaggcaggatttggagggaaggaccagcttagggagagtgtctgagccacagcgtcaggatgggggaacccacatgggatccatcaagttccagttgaacaggancaagatcagaacttaggagggcagtgtcanctcccttgttggctgncaaggaacaccgatcnagtanaaacccacttggttgtgacccaggtacgaggtagatgccanacatttgagatatgcgtccttaaggaacctgnacaagcagactggaaggggatggtaagtgtgacagccttgataagttttctcaaagcccaggatacagagccagtgttttcnggtaactggagacctcagttangccaactttcga

SEQ ID NO: 6267 - DNA, 412 bp, Homo sapiens
tcggcacgagggctccctcctccatcctgctgccagcagcccccatccccatccttagcccctgcagtccccctagcccccaggcctcttccctctctggccccagcccagcttccagtcgcctgtccagctcctcactgtcatccctgggggaggatcaagacagcgtgctgacccctgaggaggtagccctgtgcttggaactcagtgagggtgaggagactcccaggaacagcgtctctcccatgccaagggctccttcaccccccaccacctatgggtacatcagcgtcccaacagcctcagagttcacggacatgggcaggactggaggaggggtggggcccaaggggggagtcttgctgtgcccacctcggccctgcctcacccccacccccagcgagggctcctt

SEQ ID NO: 6268 - DNA, 459 bp, Homo sapiens
atggagtatggcccaagaccagctgatactccccctgctccatcacctcctccaacaccagctcctgttcctgttccccttcccccttccactccagcacctgttcctgtgtcaaaggtcccagcaaatataacacgtcaaaacagcagctccagtgacagtggtggcagtatcgtgcgagacagccagagacacaaacaacttccggtggaccgaaggaaatctcagatggaggaagtgcaagatgaactcatccacagactgaccattggtcggagtgccgctcaaaagaaattccatgtgccacggcagaacgtgccagttatcaatatcacttacgactccacaccagaggatgtgaagacgtggttacagtcaaagggattcaaccctgtgactgtcaatagtcttggagtattaaatggtgcacaacttttctctctcaataaggaggaactg

SEQ ID NO: 6269 - DNA, 517 bp, Homo sapiens
tcggcacgaggggtgtttgtcctgaaggaaggtgttgattacagagtgaagatctccttcaaggtccacagggagattgtcagcggcctcaagtgtctgcaccacacctaccgccggggcctgcgcgtggacaagaccgtctacatggtgggcagctatggcccgagcgcccaggagtatgagtttgtgactccggtggaggaagcgccgaggggtgcgctggtgcggggcccctatctggtggtgtccctcttcaccgacgatgacaggacgcaccacctgtcctgggagtggggtctctgcatctgccaggactggaaggactgaacccccagtccgtgtctcccctacctccctcagttgttgcacagggacccccaagcatccccagcaccccccgtgagtgaccagaccctcccctgctgcccctgctgcccctgctgcccctgctctgtcccgggaccccctgggcctggcgctgtcccctgagctgtcccattaaacacggccctgtctc

SEQ ID NO: 6270 - DNA, 437 bp, Homo sapiens
tcggcacgaggggagttgaggtctcggtggatgatgttcatggagtggaggtaggccatccctgatgcgatgtccttggcaaagctcactctctggctccatgggtactggctgtccatgctcttgatgatgccccggaacgtgccgcccttgatgtactcagtgatgaagttgagcctcttgtccttgtagagcaccccgatgaacttgagcacgttggggtgttccaggcatcgcatgaccttcacctccttgaggaacgtcctctgggtctcctcgtcgaaccggatcagctccttcatcaccatcacctcacctgtctcacggtgtgtcaccttgatagcctggccgaagcagcccttgcccagcacctccccgtggatgaagtccgacggccggaagatgcggtgtggccggcagactacgcggagggactc

SEQ ID NO: 6271 - DNA, 408 bp, Homo sapiens
  misc_feature 288, 311, 352, 385: n = A,T,C or G
ccagggatattttcacgtaacaaaaccccaacgatgcggcgaggggccacacacggcggtggaggggtggggtgggggttgggcctgccaggtgagattttgtctgcatcagtgcaggcgagaggctggggaagggggtgcctcttggcagactggccgggggcaggacctgaagaccctgaagcatggccgtgagacccatgggtgctccatcctgggctgccgtccatcgagacaccatggccgcctccgggcacccagcggcattccgtaccagcgaggggactnggctcacatcctgggggaggggntccaggggcagcagggcgttcctacagcaacagcattcctngggggggtgaacgggttggggaagggttggcancctgggggttttccaaagttttt

SEQ ID NO: 6272 - DNA, 177 bp, Homo sapiens
ctggataaagaacaggatatgaaaggcagaggacgctctcttgacgcattgcaagtccaggcaaaaacaattatgggttgcttttgaatgagaatgaaagtttatttttaatggaggtattatggaaaattccaagtaaagaactgagggtcatattgaccttgcctatatattcga

SEQ ID NO: 6273 - DNA, 423 bp, Homo sapiens
ttttaaattactactttattacattaatgttagctcttaatgttttgtattgggaggtttgacttaagagttgcaagtactaccaaatagccgaaaagaaagctgaagcacaatatttattagaatttttgaaagtgaaaaatgataaattatgccaatggactgacttctatttctcaatttattttctgttaagtacatgtgacataaaaaacaatacttaccatagtgaggatcttgacctaaaaggaactggtttatttattattctctctgccaaaatatactgctgcctcacagacacatatttttcatacggctatcttaagtataaggctgggtcaactgaactttaaatttatatgacacctcctgcattgattactatccttatttaaaaatcaaaacatttggtacctgagg

SEQ ID NO: 6274 - DNA, 455 bp, Homo sapiens
  misc_feature 4, 146, 157, 158, 161, 393, 413, 434, 442: n = A,T,C or G
gcgnccgcctcatgcaggaggtgaatcggcagctgcagggccacctgggcgagatccgcgagctcaagcagctcaaccggcgtctgcaggcagagaaccgtgagctgcgcacctctgctgcttcctggactcggagcgccagcggngcggcgccganncangtggcagctcttcgggacccaagcatcccgggccgtgcgcgaggacctgggcggctgttggcagaagctggccgagctggagggccgccaggaggagctgctgcgggagaacctagcgcttaaggagctctgcctggcgctgggcgaagaatggggcccccgcggcggcccagcggcgccgggggatcaggagccgggccagcaccgagcttgcttgccccgtgcggccccngacctagcgatggaactcanatgcagcgtgggatcggatanttgcctgntgttcccgatgat

SEQ ID NO: 6275 - DNA, 687 bp, Homo sapiens
  misc_feature 635, 659: n = A,T,C or G
caaaagggaaccttgtatttcacaggcctcattttgatggcaaaaagacagggtaataataacataataataataaaaatataatactgaaaaggattgttcagggggagttggggtctcccgatcctgccatggctcggggggggctcaggtggctgcttaaggctgaaaggggggtctgaaatgaacctgcaaaataatccaagccgaccctcacctgctgggtccagggctaaagcctttgaaaatgctcccatggatcctggaactaggtctactgtggcagcaaggcacaggctgggggcctaaggggtcctggaggtcaggcaggtcacccagcaccattggggagtccatctggatctcacgctgcagggactcaatatcggcagggttcatgccatggccttcgagccagtcagcaagcagggaggctgagagagaggctgaatctgcctggccatcctgtggcccatcagccacgcccatgtcgaaagactggtttaagaattcctccaggtcaaagccaacaccgtagccagccccactgccctttggtgtgcctgagaacacagggggcagggggtcctccacctgtgacttaaatagctgctgggtcacaaggttgacatcangtgactctgacatggaaaactgangggctcccccggcgtttggggccgcaag

SEQ ID NO: 6276 - DNA, 838 bp, Homo sapiens
gctgctactgtgcgccgcgggccacctgtaccccggagaggtgtgtcccggcatggatatccggaacaacctcactaggttgcatgagctggagaattgctctgtcatcgaaggacacttgcagatactcttgatgttcaaaacgaggcccgaagatttccgagacctcagtttccccaaactcatcatgatcactgattacttgctgctcttccgggtctatgggctcgagagcctgaaggacctgttccccaacctcacggtcatccggggatcacgactgttctttaactacgcgctggtcatcttcgagatggttcacctcaaggaactcggcctctacaacctgatgaacatcacccggggttctgtccgcatcgagaagaacaatgagctctgttacttggccactatcgactggtcccgtatcctggattccgtggaggataattacatcgtgttgaacaaagatgacaacgaggagtgtggagacatctgtccgggtaccgcgaagggcaagaccaactgccccgccaccgtcatcaacgggcagtttgtcgaacgatgttggactcatagtcactgccagaaagtttgcccgaccatctgtaagtcacacgggctgcacccgccgaaggcctctgttgccacagcgagtgccctggcaactgttctcagcccgacgaccccaccaagtgcgtggcctgccgcaacttctacctggacaggtaagtgtgtgagacctggcccgccccgtactaccacttccaggacttgcgctgtgtgaacttagcttcttgcaggactgcacatcaatgcaagaactccggaggcaggg

SEQ ID NO: 6277 - DNA, 457 bp, Homo sapiens
tcggcacgagggactggaagcagaaaatgaccaaatcagtattttttttaatgaaatattattgctggaggcgtcccaggcaagcctggctgtagtagcgagtgatctggcggggggcgtctcagcaccctccccaggggtgcatctcaaccccctctttccgtccttcccgtccagccccagccctgggcctgggctgccgacacctgggccagagcccctgctgtgattggtgctccctgggcctcccgggtggatgaagccaggcgtcgccccctccgggagccctggggtgagccgccggggcccccctgctgccagcctcccccgtccccaacatgcatctcactctgggtgtcttggtcttttattttttgtaagtgtcatttgtataactctaaacgcccatgatagtagcttcaaactggaaatagcgaaataaaataactcagtctgc

SEQ ID NO: 6278 - DNA, 440 bp, Homo sapiens
  misc_feature 332, 383, 406, 411: n = A,T,C or G
gttaaattacttcgaaactttaattacagatacttttccacgcaacatttctgaaatgaaagctttgattctcccctttttttgcataaaggctgggaaggtggtttggccagaccgtacatctttttgtatatacatatctacacctgtgtctcttctttattaataaaaggtgtcttgatcacagtcccaaaccaactctgcattgggattccagcatataaaactcagagggtaaaacaatttcaaagggaagacaggctgcaaccacagggaaaatgggcagggaaaagttgtaggcttgataggttgtttcttcttaaggtttaacntcagggaatattaattaattaatttaggggggaaaaaatagggggcccctngggtttccatcccctgctacccnacacngctcgtccccggactctgggggctgtctt

SEQ ID NO: 6279 - DNA, 449 bp, Homo sapiens
  misc_feature 382, 397: n = A,T,C or G
gggttccaacgccagtctggccgagtgcgttggcacctgcggaggtctgagagaggagacaggacggcaggatctccgccacgcaccatctcccctcccccgtgccaaggacccatcgagatcaaggagactttcaaatacatcaacacggttgtgtcctgccttgtgttcgtgctggggatcatcgggaactccacacttctgagaattatctacaagaacaagtgcatgcgaaacggtcccaatatcttgatcgccagcttggcttctgggagacctgctgcacatcgtcattgacatccctatcaatgtctacaagctgctggcagaggactggccatttggagctgagatgtgtaagctggtgccttttcatacaganagccttccgtggggnattcactgtggcttgagtcttattgtggttcttgagtatttgacaggtattc

SEQ ID NO: 6280 - DNA, 663 bp, Homo sapiens
tcaacagctccatgaccaacagtaccgcggccagcaggcccccggtcaccctgaggctggtggtgccggccacccagtgcggctccctgattgggaaaggcgggtgtaagatcaaagagatccgcgagagtacgggggcgcaggtccaggtggcgggggatatgctgcccaactccaccgagcgggccatcaccatcgctggcgtgccgcagtctgtcaccgagtgtgtcaagcagatttgcctggtcatgctggagacgctctcccagtctccgcaagggagagtcatgaccattccgtaccagcccatgccggccagctccccagtcatctgcgcgggcggccaagatcggtgcagcgacgctgcgggctacccccatgccacccatgacctggagggaccacctctagatgcctactcgattcaaggacaacacaccatttctccgctcgatctggccaagctgaaccaggtggcaagacaacagtctcactttgccatgatgcacggcgggaccggattcgccggaattgactccagctctccagaggtgaaaggctattgggcaagtttggatgcatctactcaaaccacccatgaactcaccattccaaataacttaattggctgcataatcgggcgccaaggcgccaacattaatg

SEQ ID NO: 6281 - DNA, 499 bp, Homo sapiens
tcttccccacaacaatattcatgtgcctagaccaaaaagttattatctcgaactgacactgagccacaacccaaacaacccagctctccctaagcttcaaactagactacttctccataatattcattcctgtagcattgttcgttacatggtccatcatagaattctcactgtgatatataaactcagacccaaacattaatcagttcttcaaatatctactcattttcctaattaccatactaatcttagttaccgctaacaacctattccaactgttcatcggctgagagggcgtaggaattatatccttcttgctcatcagttgatgatacgcccgagcagatgccaacacagcagccattcaagcaatcctatacaaccgtatcggcgatatcggtttcatcctcgccttaacatgatttatcctacactccaactcatgagacccacaacaaatagcccttctaaacgctaatccaagcctcaccccactact

SEQ ID NO: 6282 - DNA, 457 bp, Homo sapiens
tcggcacgaggctggaagcagtccacccagcgcctgcgcagggcctgcctgccctcctgcgtgcccgccggggtcacgtgctcgccaaggagctcgaggcgttcagggaggccaaacgtcaccgtcccctgattgctctacccacccaagaccccgcccacgggggcgcccccccagagatggccagcaatcggaattgagcaaaactgccgcaagtctgcagcccggcgccaccatcctgcagcctcctcctgaccacggacgtttccatcaggttccatcccgaaaatctctcggttccacgtccccctggggcttctcctgacccagtccccgtgccccgcctcccctctccctcggtgacatcttgcccgcccctcagcaccctgccttgtctccaggaggtccgaagctctgtgggacctcttgggggcaaggtggggtgaggccggggagt

SEQ ID NO: 6283 - DNA, 566 bp, Homo sapiens
  misc_feature 361: n = A,T,C or G
tcggcacgaggctttgagtttaagaacttgtttgaaacctttaggcttgtttgttccatgggagagtcctcctgggattttgatactttgtgcatctttaaagaaaaggtttaccgtgtttcaccaaagctttaattgtccctctgtcccaagaattcagtgggtctctttatttaaaacaattgctcttttttaaaaggtgagagaaagcactcagaactgccttccatcttcccaaatggaaggctcacccgacagttgtatggaaccttctcatttacagagctgtggcattaaatcctcacagtcaccatgggggaacgaagccttatagggtgctgttcaacacagtagtcactangcacataagcctctgtgcattcatattcattaaaatgaagtcatctgtgtctcagttgcaccagtcacatttcaagtgctcaatggccccatgtggctactggcttccatattggacagtgcagacatataatcctgccatcatgataagaagttcaattggacagtgctgcattttaatacttgtcctacagagaattaaactg

SEQ ID NO: 6284 - DNA, 564 bp, Homo sapiens
tcggcacgaggggcacttaaattttttctttataaagctttttgaaggtcataaacaaagaccataattgatgatagacctaatacatttcctctgtgtgtgtgtgtaacattccaaatactttttttttcttttccactgtttgtaaggtgcaacaatttaatatttttaagggactttttaacagttccttaagaaccaatttaaaattacttcagtgcaatcctacacagtatcaacattagaattttgatattactcttatgttatcttccattctatttttatctgctttttgctgctaatttcaaactgccagtatttttccttttgcttttaaaatagttacaatatttttcatgatacccacagtattgccacaatttattataataaagggtttttatttgatttagcgcattcaaagcttttttctatcacttttgagttcagaatataacctttgtgtgcgtgtatgtagtgtgtgtgcatgtgtggcgtatatgtgtgttacaggttaatgccttcttggaattgagttaatgttctcttggtttattatgc

SEQ ID NO: 6285 - DNA, 603 bp, Homo sapiens
tcggcacgaggcatgtgaacccgccagcagaggtgagcacgagcctgaagacataccagcacttcaccctggagaaagcctacctgcgcgaggacttcttctgggccttcacccctgccgcgggggacttcatccgcttccgcttcttccaacctctaagactggagcggttcttcttccgcagtgggaacatcgagcacccggaggacaagctcttcaacacgtctgtggaggtgctgcccttcgacaaccctcagtcagacaaggaggccctgcaggagggccgcaccgccaccctccggtaccctcggagccccgacggctacctccagatcggctccttctacagggagtggcagagggagaggtggacccagccttcggccctctggaagcactgcgcctctcgatccagacggactcccctgtgtgggtgattctgagcgagatcttcctgaaaaaggccgactaagctgcgggcttctgagggtaccctgtggccagccctgaagcccacatttctgggggtgtcgtcactgccgtccccggaaggccagatacggccccgcccaaagggttctgcctggcgtcgggcttgggccg

SEQ ID NO: 6286 - DNA, 340 bp, Homo sapiens
tcggcacgaggttttttttttttttttgggggttggcagtttttttttttacaagtttcctttaaccacatggaattaacccctgatttccggaaccctatttaatagtggggaaacaataggcatcttttggaggataactttttttaaaacaccaacctcccctgaaaatttatggccgaaaaaattttgggccttatttttaaaaaatccattttttaattggaaaatttgatggttaaaatttggaaaagggaaggaacctctttgggacaaactcaaatttaacatattctgagggggggggacctttgccccaaatgatttttttcgggttacc

SEQ ID NO: 6287 - DNA, 350 bp, Homo sapiens
tgtacctgcagttatcaacacagttcgtccttaatcctcatgtcactgcttttggtgctgcctgttgtggaagcagtagaagccggtgatgcaatcgcccttttgttatgtgtggttctcatcattacaagcatttgtgcctgcttgggggtatatgcacgaaaaacaaatggacagatgtgactttgaaaggcctactgattcaaacctcaccctgaaaacctttgcgctgtagaggctaaacctgagctttggtgtgtgaaaggttccaagaatcagaccatacgggagtttcacatttttcattgtttccatgaaatggcaacaaacatacattgataaattgaaaa

SEQ ID NO: 6288 - DNA, 660 bp, Homo sapiens
  misc_feature 553: n = A,T,C or G
gacagctgacgctgcagcagtttgcgcagtccacagagatgctgaagcgcgtggtgcaggagcatctcccgctgatgagcgaggcgggtgctggcctgcctgacatggaggctgtggcaggtgccgaagccctcaatggccagtccgacttcccctacctgggcgctttccccatcaacccaggcctcttcattatgaccccggcaggtgtgttcctggccgagagcgcgctgcacatggcgggcctggctgagtaccccatgcagggagagctggcctctgccatcagctccggcaagaagaagcggaaacgctgcggcatgtgcgcgccctgccggcggcgcatcaactgcgagcagtgcagcagttgtaggaatcgaaagactggccatcagatttgcaaattcagaaaatgtgaggaactcaaaaagaagccttccgctgctctggagaaggtgatgcttccgacgggagccgccttccggtggtttcagtgacggcggcggaactcaaagctgccctctccgtgcaatgtcactgctcgtgtggtctnagcacaggattcggcgaagaaaacggatgcaccgctttagaacaaaatattcttcaagatttatctgtgttataatatattttgtgtcgttacattcacgtcgtgat

SEQ ID NO: 6289 - DNA, 587 bp, Homo sapiens
  misc_feature 119, 252: n = A,T,C or G
tcggcacgaggcggcacgagggggggaagttaagggggtcacctccattctggggaatttatatttgaattgaggctttggccttaacacccaggaacttttctattacaatcgcttangaagtaaagccttgtctccctccctgttctctgcctcttgtacccctctgacccacccgctctgccccactcccagccctcctcagccccagccctgcctgccctgcccctccagggggccatgagtgcctangtttctcataccccacaaggtcacagcaggggagggagggacaattttataatgaaccaaaaattccatgtgttggggggtggggggcggaggagggtgaggggtgccgcccatgggccacaaatctctacaagtgcctgctatccctctcccactccccaccccagcaccggtccaaccccttcatccccagctgctcctaagactggcccatgggcaggcgggtggggggatgggaagggggtgccctgaaaccaaactggaagccccctctgcctcccagctggggcctctggggtggggtggggggctgtggtcaagccttattctgtatt

SEQ ID NO: 6290 - DNA, 633 bp, Homo sapiens
ttcggcacgagggagcccgagagtttccaggatggcttctgcatcaacttctaaatataattcacactccttggagaatgagtctattaagaggacgtctcgagatggagtcaatcgagatctcactgaggctgttcctcgacttccaggagaaacactaatcactgacaaagaagttatttacatatgtcctttcaatggccccattaagggaagagtttacatcacaaattatcgtctttatttaagaagtttggaaacggattcttctctaatacttgatgttcctctgggtgtgatctcgagaattgaaaaaatgggaggcgcgacaagtagaggagaaaattcctatggtctagatattacttgtaaagacatgagaaacctgaggttcgctttgaaacaggaaggccacagcagaagagatatgtttgagatcctcacgagatacgcgtttcccctggctcacagtctgccattatttgcatttttaaatgaagaaaagtttaacgtggatggatggacagtttacaatccagtggaagaatacaggaggcagggcttgcccaatcaccattggagaataacttttattaataagtgctatgagctctgtgacacttaccctgctct

SEQ ID NO: 6291 - DNA, 582 bp, Homo sapiens; identical to SEQ ID NO: 1694
  misc_feature 331: n = A,T,C or G

SEQ ID NO: 6292 - DNA, 487 bp, Homo sapiens
gccgcggtcttcctcgccgccttcgcgccgcctgggccactcagcttcggcttcgcgctcggctacagctccccggccatccctagcctgcagcgcgccgcgccccggccccgcgcctggacgacgccgccgcctcctggttcggggctgtcgtgacctgggtgcgcgcggggggagtgctgggcggctggctggtggaccgcgccgggccgaactgagcctcttgctgtgctccgtgcccttcgtggccggctttgcgtcatcaccgcggcccaggacgtgtggatgctgctggggggccgcctcctcaccggcctggcctgcggtgttgcctccctagtggccccggtctacatctccgaaatcgcctacccagcagtccgggggttgctcggctcctgtgtgcagctaatggtcgtcgtcggcatcctcctggcctacctggcaggctgggtgctggagtggcgctggctggctgtgctgggca

SEQ ID NO: 6293 - DNA, 585 bp, Homo sapiens
  misc_feature 327: n = A,T,C or G
tcggcacgagggttgatgatgggaggggccatggcaatggcctggccaggaaagtggggttgaagtagagaccttcccgcagtgacaccccggtgggtggctcgcagtagcccgtgagcagggagaagacgtagtcctcaccaccatgcctagctcgcacgatgtagctgaggtcagggggcaatgctccgttgttggcagctcgagcagcctcactgttggggtatggttttgggaaatagtcgaacagcttccctggccgcatgaacatctccccatcttcattggggccgtcttgaacctccacctccgcagccagctccttancttcatcctccgtgtagcacacgcccaccaggtggcggtaggccacgaagtccatgctgtggcaggaggcgcacacctgcttatatacctggaaacccctccggatgctggtgtggtccaaggaagaaaggaggccacggtgagaccacggatagctgggggggtgcagctccaggtcactggcactcacagccgaatgcagagccacgggcagccccgcaccccctgccgccagcatgcccagcgctgacagcatca

SEQ ID NO: 6294 - DNA, 477 bp, Homo sapiens
  misc_feature 392, 397: n = A,T,C or G
agctggtttcgccaaggcctttcaagtagagactctaggaccagtccgtgacaagcacgccggccggactgctccgggtcccagaccagctcgtgcgggccagagccggggacatggctagggagggatccccgggggcccggctcggccactctcccaccgtacgctggtcagtccgtgagtcagcagccggcgagggggttcgtggatatgctcaagccctcccacaagagtgagacctgtgagattatgcgtgagtctgagcggcctgtgcccccggcccggcccccctcacacagtgagtcagcagcatcagagccggctagccggccccctctccgctgccgccgaccgacataagccgagctgggccgcgggggcgagtaggcagngcggngagctttaccgatggagtggaggatgtcgatggaggcctcccggtcggtgctgagtagagactgggctctctggaactcc

SEQ ID NO: 6295 - DNA, 406 bp, Homo sapiens
tttcggtttaaatctttaatgcactggctggctgggcagcggcggtggggctgcggcgggggaagccacgacccgagcgctggggagtaggacccaggccgctggacagacagctcatcaggcctcgcagagtgccagcttctgctccccggggtgcgccgagctccgctccctccgccacatgcgaacgcaggggaaaaagtagaaacagccccagtagatctcctcctccgcctccagcgccacctcgtatctcctcattcccgacatgtcctgggctccgaacgtctcctggggagcggcatgattgaatcagggattccctagccccaggtccccttctccgtcattctcaggacgaggctgcccagttctcaggtaatctgaggctgatgccccgagaagc

SEQ ID NO: 6296 - DNA, 469 bp, Homo sapiens
tcggcacgaggatcgccgccatcatgggtcgcatgcatgctcccgggaagggcctgtcccagtcggctttaccctatcgacgcaccgtccccacttggttgaagttgacatctgacgacgtgaaggagcatatttacaaactggccaagaagggccttactccttcacagatcggtgtaatcctgacagattcacatggtgttgcacaagtacgttttgtgacgggcaataaaattttaagaattcttaagtctaagggacttgctcctgatcttcctgaagatctctaccatttaattaaaaaagcagttgctgttcgaaagcatcttgagaggaacagaaaggataatgatgctaaattccgtctgattctaatagatagccggattcaccgcttggctcgatattataagaccaagcgagtcctccctcccaattggaaatatgaatcatctacagcctctgccct

SEQ ID NO: 6297 - DNA, 494 bp, Homo sapiens
ccgcaggtctgaaatggactttaattggcttttgtctctagaattacccacccgttcctgcgctctacggttctccatgccccctccagtttgggggtctaaaccgaacaggagaggtgcaggggaccaggaggtgtcctggcacaaaggttcgggggtctccctggcaaggggtcccagggcctggagccgaggcccagccaaaagcacacagcatcaaaacatgtttttagtgggaagctccaggccctgcccctccccgggggcctcgaggatgtggagcaggtggaatcctgtctgcctccaggtcatggcagtgcaggcggtgagctgggggccagcaggggcgcggacagtgcggcgtggtcgaacagagggttgcgcacctccatttccccggtcggggccaggcccgggcactcgtacaccgtgaagtctccgtcctcattctcctcatccgaggaggccgtgtccagctcctctgggtggctctt

SEQ ID NO: 6298 - DNA, 332 bp, Homo sapiens
gcttgataaggcctcaggatctcagcattgcacaatgcctcatggaagcctttgagggtatcacacagacacccccaccttcctccagcctgtgcgcacctgccctccttgcagcccagcacacctgcaggtgtaagggacgattggagtttcttcccagagagtctgtcccagaaggactgtggcttgtgtgtgtccatctcgcctgttggtcagtgcttcatcccatttgcagagcctcagacacgtcttggtggtgaggctcagttacccctgggcttaggctgaggcgggccctgtgctgggggtggtagaaaggatgctgctgaggc

SEQ ID NO: 6299 - DNA, 588 bp, Homo sapiens
tcggcacgagggggctgtaaagactagggcgccagcggctggcgaagaaggaaagagggtactctctggctgggctggggccgtagcgacgtccgccgcgaacctgggccccccaaagctgcggggcgttcggtgtcgccgaagtaaacatgcaccctgagccctcggagcctgcgacaggtggtgcagcagagctggattgcgcgcaggagcccggcgtggaggagtctgcgggtgaccacgggagcgcaggccgagggggctgcaaggaagaaattaatgatcctaaggaaatatgtgtgggttcttctgacacatcctaccacagccagcagaaacagagtggtgataatgggtcaggtggtcacttcgcacacccaagagaagacagggaagatcggggccccagaatgactaaaagttccctgcaaaaactctgcaagcagcacaagctttatattaccccagcattgaatgatacgctgtatttacactttaaaggttttgatcgcattgagaacctggaagatacacagggctgcgctgtctctggctgcagagcaatggaatacagaaaatcgaaaacct

SEQ ID NO: 6300 - DNA, 675 bp, Homo sapiens
tggtcttgatcccctgacctcgtgatctgcctgcctcagcctcccaaagtgctgggattacaggcgtgagccaccgcacctggctggcaatttataatttttaaaaggtgattctgattaccagccaagcttgcaaatcactggtttgtattgaaataaaagatattttcttgtaccagggctaaaatgtgggatgaaacattaaatctactagcctgaaaaaaaactttggcatttgtaatcaaagaacctgaaagttgccttgtgtgtttcctctgaagaatgctggagatttgtgatggataatgtttcaaaattcatgtgcctatgctttggaccatcaaagaagccattagtctctgtgtaaagaagaagtattcttaatggacagtcccccctaaccttataaattcagctttgcaacagatttcacctcctagcatgaaaattccaaaaactttaacaattactcataagtggatcttgagatgacattttcatcttggacaggttgaattctaaatctctacttcacagtgaatcgttttttaaatttttactgatggatcgttatttttcacaaggtactacattcttacaatgtaagactagatggaccaaaattttaaaaaaaacttcttgccttggttttttaattttcatatatattctatt

SEQ ID NO: 6301 - DNA, 566 bp, Homo sapiens
aaacttaccggctgagccatggttacaccgttaaggcgcagccgacggctgggaggcctaaggcccgaatcccccgagagcctcacctcagtttcgcggacgatacgggcccttgtggagttcgagtcgaacccagaagaaacgagggagcccgggtctcctccgagtgtgcagcgggctggcctggggtcccccgaaaggccgccgaagacaagcccaggatcaccccgtctgcagcagggtgcaggcttggagtcaccccaagggcagccagagccaggcgcagcgtccccccagcgtcagcaagacctacacctggagtcgcctcaaagacagccagagtacagtcctgaatccccacgatgtcagccgaagccaagtgaggaggcaccaaagtgttctcaggaccagggagtactggcctcggagttggcccagaataggaggagctgaccccgggggccccccagcatcagctaccgccggtcccaggatcaccagagccttaccccggtcagcaagctcccggtccggagccctctcagccactactggagctgacaccc

SEQ ID NO: 6302 - DNA, 429 bp, Homo sapiens
ggtgagattgtcacagacttggctgaaacttaacaagaaactgtttacagcaacaaaggaagcaattaaagttaacatgatcattcaactgtgccattcatcatgcacttattgacatgctcaaaataggggaatgttaagtaaggaaatgaagtgggaacaggaacaagggagctaagccaagaggacttccagggacttgaacaaaaacaattcccaaccacatactacttttcaagcattttgaaactcttcttttcctttagtgatgttttcagtaacaaacttgcaagtgttcttggtggttaaaaaacaaaacaaaactacaagtatcagctgagaaagacaaagaaaaaactaagaatttaaattagataattccatttaaagtttccaattcctcgtttagggtgagttggaacattagaa

SEQ ID NO: 6303 - DNA, 476 bp, Homo sapiens; identical to SEQ ID NO: 1700
  misc_feature 372: n = A,T,C or G

SEQ ID NO: 6304 - DNA, 614 bp, Homo sapiens
  misc_feature 595: n = A,T,C or G
gggtttctagtgaatttaatgcatgagtctcaaaaatcaatggcaaaggaaaaaatgaataaaattaaaatggggtcaggagaaaagggccatgggcacacacaggaggggcagtcagtggctgagctaggagctgaagcaggggaattccttaggtgtcatatctcgtccaacccgtagtcctcctccgggaagtcccccaccgtcacgactgctggcttgacaaaggcgccatacttggcctggcattcgaagtagcgtttcccattcacactgccatcatttttccccagtggctcatcatagcggacaccaatccagtagccaggcttgaaatctgtgagacctacatacatgacggtgccccggcgaggggattgtcccgccgcccgcacctcacagcggctgcccacggggatggagctggcctgggccttctcctcggccaggcgctgggcggcctcggcctcctgctgagcccgctcctcctcgttgtaccggccgagcttgctgcgcttcaggaaagagcggaccgtgtcttgcctctggtcgtaggcttcttgtgagatcgtgtactttctcaaccgggacacgntctcatactcaccaaggcg

SEQ ID NO: 6305 - DNA, 536 bp, Homo sapiens
  misc_feature 153: n = A,T,C or G
tcggcacgaggcctcgtgccggtacatgctgaaaaacgttcgggtcctgggccactttgagaagccgctgttcctggagctttgcaaacacatcgtctttgtgcagctgcaggaaggggagcacgtcttccagcccagggagccggaccccancatctgtgtggtgcaggacgggcggctggaggtctgcatccaggacactgacggcaccgaggtggtggtgaaagaagttctggcgggagacagcgtccacagcctgctcagcatcctggacatcatcaccggccatgctgcaccttacaaaacggtctccgtccgcgcggccatcccgtccaccatcctccggcttccagctgcggcttttcatggagtttttgagaaatatccggaaactctggtgagggtggtgcagatcatcatggtgcggctgcagagggtgacctttctggctctgcacaactacctcggcctgaccacagagctcttcaacgctgaaagccaggccatccctctcgtgtctgtagccagtgtggctg

SEQ ID NO: 6306 - DNA, 464 bp, Homo sapiens
ctcatcagagtactgggagatgagttcactgaagtcgatgcagatatccctttcctcagcttcctctcggaatttctcaatccccggccgcccatagtcgtcatcagctgcaattgtgcccacccagttccagcggaaatactcgatgatgtctgccatggcagtggcctggtgctcatcattggggatggttcggaggaaagacttgaattgattcttgttgctgaggagtctgctggaggaggcataactgacctggggaatgtagaagagccccagcagatttgccactgccgtggagacgcctgagccagttgctcccaccacagcaatcgtagagggaatgtgctctgagcagttgcagaactcatcaaggttcaaagaatcaattttgttttgagcaacaaaactcagggtggcttcaaggccttagaaacggtgttgcaagtgtcaaatatcatgta

SEQ ID NO: 6307 - DNA, 547 bp, Homo sapiens
acatttccctttcatgacatcaggtacggttgtatgactcccgactagttttaccatctgattcttaccttcccccccactgtattgaagaatgttggagatcttttaacacgtactctgtatattttgacattcgtacctaccagaaaacaaactttagattgttagttgttgtgttgttaccttcagctactctttggatatttcatgactggtgacaaaattcccatgtcctgggaaaccctgtcaagcgataaataattggtgactgttaaatttcgcaatggaaaaaattgcaactcaaagtttaggagtttggcattggttttagaggactaagagagaggctatgaattctcaaagatactaaacctgtaatgggatggacttcttgctctgttgaaaaggcctggtctctggaagatgaacttaaaaccagcttctcaaggtggttcatttaccacacatacttcagtgctcttttctgatttcatgtcccttatcaaggtttatgatttggggaccctcaagatttaagtgatcatgg

SEQ ID NO: 6308 - DNA, 731 bp, Homo sapiens
  misc_feature 517: n = A,T,C or G
tgaaagaattcatccttggtaaattaggctaggtcttgtggcaagaggcacccaaagctaatgaagaagagtaaatgatatttgaccgttacatatgtatataaggacgaaaaagaaaatataccaataaacatcttcatcaatatggaattaaatacatttacctattttagagatattttaagtatgctagtatcaacataatgagaatagtattttactgtctatttttaatagaaaaacatgtatatatacatatctatatatatttaaggagcaccccttcccccatttgagtatgattactcaatgggaagcagtaatacaaatggaaaaattcttcctcctatattgaggaaagaagataaaataagattgagccatgtttagcactgagtattttaacacatgggttttttgtttgtatgtttgttttgtaataccatacttcagattacaatacccaaaattctaaggtcctaatgttaatgatagtatctcaatgtccattttcggnttggttcaacatgattgtcttcttttgcctctgtgtcacacgtagtcattcccgctggaaggtgcacgtatttgatagggccttggtgttgagtaagaggatgtatttcgcgacatgaacagcatagtagtgcacctcccattaagcagagagtagcagcagtccatccagtgtagagagcctgacacatttctacctgcattgactgcggcat

SEQ ID NO: 6309 - DNA, 333 bp, Homo sapiens
  misc_feature 247, 289, 294, 324: n = A,T,C or G
aaacagccatgtgcctaactgagaggaacctgcccatttacccactggatattgtccgaaaaatgcgagaccagcgcgccatgatggtgcagacatcaagccagtacaagtttgtgtgtgaagcgattcttcgtgtgtatgaagaaggtttagtccaaatgctggatcctagttaagacaactgtgaaaaagttcattcctctttcccaagggcatcctccttgaaagaggaggacagacctctctngaagcagcaagaggaaccagtaagcttgtgggaaaggaattnggcanctctgaacccagggcacttttaaacttctnttagaaaag

SEQ ID NO: 6310 - DNA, 168 bp, Homo sapiens
  misc_feature 54: n = A,T,C or G
ggcgagaggactgagtgtgctgagcccccccgggacgaacccccggctgatggngctctgaagcgggcagaggagctcaagactcaggccaatgactacttcaaagccaaggactacgagaacgccatcaagttctacagccaggccatcgagctgaaccccagcaat

SEQ ID NO: 6311 - DNA, 230 bp, Homo sapiens
tggtacgcctgcaggtaccggtccggaattcccgggtcgacatcatcatcatgatcgctcgacatcgatacgacttttttttttttttttttttttttttccccggggggaaaagggggccccgaaaaatttggatttccagggggggggttaatttttaaaaccccccttttggggtttttttccaaccctttaaaaaaaaaaggggcccccttaaaaaaaccaaattt

SEQ ID NO: 6312 - DNA, 582 bp, Homo sapiens
tcggcacgaggtccagaatgacaagatgcggactggaaaccttccagccaacatgaagaagaaaccgtgttttacagatcattccatatgaattcaacagagtgatcattccagttaagcggggcgaagagaatacagactatgtgaacgcatcctttattgatggctaccggcagaaggactcctatatcgccagccagggccctcttctccacacaattgaggacttctggcgaatgatctgggagtggaaatcctgctctatcgtgatgctaacagaactggaggagagaggccaggagaagtgtgcccagtactggccatctgatggactggtgtcctatggagatattacagtggaactgaagaaggaggaggaatgtgagaactacaccgtccgagacctcctggtcaccaacaccagggagaataagagccggcagatccggcagttccacttccatggctggcctgaagtgggcatccccagtgacggaaagggcatgatcagcatcatcgccgccgtgcagaagcagcagcagcagtcagggaaccaccccatcaccgtgcactgcagcgccg

SEQ ID NO: 6313 - DNA, 310 bp, Homo sapiens
cactagctcttaggtgttttcaatccctggcttctaaacctgaaaggacaccttttgcattcctcgcaagtcttttatttcagagccagagcctcctgctttgagacaaagccccatcacttcccttctccttccaagcctataaacctggtgccacttcgtgttgctccaggactccaccagggctcacttggtatggctgctcttgccttttcttggagtttgccgacccatgactaacattggaagtgagagaaatgagggcaggcatgagggtgtgtgttccacgtctgcagccctcctggccttc

SEQ ID NO: 6314 - DNA, 286 bp, Homo sapiens
tggtacgcctgcaggtaccggtccggaattcccgggtcgacatcatcatcatgatcgctcgacatcgatacgacttttttttttttttttttttttcccgggttttcccacccggcaggggaaaaaatggcctcccggcccccattttagggaggggcagggggtggaattcccccgaggaaccaagccttaaaaaccgaaaaaacggccccccttttgaaaaccccccaggggccccctttttgggtttttttccaaccctttaaaaaaaaaagggggccccctt

SEQ ID NO: 6315 - DNA, 289 bp, Homo sapiens
tggtacgcctgcaggtaccggtccggaattcccgggtctactactactaaattcgcggccgcgtcgacattgaatcaaactcttagacaagctggtgaaagttttaacgactgctggaggcaacatgcttccacactgacagaaatcatctttcaaaaatcctgcacatatctcaggcttatgaaacaaactaattcctaatagttggaaatgaattaaaagcttgcggtgagataaaagatagattttggctggatgtgatgactcatgcctgtgatccctacacttt

SEQ ID NO: 6316 - DNA, 464 bp, Homo sapiens; identical to SEQ ID NO: 1706

SEQ ID NO: 6317 - DNA, 517 bp, Homo sapiens
tgcaggtcgacactagtgggatccaaagaattcggcacgagggagcctcctcgggaccaggacttcagggccacaggtgctgccaagatgctccagggcacctgctccgtgctcctgctctggggaatcctgggggccatccaggcccagcagcaggaggtcatctcgccggacactaccgagagaaacaacaactgcccagagaagaccgactgccccatccacgtgtacttcgtgctggacacctcggagagcgtcaccatgcagtcccccacggacatcctgctcttccacatgaagcagttcgtgccgcagttcatcagccagctgcagaacgagttctacctggaccaggtggcgctgagctggcgctacggcggcctgcacttctctgaccaggtggaggtgttcagcccaccgggcagcgaccgggcctccttcatcaagaacctgcagggcatcagctccttccgccgcggcaccttcaccgactgcgcgctggccaacatgacggagc

SEQ ID NO: 6318 - DNA, 492 bp, Homo sapiens
cagctgcagcctgcaattcactcccactgcctgggattgcactggatccgtgtgctcagaacaaggtgaacgcccagctgcagccatgaagatctgtagcctcaccctgctctccttcctcctactggctgctcaggtgctcctggtggaggggaaaaaaaaagtgaagaatggacttcacagcaaagtggtctcagaacaaaaggacactctgggcaacacccagattaagcagaaaagcaggcccgggaacaaaggcaagtttgtcaccaaagaccaagccaactgcagatgggctgctactgagcaggaggagggcatctctctcaaggttgagtgcactcaattggaccatgaattttcctgtgtctttgctggcaatccaacctcatgcctaaagctcaaggatgagagagtctattggaaacaagttgcccggaatctgcgctcacagaaagacatctgtagatattccaagacagctgtgaaaac

SEQ ID NO: 6319 - DNA, 639 bp, Homo sapiens
gacagaggggcgctttgtgagcagatgcggagccgagtggagggcgcgagccagatgcggggcgacagctgacttgctgagaggaggcggggaggcgcggagcgcgcgtgtggtccttgcgccgctgacttctccactggttcctgggcaccgaaagataaacctctcataatgaaggcccccgctgtgcttgcacctggcatcctcgtgctcctgtttaccttggtgcagaggagcaatggggagtgtaaagaggcactagcaaagtccgagatgaatgtgaatatgaagtatcagcttcccaacttcaccgcggaaacacccatccagaatgtcattctacatgagcatcacattttccttggtgccactaactacatttatgttttaaatgaggaagaccttcagaaggttgctgagtacaagactgggcctgtgctggaacacccagattgtttcccatgtcaggactgcagcagcaaagccaatttatcaggaggtgtttggaaagataacatcaacatggctctagttgtcgacacctactatgatgatcaactcattagctgtggcagcgtcaacagagggacctgccagcgacatgtctttccccacaatcatactgctgacatacagtcg

SEQ ID NO: 6320 - DNA, 641 bp, Homo sapiens
cccttttgcaataagaagccagatggataaaggaagtgctggtcaccctggaggtgtactggtttggggaaggtccccggcccccacagccctctggggagcctcaccctggctctccccactcacctcagccctcaggcagcccctccacagggcccctctcctgcctggacagctctgctggtctccccgtcccctggagaagaacaaggccatgggtcggcccctgctgctgcccctgctgctcctgctgcagccgccagcatttctgcagcctggtggctccacaggatctggtccaagctacctttatggggtcactcaaccaaaacacctctcagcctccatgggtggctctgtggaaatccccttctccttctattacccctgggagttagccatagttcccaacgtgagaatatcctggagacggggccacttccacgggcagtccttctacagcacaaggccgccttccattcacaaggattatgtgaaccggctctttctgaactggacagagggtcaggagagcggcttcctcaggatctcaaacctgcggaaggaggaccagtctgtgtatttctgccgagtcgagctggacacccggagatcagggaggcagcagttgcagtccatca

SEQ ID NO: 6321 - DNA, 552 bp, Homo sapiens
acagaagggggaaggtgctgtgtaatcattaaggagcggaggcttttggagctgctaaaatgccggattacctcggtgccgatcagcggaagaccaaagaggatgagaaggacgacaagcccatccgagctctggatgagggggatattgccttgttgaaaacttatggtcagagcacttactctaggcagatcaagcaagttgaagatgacattcagcaacttctcaagaaaattaatgagctcactggtattaaagaatctgacgctgacctggccccaccagcactctgggatttagctgcagataagcagacactccagagtgaacagcctttacaggttgccaggtgtacaaagataatcaatgctgattcggaggacccaaaatacattatcaacgtaaagcagtttgccaagtttgtggtggaccttagtgatcaggtggcacctactgacattgaagaagggatgagagtgggcgtggatagaaataaatatcaaattcacattccattgcctcctaagattgacccaacagttaccatgatgc

SEQ ID NO: 6322 - DNA, 395 bp, Homo sapiens
ttcggcacgagtcgagttttttttttttttttttccgggtcaaaatttcccccggctttttaaaaaaagggttgaatgggaaccttttaccaattttttccccaaattttttttttaaaacccggtttttaaagtccaccccaatttccctttagggattgttccaacccatttttttccttaccggcttattaaatttttggccttattccccattccccatttttggttttaccacctccttccctttcccttggaaaggccccttgcccttaaccacccttttgtttgcccccacttttggttagggcccaaaaaagggcccattttggggatgttccctattgaaaaaatgtttttcccccgggatcttttttttttgatctatttaaggg

SEQ ID NO: 6323 - DNA, 494 bp, Homo sapiens
cctgtcggggtgtgcaaggtgggcctttgagaggcagctctggggctcaggcgactttcccccagggcccctccatggaaaggcgccatccagtgtgctctggcacctgtcagcccacccagttccgctgcagcaatggctgctgcatcgacagtttcctggagtgtgacgacacccccaactgccccgacgcctccgacgaggctgcctgtgaaaaatacacgagtggctttgacgagctccagcgcatccatttccccagcgacaaagggcactgcgtggacctgccagacacaggactctgcaaggagagcatcccgcgctggtactacaaccccttcagcgaacactgcgcccgctttacctatggtggttgttacggcaacaagaacaactttgaggaagagcagcagtgcctcgagtcttgtcgcggcatctccaagaaggatgtgtttggcctgaggcgggaaatccccattcccagcacaggctct

SEQ ID NO: 6324 - DNA, 558 bp, Homo sapiens
ccctgtttgcaacaaagtatgctttaaaatgtaaactgtggagccattttccttgcgttgtccagaaggaacttcgtcctgcgtgacgctggattaatcatgagagagctcgtcaacattccactggtacatattcttactctggttgccttcagcggaactgagaaacttccaaaagctcctgtcatcaccactcctcttgaaacagtggatgccttagttgaagaagtggctactttcatgtgtgcagtggaatcctacccccagcctgagatttcctggactagaaataaaattctcattaaactctttgacacccggtacagcatccgggagaatgggcagctcctcaccatcctgagtgtggaagacagtgatgatggcatttactgctgcacggccaacaatggtgtaggaggagctgtggagagttgtggagccctgcaagtgaagatgaaacctaaaataactcgtcctcccataaatgtggaaataatagagggattaaaagcagtcctaccatgtactacaatgggtaatcccaaaccatcagtgtct

SEQ ID NO: 6325 - DNA, 498 bp, Homo sapiens
  misc_feature 327: n = A,T,C or G
tcggcacgaggcaaggggctgcaaagcctccccacacatgaccccagccctctacagcggtacagtgaggaccccacagtacccctgccctctgagactgatggctacgttgcccccctgacctgcagcccccagcctgaatatgtgaaccagccagatgttcggccccagcccccttcgccccgagagggccctctgcctgctgcccgacctgctggtgccactctggaaaggcccaagactctctccccagggaagaatggggtcgtcaaagacgtttttgcctttgggggtgccgtggagaaccccgagtacttgacaccccanggaggagctgcccctcagccccaccctcctcctgccttcagcccagccttcgacaacctctattactgggaccaggacccaccagagcggggggctccacccagcaccttcaaagggacacctacggcagaaaacccagagtacctgggtctggacgtgccagtgtgaacc

SEQ ID NO: 6326 - DNA, 372 bp, Homo sapiens
acgattttcactgctacatgcatgccatccatgccatgatcaatgcactctacaactttgccaaaggctccttcacccaaagtgtccacgatttcatcgaacgtgactgatgacttgaacagtgtctattgcgcttccttttaggactgcttctcctgctgcggactgaagatttactgcagtggattcgatacccgctttcaatgtctctgtgataatgtctaggaacatatccttcacagtagtcattcctgtattcgtcaacgtatctccggtcccgataatctcgctcattcaaggaccttgcttctaaataatgactgcaaacacattaaaagatttcaaattattctcttcattctgcaataatgt

SEQ ID NO: 6327 - DNA, 550 bp, Homo sapiens
tcggcacgaggggtggttctttagatcacagggtcggaaggaggctgagaggcagcttcttgctccaatcaacaaggccggctcctttcttatcagagagagtgaaaccaacaaaggtgccttctccctgtctgtgaaggatgtcaccacccagggggagctgatcaagcactataagatccgctgcctggatgaagggggctactacatctccccccggatcaccttcccctcgctccaggccctggtgcagcactattctaagaagggggatggtctatgccagaggctgaccctgccctgtgtgcgcccggccccgcagaatccctgggcccaggatgaatgggagatcccccggcagtctctcaggctggtcaggaaactcgggtctggacaattcggcgaagtctggatgggttactacaaaaacaacatgaaggtggccattaagacgctgaaggagggaaccatgtctccagaagcctttctgggtgaggccaacgtgatgaaggctctgcagcacgagcggctggtccgactctacgcagtg

SEQ ID NO: 6328 - DNA, 488 bp, Homo sapiens
  misc_feature 79, 211: n = A,T,C or G
ccccatcaccttccgcatgaacgtggcgcctgcctgcctccccgagcgtgactgggccgagtccacgctgatgacgcanaagacggggattgtgagcggcttcgggcgcacccacgagaagggccggcagtccaccaggctcaagatgctggaggtgccctacgtggaccgcaacagctgcaagctgtccagcagcttcatcatcacccanaacatgttctgtgccggctacgacaccaagcaggaggatgcctgccagggggacagcgggggcccgcacgtcacccgcttcaaggacacctacttcgtgacaggcatcgtcagctggggagagggctgtgcccgtaaggggaagtacgggatctacaccaaggtcaccgccttcctcaagtggatcgacaggtccatgaaaaccaggggcttgcccaaggccaagagccatgccccggaggtcataacgtcctctccattaaagtgagatcccactc

SEQ ID NO: 6329 - DNA, 454 bp, Homo sapiens
aagatttacatacacatgttatatcatagtctcctcacaacatgtctaagaggtaggcacgtcattgttcccattttgcagatgaggaaactgaggttcagagagggcacttggcttgcccaaagtcacacagcagggagtggcagaggaagtcaggttgggtgaccccagtaactgctctcagaggctgggtgatgaccggcttcctggcttctctggaataaacctttgccaccacttcctgcatttcagcttcagtacaggcagagaatggggataggtgggggaatgaggtgagaggggagatgtttagaggtgtggagggcggcagaggtttgaacagtgcagacaaggggagagttcagccgactggggaggaagaggatggacgatggagcctctgggcatctggatcagcaggagcataacatctggatcagctggagcgtatgac

SEQ ID NO: 6330 - DNA, 80 bp, Homo sapiens
gggcctttttatcattgatgataagggtattcttcggcagatcactgtaaatgacctccctgttggccgctctgtggatg

SEQ ID NO: 6331 - DNA, 449 bp, Homo sapiens; identical to SEQ ID NO: 1715

SEQ ID NO: 6332 - DNA, 499 bp, Homo sapiens
tggatcccccgggctgcaggaattcggcacgagcacacatgccctcctggacaaggctaacatcccacttagccgcaccctgcacctgctgcgtccccactcccttggtggtggggacattgctctctgggcttttggtttgggggcgccctctctgctccttcactgttccctctggcttcccatagtggggcctgggagggttcccctggccttaaaaggggcccaagccccatctcatcctggcacgccctactccactgccctggcagcagcaggtgtggccaatggaggggggtgctggcccccaggattcccccagccaaactgtctttgtcaccacgtggggctcacttttcatccttccccaacttccctagtccccgtactaagttggacagcccccttcggttacaggaaggcaggaagggtgagtcccctactccctcttcactgtggccacagcccccttgccctccgcctgggatctgagtacata

SEQ ID NO: 6333 - DNA, 478 bp, Homo sapiens
tggatcccccgggctgcaggaattcggcacgagcctgcattaaaaatttcggttggggcgacctcggagcagaacccaacctccgagcagtacatgctaagacttcaccagtcaaagcgaactactatactcaattgatccaataacttgaccaacggaacaagttaccctagggataacagcgcaatcctattctagagtccatatcaacaatagggtttacgacctcgatgttggatcaggacatcccgatggtgcagccgctattaaaggttcgtttgttcaacgattaaagtcctacgtgatctgagttcagaccggagtaatccaggtcggtttctatctacttcaaattcctccctgtacgaaaggacaagagaaataaggcctacttcacaaagcgccttcccccgtaaatgatatcatctcaacttagtattatacccacacccgggtcacagcttcccttccatggtgt

SEQ ID NO: 6334 - DNA, 505 bp, Homo sapiens
  misc_feature 248, 384, 460, 465, 485: n = A,T,C or G
tccgctctgtcctgggtgaccagggtgtctgccagcacttggacacgtcagaccccaccacctcctgttgggttatctgcttttccctcttgggggggtggggagcatttctggagtaggaaaggactggggcatggggcggggtgcggagggcctggagagaggccatgggtcccggggctggaccacagcggggctgtgggaagggtcctaaccttcacaggcccccttcctggttaaggtttttnttttgctgaaagggccacaggatatatttgtggtgtaaaccccagaggctgccactgctttcctggggagcttggaggccacacccatgtgactgcagggcaggatggtggacttctaggcccctacagcctcggnagtgtcctcagatccggatgtggaaagtgctgaggaagtcaggggccttggaaatcatgtcctcgaagtagcaaanccaanttgccgtcacatccaaagtnacctcctcaatgaccttgtt

SEQ ID NO: 6335 - DNA, 549 bp, Homo sapiens
  misc_feature 140, 416: n = A,T,C or G
tcggcacgaggagagccccaggccagccctggtgagatccgcctccagtgacaccagcgaggagctgaattcccaagacagccccccaaaacaggactccacagcgccctcgtctacctcctcctccgaccccatcctanacttcaacatctccctggccatggccaaagagagggcccaccagaaacgcagcagcaaacgggccccgcagatggactggagcaagaaaaacgaactcttcagcaacctctgagcgccctgctgccacccagtgactggcagggccgagccagcattccaccccacctttttccttctccccaattactcccctgaatcaatgtacaaatcagcacccacatcccctttcttgacaaatgatttttctagagaactatgttcttccctgactttanggaaggtgaatgtgttcccgtcctcccgcagtcagaaaggagactctgcctccctcctcctcactgagtgcctcatcctaccgggtgtccctttgccaccctgcctgggacatcgctggaacctgcaccatgc

SEQ ID NO: 6336 - DNA, 459 bp, Homo sapiens
tcggcacgagaatacttcttgaaaacttagtttactatacatcttgccctattaatatgttctcttaacgtgtgccattgttctctttgaccattttcctataatgatgttgatgttcaacacctggactgaatgtctgttctcagatcccttggatgttacagatgaagcagtctgactgtcctttctacttgaaagattacaatatgtatccaaatggcattcacgtgtcacttatcaaggtttgctgatgcttcaaacagcttagtttgaggtttcctggacgtggaaacaagtatctgagttccctggagatcaacgggatgatgtgttacagctgcctccctcttcatgcaatctggtgagcactggtgcatgcggcgagccatataaacttgccagttatataacttgtctttggcttttcttcatctgtaaaacaaggataatactgaactg

SEQ ID NO: 6337 - DNA, 484 bp, Homo sapiens
  misc_feature 245: n = A,T,C or G
tcggcacgaggatgaagcccctcttccccggcatgggcttcatcttccgtaactgcccctcaaacccgggatctccccttcccccggccagccccaggccaccacctcggaaggatccggaagcctccaaggcctccccactgccattcgagccatggcagcgcaccccaccatcagaagagcctgtgcttttccagagctccctgatggtctgagggtcccacccctgccccactttaccatanagaccagtgccttggtggcaggtccctccccaggtcccctgagatggggtatggaggggcccttccctctcggccttcgagcactttctttcacttactgtgtcaaagccctgggtcctctttttgatgggcaccggcccctctgaacgtgatgggacctgccttctccactagtagctgggcagctcacaattcacacctgtgtacctgccacatccctcacttggtggaaaacaccc

SEQ ID NO: 6338 - DNA, 495 bp, Homo sapiens
  misc_feature 365, 404, 428, 436, 451, 485: n = A,T,C or G
agtagagacagggtttcaccatgttggccaggctggtcttgaactcctgagcttgtgatccacccgcctcagcctcccaaagtgctgggattacaggcgtgacacctgcacccagccttaaggtcttataactagtaaatatctgcattaaagaacgagttgaatgaaaattctgataaattcctacttaaagtgtatccaaagaaaacggaaaaagtctaggagttagtgatattagattcagaagaatgagctttgtaattcttaaaaattagtctcagaatagaaaggattttaaaagtaattgagtaaagtcataggaaatgtgaccatataaaggaatggctctaaatgtattaatcccngaaggaagcaacaggttaaacagtaagaggtaagaaacnaaaaataaggaacgagagagaagngagtgacnggggagagagagacngagccggggaaggagagaatgggagggaaatccnggaaacgggg

SEQ ID NO: 6339 - DNA, 562 bp, Homo sapiens
tcggcacgaggtgctctctccatttgtcttaatttttttttaactcacttgtggcaggtctttattgaataaaggaggaataaacctagacagggagttagaaatgaaagacatttcaagacagttcaagggttatgttggtgacacttcttgtcttccagacagttttgaaagcacagatcttgcctcttgtgcttgttaaaaaatctgtgatacttctctgaagattttataattaaataagtgaaccattaccatgaccttttataaaagtgctgccctatttgaagtattgggttttttctcatgatgagctttgttagacttggtactgaaaaaatcagtagtttttttccttctattttaaaggcaaagaaatgcttgcttcagctaggcatggtggctcatgcctgtaattgggaggctgaggtgggtggatcacctgacgtcaggaattggagaccagcctggccaacatggtgaaaccccatctctactaaaaatacaaaaagttagccaggcgtgatagcgggtgcctgtaatcccagctgctcgggaggct

SEQ ID NO: 6340 - DNA, 144 bp, Homo sapiens
ccacgtcctaccacatgcccttggtccagcgtgcctcctcttcgcccagggcatacgaccttgcataagacagtggaatcagcctgtatgggcagacccctgggacgcacacctgggccctgctgctggctgcacttgcctgcc

SEQ ID NO: 6341 - DNA, 552 bp, Homo sapiens
  misc_feature 128, 473: n = A,T,C or G
cacgcttcctgctgcgggagacggtgagccagctgcaagcccttcaaagctcgctggagggggcgtcagataccctggaggcccaggcccatggctggcggtcagatgcagagagcgtggaggcgcanagcaggctctgcggcagccggcgggcaggacgccgagccctgaggagtgtcagccggtcatccacctggtcccccggctcttctgacacagggcgcagctcaaaggccgagatgcagtggcggctccaggtgaaccgcctccaggagctcatcgaccagctcgagtgcaaggtgagggccgtggggccagggccccacaagggaggaccctcctggtatccaccagagccaggcccatgctggaggcccggcccacactctgtgccctcacaggccccccggctggaacccctgcgtgaagaggacctggccaaggggcctgacttgcacatcctcatggcccanaggcaggtccaggtggcagaagaaggcctgcaggacttccaccgagccctgcgctgctatgtggacttcacaggggccc

SEQ ID NO: 6342 - DNA, 248 bp, Homo sapiens; identical to SEQ ID NO: 335

SEQ ID NO: 6343 - DNA, 278 bp, Homo sapiens
tcggcacgagggttttttttttttttttttggaattttaaaaaaaaacggggttccaccatgtaaacaaggagggtttttatctccggaccttggaacccacctgcctgggcctccaaaagggcgggaattacaggctttggccaccgcccccggaattttttttttttaaaaacggatttttttttttgttccccaggtggaagggaaggggcccattttaatttaatggaacccccaccctccggggttaaaccctttttctggcctaacccccca

SEQ ID NO: 6344 - DNA, 544 bp, Homo sapiens
  misc_feature 464: n = A,T,C or G
accatcaagcgggccccgttcctagggccactccccactgaccctccagcagaggagcctctgtccagtcccccaggaaccctgcccccacctccttcaggccccaacagctccccactgctgcccacggcctgggccaccatgaagcagcgggaggatcctgagaggtcatcctgccacgggctccccccaactcccaaggtgcatatgggcgcctgcttctccaaggtcttcaatggctgccccctgcggatccacgctgctgtcacctggattcaccctgttactcgggttcctggtggtaggggccgaggaaggcatctacacactcaacctgcatgaactgcatgaggatacgctggagaagctgatttcacatcgctgctcctggctctactgcgtgaacaacgtgctgctgtcactctcagggaaatccacgcacatctgggcccatgacctcccangcctgtttgagcagcggaggctacagcaacaggttcccctctccatccccaccaaccgcctcacccagcgcatcatcccc

SEQ ID NO: 6345 - DNA, 419 bp, Homo sapiens
  misc_feature 157, 280, 380: n = A,T,C or G
cttccgtgcccaggtctgatacacctggtcccgctggtcctgcagggctcgaagctcttcctggacctccttggtgggtgtccctgcagcaagaagtgcctgctgccccagctgggtggcctgctgccacagcttctcccgggcctccagctccgcncggagccactggtgggcactgagcttcagcaagccactgctaggctcttgcgaactctcctccacctgcaggtcctggcgcacgcgggctgcccaggaggcatagtcacgcaccgccgtgganagcgggccaaggaggcgtgccgctccagctgggccctgcgctgctccatgcgtcgctgcagcactgcccacgcctgcgtcacagttgctgcctctgctgnaccgcatgggcctgaagcccggggacacagcttctggaa

SEQ ID NO: 6346 - DNA, 474 bp, Homo sapiens
  misc_feature 321, 410: n = A,T,C or G
tcggcacgagggagactccagcccccgctgcaaaccccccagcccctactgcaaaccccacgggtcctgctgcaaaccccccagccactactgcaaaccccccagcacctgccgcaacccccacgggtcctgctgcaaatcccccagcccctgccgcaagctccacaccccatggacactgtcccaatggggtaacagctgggttgggcccagtggctgaggtgaagtccagcccagtgggagggggtccccgaggacctgctggccctgccctcggcaggcactggggagcaggctgggatggcggccaccactacccanagatggatgcgcggcaggagcgggtggaggtgctgccccaagcccgggcctcctgggagagcctggacgaagagtggagggcgccccangcaggcagcaggaccccagtgcccagcacagtgcaagcaaacacctttgaatttgcggatgctg

SEQ ID NO: 6347 - DNA, 567 bp, Homo sapiens
tcggcacgaggcacgtccggaggcctagccgtcgcgtacctaggatgccgcgtggaagccgaagccgcacctcccgcatggcccctccggccagccgggcccctcagatgagagctgcacccaggccagcaccagtcgctcagccaccagcagcggcacccccatctgcagttggctcttctgctgctgcgccccggcagccaggtctgatggcccagatggcaaccactgcagctggcgtggctgtgggctctgctgtggggcacacattgggtcacgccattactgggggcttcagtggaggaagtaatgctgagcctgcgaggcctgacatcacttaccaggagcctcagggaacccagccagcacagcagcagcagccttgcctctatgagatcaaacagtttctggagtgtgcccagaaccagggtgacatcaagctctgtgagggtttcaatgaggtgctgaaacagtgccgacttgcaaacggattggcctaatgaagaagttcaacctggagagatggaaaatcagctctcataactaagttaatttagtataaaaata

SEQ ID NO: 6348 - DNA, 552 bp, Homo sapiens
  misc_feature 396: n = A,T,C or G
tcggcacgaggtccagcccctccaaacactcaaaccccaccctcccaggcactgactcccttccctgtagtcccccagtctccaattcctacactcaggcagaccctatggcccccagaactccccacccaagtcctgcccattccagtaggaaacccctcacaagctgccccagatccctcagagtctacggttcagagtctaagccccactccctcacccccaacccctgcaccccagcattcagacctttgcctggccatggctgtccagaccccagtcccaacggcagccggagggtctggggacaggagcctggaggaggcactgggggccctaatggctgccctggatgactaccgtggccagtttcctgagctgcagggcctggagcangaggtgacccgcctagaaagtctgctcatgcagagacaaggtctgactcgcagccgggcctccagtctcagcatcactgtggagcatgccttggagagcttcagcttcctcaatgaagacgaagatgaagacaatgatgttcctggggacaggcct

SEQ ID NO: 6349 - DNA, 503 bp, Homo sapiens
ttcggcacgagggccatgagccagctgcccctcttcggctacaccgtctatggggtgctgcgagtgagcatgcaggccctgtccggacccactctcctggggctcaaccgccagcatctcatcctcatggaccccagctcccaaagcctgtactgccgcattgccctgaagagcctgcagcggctccacctgctaagccctctggaggagaaggggccccctggcctggaagtcaactatggctcagctgacaacccccagaccatctggtttgagctgccacaggcccaggagctgctatacaccactgtcttcctgatagacagcagtgcctcttgcactgagtggcccagcatcaactgaaaggagtgcaggccggggagagaagaagatgaggcctcccccggcccaagtctcacccacatggtctgccttggatgctatcagatcactgttctagaacctgcctcagcacagcccagccggcccacatgcaggccatg

SEQ ID NO: 6350 - DNA, 581 bp, Homo sapiens; identical to SEQ ID NO: 1728
  misc_feature 133, 259, 321: n = A,T,C or G

SEQ ID NO: 6351 - DNA, 474 bp, Homo sapiens
  misc_feature 79: n = A,T,C or G
tcggcacgaggaaaacaacatcctgaaggaagggcggagctggcccacagccccctgcctgccaagtacatcgacctanacaaagggttccggaaggagaactgcaaatagggaggccctgggctcctggctgggccagcagctgcacctctcctgtctgtgctcctcggggcatctcctgatgctccggggctcaccccccttccagcggctggtcccgctttcctggaatttggcctgggcgtatgcagaggccgcctccacacccctcccccaggggcttggtggcagcataacccccacccctgcggcctttgctcacgggtggccctgcccacccctggcacaaccaaaatcccactgatgcccatcatgccctcaaacccttctgggctctgcccgctgggggcctgaagacattcctggaggacactcccatcagaacctggcagccccaaaactggggtcagcctc

SEQ ID NO: 6352 - DNA, 570 bp, Homo sapiens; identical to SEQ ID NO: 1729
  misc_feature 431, 443: n = A,T,C or G

SEQ ID NO: 6353 - DNA, 159 bp, Homo sapiens
gcaacacccatcatcaccaaactttaccaaggtggtcctggcggcggcagcggcggcggcggttcaggaccctacgggggacccaccatcgaaaaactggactaagcttgcactcaagtcatcgtaaacctctttgcctttctctctctctcttttttt

SEQ ID NO: 6354 - DNA, 394 bp, Homo sapiens
  misc_feature 250, 287, 321: n = A,T,C or G
acagctcctgcatcagcttctcatactggaaggagacagtgtccatcctgttgaacccggaccggcagtcaccctctgctctcgttagctacattgaggagccctacatggacatagacagggacttcactgaggagtgaccttgggccaggcctcgggaggctgctgggccagtgtgggtgagcgtgggtacgatgccacacgccctgccctgttcccgttcctccctgctgctctctgcctgccccangtctttgggtacaggcttggtgggagggaagtcctanaagcccttggtccccctgggtctgagggccctangtcatggagagcctcagtccccataatgaggacagggtaccatgcccacctttccttcagaaccctggggccc

SEQ ID NO: 6355 - DNA, 215 bp, Homo sapiens
tgtactgcaagtaaaatttcactttttgaaactatagagagatccctttctgattagcctacagaacttaaagtgagggaaccatttcctctcacatacaaagaggcctgggatattacgactttggggtttgagagcatcatggggcagacagatggtggatggtctggacaagaagcgagtaagccactgcggttggtcatactgaagggaat

SEQ ID NO: 6356 - DNA, 457 bp, Homo sapiens
  misc_feature 2, 4, 16, 41, 43, 45, 47, 49, 186, 313: n = A,T,C or G
gncncgctacaggacnacgccctcgcgacgctgcctgtgcngngngncncacgctccgcatcagctcggtgtccacgggtctgcacagcctgtccaccttccgcggcctcatgaagcgcaggagctccgtgtgactgccccgagggacctggagcacctgggggcgcgggcgggggacccctgctngggaggccaggagactgcccctgctgccttctgcccagtgggaccccgcacaacatccctcaccactctcccccagcacccccatctccgactgtgcctgcttgcaccagccggcatgatggcggcntcttgaggacccctggggcccccatcggagccctgcaaattccgagaaatgtgaaactttggtggggtcagggaggaaaggcagaagcttgggagcctcccttccctttgaaaatctaagaagctcccagtcctcagagaccct

SEQ ID NO: 6357 - DNA, 588 bp, Homo sapiens; identical to SEQ ID NO: 1734
  misc_feature 95, 429: n = A,T,C or G

SEQ ID NO: 6358 - DNA, 381 bp, Homo sapiens
ttcggaacgaggcctcgtgccgctttttttttttttttccttttaacaaatttttttttcccgttttttatgggataaaaacttttaaaaaaactttctaacctacctttctttttaaaggaaagggatccaatttccaaatattcctaccctaacctttggctttcttttaaaaacccaattttctaaaagttggttttttttcctcaaaccaaaaatacccgggtcaacatttttaccgccccaacaaagggttgaaaaaccaaatttttttttgtccaaaattaaataacaaaaaaggtttcccttgcttttatttaaaaaaccaaaattttgatttccttagggattctaaaaaaaatttcccaggggggggggaaa

SEQ ID NO: 6359 - DNA, 507 bp, Homo sapiens
  misc_feature 428: n = A,T,C or G
acaagtcccaccaaccagagagagtcgggtgaaggtcctgagaaaactggccgccactgcaccagctttgccccaacctccctcaacccccagagccaccacccttcctcctgccccagccacaacagtgactcggtccacgtcccgggcggtaacagttgctgcaagacctatgaccaccactgcctttcccaccacgcagaggccctggaccccctcaccctcccacaggccccctacaaccactgaggtgatcactgccaggagaccctcagtttcagagaatctttaccctccatcccggaaggatcagcacagggagaggccgcagacaaccaggaggcccagcaaggccaccagcttggagagcttcacaaatgcccctcccaccaccatctcagaacccagcacaagggctgctggcccangccgtttccgggacaaccgcatggacaggcgggaacatggccaccgagacccaaatgtggtgccaggtcctcccaagcc

SEQ ID NO: 6360 - DNA, 474 bp, Homo sapiens
cttggactttataacaaaatactaaaagtgttgttgctgttggcctgggggcctgtacttggcccacgggacagatcagcttcccagcctcctgtaccttccacccgtgtgtgcacagacagtcattctcctcctcctgtccccatgtgtcctaaccaccccctcttcaagagctgactgccaagtccattccttcttctgctgggcacacacaggccacactatctttctgacggcctgcggaggacttttcatgggggatgatcctctagggggtgaaataaagcacatggcccacgctgggagacataaatcccacgatgttggatgtgtggctgcctctcttggggaaagggtgggtaccctccaacaactggacgctcacctgataagccttgccaaagccaggggctcccaacccagagtgtgtaagaatcccctggtggggtgggggtgggatcccaggggcttgtc

SEQ ID NO: 6361 - DNA, 443 bp, Homo sapiens
gtgaagccaccatccaggacgtgctgccacgacaccagctcaggaacgcagacgtggagctgcagcagcgtgctgtggagtacctgcggctcagcaccgtggccagcaccgacattctggcgaccgtgctggaggagatgcccccattcccggagcgggagtcctccatcttggcaaagctcaagaagaagaagggccccagcacggtgacagacctggaggacaccaagcgggacaggagtgtggacgtgaacgggggtcctgagcctgccccagccagtaccagcgccgtgtctacgccttctccgtcggcaacctgctgggtctcggggctgcccccctgcccccgcggctccccaccctcctccggcggcaggggctgctccgtggacgtgttctcagactcggcctctgtggtcgcgcctctcgctcctggctccgag

SEQ ID NO: 6362 - DNA, 483 bp, Homo sapiens
gaactcggcagtcctttatttagatcaatgcggggctgaggggccctcattccactgcagggcaaagggggaccaggcccaaggaggcctccttctgcccaaggtctggaggcagagaggggctcgcaggcggcccgagggcgcgcatccaggccccggagcgcaaagccttcctcccagggggaggcagtttcccatccaccgaccaggtttccccggagagtcccagcacaaaagcagcagcgggcggtggcctagaaggctcagagcgcacgcagggggacacaggcggggagctcactcctgggcgagcatcctcgcgaactcctcgtagttcacccgcccgtcctggtccacgtcggcctcgcggatcatggcgtccagctcctcctgcggcagcggctgccccaggcccgccatggcccgcctgagctcgtccacggtgatgtggccgtcgccatcctggtcgaaggcgcggaaagc

SEQ ID NO: 6363 - DNA, 528 bp, Homo sapiens
  misc_feature 417: n = A,T,C or G
tcggcacgaggctgaagactgtgattacatgcacctgccttagaaggtaggattttcttcccaggacctcctatcaccctaccctgcttcttgaggtccctggagccccaggtgggctgaggggcagggagccggctgtgcccagtatgcctcctggaccctccagttctgccacaggtctgccgatgccctgtccactgcctacacatgacagacaagtaaccccctcatgggggatggggacctacctggctcctcagccagcacccagcttaacccctgccatcccatgctgggccctccaggccaagagtctcagctggccgagagtccaggccttgcctcccccgaccgccatggagggggcagcccggcacagctgctgggagcccttgtgtgtctggtcacactttttangcgtcacgccaaaggccagcctcctggccccaatacccattttggaagcccctgtggccgtgtggatgtcggtaacagttgtataaaataaattctatttatcgctattgt

SEQ ID NO: 6364 - DNA, 518 bp, Homo sapiens
  misc_feature 91: n = A,T,C or G
tcggcacgagggccgtggagccgcatccactgtggattataattgcaacatgacgctggaagagctcgtggcgtgcgacaacgcggcgcanaagatgcagacggtgaccgccgcggtggaggagcttttggtggccgctcagcgccaggatcgcctcacagtgggggtgtacgagtcggccaagttgatgaatgtggacccagacagcgtggtcctctgcctcttggccattgacgatgaggaggaggatgacatcgccctgcaaatccacttcacgctcatccagtccttctgctgtgacaacgacatcaacatcgtgcgggtgtcgggcatgcagcgcctggcgcagctcctgggagagccggccgagacccatggcaccaccgaggcccgagacctgcattgtctcctggtcacgaaccctcacacggacgcctggaagagccacggcttggtggaggtggccagctactgcgaagaaagccggggcaacaaccagtgggtcccctacatctctc

SEQ ID NO: 6365 - DNA, 578 bp, Homo sapiens
  misc_feature 6: n = A,T,C or G
ggcacngaggggatgcagaccataccctttgtgctctcagccagccttcatgggggcgacctggtggtgtcctaccccttcgacttctccaagcacccccaggaggagaagatgttttctcccacgcccgacgagaagatgttcaagctgctgtccagagcctacgctgacgtccaccccatgatgatggacaggtcggagaataggtgtggaggcaatttcctgaagagggggagcatcatcaacggggcggactggtacagcttcacgggaggcatgtccgacttcaactacctgcacaccaactgctttgagatcacggtagagctgggctgtgtgaagttcccccccgaggaggccctgtacacactctggcagcacaacaaggagtcactcctgaatttcgtggagacggtgcaccggggcatcaaaggtgtggtgacagataaattcggcaagccagtcaaaaacgcccggatctcagtcaaaggcattcgcacgacatcaccacagccccagatggtgactactggagactgctgcccccaggtatccacattgtcattgcccaagcccct

SEQ ID NO: 6366 - DNA, 527 bp, Homo sapiens
tcggcacgagggtggaagggagtgtaaaatacctcaaaaggtgtaggcatgggttagccgctgcagcccccactgtgcaaaccttaagggtgcatgtcttccaacagtggaggaaggccctgtcttcgccatgtgcatggcgggtgctcatgaccaggcgacgatggctaagtggatccagggcctgcaggagaccaacccaaccctggcccaaatccccgtggtcttccgcctcgccgggtccacccgggagctccagacatcctctgcagggctggaggagccgcccctgcccgaggaccaccaggaagaagacgacaacctgcagcgacagcagcagggccagagctagtctgagccggcgcgagggcacgggctgtggcccgaggaggcggtggactgaaggcatgagatgccctttgagtgtacagcaaatcaatgttttcctgcttggggctctcttccctcatctctagcagtatggcatcccctccccaggatctcgggctgccagcgatgggcaggcg

SEQ ID NO: 6367 - DNA, 507 bp, Homo sapiens
ggtgcggcccagcagccacaaagctcccgctgccattgctccctgtactcccgccgtcactgccgctgtccaacccctcccccggggcttgcgcggcggctcccacacccctcggcccgtgtacgcgctctgcacctgcctgcccgaaaacatgttgcagacaccagagagcagggggctcccggtcccgcaggccgagggggagaaggatggcggccatgatggtgagacccgggccccgaccgcctcgcaggagcgccccaaggaggagcttggcgccgggagggaggagggggctgcggacccgccctcacccggaaaggcgcgagggccttggcggccaaatccttggcaaggcgcagggcctaccgccggctgaatcggacggtggcggagttggtgcagttcctcctggtgaaagacaagaagaagagtcccatcacacgctcggagatggtgaaatacgttattggagacttgaagattctgttcccggacatcatcgca

SEQ ID NO: 6368 - DNA, 562 bp, Homo sapiens
attcggcacgaggctctcaagccaaattcgcctccacccactccctctgaagaactgggcatttgccaaagtaaccactggagtcatctaatggccctccccctccccaggtttcccacagctttcagggacagtgggcaagaggacacccccccccaccacctcagtggaacacaccattctccccccctcaacagcacactcagtgcagcaagactgacccctgaccccctcccagccctccctaccttggacaggaaggaagtaatgcaccttctcttgctgattatttatttgtttggagagacagaaatgtaaaagtgtatctagaaatatctatatctctatatatttttaactgactctttggaatcccctggggtggggtgaggggtaagtttaggctttcgcggaggggaggagacatggagcctgggaactccttgttctcccctctgctgcctctccccaccccttaaagcagttggtagaaggaatggtatttgtatggggggagggaggctggaatggagaatctggattctctcctcttccccattct

SEQ ID NO: 6369 - DNA, 655 bp, Homo sapiens
caaatcatcttttattaatataaaaagggcatatttagcaaaagacacacagataaaagagtcactatggctcaggacacaaggcagggaggtgccaggcctgtgcccctgctgggggagaaggaggctcgggacaaagtgggagaagtgctgggaagggctgagcggtaggggccacaaaagttccggtgggcaacactgtcggcaggtcatgggtgggactcatggggacctcgctgctaactcttgttgtgggggggtgtccttagtgctggcacctggagggccactccttggttcctggaggggacccaccaagggacacaggacaggaagcccaggatggttagtgcaactcgggatgaaggccagggagaagcgggtgctctgcagtggccggataggtccagacgctgaggccgaggcgcttcctgttacgtgcgggcgttccctctgtctctgccaggcactctctgactagggcgctccatggcgctcttgctgccagcataggtaggccggatctctttgcccatctcctctatgactgacagcaggtccgtgtaagtgctctgggagcccttggcgccgggtgcttcatcgcctgcacgtagcccatggaaggcggttcaaagtcgttaacagccggtctgaa

SEQ ID NO: 6370 - DNA, 471 bp, Homo sapiens
gaacccgggggtccgcctgtccttgtagtcccctatcccatcctggcctcgggagagactgccaaggagggcaagacgtacaggtgggggtcttggcgggatggggtccgagtgggcttggggctggggcttgagcagggctgctccaggagcccagcagcggggctgaaacaggacccttaggccgaggggcagggctagggtccagaggggcggggcttctggagagccccacccacatcccaagtcccagttcggggagggctgctggggaggggaatagaggcttggacccttaggtgtggtctgtggctggcagcacccccacagcctggggttgtgagagtcggtttcctcctccctttaagcagtgttctcaaccctggccaccttagaatcacctgaagaggccgtgcacaatggctcatccctgtaatcccagcgctttgggaggccaaggcgggtggatca

SEQ ID NO: 6371 - DNA, 358 bp, Homo sapiens
  misc_feature 91: n = A,T,C or G
gctttttttctagttttatggacttgattactgtaataatgtcttgtttttagccatgtaactacaaacagatattctcttgatgtcttantaaatttgcatttgatatatcattgatgagattttgttgttatgtaatattctttggctacgcatctgtccagcatcttattaaccataatactgtgatcattatttggaaatatgtcctatggaaagaataaaagcatgtacttcacagctagcatgttcacagatttgaaagaagtttcattaaaagcaccattgctttctgtactgcgtcagtgcctcattgtatcatcctacttgtgttttgctcaataaatgaataaaagac

SEQ ID NO: 6372 - DNA, 639 bp, Homo sapiens
  misc_feature 260, 521, 561: n = A,T,C or G
cggatccatcgatggatccgacaaaaggcatttcagcgcatcttcccacattcgcagcgaattcatttccaaagaactgaaagagaagcagcgcttggttcatgccatccgagaggatgatgaagttcaggttgtgggaggacactgtaagggttagcaaactgtcatagtccgcgtgtacgggacagctgtcatctgcatccagcgggtgcagtggggaaaggctaatggcatatttgtcatgtgagcgttcgccctancaaggtacggtggtcatggctaggccaaagctggacaaagcaaaaggaaatctgagtggaaagccacatctcaccaaacaagagaaaaagggcaaataggaagaaacgattgagatgcagaaatagggtaaccttacatacaagcttccaaaaacgaaacgaaggggacagatcggggggaagccaggtgagggggttcatgacttcttcggttttttttgggcggggtgggcggttacacagtttcgccctatcgcctangctggcgtgatctcggctcactgcaacctccacctcccangttcaagcgattctcctgcctcagcctcctgaatagctggggttacaggcgcactccaccatgcccggctaatttttt

SEQ ID NO: 6373 - DNA, 555 bp, Homo sapiens
tcggcacgaggaagtgagagcggaggcagggtcgctcagggttctacccacacgctgctgttggtcacccgggccccgaaccagcccttccagtagacggagtcctgccccccgtgctcgaagcggacgaagcggacgcccggcccgtagtcggtgaaggtgtgggagatctccatccagcccccgccgtcactgtcttggggcactgccacctgcccgctgctgaactcagccagcacgttctcgtgctcggacagtagcttaacggtgagctcgtagaggcaaccagcgtcgctgcggcccgagtaccagtccttcaccacgatggccggctgagtcgtgtccagcagctcctcccagtagccctcagcctgcaggtcaatgacctgtgctttgcgacaccactcaaaggaggaggcgaagtacttcttgacgctctcatcgtgggtgaactccaccccactgtctccaggcagctcctccaccctccagccgtccccaccatgctccacgtcacaccagccttccaagtcctcttccccacacgggttacgc

SEQ ID NO: 6374 - DNA, 544 bp, Homo sapiens; identical to SEQ ID NO: 1741

SEQ ID NO: 6375 - DNA, 669 bp, Homo sapiens
gagataaataaaggcctttatatacacagaagcatgacgcagcacgggcaggggggctggcagctgcagcagtgggcttggcaggtaaggcagggccaagtgctcctgtcaatgggagaagatcccccggaaccgggctttgtcctcttcgtccttctgccggatccgtgcctccagggcccgcagctctcggctcaccacaggcgccagggctgggtccagctccagcactttggcaaagtcagcctgggcctcctgggcattccacacggccgcgtgggcattgcccgctatgaagtaggccttgacgttgtcgtcgtacttgttgaggatggaagagcagtggtccagcacctcgtagtactcctcgaccaccagcttgcactggcagtagttgagcagcagcggcgtgatctgcttgtcaagctggatccattcaggggacccaggctgttccttcatctgcaggttcttgaggcaggcaatggcatcgtagtacttggcagcagcctccttcacatgcccctcgcggtacaaccggttgccctcctggtggataagtggcactgcatttgccttctcttcgtctgtcatggcccatgggtcctgctggtacgtggcagggctctccaccttcaacatctcccatgtgaaagatgagggggcggg

SEQ ID NO: 6376 - DNA, 517 bp, Homo sapiens
tcggcacgaggagagaaccaatggcagaaggaggagtgtagagcttacatgcagatgctgaggaagttgttcacagcaatccgtgccctgttcctggctgtctgtgtcttgaaggtcattgtgtccttggtttccttgggagtaggtcttcgaaacttgtgtggccagagctcccagcccctgaatgaggaaggatcagagaagaggctactgggggagaattcagtgcccccttcgccctctagggagcagacctccactgccattgtcctgtgagccgccaaagaccccacggggtgcccgcatgtccctgtctagggcagcccagggcccccactcctggctcctcacacttgcctcccctatggccgctctccagaccctcctcctttcttctcctcacatccgcacctgctgttcccactccggggttctcaagtccatgaacagatattgttgcattttccacaatgctgattaaacataataaacaatccagaaaagcagttttgcccag

SEQ ID NO: 6377 - DNA, 512 bp, Homo sapiens
tcggcacgaggttttttttttctgacagcaatagatttattaagtatccccgaaatataaacacaaaccagtaaaaaacaaaaccgtaaaacgtcaggcctggagctgcaataagacagaaacaggaccagctcacacgtggcctaggtggggaggacgaggccataaatactgcaggagggcggcaagggacccctagggcgaggggaaagcagggtgtcggcagcaaaatggctccgggggtttaaacactgctggcttcggccccggccgccacctgcctctcactccagctgcgagcagcttcacttggggccctgggcctccgactcctcctcgtcgtcttcgtacatctcgccctcttcctcggccgtggcgtcctggtactgctggtactcggacaccaggtcgttcatgttgctctcggcctcggtgaactccatctcgtccatgccctcgcccgtgtaccagtgcaggaaggccttgcgccggaacatggccgtgaactgctc

SEQ ID NO: 6378 - DNA, 569 bp, Homo sapiens
tcggcacgaggccggtttctctgctgactgcagacccagtctcggccctcctcggactcctgctcagtccctatgacgggcgcacgtgggcaggggctggaggtggtgcgctcgccgtcgccgccgctgccgctgagctgcagcaattccaccaggtcgctgttgtctccccttggccaccagagcttccagtttgacgaggacgacggtgacggggaggatgaggaagacgtggatgatgaggaagacgtggatgaagatgcccatgattcagaggccaaagtggcgagcctgagaggaatggagttacaggggtgcgccagcactcaggttgaatcagaaaataaccaagaagaacagaaacaggtgcgcttaccagaaagccgcctgacaccatgggaggtgtggtttattggcaaagaaaaagaagaacgtgaccggctgcaactgaaagctctagaggaattaaatcaacaactagaaaaaagaagaacgtgaccggctgcaactgaaagctctagaggaattaaatcaacaactagaaaaaagaaaagaaatggaagaacgtg

SEQ ID NO: 6379 - DNA, 472 bp, Homo sapiens
ttttattgttattatttatttttattttttacaaaacaggagaaaagagtgaatcgggttgggggaggtgacacatttctccacaaaggtacaaaattgcctatagaaagtcagcttcggaatgccgagcccaggctgctgagatgaggcgttcctgggcatccctctcccaaatgtccttcacatctggctggggtcactcccacattgagggcagccccccgaggtgagatggagtggcctccttcagcccttgcccaggaggcacaagagcaagcaactgagactgtacagagaaagagaagaggaaggggtgcagcccggggacacaggtaggggacagccaagccaggcccaggagcctctgggcagagagaagatggggaggcaggaggctctagccaaagtccctcctgttccttggagatgttcctcagaatggcagcagaggtgaccctaggaggtaagggca

SEQ ID NO: 6380 - DNA, 554 bp, Homo sapiens
tcggcacgaggcttattaaaatagtgatatttgctttactatttaaggtgtcactgataaattaatttgtacttctgtgtttaaaaattatagcttcttttcccttagtcaaattttttagcatattatacacatttctgtgtaatctgtggaagtgcaataatatgttagtaagttacattttaaataatgctcatgtgacaatactcccaatcaatggcttatagaatttaaagatctgtatattagattttggcttaaaggcatgagaagtataagacttggtttggtggctttgtaagaccaccagcctcttaatgatggttagcttctttaggtcattaaatcaataaaaacatataatgctgttttgctcttctaatgctcctcttccatttccagttatcttcacatttacatttaaatatacaaacctgagcccgccattattaatttccctatataatgacgatacatgtgaacatttataaatggactaatactgcttgtctttcccccaccgcacaaaactggttcttaagatgccagcaatg

SEQ ID NO: 6381 - DNA, 457 bp, Homo sapiens
ctgaaaaatcgaccatccagtgaaggaagtattaataaaattctttctggcctagatgatatgtctattggtggaaatctttcaaaaacacaaaacatggaacgatttggagaggataacttagaagatgatgatgtggaaatgaaaaatggtataacccagggagacaaactacgtgccttaaaaagtcagagacagccacgtacctcaccatcctgtgcatttaggtcagatgatacaaaaggacatccaagagcagtgtcccagcctttcagattaagttcatccctgcaaggatctgcagttactttgaagacatcaaaaatggcactgtccccttcagcaacggccaagaggatcaacagaacttctttgtcttcgggtgccactgtaagaagcttttccataaactcccggctagccagttctctagggaacttgaatgctgcaacagatg

SEQ ID NO: 6382 - DNA, 263 bp, Homo sapiens
gcggccgctgcacacgcccatcattgtgcactgcagctctggtgtgggccgcacgggagcctttgcactgctctatgcagctgtgcaggaggtggaggctgggaacggaatccctgagctgcctcagctggtgcggcgcatgcggcagcagagaaagcacatgctgcaggagaagctgcacctcaggttctgctatgaggcagtggtgagacacgtggagcaggtcctgcagcgccatggtgtgcctcctccatgcaaaccct

SEQ ID NO: 6383 - DNA, 535 bp, Homo sapiens; identical to SEQ ID NO: 1748

SEQ ID NO: 6384 - DNA, 557 bp, Homo sapiens
ttcggcacgaggtttcacctttttgttatgtaaaaagtgcacgaaagctcggcagcctttgcaaaggtcagcagtgtttcctggggcgggggaactgggaggggccccaggcctggcacccagcttgcgactgaaggtggcctcgtattgcttagaaacgtatgtttcagtttaaataccagacagtaaaaatagagctcgaggaccacccgcactgttgccaaatcattgccagaatgaacagcttaaataaataaaaaatcgaaatatttacttctcgataaaaatcccagtaaaaccatttacctttctttgcattatatataatatacatttataacgggcctggctgcgggcggcggggccgagggcagcggaggggtcaggacacctcgatgacctccacgctgcccgagaagctcgcctgcttgcccagggcggccagctcctcgccgcgcgcgcgcccctccaccatgccctcctcgaactccatctggcagctgcggcgcttgaactgcgtctccggggccggctcctcgggccagccggtccgcgcg

SEQ ID NO: 6385 - DNA, 580 bp, Homo sapiens
tcggcacgagcttcatcctgcccgccgtcactgagaggatgttcaaccagaatgtggtggcccagctctggtacttcgtgaagtgcatctacttcgccctgtccgcctaccagatccgctgcggctaccccacccgcatcctcggcaacttcctcaccaagaagtacaatcatctcaacctcttcctcttccaggggttccggctggtgccgttcctggtggagctgcgggcagtgatggactgggtgtggacggacaccacgctgtccctgtccagctggatgtgtgtggaggacatctatgccaacatcttcatcatcaaatgcagccgagagacagagaagaaatacccgcagcccaaagggcagaagaagaagaagatcgtcaagtacggcatgggtggcctcatcatcctcttcctcatcgccatcatctggttcccgctgctcttcatgtcgctggtgcgctccgtggttggggttgtcaaccagcccatcgatgtcaccgtcaccctgaagctgggcggctatgagccgctgttcaccatgagcgcccagcagccgtccatcatccccttcac

SEQ ID NO: 6386 - DNA, 605 bp, Homo sapiens
  misc_feature 411: n = A,T,C or G
tcggcacgagcaggcctcctacacctacctctctctgggcttctatttcgaccgcgatgatgtggctctggaaggcgtgagccacttcttccgcgaactggccgaggagaagcgcgagggctacgagcgtctcctgaagatgcaaaaccagcgtggcggccgcgctctcttccaggacatcaagaagccagctgaagatgagtggggtaaaaccccagacgccatgaaagctgccatggccctggagaaaaagctgaaccaggcccttttggatcttcatgccctgggttctgcccgcacggacccccatctctgtgacttcctggagactcacttcctagatgaggaagtgaagcttatcaagaagatgggtgaccacctgaccaacctccacaggctgggtggcccggnagctgggctgggcgagtatctcttcgaaaggctcactctcaagcacgactaagagccttctgagcccagcgacttctgaagggccccttgcaaagtaatagggcttctgcctaagcctctccctccagccaataggcagctttcttaactatcctaacaagccttggaccaaatggaaataaagctttttgatg

SEQ ID NO: 6387 - DNA, 543 bp, Homo sapiens
gggagagtccagcggtcttccagcgcttgggccacggcggcggccctgggagcagaggtggagcgaccccattacgctaaagatgaaaggctggggttggctggccctgcttctgggggccctgctgggaaccgcctgggctcggaggagccaggatctccactgtggagcatgcagggctctggtggatgaactagaatgggaaattgcccaggtggaccccaagaagaccattcagatgggatctttccggatcaatccagatggcagccagtcagtggtggaggtgccttatgcccgctcagaggcccacctcacagagctgctggaggagatatgtgaccggatgaaggagtatggggaacagattgatccttccacccatcgcaagaactacgtacgtgtagtgggccggaatggagaatccagtgaactggacctacaaggcatccgaatcgactcagatattagcggcaccctcaagtttgcgtgtgagagcattgtggaggaatacgaggatgaactcattgaattcttttcccg

SEQ ID NO: 6388 - DNA, 493 bp, Homo sapiens; identical to SEQ ID NO: 1751
  misc_feature 389: n = A,T,C or G

SEQ ID NO: 6389 - DNA, 555 bp, Homo sapiens
gacagaaggggaggagcagcctgtgggcaccgcggcggtagttggaggcgggagagggtccgtagccgcgccgccctgccccgccatgggcctcctgtcggacccggttcgccggcgcgcgctcgcccgcctagtgctgcgcctcaacgcgccgttgtgcgtgctgagctacgtggcgggcatcgcctggttcttggcgctggttttcccgccgctgacccagcgcacttacatgtcggagaacgccatgggctccaccatggtggaggagcagtttgcgggcggagaccgtgcccgggcttttgcccgggacttcgccgcccaccgcaagaagtcgggggctctgccagtggcctggcttgaacggacgatgcggtcagtagggctggaggtcttcacgcagagtttctcccggaaactgcccttcccagatgagacccacgagcgctatatggtgtcgggcaccaacgtgtacggcatcctgcgggccccgcgtgctgccagcaccgagtcgcttgtgctcaccgtgccctgtggctctgactctaccaacag

SEQ ID NO: 6390 - DNA, 68 bp, Homo sapiens
tactgtgatggttcgtgttggacgtggatggatggcacttgatgagttcttagtgaaaaatgatcctt

SEQ ID NO: 6391 - DNA, 377 bp, Homo sapiens; identical to SEQ ID NO: 1753

SEQ ID NO: 6392 - DNA, 503 bp, Homo sapiens
  misc_feature 78: n = A,T,C or G
ggactcagaagcttggaccgcatcctagccgccgactcacacaaggcaggtgggtgaggaaatccagagttgccatgngagaaaattccagtgtcagcattcttgctccttgtggccctctcctacactctggccagagataccacagtcaaacctggagccaaaaaggacacaaaggactctcgacccaaactgccccagaccctctccagaggttggggtgaccaactcatctggactcagacatatgaagaagctctatataaatccaagacaagcaacaaacccttgatgattattcatcacttggatgagtgcccacacagtcaagctttaaagaaagtgtttgctgaaaataaagaaatccagaaattggcagagcagtttgtcctcctcaatctggtttatgaaacaactgacaaacacctttctcctgatggccagtatgtccccaggattatgtttgttgacccatctctgacagttagagccgatatcactgg

SEQ ID NO: 6393 - DNA, 517 bp, Homo sapiens
ggtcgacactagtggatccaaagaattcggcacgagggtcgctagctcgctcggtgcgcgtcgtcccgctccatggcgctcttcgtgcggctgctggctctcgccctggctctggccctgggccccgccgcgaccctggcgggtcccgccaagtcgccctaccagctggtgctgcagcacagcaggctccggggccgccagcacggccccaacgtgtgtgctgtgcagaaggttattggcactaataggaagtacttcaccaactgcaagcagtggtaccaaaggaaaatctgtggcaaatcaacagtcatcagctacgagtgctgtcctggatatgaaaaggtccctggggagaagggctgtccagcagccctaccactctcaaacctttacgagaccctgggagtcgttggatccaccaccactcagctgtacacggaccgcacggagaagctgaggcctgagatggaggggcccggcagcttcaccatcttcgcccctagcaacgaggcctggg

SEQ ID NO: 6394 - DNA, 425 bp, Homo sapiens
ggggagaccagcgggccatgacaagttccaggctttggttttcgctgctgctggcggcagcgttcgcaggacgggcgacggccctctggccctggcctcagaacttccaaacctccgaccagcgctacgtcctttacccgaacaactttcaattccagtacgatgtcagctcggccgcgcagcccggctgctcagtcctcgacgaggccttccagcgctatcgtgacctgcttttcggttccgggtcttggccccgtccttacctcacagggaaacggcatacactggagaagaatgtgttggttgtctctgtagtcacacctggatgtaaccagcttcctactttggagtcagtggagaattataccctgaccataaatgatgaccagtgtttactcctctctgagactgtctggggagctctc

SEQ ID NO: 6395 - DNA, 60 bp, Homo sapiens
acaactgaaataacaagtcttgatacacagaatatacatgaaatgttaaacaatgctgat

SEQ ID NO: 6396 - DNA, 601 bp, Homo sapiens; identical to SEQ ID NO: 1757

SEQ ID NO: 6397 - DNA, 401 bp, Homo sapiens
atagttgtcactttattataccatatcccttctgtgacctttcacaagtctgaaacaggtcgcagggacttcatggtgggtagttatttgcaatcaccgcattgatcgaggcgatgtaattggagacccgcgtgaagacggagggaatgtggcagtagttgcagccgcaagcgagacccgaagctcaggatgccgtgcacctggcaccggggcgtcagacccctgacagttcaatggcccgagagaatctccgtagcagctggagatcacgccatcactcggagaacagatcatactggttttcacgcagctggcccaccaggcatacccgcaacaagtggcataattcagaaccagcaaccggacctgctgcaggacatcaggaacagcccgttggtctg

SEQ ID NO: 6398 - DNA, 81 bp, Homo sapiens
tcggaaatgcccatccgtctccagtacatcgatgacctcctggaggtaccggtggtagtacaggcctgtgtcgggactctc

SEQ ID NO: 6399 - DNA, 588 bp, Homo sapiens
attgtacaccttgatggcgaggttaattaaatcctgttgtggagtttgagggccggaatttaatttttggagttttatttaatatcgggagcagattgggtaataaaatgtatattgagaataagacggccttttgaccttttagggtctagggctgtaaagtgtctcagggttgctgccgaacgagccatgaactgggctgggtttttatatttgatgaaaaagagcctaaacgcttctgatttgggataaagacaaaggagcattaaccttgactatgtctttagctccagccacctttttaagagtaaattgctgggcaggtgggggagggctagtcacggaacgaaactgtaagccggaccaggtgtgaggaggggaggtgataaaaagattacagggtggaggagtggagcctgaggaagaattgggacctagcttggcgtggagaggaggggagaggtcagatgggtttgtagaaaaggaagattagacacactcagcaacgcctggggttgggactgaggggacaggtgggagggaaagaaggaagatttgggaccaattgcactgggcacagagactagg

SEQ ID NO: 6400 - DNA, 719 bp, Homo sapiens
  misc_feature 537, 553, 567, 616, 678: n = A,T,C or G
catggacagcctgtattgaagttttattttttttctatacacgtgattgattaacaatataattaatgggatgtcattttataccctgacaagtttaaatgtaaataaattggcaccacctttaatcagactgatgtcctgacttgcacaggaaacacgcacctaacctcaccaacctcaagccctccctcctcaagtctccatgcaaagactgtgccagtcagagtggagctgtccccccgacgagcccccagaagcacccggccggccatggctgtcattttgagggcggaaaataactggatttctggttaattggtgacatcctcaagagctgtggcaagccatgtctcggccgcgtgatggggcagacatggtgggtcctgacggccttgtcttcaccaagtgctcctaactctcagcaaacttggggttcatgaccgtcgtggtggcgctcttgaaaaggggattatcattgttccactgggacttgagcttctccttctcaaagcgcctgtactccccgaggtcgctcangtggatcagagccttncagatgaccagcangagaatggcgatcagcacgatgccttgcacggtgcccccgacgatggcngcgatgttggggcctgcacacactctccgctctatccacatagatgaggtacgggccatccngtctgctgcttcagctgtaggcaccagcagcccttgagtcc

SEQ ID NO: 6401 - DNA, 391 bp, Homo sapiens
  misc_feature 62: n = A,T,C or G
tcggcacgaggcgagaagaaactgcaaaaatgaaggaacacaaagccatttgtaaagctgcnagggaaagaggttccacttccacagagacaaactgtccttctatccacttttatcttttaataaatatcaaaaggaaaaagctgcaagggtgcaaagggcctgtgccagaagaaaacacacacagggaaaccgctttttttaatcaattgtagagaatagtcatttttaatctaaattagagaattgtgatacaatggcagtcctcaaaggcgtaacgagttcatctttctttcaccataggggttatagttggcttgtgctactctggaatcattttactgtttgtttttattatcttaagtgctaattaaaaaaaaaataaaatttt

SEQ ID NO: 6402 - DNA, 390 bp, Homo sapiens
tcggcacgaggcgaatggcggcggcagcgccttcagcgactactcggcctcagtcccctccacccccagcatcaaccagcgggagctgcgcatcgagaccatcgctgcctcctccacccccacacccatccgaaagcagtccaagcggcgctccaacatcttcacgatatgtgccactgtttccaacttttcatcaacaaaaaggcctttccaactccttccaaattagaagaccagctggtgacacacagcacctctggacatgccccctgtgcggggccggaggcgggccgggccctgggactgctctcacatgacaagcggccgcaagcttattccctttagtgagggttaattttatcttggcactggccgtcgttttacaacgtc

SEQ ID NO: 6403 - DNA, 356 bp, Homo sapiens
gttcaaaaaattttttttcttaacgttacatatcatagtgaatggtttccccagtgtatatgaatgttttaagtgtctccaatagcttatgcagtctatgagctttccaatactcatttaattaagatttaatcatttgctaatggaaatcttaccacctttcattttccctctgttaccaaatttcagctcttaggagctgctctacaattctgaatttgcttttcttgcctctctttactcacctgtcacaggaggttcctgctcagtaatgatattgtgagttaggataataactttttttttttgggcttcaaatttaaaaaaaaagatcctgtttccatttgaaaggaact

SEQ ID NO: 6404 - DNA, 495 bp, Homo sapiens; identical to SEQ ID NO: 1760

SEQ ID NO: 6405 - DNA, 600 bp, Homo sapiens; identical to SEQ ID NO: 1761

SEQ ID NO: 6406 - DNA, 445 bp, Homo sapiens
  misc_feature 400: n = A,T,C or G
tggcaagaaataaaggaaatcattgtggggattgctagctttccctcttacccagaaatctagaggatctctcctttttataacaaatcaagaaatatgaagcactttctcttaacttaatttttcctgctgtatccagaagaaataattgtgtcatgattaatgtgtatttactgtactaattagaaaatatagtttgaggccgggcacgtgggctcacgcctgtaatcccagtacttgggaggccaaggcaggcatatcaacttgaggccagggagttaaagagcagcctggctaacgtggtgaagccccgtctctactaaaaatacaaaaaattggccgagcacggtggtgcatggcctgtaatcccagctacttggggagggcttgaggcacgagnttccttgaacccaagaggtttgaggctatgttgaggctgagatct

SEQ ID NO: 6407 - DNA, 549 bp, Homo sapiens
  misc_feature 15, 16, 34, 312, 378, 426, 453, 459, 464, 476, 483, 488,506, 519, 540: n = A,T,C or G
aggtcccttcccttnntatgggagctgttttcangctatttcactctattaaatcttgcaactgcactcttctggtccatgtttcttacggctcgagctgagcttttgctcaccgtccaccactgctgtttgccaccaccgcagacctgccgctgactcccatccctctggatcctgcagggtgtccgctgtgctcctgatccagcgaggcgcccattgccgctcccaattgggctaaaggcttgccattgttcctgcacggctaagtgcctgggtttgttctaattgagctgaacactagtcactgggttncatggttctcttctgtgacccacggcttctaataggaactattaacattaccacatgggcccaagnattccattccttgggaattccgtgaggcccaaggaattccaggttcanggattaggagggtttgccaccattttnggaagngggcntgttaccatttnggaagtnggttnaccaccattttggggagnttttgaggaaggnaccccccgtaacattttgggnaaccaggaa

SEQ ID NO: 6408 - DNA, 509 bp, Homo sapiens
  misc_feature 355, 423: n = A,T,C or G
tcggcacgagctgtacaacatcgacgccaagcctgaggagccgcactttgtccaagaggacatggtgtgtgctggctatgtggaggggggcaaggacgcctgccagggtgactctgggggcccactctcctgccctgtggagggtctctggtacctgacgggcattgtgagctggggagatgcctgtggggcccgcaacaggcctggtgtgtacactctggcctccagctatgcctcctggatccaaagcaaggtgacagaactccagcctcgtgtggtgccccaaacccaggagtcccagcccgacagcaacctctgtggcagccacctggccttcagctctgccccagcccanggcttgctgaggcccatccttttcctgcctctgggcctggctctgggcctcctctccccatggctcancgagcactgagctggccctacttccaggatggatgcatcacactcaaggacaggagcctggtccttccctgatggcctttggaccc

SEQ ID NO: 6409 - DNA, 459 bp, Homo sapiens
tcggcacgagacttgtgtcagttacctgtgagaggcacagcacaagtctttctgacttctcaagagtgtcccaaacaagttagggttaaggattacccatgcttccatggagaagggtgccttacggaagaggtcttgacttctcagtgtggaagaaccttccaggtctcacctcttactgcttgaaggtccttggggtttcctactgagctctgcctctcctccttctaagaggcaagctgcctcacccaggccagggccgctctaaatgcagcctgtggacacgctttttgcttcctgttctgctcagcagtgctttaactgggcagtgtgttactggattgatgattgaccaatactgcacacctcatcgttagcaaacacctggaagcttgtttgcagggcctggcttttctcttgtctccaacaccctagtgcatgtgctgtgtcactatcatc

SEQ ID NO: 6410 - DNA, 492 bp, Homo sapiens
ttcggcacgaggggggaagcagatctgaggacatctctgtgccaggccagaaaccgcccacctgcagttccttctccgggatggacgtggggcccagctccctgccccaccttgggctgaagctgctgctgctcctgctgctgctgcccctcaggggccaagccaacacaggctgctacgggatcccagggatgcccggcctgcccggggcaccagggaaggatgggtacgacggactgccggggcccaagggggagccaggaatcccagccattcccgggatccgaggacccaaagggcagaagggagaacccggcttacccggccatcctgggaaaaatggccccatgggaccccctgggatgccaggggtgcccggccccatgggcatccctggagagccaggtgaggagtgcagatacaagcagaaattccagtcagtgttcacggtcactcggcagacccaccagccccctgcacccaacagcctga

SEQ ID NO: 6411 - DNA, 307 bp, Homo sapiens
tcggcacgagcggcacgagattaacaggtgctaaagtcagaagcagaaatttatgaagcatttgaaaacatctaccctattctaaagggattcaggaagacgacgtaatggctctcatgtacccttgcctcccccacccccttcttttttttttttaaaacaaatcattttgtttgggtaccttaaaaggggggtgttgaaaaaaaatggatgttgatttgcagggtgtggcaccaggggatgcccttctgtaagtgcccaccgcggaatgccggaaaggggctttatttgggcactgaaaacaccg

SEQ ID NO: 6412 - DNA, 462 bp, Homo sapiens; identical to SEQ ID NO: 1764

SEQ ID NO: 6413 - DNA, 225 bp, Homo sapiens
tcggcacgaggcttctgtatttttttttctaagagaattattttctacagtggttttatactgaaggaaaaacacaagcaaaaaaaaaaaaaagcttttttctaatttatctaaaccctaatttctcctcctttcttttcccttgtttcaagaaaactccacttttgctttaaaaccaaaaagggtttcctttaaaacccaaggaaagggggggcttttataaag

SEQ ID NO: 6414 - DNA, 431 bp, Homo sapiens
  misc_feature 1, 276, 277: n = A,T,C or G
ngtctgaaatggcttccccacaggacatttttaaatgattcttaattgcagggtagccaagtggagtaggtctgttgctggcacgtgaatactggctgaacctgtgcaatgtagtaattgctaaagttggcatctgctacatagggggctggctggtaatagcaagtgacattagccacattaggaatgacattttggtcagctaacacccggatagccagcatggtgataaggtttaaagtctgtcttctttcatgtcccatcaggcacactgtnntcatcatttaccactccatgaagggtcatgagatactcatacttgcggtcttccaatcccacaaagtggttctgcaaataggactccagttttctctgctgctctacaatgtctgagaagtcgatgaaaaacctgggaacacatatacctttga

SEQ ID NO: 6415 - DNA, 465 bp, Homo sapiens
tttgactggaaagaaattgggatttttattttagtaagtaagttggtcaggcacaagggcgactcagcagagggaacttcaaggaagtgtgagacaacagctggagccctgagctgggagagtggaggacgaattataaagagttttatgcctgccataatgagaagcttgtccttgaacttgaggggaatgctgagagtgcaaaggactttaagcaggccctacacagtggcagccaagcaggtcataaagagcaagatgatgcccaggcagatcagggattctcttatctacagagcgtccgcctaccagctccttcacagcagcggattttgctgcaagagaagaggcagcaggccaggccttttccttcgcccacagcgcctacgtcgaaggctcccaggctggttgctccactggctgcttgaggtcccctctctccagacccgccgaactggggccggg

SEQ ID NO: 6416 - DNA, 534 bp, Homo sapiens
  misc_feature 74, 400, 412, 448: n = A,T,C or G
cggcacgagggcagactttctgagccgggttttcttttagtggaaacaaatggttgatggatccagatccttanaaaaggagaggatgggggtagagtctcccaagccaaaattttgacatttgagtgctttcgtaagccctgtacatgtactattaattcagtcattcagccaagcctcctcctctagcagcaatttccagctgtttaacactatcctgggcaaatgttttaccctgtcctccagcctccctgcttcccttctggccctggaagactgagtctggacggcagagtggagggactgggaggctgtggctgcctccctccctcagcccggctgggactgtctcccggaccccagtgctggggtgggggaagggggacggagaatgactcangcagggccccanggtggggtgaggaggttcctgctctggcaggtctangcggaagggagtggagatggggctggttcctgctgcagtgaggggaacagatgggacaataaagactggagactcagttgaataat

SEQ ID NO: 6417 - DNA, 562 bp, Homo sapiens
tcggcacgagggacgcaggcaggctgcggttacccaagcggccacccgggcctcagggaccccttccccgagagacggcaccatgacccagggaaagctctccgtggctaacaaggcccctgggaccgaggggcagcagcaggtgcatggcgagaagaaagaggctccagcagtgccctcagccccaccctcctatgaggaagccacctctggggaggggatgaaggcaggggccttccccccagcccccacagcggtgcctctccaccctatctgggcctatgtggaccccagcagcagctccagctatgacaacggtttccccaccggagaccatgagctcttcaccactttcagctgggatgaccagaaagttcgtcgagtctttgtcagaaaggtctacaccatcctgctgattcagctgctggtgaccttggctgtcgtggctctctttactttctgtgaccctgtcaaggactatgtccaggccaacccaggctggtactgggcatcctatgctgtgttctttgcaacctacctgaccctggcttgctgttctgga

SEQ ID NO: 6418 - DNA, 123 bp, Homo sapiens
tcggcacgagggcggaccagcggagcggaccccgacagctgctgaccctctataaccccacagaactgcgcttcgcttccgagtcctgtgcacagcacctgccaaatacacggtgtttgacgc

SEQ ID NO: 6419 - DNA, 559 bp, Homo sapiens
  misc_feature 495, 504, 516, 522: n = A,T,C or G
catctgaagtgggagcgctacccaaaggtggctctgagggtcctgttccccgaccgctacgtcctacagggcttcttccgccccagcgagacagtgggggacttgcgagacttcgtgaggagccacctggggaaccccgagctgtcattttacctgttcatcacccctccaaaaacagtcctggacgaccacacgcagaccctctttcaggcgaacctcttcccggccgctctggtgcacttgggagccgaggagccggcaggtgtctacctggagcctggcctgctggagcatgccatctccccatctgcggccgatgtgctggtggccaggtacatgtccagggccgccgggtccccttccccattgccagcccctgaccctgcacctaagtctgagccagctgctgaggagggggcgctggtcccccctgagcccatcccagggacggcccagccgtgaagaggagctgggcaaggtgccaagtggctgaantgccggcanaagaggtgagantgcaanctgaggtgccattcggcagcacaggacaactctctgc

SEQ ID NO: 6420 - DNA, 485 bp, Homo sapiens
  misc_feature 329, 389, 401, 472: n = A,T,C or G
atgctgttcgttttggccccaacagcagcctcctggccactggaggggctgaccgcctgatccacctctggaatgttgtgggaagtcgcctggaggccaaccagaccctggagggagctggtggcagcatcaccagtgtggactttgacccctcgggctaccaggttttagcagcaacttacaaccaggctgcccagctctggaaggtgggggaggcacagtccaaggagacactgtctggacacaaggataaggtgacagctgccaaattcaagctaacgaggcaccaggcagtgacttgggagccgcgaccggacagtgaaggagtnggacctcggccgtgctatttctccagggaccattcaatgttccttttcctactgtaattnacgttggttttnttggggaccatattcattcatttagttggccacaattgacccagaaagattcccgtttttttggggacaancaaggggggcccc

SEQ ID NO: 6421 - DNA, 529 bp, Homo sapiens
tcggcacgaggcggatggcgaatactctctgcacggcttcatcatgcacaataatgacctcacatggaacctctttacatacctggagtttgccatccgagagggaacaaaccagcaccacagggcgttggggaagaaggcggaagatctgttccaggatgcgtactaccagagcccggagacgcggctgaggttcatgcgggccatgcacagcatgacgaagctgactgcgtgccaggtggccacggccttcaatctgtcccgcttctcctccgcctgcgacgtgggaggctgcacgggtgcactggcccgagagctggcccgtgagtaccctcgtatgcaggtgactgtgtttgacctcccagacattatcgagctggccgcccacttccaaccccccggaccgcaggcagtgcagatccacttcgcagcaggtgactttttcagggaccccctccccagcgctgagctgtacgtcctgtgccggatcctgcatgactggccagacgacaaagtccacaagttactc

SEQ ID NO: 6422 - DNA, 450 bp, Homo sapiens
  misc_feature 1, 4, 55: n = A,T,C or G
ngtntcctgaatgtggaccgtgtggctgagcagctggagaagctgggctacccancatccaggtgcgaggcctggctgactccggctggttcctggacaacaagcagtatcgccacacagactgcgtcgacacgatcacgtgcgcgcccacggaggccatccgccgtggcatcaggtactggaacggggtggtcccggagcgctgccgacgccagttccaggagggcgaggagtggaactgcttctttggctacaaggtctacccgaccctgcgctgccctgtgttcgtggtgcagtggctgtttgacgaggcacagctgacggtggacaacgtgcacctgacggggcagccggtgcaggagggcctgcggctgtacatccagaacctcggccgcgagctgcgccacacactcaaggacgtgccggccagctttgcccccgcctgcctct

SEQ ID NO: 6423 - DNA, 572 bp, Homo sapiens
  misc_feature 402: n = A,T,C or G
tcggcacgaggcgcatcccctccctgtctttgtggattggcctgtcctggacatttcatagaaatgggatctcacggtgcgcagccttctgtgtctggcgtctctcactgagcgtgacgtcctcaggtgcgtcctcaggcgcatccgcgctgtggcctgcgccagcctcgctcctcttcctggctggtggtcccaccgcgtacacgtgccgccgcctgttttgctgctgcttttgagctgagaattgtttttatgacttttaaatagctagaaagggatcaaaacaagactgtctcacgatgtggaaattacatgaaattcacagttcagtgcctgtgagtagagctgaccggccgcagttcagccacacatggactcattaccgaagctgcctccacccangcagcctgagccagcagctgtgaccggcaccctgtggcccacacggccagaagtgtttgccatctggccccccgcaaacgcggtctgctgcctgtggtggagatcactctggaggcggctgtcatcggccactcccgggagccctctcctaccctcagtcctccatccct

SEQ ID NO: 6424 - DNA, 658 bp, Homo sapiens
tgcatcagtaattttaatagagactcttagtggttatcaacaactggtcagttgttttttgttttttttttccacactgctctctggattcgaacctagtgaattctgggctcagtcctcctcctccatctctttcttgatccagtccacgtagttgagcactttggtgtagaagccatagcccctgctgcacccgatgccccaggacacgatgcccgtggccacccagcgatcagtgttcgggtcccttactgcaaaaacgcccccactatccccctggcaggcgtcctgctttagagatgggtgtccagcacagaacatgttttgagagaacacatccatcctattctttccccggagccagttctcacaggcctgtggattagctacgggcagacggacaaacctgaggtcatgagcaatcttctcctccatgaccccgaagccactgacatagcccatcaagcccaggtcgtagaaggtatcgttgtcagggaggcagatggggaggaggtttgggaccagggtgacactattttccagcttcagcaggcgattgtcccctcaaaaatgtaggaatcatcttgacgtagccgggttggcgctgaccttgcgatggggggattcctagctttatagctctttcaattgtgtggcc

SEQ ID NO: 6425 - DNA, 515 bp, Homo sapiens
cagtctttggggctgtcctgcacccctacacctgggccgcctgaccttggactgacctcccgttgcctcctggagccctgcataccttctgtgccacaatgcctgccgtctcccgctaatgtctccagctgcctggaacaaatgtgggctgcggtcactctggggcagtcttctggcctcactgactcctccaccattgcctcccccagacccccctgcccctcccactcttcttcataactgccacctttgccagaagctccagagagactccccaacctgccatgcctgcctccaccccaaccgtacagtccccactgcgctgtccagcccctggtaccatacctatggcctggctcccccctggccttggagcccggtgcccctttcacttcctcagcctcagcaatgttcccttttcagtgtcatggagctggctcggctcaagtctttcgttttcccaggctaggtagggctgtgaggaatgcattaagagggtttgggagtttctgaga

SEQ ID NO: 6426 - DNA, 233 bp, Homo sapiens
tcggcacgaggttttttttttttttttttgccggcagcaggaacttgtttttttttaaccaggtgggccctttcggccaggggttgaaaccacaaattggggggggttgtcccccacaaggcccgccctagggaggcaggtttcggccctaaaaaaccctccggaaggaatccaggtgtccgggggtaaaggagggctttattttttccgaaaaataagccttttgttgtggg

SEQ ID NO: 6427 - DNA, 535 bp, Homo sapiens
tcggcacgaggcctcgtgccgagctgggctctactcctgagtgagtctagtgggcttgggggtgtccatgtggtgctgtcccttggcagggtcagggcagctgctagggtgggaccagcagttggggtctgcagcgtggagatgggcaggaagctggagcccggctcatcgtcgcatagcctgcctgcacccgccccccgccaccacctcctggtgggttccgccctcatgccccacctctccctgcagcgggacctggacttcaccatcgacctggacttcaagggccagctgtgcgagctgtcctgctccaccgactaccggatgcgctgaggcccggctctcccgccctgcacgagcccaggggctgagcgttcctaggcggtttcggggctcccccttcctctccctccctcccgcagaagggggttttaggggcctgggctggggggatggggagggcacatcgtgactgtgtttttcataacttatgtttttatatggttgcatttacgccaataaatcctcagctggg

SEQ ID NO: 6428 - DNA, 450 bp, Homo sapiens
cctcgaggccaagaattcggcacgaggtggattcacagctgaggaatatgtttatttccatggttttactgcatagatacccacaattcactgcgagccatggaaagaagaaacatgctaaatagacaccttattcttggcactacatgtgactaaaggaagatatggaacccatttctacaatttctttgccgcttccttgaattggaaaaatgtactttgaaagaaccgttaagtgaactattataatatttttgctgactacccagctgaagaaaagtttgttaattggatgcgatttttttttttcacgttacaagacatgaagaaattttaaaagataaacatctatattgtgaaccatcagctgaaaagataaatttgtgttcaatatataggcaaaaaaaaatttgtgttaaaatggtgaatggaataataatgaggaaactg

SEQ ID NO: 6429 - DNA, 455 bp, Homo sapiens
attcggcacgagggggagcgggaggcccgccgtggacaggcccactcaccccgtaggtgatgagcagggccctgggtttgagcaggtgtcctgctgctctgaagagcccctggtgagtaggaacaggacggcagtgaggtgctgcccccaacagaagccaggccctgaggctggagaccctcaccccgactgtgatgggggaggctggagaccctcaccccgactgtgatgggggaggctggagaccctcaccccgactgtgatgggggaggctggagaccctcaccccgactgtgatgggggaggctggagaccctcaccccgactgtgatgggggcaaatctggcatcccagctgcccccatgcagggtgagtggtgccacggcagacacccatgctgggctccccacagacctccgtgcagcgcagggggctgacatgggccatgttgatgc

SEQ ID NO: 6430 - DNA, 546 bp, Homo sapiens
tcggcacgagggtaatttcagcactttgggaggccaaggcaggcggatcacttgaggttctgtttggattctgcaaagcagactcgtcagaaagttgctgtgaactggaccaacttcagcctcaagaaaaccactcctagcacagctcagtgaggccctgcccaggctgagctgcttcagggcatcctgaggccctgactgccagctgaaggcgtataatttttccctccgtgtgccccacctacccgtccaagaccctctgtgctccccaccatcctggaccaaccaaaagctgaacggatgccacactgtgctggggccccttgacctcagcagagccgcttcctggtgctacgcagcctccacactcagagcccgtggactgggctggcctaagggccagggctgatggtactgctggcccaacactgctctctttgtgtttggtttttttgtttttgtttttattgtggttttttccaattctttacttttgatactgtgaagatctttcgtgccgaaagataaagcaacatttggacacag

SEQ ID NO: 6431 - DNA, 408 bp, Homo sapiens
cggcacgagctgaatagctgggactacaggcgcgccaccacgctcagctaatttttgtatttttagtgaaatacgaaaattagttttagcgaaacggggtttcaccatgttggccaggatggtctcgatctcttgacctcgtgatccacccgtctcggcctcccaggtgctgggattgcagacatgagccaccgcgcctggtgaaagttaaaaatcttaaagcaaccagtggattgagacacattatctttacacaagcaagaaaaaggctgggcgtgatggctcatacctgtggtcccggtactttgggaggctgaggcgggatgattccttgagcccaggagttttgagaccagcctggtaacatggtgagaccttgtctcagttttaaaaatttattttcttatt

SEQ ID NO: 6432 - DNA, 544 bp, Homo sapiens
  misc_feature 333, 373: n = A,T,C or G
tcggcacgaggtgaaggttcctatcatcgactcggaagtctgcagccatctgtactggcggggagcaggacagggacccatcactgaggacatgctgtgtgccggctacttggagggggagcgggatgcttgtctgggcgactccgggggccccctcatgtgccaggtggacggcgcctggctgctggccggcatcatcagctgtggcgagggctgtgccgagcgcaacaggcccggggtctacatcagcctctctgcgcaccgctcctgggtggagaagatcgtgcaaggggtgcagctccgcgggcgcgctcaggggggtggggccctcanggcaccgagccagggctctggggccgccgcgcgctcctanggcgcagcgggacgcggggctcggatctgaaaggcggccagatccacatctggatctggatctgcggcggcctcgggcggtttcccccgccgtaaataggctcatctacctctacctctgggggcccggacggctgctgcggaaaggaaaccccctccccgacccgcccga

SEQ ID NO: 6433 - DNA, 544 bp, Homo sapiens
cagctaaattaccctcactaaagggaataagcttgcggccgccgactccggaggccggtagggactgctcgctgccagggggctcggtgcccaccgtggctggtcttcatgctcaaaattttcatgtcactggtggtggggatcaccaccggcgtctgggtgtggagctccaagactttccagacctggcagagcctgtgctaccgcaagatagcagctggccgggcccgggacaaggcctgccgcgcccccgggagctacggacgtggcacgcactgccactataaggctcccaccgtgctcttgcacatgactaagacggacccctctttggagaaccccacacacctctagccacacaggtctggcgcggcgtggctgctgccccctccttgccctccacgccctgccccctgcaccccctagagacagctgactagcagctgcccagctgtcaaggtcaggcaagtgaccaccggggactgatgatcagggcggaaccccgtgaggctcattaggggagatgggggtctcccctaatgcg

SEQ ID NO: 6434 - DNA, 457 bp, Homo sapiens
  misc_feature 455: n = A,T,C or G
caagtgtagtcacagtttatttctgatgtggctgaatctagggacaggcgggctgggctgagtggggggcgtgtcggcgatggggctagaactccaccttgcaggccgggaagggtcatcctgcatggacaccatgctgttgctgcccaacaccgtgatgcccagcgcctggtgccgggcgtgcgtctctgcgtaccacgtatgcatggccaccgagtcgaaagtggggatcagggtcacctgcaggtcacggtcccaatgctgcttgctggccagtagcgcgtccaggacggcccgcatgccttcctccttgcgctggtcctggccactgatgacgtagcagaggcgcgcacgtcggaagaactcctcatccaccaggtgggcgctgctcccgctgtgcagggtaggccaggtccaggtagaccggggacttgggtggggtggctgacacacgngg

SEQ ID NO: 6435 - DNA, 351 bp, Homo sapiens
  misc_feature 333: n = A,T,C or G
gagaagacgacagaagggagttagtggatataattaagggtctcaattagttgactttaggctgggtttatcctgcttggactgtcctaatcaggtgagaccttgaaaggactgggttcttcctgagcatagagactcacagtgtgagagggactcagcatgaggggtttcctccagcatgggctttgaaaatgaaagggctgtgggccgggtgcggtgcctcacgcctgtaatcccagcactttgggaggctgaggcgggcggatcatgaggtcaggagatcgagaccatcctggctaacatggtgaaaccctgtctctactaagaatacanaaaaaaaaaaaaaaaaaa

SEQ ID NO: 6436 - DNA, 418 bp, Homo sapiens
aatttaatgtatttaatttaatacaagaaatgagaacacaaaggcattctgcagtacaaacaaaggagcaatatgaacttgttcatagagctattgcccaactgtttgaaaaacagctacaactatatgaaattcatggagctcagaaaattgctgatggagtgaatgaaattaacactgaaaacatggtcagctccatagagcctgaaaaacaagattctcctcctccaaaaccaccaaggacccgcagttgccttgttgaaggggatgctaaagaagaaatactgcagccaccggaacctcatccagtgccacccatcttgacaccttctcccccttcagcttttccaacagtcactactgtgtggcaggacaatgatagataccatccaaagccagtgttgcatatggtttcatc

SEQ ID NO: 6437 - DNA, 53 bp, Homo sapiens
cgcttacttgatgaagcacactcggatgaccatgactgatgcttataaatttg

SEQ ID NO: 6438 - DNA, 532 bp, Homo sapiens
tcggcacgaggggcagtgacgtggtggcccagttcaacgcagccaatgacattgacatgatctgccgtgcccaccaactggtgatggaaggttacaagtggcacttcaatgagacggtgctcactgtgtggtcggcacccaactactgctaccgctgtgggaatgtggcagccatcttggagctggacgagcatctccagaaagatttcatcatctttgaggctgctccccaagagacacggggcatcccctccaagaagcccgtggccgactacttcctgtgaccccgcccggcccctgccccctccaacccttctggccctcgcaccactgtgactctgccatcttcctcagacggaggctgggcgtgggggggggctgtcctggctctgctgtcccccaagagggtgcttcgagggtgaggacttctctggagaggcctggagacctagctccatgttcctcctcctctctccccacttgaaccatgaagtttccaataatttttttttctttttttccttcttttttc

SEQ ID NO: 6439 - DNA, 355 bp, Homo sapiens
tatacggctgcgagaagacgacagaagggcaacagtacaggaagttgggtagatgtggggacaacagagagactgtggcagaggcaggactgcagatctatggaaattgcctggaagagtcagctgtaagggatgagaatcctgagggtaaaagagaaaagggaaagactcctctttgatcttatgaagctgaaataacaagatcttaaacatgagtgagaatctgttgccccaacctaaggtgactttaaatccaaggtaaaaaacacggcatgggtattagtttgaatagggaaaatgagaactctctttgagcgcaaaaaaaaaaaaaaaaaaaaaaaaaaagtcgtatcga

SEQ ID NO: 6440 - DNA, 545 bp, Homo sapiens
tcggcacgagggcggattgcctggtcttgaactcctgacctcagttgatccgcctgcctcggcctcccaaagtacagggattacaggcatgagtcaccacacctggcctggtcatttacatttttgccagaatgaaagataagcaaaagttacacatgcacacatatacatacatgcgtgtgtagagattataggtatatgtgtatgggcatgtatgtatataccatttgtattgtcctccattttaactccttattttgcccatatttttgttgtctctcctaagttattttttggagacgggatcttgctctgtcacacaggctggtatacatgggtgagatcatagctcactgtagccttgaactcctgggctcaaaagatcctcccatcttagtttctctcaagtagctaggactgcaggcacacagcatctcaagatcctggcctcaggtgaatcgcttgacccaggagtggaggttgcagtgagccgagatcgcatcactgctctccagcttgggcgacaggaactgactccatctcag

SEQ ID NO: 6441 - DNA, 477 bp, Homo sapiens
ttcggcacgagggttttttttatatagtgttaggtaggtatctagttttactctttttgcatgtgaatatctgcttgtcccccatcattgttgaaaaaaactattctttccccattaaatgatcttgggacccttgtaaaaaaatcaattgactatagatgtatggggtccagaggattttaatggccagaataaattaggatatgtttgagatgattaaatgcagggtttctcaacagtggtactgttgataattctttgttttagggtccatcttgtgcattataagatgtttggcagcatgtctggcctttatttattagatgccagtagcacctcacctccatcttagtcataacaaacaacaatgtctccagacattgccaaatgtcccctggagggaggggagcacaattactcccagctgaaaatcattggtgagccagtgggtttgtgtgatcctcttgggagtttaaa

SEQ ID NO: 6442 - DNA, 568 bp, Homo sapiens
  misc_feature 283: n = A,T,C or G
tcggcacgagccgctgtgtaggaaagaagctaaagcacttccagagcctgtccggagctcagaggttcggaagacttatcgaccatggagcgcgcgtcctgcttgttgctgctgctgctgccgctggtgcacgtctctgcgaccacgccagaaccttgtgagctggacgatgaagatttccgctgcgtctgcaacttctccgaacctcagcccgactggtccgaagccttccagtgtgtgtctgcagtagaggtggagatccatgccggcggtctcaacctanagccgtttctaaagcgcgtcgatgcggacgccgacccgcggcagtatgctgacacggtcaaggctctccgcgtgcggcggctcacagtgggagccgcacaggttcctgctcagctactggtaggcgccctgcgtgtgctagcgtactcccgcctcaaggaactgacgctcgaggacctaaagataaccggcaccatgcctccgctgcctctggaagccacaggacttgcactttccagcttgcgcctacgcaacgtgtcgtgggcgacagggcgttcttggctcg

SEQ ID NO: 6443 - DNA, 466 bp, Homo sapiens
acagaagggggaggacccgccttctctctcggcgtttccgctgtcagggccctgcggtgtgactcgcgggctcagctggtccggccgtagcacctccgcgccgtcgccatgtcgcggtttttcaccaccggttcggacagcgagtctgagtcgtccttgtccggggaggagctcgtcaccaaacctgtcggaggcaactatggcaaacagccattgttgctgagcgaggatgaagaagataccaagagagttgtccgcagtgccaaggacaagaggtttgaggagctgaccaaccttatccggaccatccgtaatgccatgaagattcgtgatgtcaccaagtgcctggaagagtttgagctcctgggaaaagcatatgggaaggccaaaagcattgtggacaaagaaggtgtcccccggttctatatccgcatcctggctgacctagaggactatcttaatgagc

SEQ ID NO: 6444 - DNA, 572 bp, Homo sapiens
ggagactttaacatcagaaaaaggatggacttgttgcagttgctgtagcattcaaagtcaaggtgatcatttcaaaccaagcatcagcaacaattaaaaatattcacttggtatctgtagtttaataatggaccaacatcaacatttgaataaaacagcagagtcagcatcttcagagaaaaagaaaacaagacgctgcaatggattcaagatgttcttggcagccctgtcattcagctatattgctaaagcactaggtggaatcattatgaaaatttccatcactcaaatagaaaggagatttgacatatcctcttctcttgctggtttaattgatggaagctttgaaattggaaatttgcttgtgattgtatttgtaagttactttggatctaaactacacagaccgaagttaattggaattggttgtctccttatgggaactggaagtattttgacagctttaccacatttcttcatgggatattataggtattctaaagaaacccatattaatccatcagaaaattcaacatcaagtttatcaacctgtttaattaatcaaaccttac

SEQ ID NO: 6445 - DNA, 522 bp, Homo sapiens
acagaggggggtgaacgagtctccagcaccatgtctggtttgtctggcccaccagcccggcgcggcccttttccgttagcgttgctgcttttgttcctgctcggccccagattggtccttgccatctccttccatctgcccattaactctcgcaagtgcctccgtgaggagattcacaaggacctgctagtgactggcgcgtacgagatctccgaccagtctgggggcgctggcggcctgcgcagccacctcaagatcacagattctgctggccatattctctactccaaagaggatgcaaccaaggggaaatttgcctttaccactgaagattatgacatgtttgaagtgtgttttgagagcaagggaacagggcggatacctgaccaactcgtgatcctagacatgaagcatggagtggaggcgaaaaattacgaagagattgcaaaagttgagaagctcaaaccattagaggtagagctgcgacgcctagaagacctttcagaatctattgttaatgat

SEQ ID NO: 6446 - DNA, 137 bp, Homo sapiens; identical to SEQ ID NO: 1794

SEQ ID NO: 6447 - DNA, 80 bp, Homo sapiens
cggcacgagcgccgcaatgcccgcgcgcccaggacgcctactcccgctgctggcccggccggcggacctgactgctctgc

SEQ ID NO: 6448 - DNA, 754 bp, Homo sapiens
  misc_feature 480, 663: n = A,T,C or G
agaatctgaacaggggcagctttattgcagccttgatttattttggagtaagaaaaaaaaagaatggggataaactggtatataagaggaacaggaaggaggggagagaacccaacacatgaggtctgcacacacagctgtcctggttgccctcggtgcagctccgagctccagttacaaggaattccaagttctcaggatcttgaagactctggaggccagtaatccctggatcacactgcttctaccagctcagaagagaagtcctgcctaaggtcatgaaataaacctgactgctgccaccagaccgaacagaggcaaagaacaccttgtcattgcgttcacacaagaattttagtctttgagcccttttgtgcatgaacacaccatccaagtgaccagtttccacagatcggatctctatggccttctctccccagcccattgtctgattggatcgaatatatgctactgatgtangcatctctccccactgtagaactacatccttggtgatccttccatatgtgtttacataaaccccctcatcttcatagcacaccagaagcctcattccatctgtatttgggacgatgatgattgcatggtgtttgatgctacactggatatgtgttggtagataaatgtcatagactgatcctngatccacatcaacagcatggaatccagcacaggattcatagatcactttcaacctctgggctggcttaacagcgagatccaccagaatggg

SEQ ID NO: 6449 - DNA, 273 bp, Homo sapiens
  misc_feature 62: n = A,T,C or G
tcggcacgagggcggcggcgcggcgaggctggggctcttgtttaccagcattaactccgctngagcggaaaaaaaaagggaaaaaacccgaggaggagcgagcgcacccggagggccccggcggcgccgccttcggagtattgtttccttcgcccttgtttttggagggggagcgaagactgagtttgagacttgtttcctttcatttcctttttttcttttcttttctttttttttttttggaaaaaggggaattttctcccaaaaaaaaag

SEQ ID NO: 6450 - DNA, 191 bp, Homo sapiens
ccatacaccttacgcgcctagtactccggggtcccacaaaaagttttcatggcgggccccccactgatgccttctttgcagaggccaaagtcagcgatcttgatgcggtcatcttttcccaatcataatgttttcaacttgttgccttgtgttccacgccccccaatgcaacaactcaagaatcagacaat

SEQ ID NO: 6451 - DNA, 64 bp, Homo sapiens
gctgagtgtaaagcctcctaccctggaaagattaccaacagcatgttctgtgtgggcttccttg

SEQ ID NO: 6452 - DNA, 600 bp, Homo sapiens
  misc_feature 567: n = A,T,C or G
gagggctggaaggtgtacgcgggcaccagcaacctgcaccagttgcctgaggcagcctccattgccgagatcatcatcaacagcaattacaccgatgaggaggacgactatgacatcgccctcatgcggctgtccaagcccctgaccctgtccggtgagggaatctgcactccccgctctcctgccccccagccccagcaccctctgcagccctcgcacttgtcagcatctgtcaactcatatccgggccccaaagcttctgcagggcagaagtcaaagactcttaaagatccttacatggaacacttctgttttataattagggaaactgaagcccaagggttataaataagtttgctccaaatgacacatctcacattacaaattgatgacggagtcagggcttgggtactgatcttaatcaatagattgaattctttcactggtattaactgagcacctaggggccaaacgctatggtaggcatttcacacatatgatttcatttactcttcacaaccaaccctgtggagcaggcactattattaacttcatttgacatatgangaaatggagctttacagagagataattacctga

SEQ ID NO: 6453 - DNA, 415 bp, Homo sapiens
  misc_feature 2, 4, 112, 237, 270, 370, 407: n = A,T,C or G
ananaacagtgtttattgatgatgagtccagggctcctgctgaagccctgggtggggaggggcacagagcgagatggggcgtaatggaatgcttgaaggctgctccgtgatntcggtcggagcttccagactaggcgagggcagggtgaggcctcgggcacacagccggcgcccagtcacccggcccagatggagggcggccggccctgcacaggcacttgccaaggtggctcacantcacgcacactcgtactgagactcaaggccgtntccacaactccaaccagtgcaaatgacttagtgcaaattaaattcagaagggacgggggaaacagagtcgtggaggctttgaatctctcagaaaaaaggnaagacaggaaagtttcagaaacaaagagacagaaggntgaaaaag

SEQ ID NO: 6454 - DNA, 352 bp, Homo sapiens
  misc_feature 327, 338, 345: n = A,T,C or G
tgaaaagcaatataaagtcttaaagaaacggctgcctgcaaccaggatgttcttatgagctttgaagatttttccgcttaccacaatgctgacatcacaaagaatacctttctttctctgttcatttagttgtcgcagaagttgatagcaataagagttctcatttggcctactattaaagtcacagtacccctcctctgatggtatttctgactcctggggcgttggcttcgtgggagtttgtgctcggtagagacgtggtgcctcaggaggagggttttcttgtagttgcgggtccctcgcgaaagttcattcatggccccactnggggaaaggtnccacggnttccccc

SEQ ID NO: 6455 - DNA, 523 bp, Homo sapiens
  misc_feature 380: n = A,T,C or G
cggaacgaggcggggatgctgcgagggggtctcctgccccagcgggccggctgcctaccctccagactgtccgctatggctccaaggctgttacccgccaccgtcgtgtgatgcactttcagcggcagaagctgatggctgtgactgaatatatccccccgaaaccagccatccacccatcatgcctgccatctcctcccagccccccacaggaggagataggcctcatcaggcttctccgccgggagatagcagcagttttccaggacaaccgaatgatagccgtctgccagaatgtggctctgagtgcagaggacaagcttcttatgcgacaccagctgcggaaacacaagatcctgatgaaggtcttccccaaccangtcctgaagcccttcctggaggattccaagtaccaaaatctgctgcccctttttgtggggcacaacatgctgctggtcagtgaagagcccaaggtcaaggagatggtacggatcttaaggactgtgccattcctgccgctgct

SEQ ID NO: 6456 - DNA, 403 bp, Homo sapiens
  misc_feature 392: n = A,T,C or G
atcaggaatgtggaattgaaaatgttccccaagtcccctttccacagtgtttggccagccctaacggaggcgccgggacctggtgagccagggcctggtgagtaaacggccctgcctgccccagacagggagcatctggtggtggccacgctcctgcagcagaggggtggggggagggccaggggacatcatggggacttcctgggctttctgtaggaggccagtgctctggtcacatctgaggtcttcctgacaaggggacacagctgtgacacggtgagtatcctgggctgataggaaacccagctgggatggctgagcacactcacccccggcctttcagagtgggatcagcagaggggcatcaggcgaaaacgttctgttgccggtantggcgtcagag

SEQ ID NO: 6457 - DNA, 425 bp, Homo sapiens; identical to SEQ ID NO: 1800

SEQ ID NO: 6458 - DNA, 525 bp, Homo sapiens
  misc_feature 418, 444: n = A,T,C or G
attcggcacgaggatcctgaccacggcttcagccgcatgagtgagcggcaagtggcgctgtgggacacaaagcacctggaggagccgctgtccctgcaggagctggacaccagcagcggtgtcctgctgcccttctttgaccctgacaccaacatcgtctacctctgtggcaagggtgacagctcaatccggtactttgagatcacttccgaggcccctttcctgcactatctctccatgttcagttccaaggagtcccagcggggcatgggctacatgcccaaacgtggcctggaggtgaacaagtgtgagatcgccaggttctacaagctgcacgagcggaggtgtgagcccattgccatgacagtgcctcgaaagtcggacctgttccaggaggacctgtacccacccaccgcanggcccgaccctgccctcacggctgangagtggctggggggtcgggatgctgggcccctcctcatctccctcaaggatggctacgtacccccaaagagccgggagctg

SEQ ID NO: 6459 - DNA, 517 bp, Homo sapiens
  misc_feature 393: n = A,T,C or G
ttcggcacgaggccatgaacaaggtcttctggagagagatggtagagtgcttcaacaagatttcgagagacgctgactgtcgggcggtggtgatctctggtgcaggaaaaatgttcactgcaggtattgacctgatggacatggcttcagacatcctgcagcccaaaggagatgatgtggcccggatcagctggtacctccgtgacatcatcactcgataccaggagaccttcaacgtcatcgagaggtgccccaagcccgtgattgctgccgtccatgggggctgcattggcggaggtgtggaccttgtcaccgcctgtgacatccggtactgtgcccaggatgctttcttccaggtgaaggaggtggacgtgggtttggctgccgatgtangaacactgcagcgcctgcccaaggtcatcgggaaccagagcctggtcaacgagctggccttcaccgcccgcaagatgatggctgacgaagccctgggcagtgggctggtcagccgggtgttccc

SEQ ID NO: 6460 - DNA, 574 bp, Homo sapiens
  misc_feature 402: n = A,T,C or G
attcggcacgaggggctccctctttcctcccaatcctaagctcctgacaagtggccaggtggctctgggccctcctgccccgtgcctaggtcaggggtcctggaataccccgtagctctggcaccaccacactggcctctgatggcaagacttggcccctccacctgtccctaacggacggcaggtcaggaaagccaggactcaggggagaagcaaacccccaggattgaaggctagggttctagggcctttgggtggggagggcccgggccggacagcctcagctccgtcccctgccccacaagattcacctgggcctccagtcccacgctggccccaactgctgcagctctcggcttccgcccaacagcctctggaggtgaggcgggagcatgccctcancgaggctgggcggcgggtcctgctgtgccatctccctgtgcgcctgagcagatcaatccaccagtgcaaaacagggctaacggcacctgcaggacagcagcacgctccatccctcatgctcagctgcctctgcggccacggacttctgcccttcatctgctctctcttactc

SEQ ID NO: 6461 - DNA, 361 bp, Homo sapiens
  misc_feature 119, 283, 307, 337, 351, 357: n = A,T,C or G
aatttgggggaggatatattccaacttgggggaagggtgaaggcattttagctctgaagctcaatcatgacatttctagagagttctgcagtgcccccgcattggacaggacaggatgnaagagtgtgctggactggctggattccccagtgtcaagctggcagcgctcctgaggttcttgagtgtttatcaactcagcaggtcaaaagtctgcagacactgggtggagcagcagtaagccacaaaactaacagttgtcttccactggtgcagccctgccatntggcgtctctctcaagggaaagancttggggtagacgatggtaaacattaggcncactacaccgatgncaattncccc

SEQ ID NO: 6462 - DNA, 563 bp, Homo sapiens
  misc_feature 101, 116: n = A,T,C or G
ctctgtcggggggacaggaagcggatcgtgtgaggtttccgctggcgcccgcgtagactcacgctgactgcaggcagcggggggcatcgaggggtgcttanccccagggcactcanaaacccgggcgctgcctgctctgcgtttcctcgtctggggtggctctgcagcctcctgcgggcgggcgtctgctgctcctacaagggaagcttcttgctgccaggcccacacatccccagttgttggtttggccactcttgacctggagccatcttcctagtgggccacccctaatcactattgcttcctaaaggtattttcaccctcttcgcctggtacagccctcacagctcttcagagcaagcactggactacaagggcatggctcacaaaaggttaatggatgggggttacctagccctggctaattccccttccattcccaactctctctctctttttgaagaaaaatgctaagggcagccctgcctgccctccccatcccccgctgtaaatatacactatttttgatagcacacatggggcccccatatctcttggccttg

SEQ ID NO: 6463 - DNA, 618 bp, Homo sapiens
ggtgccaagttctgggaggtgatcagtgatgaacatggcatcgaccccaccggcacctaccacggggacagcgacctgcagctggaccgcatctctgtgtactacaatgaagccacaggtggcaaatatgttcctcgtgccatcctggtggatctagaacctgggaccatggactctgttcgctcaggtccttttggccagatctttagaccagacaactttgtatttggtcagtctggggcaggtaacaactgggccaaaggccactacacagagggcgccgagctggttgattctgtcctggatgtggtacggaaggaggcagaaagctgtgactgcctgcagggcttccagctgacccactcactgggcgggggcacaggctctggaatgggcactctccttatcagcaagatccgagaagaataccctgatcgcatcatgaataccttcagtgtggtgccttcacccaaagtgtctgacaccgtggtcgagccctacaatgccaccctctccgtccatcagttggtagagaatactgatgagacctattgcattgacaacgaggccctctatgatatctgcttccgcactctgaagctgaccacaccaacctac

SEQ ID NO: 6464 - DNA, 483 bp, Homo sapiens
  misc_feature 1, 189: n = A,T,C or G
ngcagactgaactccttctggacctggtggctgaagccagtcccgccgcctggaggagcagagggccaccttctacaccccccaaaacccctcaagcctagcccctgccccactccgtcctctcgaggacagagaacagctttacagcactatcctcagtcaccagtgccagcggatggaagcccagcngtcagagcctcccctccctccaggggggcaagagctcctggagttgctgctgagagttcagggtgggggtcgaatggaggagcaaaggtcccggccccccacacacacctgctgagacttgagccccaaccagcccttccttgccactggtctcaaagctgggcagcccattgcatgccctcaactcttgcttggcagggggtaccagagactgaaagacacggcacaaatcttcaatattcatctcccacatcactttcctggggaacttggaaggggtgaaagttcctcaaa

SEQ ID NO: 6465 - DNA, 497 bp, Homo sapiens
cggcacgaggctggtgccacgaggcgtcccacaggcatgggtgtccttcctatatcacatggccttcactgagactggtatatggattgcacctatcagagaccaatgacaggacctccctggaaatctctgagacctggcctgtgatccaattgctgccttgtcctcttcctgctatgtcatggcttatcttctttcacccattcattcattcattcattcattcattcagcagtattagtcaatgtctcttgtatgcctggcacctgctacatggtccccgagtttaccattagtggaaaagacatttaagaaattcaccaacggctctatgataggccatacacggtggacctgactagggtgtggcttccctgatgagctgaacttgcccagaagcccacagaatgggagctgagcacgtttgaaccactgaacctgctctggacctcgcctccttcccttcggtgcctcccagcatcctatcctctttaaag

SEQ ID NO: 6466 - DNA, 576 bp, Homo sapiens
catcgtctcctcttccaatcagccctgctgaggcaggggacctctgcccgaaacctgctcagagagatggcccgggacaagccacgcctcctagctgccctggaagtggcttcagctgccatggccaaggaggaggccgccggcggggagcaggatgccctggacctgtaccagcacagcctgggggagctactgctgttgctggcagcggaacccccgggccggaggcgggagctgcttcacactgaggttcagaacctcatggcccgagctgaatacttgaaggagcaggtcaagatgagggaatctcgctgggaagctgacaccctggacaaagagggactgtcggaatctgttcgtagctcttgcacccttcagtgaccctagaagaatgattggacagatgtgagccatctggagcagaggggcactaacccaggctgacgccaagaatgaagtggcccactgcagccctggcgagcaggcttctttcatgagacctttgttactcggtggttactgggtcctgtgcctgtccgttctggggcatgcagccctctatcatttttggctccg

SEQ ID NO: 6467 - DNA, 461 bp, Homo sapiens
tcggcacgaggaaatctcggaaggagaagaagcaaacaggatcagggccattaggaaacagctatgtggaaaggcaaaggtcagtgcatgagaagaatgggaaaaagatatgtaccctgcccagcccaccttcccccttggcttccttggccccagttgctgattcctccacgagggtggactctcccagccatggcctggtgaccagctccctctgcatcccttctccagcccggctgtcccaaaccccccattcacagcctcctcggcctggtacttgcaagacaagtgtggccacacaatgcgatccagaagagatcatcgtgctctcagactctgattagctgcctccccttctccctgcctccagaatgttctgggataacatttggaggaaggtgggaagcagatgactgaggaagggatggactaagctaatccccttttggtggtgtttcttt

SEQ ID NO: 6468 - DNA, 489 bp, Homo sapiens
  misc_feature 305, 346, 374, 441, 449, 454, 461, 467: n = A,T,C or G
acaatgtctgctcatcaatgcagttgaggcctcctgtatccgaacacgagagctacagtccatggccgaccaagaaaagatctccccagctgcccttaagaagaccctcttagacagagtgaagctggaatcccccacagtctccacactgaccccctcctcccagggaagctcctcacaagaagcctggccctgggaggcaagaaggactaaggcagcatctgtcccctctgtgattcagagcccttagttgagagcccctgccgcccctgccacccccctgccccgttcccaccatttgcccntcctcagctgttgcaagggaggaaagcattgtttagggaantttttcaggttccttgttgattaaaacntcctttaaatttgttttcaggaccaaggcaattgggagttttccttttcctgttcccatttttgggnagtttgtnttttnaaggggntggtangatgtttgggaaggcaggacaa

SEQ ID NO: 6469 - DNA, 464 bp, Homo sapiens
tcggcacgaggaggccatgaagaagaaagacacagaggttctcttctgctttgagcagtttgatgagctcaccctgctgcaccttcgtgagtttgacaagaagaagctgatctctgtggagacggacatagtcgtggatcactacaaggaggagaagtttgaggacaggtccccagccgccgagtgcctatcagagaaggagacggaggagctcatggcctggatgagaaatgtgctggggtcgcgtgtcaccaacgtgaaggtgaccctccgactggacacccaccctgccatggtcaccgtgctggagatgggggctgcccgccacttcctgcgcatgcagcagctggccaagacccaggaggagcgcgcacagctcctgcagcccacgctggagatcaaccccaggcacgcgctcatcaagaagctgaatcagctgcgcgcaagcgagcctggcctggctc

SEQ ID NO: 6470 - DNA, 507 bp, Homo sapiens
  misc_feature 376: n = A,T,C or G
attcggcacgaggcccccttcccccagcccatccattaggccagcaacgcttgtagaactcactctgggctgtaacgtggcactggtaggttgggacaccagggaagaatatcaacgcctcactgaaacatggctgtgtttgcagcctgctctagtgggacagcccaaagcctggctgcccatcatgtggccccacccaatcaagggaagaacgaggaatgctggactggaggcccctggagccatatggcaagagggtgacagcttcctttcctgtgtgtactctgtccagttcctttagaaaaaatggatgcccagaagactcccaaccctggcttggggtcaagaaacagccagcaagagttaggggccttanggcactgggctgttgttccattgaagccgactctggccctggcccttacttgcttctctagctctctaggcctctccagtttgcacctgtccccaccctccactcagctgtcctgcacaaacactccaccc

SEQ ID NO: 6471 - DNA, 500 bp, Homo sapiens
ttcggcacgaggccaagtggtgcctaaagtttaaccaaaaagaccagactaatatattaatatatatctgctgtccagacagcctgtatcttgggggacagggctggcccagccctgctggccgcctcaccccctcgggtctcctcactcccttctacctgccactcacacagccaggtgccttggagggtcccaagctgggccccagcccaccctcctgtcttcccagggtagcccgcctgccagtcctagctgcacagggcagctgggcccaaccctgtctgtagagggccctggtgtttctagcactggcctgcacggtgggccttgctggggacggggggccccagtcagcctctctcccagtctacccagagaagccccttccccatgggaagacgaggccctcgggcccagcccccacagtgctgtctgatctgtgctttccagctcaccccccacactcactcctgagacccctggcctccggcgtcagcctc

SEQ ID NO: 6472 - DNA, 454 bp, Homo sapiens
ggctccatcagcctcggtgacagtgtggagatccctgccctcaaggtggtgtagaaggtgaagtccatgcagatgttccacatgcccatcacttcagccatgcaaggagaccggctgggcatctgcgtcacccagtttgaccctaagctgctggagcgcgggttggtgtgtgcccccgagtccctgcacactgtccatgcggccctcatctctgtggaaaagataccgtatttccgggggcccctgcaaaccaaggccaagttccacattacagtgggccatgaaacagtcatgggccggttgatgttcttcagtcctgctccagataactttgaccaggagcctatactggactccttcaacttctctcaagaataccttttccaggagcagtacctgtccaaggatttgacaccagcagtgacagacaatgatgaggccgacaagaaggccg

SEQ ID NO: 6473 - DNA, 421 bp, Homo sapiens
gcgtccgcccctggtcgtgcgcaaggtgcccccggctactccatcaaggtgttcgacttcgagcgctcgggcctgcagcacgcgcccgagcccgacgccgccgacggccctacgaccccaacagcgtccgcatcagcttcgcaagggtgggggccctgctactcccggcagttcatcacctcctgcccctgctggctggagatcctcctcaacaaccccagatagtggcggccccggcgggaggggcgggtgggaggccgcggccaccgccacctgccggcctcgagaggggcgatgcccagagacacagcccccacggacaaaaccccccagatatcatctacctagatttaatataaagttttatatattatatggaaatatatattatacttgtaattatggagtcatttttacaatg

SEQ ID NO: 6474 - DNA, 477 bp, Homo sapiens
taaacaggttgaatgatatatttatcaaatctgacagacatcacgcaaattatagcctggtgacaaaagtgttcatagtgaattaattactcttgtaatactacctataattagtacatcaggaatttcatccacttcactgatataactgaaaagactgttctctgcaacttcagctaattcatcatcttcactaacttctaaaaaataagcatcatcaatgccattatcccaaacagcatcaacagatgccccttttgacagcctgctatgtgatggtttatgaggattctgggtttcattgctcctacttgcatctgcttcatctgatggaaactcttcttcctttatttcagtggtgaagggataaacagtgggataggaaaatatttactcacgatatgcgatttaaccttatactctatgttgaagaaaggtatctaagtgacagatactaaagtgaatatgcaagatgaa

SEQ ID NO: 6475 - DNA, 655 bp, Homo sapiens
ttcggcacgaggaagctccgcacactctcggccggtcccgagtccgactccctcagggtgacgcgagctctgccctttaaccggaaacgtctccctgctcaccccacccccgcgcagacgcagtgctgagcacacagctaccggacaaagagtgacgcccggagctggagttatggcggctacggagccgatcttggcggccactgggagtcccgcggcggtgccaccggagaaactggaaggagccggttcgagctcagcccctgagcgtaactgtgtgggctcctcgctgccagaggcctcaccgcctgcccctgagccttccagtcccaacgccgcggtccctgaagccatccctacgccccgagctgcggcctccgcggccctggagctgcctctcgggcccgcacccgtgagcgtagcgcctcaggccgaagctgaagcgcgctccacaccaggccccgccggctctagactcggtcccgagacgttccgccagcgtttccggcagttccgctaccaggatgcggcgggtccccgggaggctttccggcagctgcgggagctgtcccgccagtggctgcggcctgacatccgcaccaaggagcagatcgtggagatgctggtgcaagaacagctgctcgccatcctgccc

SEQ ID NO: 6476 - DNA, 493 bp, Homo sapiens
tcggcacgaggtttttttttacaatgtcagaaaagtatttggctttttttttctttttaaaataagtgcatacaaatacagctagaagcatttctgatttgccaagtgctctaaaaaagcagcgcaagtcacagcctacatagaacggtaactgtcaccaggataataaagcacaaagatatgctaataacgttaacaaaagaaaaaaatgtctttataagtacataccttttgtcgtcaaaaaaaatatagaaacacaatgtattcaaaaaaaatcaaaattatacagccatgtttatgaagtctacatttcccttgtcttggatatatatatatatggagatatatatacaattcaagcagttttaattaagggtaatcattgggtttttctgaaaccggaaaagtcacgagtctctctcttttttcactttcacatctccagcaaggatggttgcaatttccccttgcataaaggcccaggggacattgg

SEQ ID NO: 6477 - DNA, 403 bp, Homo sapiens
gaggccctggggttctccccctttctctccagcctgacttggggagatggagttcttgtgccatagtcacatggcctatgcacatatggactctgcacatgaatcccacccacatgtgacacatatgcaccttgtgtctgtacacgtgtcctgtagttgcgtggactctgcacatgtcttgtacatgtgtagcctgtgcatgtatgtcttggacactgtacaaggtacccctttctggctctcccatttcctgagaccacagagagaggggagaagcctgggattgacagaagcttctgcccacctacttttctttcctcagatcatccagaagttcctcaagggccaggactttatctaatacctctgtgtgctcctccttggtgcctggcctggccacatc

SEQ ID NO: 6478 - DNA, 354 bp, Homo sapiens
gcgaccgccaactggacggcgggcttcggcgcgggcacacgccgcccggcgttgtgggcatccggcccgcgcggcgcggcgcgcgccgctcctcgtgctggaagaattcaagacggagaagaagctgtgcaagatgttctacgccgtcacgctgctcttcctgctcctctgggggccctacgtcgtggccagctacctgcaggtcctggtgcggcccggcgccgtcccccaggcctacctgacggcatccgtgtggctgaccttcgcgcaggccggcatcaaccccgtcgtgtgcttcctcttcaacagggagctgagggactgcttcagggcccagttcccctgctcccagag

SEQ ID NO: 6479 - DNA, 138 bp, Homo sapiens
taagcctgcaaaagcatgagcagaaatagtgctaatttggttgtggttgatgtagagttcttgaaggttgctgaggtcttgtagacagtaatcagtcatctcggtaatctgattttcatccaaatgcagcgttgtgag

SEQ ID NO: 6480 - DNA, 416 bp, Homo sapiens
caagccctttccagctcctccgatgaaggcagccccagccctggcatgggggggccactagatgcacctgggagccccctggcttgcactgaaccctcgaggacctgggcacggggtcggatggacacacagtcagaccgtaaaccctcacgtatccccacgcctcggggcccccgccgcccctccggacccgcagagctggggacatggcatgccctgcactcagtcaccccgagggctgagccagattcctggatgtgatggaccagctcagctgtccccagaccccatcccttctccttttcctttgtggccttaacccttctgcatcagggagccacctctgcctcttgagtaccagacctcatgggaccagaccccttgggaccacatggcacaatgggacctctgttgta

SEQ ID NO: 6481 - DNA, 334 bp, Homo sapiens
tcggcacgaggttttttttttttttttttaacccttgccgccactttttttgggcactaacccttggaggttttacacaccccccccggggaatggaagggaatggggtttcattcggggcaggaaccttttggcggaagaacggggggttggtaataaaaccttggccccggggcccggccctttggcccccgaaaccttttggaaccctcgaatttaacctggcctaagggcgtgcaaattcgtaacctgaaccacccggggggaaactggttccccaatttttgggctcatttgggggctttaaagggcccggccccttgtttcatggggt

SEQ ID NO: 6482 - DNA, 527 bp, Homo sapiens
tcggcacgaggagcggagcagccgagcgagttagtgtcagccgagggccgaaaccggaaggcggtgctgtgccagcgttgcggctcccgggtgctgcagccagggaccgctctcttctctcgccgacagcttttccttccctccatgagaaagaagccagctctgtctgacggcagcaatcctgacggcgatctcctccaggaacactggctggttgaggacatgttcatttttgagaatgtgggcttcaccaaggacgtgggcaacatcaagtttctggtctgcgcagactgtgaaattggaccaattggctggcattgcctacatgacaagaacagtttctatgtggccttggaacgagtttcccatgagtaactgacgggaggggtactcagctccatctccaaagataaacctactccccacaagaactggcctttaatgtggtataactgttccgctgccttcttgtctgtgctaatataaatactgagtaccagcatgtccatttgaacatgcagagggtt

SEQ ID NO: 6483 - DNA, 575 bp, Homo sapiens
tcggcacgaggccaagagcaggagcaagaaaaacatagcaagtttactcttgcccactccaaacagcccggtaacacggcacccaacctgatcttcctggcagtgagtccagaagagaaggaatcgtggatcaatgccctcaactctgccatcacccgagccaagaaccgtatcttggatgaggtcaccgttgaggaggacagctatcttgcccatcccactcgagacagggcaaaaatccagcactcccgccgccccccaacaaggggacacctaatggctgtggcttccacctctacctcggatgggatgctgaccttggacttgatccaagaggaagacccttcccctgaggaaccaacctcttgtgctgagagctttcgggttgacctggacaagtctgtggcccagctggcagggagccggcggagagcggactcagaccgcatccagccctccgcagaccgggcaagcagtctctcccgaccttgggaaaaaacagacaaaggggccacctacaccccccaggcacccaagaagttgacgcccacagagaaaggccgctgcgcctccct

SEQ ID NO: 6484 - DNA, 452 bp, Homo sapiens
tcggcacgaggattttttttttttttttttttcaaccccaattttttttattgaaaccggcccccgttggccctggttaaggcttttccttttcctttaggggaaccaacccattgggtaatttaagtgttaacccgttggttggcccatccctgccggatgtaataaagggggcagcaaaagcccaaaaggggctgggggccccaattttccataaaacctcccaccttttgccggaatttttccaagcccttccaaataattaattttttatctttaggaacccacggaaaaccttggttttccagaacaataaccgggggcacacaaggttgaggcaccattttttgattatccaacataataagtcctgcttcaggaaaaaattttgaatttcccccaaaatttttaaaggccagggccccagggttgtgtaaagggaaaatcaaagg

SEQ ID NO: 6485 - DNA, 605 bp, Homo sapiens
tcggcacgagggctacctctaatgttccatgctgttacttagttttcactcactactatattttggagatttgttcatattgctctgtgtacatttaattcttcagtgtgtatccaccacatttaacttattcacttacagaactatgcaagaatttctctggtaaatttcactaagtacttatgtacttttcagaacgattgtgagtttacacccctaccagcaggactgagttgagtacccatttcctcacatccttgccagtacttcatttgcctaatttttgccattctcataatgtggcaattgttcaattttgcatttcttccattttatttttttgcatctctgcttttcttttggttagctttgccagttctgcctattatattaatctcccaaaatcagcttttagttttgttaaatctctgacatgtttcgttgattcctgctttcatcttaaacatttcttcgttgttaatttgtgtttgctataaaataagcaacatcttaaatgcttgatttgctttcgatgtttattctgtaataagatatttaaagatataattttttccctaaatgctttattagacttttctcataag

SEQ ID NO: 6486 - DNA, 596 bp, Homo sapiens
ttcggcacgaggaagtccgggcagccgaagagtgtggtaggtaacggtcctcagcgcaagggtcatttcgtcgctgggaagggacggccctcgcccgcggtgatggtggttagcaagatgaacaaagatgcgcagatgagagcagcgattaaccaaaagttgatagaaactggagaaagagaacgcctcaaagagttgctgagagctaaattaattgaatgtggctggaaggatcagttgaaggcacactgtaaagaggtaattaaagaaaaaggactagaacacgttactgttgatgacttggtggctgaaatcactccaaaaggcagagccctggtacctgacagtgtaaagaaggagctcctacaaagaataagaacattccttgctcagcatgccagcctttaagattgaattagattgtgttgttgtggttttatttctgaaagtaaaacttgccataaattagaaaacaatttcccaaaataaaatccttttttgtatgatggtatacagttttcagtaatgatgtatacattgtattgatttttttccctaaatgtgttattttaataaatatctcatgaatgagtttg

SEQ ID NO: 6487 - DNA, 506 bp, Homo sapiens
ttttctaaattaagggcttttaattttcagaccaaacatttttaatataaaaacattttgataatatacaaacagcaatcacaacagcatccacatggcagcaaggggaccagggcacagagagggggagcgggctggggagggacagttttcagggtcccagttgcttccctggcttgaaatcaccctggtcctagcagaggacaggttaagggctgccagaggcagagggtccctgaccctggcccggagacagactgcccaggcaggccctctgataccatcttccaaccatggcagcctccaggaaaagccagatccatttaggagataacaggaaggtggctgtgattgacaggaaaggcaacatggttcctcagcatcctgctgatcacacctctgggaggggctgctggattgaagaggacctaagaatcttcctgggagcaggacagaaatgggatctaagtctacctactaactaacattcccgcctgtgacaccag

SEQ ID NO: 6488 - DNA, 497 bp, Homo sapiens
tgaaaatcctatttataagagtgccgtaacaactgtggtcaatccgaatatgagggaaaatgagtactgcccgtgcaaatcccacaacactgaatgcaaagtagcaatttccatagtcacagttaggtagctttagggcaatattgccatggttttactcatgtgcaggttttgaaaatgtacaatatgtataatttttaaaatgttttattattttgaaaataatgttgtaattcatgccagggactgacaaaagacttgagacaggatggttattcttgtcagctaaggtcacattgtgcctttttgaccttttcttcctggactattgaaatcaagcttattggattaagtgatatttctatagcgattgaaagggcaatagttaaagtaatgagcatgatgagagtttctgttaatcatgtattaaaactgatttttagctttacaaatatgtcagtttgcagttatgcagaatccaaagtaaatgtcctgct

SEQ ID NO: 6489 - DNA, 796 bp, Homo sapiens
  misc_feature 528, 782, 783: n = A,T,C or G
aatccaagtacaattttttaataaagataattacaaaagatggaaaaatcagctcagaaaggccaattacttctttaatagatcagtttttttgacataataactcacatcaattttaaatactatcacataaagcatggtggagaaaagaaattttgcttcataattagaaaaactcacaataaaacttgccaagaaaaacaaaaacgaaaaagccatttgaaaataaatacagtccatgccaaagtagtataaaatgaagccagaagtcttcaaaaagaaaacattttcctttcaatattttctttttaatgattttctgaaattggtgagactgtcaaattcaggggttgctgagctgttctgatttggttcctttggtatctgttttttcaccactgttgtccttggatttatcttcttccttaacgtctgtttttttggcctctgtttctttcttatcttcttcaattctagctttctttgctcctttcttatgatcagccacatttcttcgacctccttctncttcatcctcagaatctgagaattcttcatcacaagctatccgcttgtctgatgctcgaatagaaattctcttgtctggatcttctccatcttcatctccactgtcttcatgaacagcatcttctggaatagcttgcatctggacaccaggtgcatgaggtaacatgcgcaaattttcaaaacaacgctgttttatctttttcatatattcctgagtggtctggtttgtcatgtttgaaggactaatatgcagnntgaagttgggtcc

SEQ ID NO: 6490 - DNA, 569 bp, Homo sapiens
ttttaactaaaagataagatttaataacacagtaagacactcagttggggagggattaattgcaaaatatatcattatttcacagtgaggtttaagtactcataacaatcttctggttttagtagaacagatacccactggtgtatttttttcacatttgttttctataatttcttcccctctactatttcatataaagacactaatgtggtcaaacattaaactatcaattgacaatcaccttttgcttccctattaggaaataaccttcattgcttaactgcaactcaagagaattagggcacagtcaaccatgtcactgataaaaacataagaagtaatgcatcacatttattccaatctaaacacactgtcacagatgtggtaagtgaactggaacactggtgttccccagtgggtcatcagctacatatacatcacattcttttatcaaatctggcattgaaatttccttttccatatataggtttaaaaaaataaaattaaaaaagccacaggagcaaccctgacagagaagtcttgcatgcagccttctcctgagaaagtat

SEQ ID NO: 6491 - DNA, 553 bp, Homo sapiens
  misc_feature 390, 515: n = A,T,C or G
agttgaaggaagaaatagctcttctcctaagatggaatctgtggtttgggaatgtggttgatcaacttgatatgttggccaaatgtgccccatgtaataaaatgaaaagaagagacaagatgatgtcattttcccatattgtgaaaccaaaaacaaacgccttttgtgagaccaagctaacaaacctctgacggtgcgaagagtatttaactgtttgaagaatttaacagtaagatacagaagaagtaccttcgagctgagacctgcaggtgtataaatatctaaaatacatattgaataggcctgatcatctgaatctccttcagacccaggaaggatggctatgacttggattgtcttctctctttggcccttgactgtgttcatggngcatataggtgggcacagtttgttttcttgtgaacctattaccttgaggatgtgccaagatttgccttataatactaccttcatgcctaatcttctgaatcattatgaccaacagacagcagctntgggcatggagccattccaccctatggtgaatctggat

SEQ ID NO: 6492 - DNA, 464 bp, Homo sapiens
  misc_feature 242, 255, 442: n = A,T,C or G
aaagtgacccagttttattttggttttggaggccagacagggcattgctccacgggttcgggctgtacaaccttcccctccttgaggtgggaggcccagcaaccacagggcccaggcagcggggtgggaggctcaggaaatggtggctctggggacccgatcccgaggagagagggggcagcaggcaaaggcctgcaatggctcaaattgggggaagagggcggcgagggggagaggacacnatccaagaaccanagtccgaaagctgaagctggtccggtctctttcactttacggccgaggctggggtcagagaagtgaagccaaactgtcctcccgcaggaggcaaggcctggagggacgccagggtcccagtccggtgccgggccctgcgcacacagccgccgcctccaccctcgcggagggcgcgcgcggggcccantcgctgggtgcagggtccggcg

SEQ ID NO: 6493 - DNA, 134 bp, Homo sapiens
ccagcctgtccccagcccctcaatctggtgccagcagcatcttgtcacctgcacaacagtggccctgggtcccccacaggcagttagggccccaggtcagccctcaccatgataggcccattggtcctggggtt

SEQ ID NO: 6494 - DNA, 504 bp, Homo sapiens
gccaagaattcggcacgaggggaatagtttccatggatatttttatttttattaacttttttcagtttctttttattcaaagaaacaaaattcaatctctgataatatttgaggtaaagttcctttccctatcttgactcactgagttattaggaaacagaaggcaaaaagattgtcaaaataaaaacaataattcaagtaacaatgcccggaatatacgtcctaactacaccccttcctatcagctggattctatccaagtgactctattgatgtatgtatgttcattcaaagaatgggaaaaggatatgacatatatttgccagtacttcatcttcaagatttacccttttcctgtgaagttcagagttactgaagatgcttcttcccttgggaagttgttgacccaagaacataggttatatttcccaaatctttaattattgagtgaaagagctatagatgaattgatatggaaagaccgtatcttcattttcgtgagta

SEQ ID NO: 6495 - DNA, 578 bp, Homo sapiens
acagaggggcttcactttttccgttgctagcagtggaagggtcacagaccaaacactaaggcctgagcggtgacaatcgaggcgagatgatggtcaacagggaatgcctcgtgggagaaaaaagacaattttattctcagcgctgattttgagatgatgggcttgggaaacgggcgtcgcagcatgaagtcgccgcccctcgtgctggccgccctggtggcctgcatcatcgtcttgggcttcaactactggattgcgagctcccggagcgtggacctccagacacggatcatggagctggaaggcagggtccgcagggcggctgcagagagaggcgccgtggagctgaagaagaacgagttccagggagagctggagaagcagcgggagcagcttgacaaaatccagtccagccacaacttccagctggggagcgtcaacaagctgtaccaggacgaaaaggcggttttggtgaataacatcaccacaggtgagaggctcatccgagtgctgcaagaccagttaaagaccctgcagaggaattacggcaggctgcagcaggatgtcctccagtttca

SEQ ID NO: 6496 - DNA, 618 bp, Homo sapiens; identical to SEQ ID NO: 1818

SEQ ID NO: 6497 - DNA, 498 bp, Homo sapiens
gcactactccagacagatggctttggaatccaccagctacatccagctccctgaggcagagttgagaatggagagaatgttacctctcctggctctggggctcttggcggctgggttctgccctgctgtcctctgccaccctaacagcccacttgacgaggagaatctgacccaggagaaccaagaccgaggggcacacgtggacctcggattagcctccgccaacgtggacttcgctttcagcctgtacaagcagttagtcctgaaggcccctgataagaatgtcatcttctccccactgagcatctccaccgccttggccttcctgtctctgggggcccataataccaccctgacagagattctcaagggcctcaagctcaacctcacggagacttctgaggcagaaattcaccagagcttccagcacctcctgcgcaccctcaatcagtccagcgatgagctgcagctgagtatgggaaatgccatgtttgtcaa

SEQ ID NO: 6498 - DNA, 119 bp, Homo sapiens
aaatcataagcatctacttcatgtggaccccactgtcataagggaactccactgcccacttacgaagaggccaagcaatatctgtattatgaaacgctatatgccaaaggcaaccgcac

SEQ ID NO: 6499 - DNA, 486 bp, Homo sapiens
gtcgacactagtggatccaaagaattcggcacgagatgatggttatgtagtctttaggaggatgcaattataacattgctcttcctttcacgcaccacatgatttagcaagtacttcatattggctccaccattaacatggtcaatggcttctggatactcacagttcaggcacagtttctcctgaagattttttacctctcccatctttaagaaattgtctggatgtccatgaaagatgctgacactttgtattaattcattaaaaaacacccaccccctcccttgaaataaactaaaaagtaatgaattcatagaaaaaaatttcaccaagattgaaactagagaatatacctagacttgcactttgagctttgagaaatgtgtacctattcaccattccaacgtgaagaagctctgcagtaggaaaaataattaacacacttatagtctactgcccatgtaaggatcagctccggctaaaagc

SEQ ID NO: 6500 - DNA, 563 bp, Homo sapiens
acagaaggggatagttctccctgagtgagacttgcctgcttctctggcccctggtcctgtcctgttctccagcatggtgtgtctgaagctccctggaggctcctgcatgacagcgctgacagtgacactgatggtgctgagctccccactggctttggctggggacacccgaccacgtttcctgtggcagcctaagagggagtgtcatttcttcaatgggacggagcgggtgcggttcctggacagatacttctataaccaggaggagtccgtgcgcttcgacagcgacgtgggggagtaccgggcggtgacggagctggggcggcctgacgctgagtactggaacagccagaaggacttcctggaagacaggcgcgccgcggtggacacctactgcagacacaactacggggttggtgagagcttcacagtgcagcggcgagtccaacctaaggtgactgtatatccttcaaagacccagcccctgcagcaccacaacctcctggtctgctctgtgagtggtttctatccaggcagcattgaagtcaggtggttcctgaacg

SEQ ID NO: 6501 - DNA, 431 bp, Homo sapiens
ttgttgcctgctgtcccccaagaaaaccaaaatggtcgttactctctgacctatatctacactgggctgtccaagcatgttgaagacgtccccgcgtttcacgcctcttggctcactcaatgacctccagttctttagatacaacagtaaagacaggaagtctcagcccatgggactctggagacaggtggaaggaatggaggattggaagcaggacagccaacttcagaaggccagggaggacatctttatggagaccctgaaagacattgtggagtattacaacgacagtaacgggtctcacgtattgcagggaaggtttggttgtgagatcgagaataatagaagcagcggagcattctggaaatattactatgatggaaaggactacattgaattcaacaaagaaatcccagcctgggtccccttcg

SEQ ID NO: 6502 - DNA, 492 bp, Homo sapiens
tcggcacgagctctgggaggagagggtggagaaagccttgctttcatcctctggcatcggaaactcccctatgcacttgaagatggtttaaaagattaaagaaacgattaagagaaaaggttggaagctttatactaaatgggctccttcatggtgacgccccgtcaaccacaatcaagaactgaggcctgaggctggttgtacaatgcccacgcctgcctggctgctttcacctgggagtgctttcgatgtgggcacctgggcttcctagggctgcttctgagtggttctttcacgtgttgtgtccatagctttagtcttcctaaataagatccacccacacctaagtcacagaatttctaagttccccaactactctcacacccttttaaagataaagtatgttgtaaccaggatgtcttaaatgattctttgtgtaccttttctgtcatattcagaaaccgttttgtgcctgctgggagtaattccttt

SEQ ID NO: 6503 - DNA, 582 bp, Homo sapiens; identical to SEQ ID NO: 1822

SEQ ID NO: 6504 - DNA, 74 bp, Homo sapiens
taacgttgtctttcaaacaccctgagccttcctaaacagccagtgcatacattatgtctgggccacgaatgccc

SEQ ID NO: 6505 - DNA, 439 bp, Homo sapiens
ttcggcacgaggctgattccttctactctccaccccacaaattaacggggaccaatatttttaactttgcctattcgtttgtgggtgagtttcccccctccttattctgtcctgagaccacgggcaaagctcttcattttgacagacaagaaaaactgtttggaaccacaccaatgatatttttctttgtaatacttgaaatttattttttgtattattgggatagcagatgtgctatttatttatttaatatgtataaggagcctaaacaatataaagctgtagagattgggtttcattgataattggttggggagcctcctatgtgtgacttatgacttctctgtgctctgtgtatttggctgaattaatgacctgcgatataaagctatgctagctttcaaacaggatatgcctttcaaaaatgggtatattttgc

SEQ ID NO: 6506 - DNA, 408 bp, Homo sapiens
  misc_feature 357: n = A,T,C or G
ttcggcacgagggagccggcgaggagttccccgaacttgttggaactccgggctcgcgcggaggccaggagctgagcggcggcggctgccggacgatgggagcgtgagcaggacggtgataacctctccccgatcgggttgcgagggcgccgggcagaggccaggacgcgagccgccagcggcgggacccatcgacgacttcccggggcgacaggagcagccccgagagccagggcgagcgcccgttccaggtggccggaccgcccgccgcgtccgcgccgcgctccctgcaggcaacgggagacgcccccgcgcagcgcgagcgcctcagcgcggccgcaagcttattccctttantgagggttaattttagcttggcactggccgtcgttttacaacgtcgtgact

SEQ ID NO: 6507 - DNA, 438 bp, Homo sapiens
  misc_feature 366: n = A,T,C or G
ttcggatccatgaagacaccctgctacatcaccggctggggccgtctctataccaatgggccactcccagacaagctgcagcaggcccggctgcccgtggtggactataagcactgctccaggtggaactggtggggttccaccgtgaagaaaaccatggtgtgtgctggagggtacatccgctccggctgcaacggtgactctggaggacccctcaactgccccacagaggatggtggctggcaggtccacggtgtgaccagctttgtttctggctttggctgcaacttcatctggaagcccacggtgttcactcgagtctccgccttcatcgactggattgaggagaccatagcaagccactanaaccaaggcccagctggcagtgctgatcgatcccacatcctgaataaagaataaagatctctcagaaaattc

SEQ ID NO: 6508 - DNA, 594 bp, Homo sapiens
ttcggcacgaggccagatgcctatacaaacacttcaggacaataagtcgatttatggaggtatgagtcagtataactgtgcgcctggactcttgaaggagttgctgacttctgactctcctccccataatgacattatgacaccagttgatcctggggtagcccagcccaacagccgggttctgggccagaacgtcatgatgggccctaattcggtcatgtcaacctatggcagccaggcatctcataacaaaatgatgaatcccagctcccatacccaccctggacatgctcagcagacatctgcagttaacgggcgtcccctgccccacacggtaagcaccatgccccacacctcgggtatgaaccgcctgacccaagtgaagacacctgtacaagtgcctctgccccaccccatgcagatgagtgccctggggggctactcctccgtgagcagctgcaatggctatggcagaatgggccttctccaccaggagaagctcccaagtgacttggatggcatgttcattgagcgcttaaactgtgacatggaatccatcattcggaatgacctcatggatggagatacattgga

SEQ ID NO: 6509 - DNA, 519 bp, Homo sapiens
catgatccgccaccccaaatacaacagccggactctggacaatgacatcctgctgatcaagctctcctcacctgccgtcatcaattcccgcgtgtccgccatctctctgcccactgcccctccagctgctggcaccgagtccctcatctccggctggggcaacactctgagttctggtgccgactacccagacgagctgcagtgcctggatgctcctgtgctgagccaggctgagtgtgaagcctcctaccctggaaagattaccaacaacatgttctgtgtgggcttcctcgagggaggcaaggattcctgccagggtgattctggtggccctgtggtctccaatggagagctccaaggaattgtctcctggggctatggctgtgcccagaagaacaggcctggagtctacaccaaggtctacaactatgtggactggattaaggacaccatagctgccaacagctaaagcccctggtccctctgcagtctctataccaataaagtgaccctgctctc

SEQ ID NO: 6510 - DNA, 672 bp, Homo sapiens
  misc_feature 574: n = A,T,C or G
ttcggcacgagggtggggagaggctgggtaggctgtggctgaccgtctggggtaccgtagagctgctggatgccacggagatcgtcctcgggcagcttgaaagttgtcaacgtccttccactggtagaacggcgccatgatggcattggggttgctggagtgctccagccccagcgcgtggcccagctcatgcactgccaccaggaagaggttgtttccatgcaggtcagtgctggagaaggtccagggctcatctgcgtcaaaatgggtgtccccgcctaggccggggccagggaaataggcgtgggccagaaagccaccggtgccatcaaacggcgagctgtcgccgtggaagccagaggcaaagagtaccatgatgtcggcctccttctgtcgccgcagccggatgtcctcatagggcacctcctggaagaccaggggcgtggcctgctcccacacgcggaaggccctgcgcaccgcctccatcgagtggtaccagcccaacttctccgtgtagttctggatgctaaaggtcagatggtggttgttccacttcctcccggtgagggcgtancgcttccgacgccgccgcaggttggctttcactcgtaccccgaactggtctggcaccccacagcggggccgcttcatccactccttggtctcttcgtc

SEQ ID NO: 6511 - DNA, 582 bp, Homo sapiens
ttcggcacgagcaagaagaagctgcgggcacggagccagctctctgagttctggaaatcccataatttggacatgatccagttcaccgagtcctgctcaatggaccagagtgccaaggaacccctcatcaactacttggatatggaatacttcggcactatctccattggctccccaccacagaacttcactgtcatcttcgacactggctcctccaacctctgggtcccctctgtgtactgcactagcccagcctgcaagacgcacagcaggttccagccttcccagtccagcacatacagccagccaggtcaatctttctccattcagtatggaaccgggagcttgtccgggatcattggagccgaccaagtctctgtggaaggactaaccgtggttggccagcagtttggagaaagtgtcacagagccaggccagacctttgtggatgcagagtttgatggaattctgggcctgggatacccctccttggctgtgggaggagtgactccagtatttgacaacatgatggctcaaaacctggtggacttgccgatgttttctgtctacatgagcagtaac

SEQ ID NO: 6512 - DNA, 553 bp, Homo sapiens
ttcggcacgagggacgtccgcatcatccgtgacgacatgctgtgtgccgggaacagccagagggactcctgcaagggcgactctggagggcccctggtgtgcaaggtgaatggcacctggctacaggcgggcgtggtcagctgggacgagggctgtgcccagcccaaccggcctggcatctacacccgtgtcacctactacttggactggatccaccactatgtccccaaaaagccgtgagtcaggcctggggtgtccacctgggtcactggaggaccaacccctgctgtccaaaacaccactgcttcctacccaggtggcgactgccccccacaccttccctgccccgtcctgagtgccccttcctgtcctaagccccctgctctcttctgagccccttcccctgtcctgaggacccttccccatcctgagcccccttccctgtcctaagcctgacgcctgcactgggccctccggccctcccctgcccaggcagctggtggtgggcgctaatcctcctgagtgctggacctcattaaagtgcatggaaatc

SEQ ID NO: 6513 - DNA, 635 bp, Homo sapiens; identical to SEQ ID NO: 1825

SEQ ID NO: 6514 - DNA, 621 bp, Homo sapiens
  misc_feature 353, 365, 573: n = A,T,C or G
ttcggcacgagggctatttaagtgatggacagcaggtgaccttgctttgtcagctggacctgaggtgctggtggaactctcagaaagggccggaggcccccccgacttgttttcaaatccaggggaggggccagtgggggaggagtaaccacttctgagcacctactatgggcgcagcacgtgtgggattgcttgcattcagcctcactggacccttgcgtccacccaggaggtggcaatgttacccccagtgttgagacccaaagggggacgtgacttgtccacagtcacagaaagtggggagctgggatttgaacccacctctacctggtctcagtccagggatcttctancccacctcccangctgtcttggagctccacctctaatccaaagggatgcagatgtttatttgacaaatatcagtgagcctccactatatgctgggcagtgggtagtgaccggggagtacttcgttttccttttcagtaaaaggcctaataatggcacctgcgtgatggaagtattgagcagaggagtgtggttcctcctggcctcacgggcactaaagangaaggcaaaatctatctcaccatcactaatgctatggtgcatttcttt

SEQ ID NO: 6515 - DNA, 524 bp, Homo sapiens
ttcggcacgaggacgacctgccgtttgatgggcctgggggcatcctggcccatgccttcttccccaagactcaccgagaaggggatgtccacttccgactatgatgagacctggactatcggggatgaccagggcacatacctgctgcacgtggcagcccatgaatttggccacgtgctggggctgcagcacacaacaacagccaaggccctgatgtccgccttctacacctttcgctacccactgagtctcaacccagatgactgcaggggcgttcaacacctatatggccagccctggcccactgtcacctccaggaccccaaccctgggcccccaggctgggatagacaccaatgagattgcaccgctggagccagacgccccgccagatgcctgtgatgcctcctttgacgcggtctccaccatccgacgcgagctctttttcttcaaagcgggctttgtgtggcgcctccgtgggggccagctgcagcccggctacccagcattggcctctcgccactg

SEQ ID NO: 6516 - DNA, 442 bp, Homo sapiens; identical to SEQ ID NO: 1827

SEQ ID NO: 6517 - DNA, 442 bp, Homo sapiens
  misc_feature 3, 5, 89, 347, 425: n = A,T,C or G
aanancgctgagagtcacttttattgggaaccatagttttagaaacacaaaaataattctttcacgggattggttccaggagcccagantatgagtggccccctactctccaaactgatcaatgaccttctgtatccacttcttcaggcggaacacatgtgtgtagaagccatatttcccatcccggtcacagccttcaccccatgagacgatgcccatttgataccagcggttgttaaaggggctcttcatgacaaagggtcccccactgtcaccttcacaggcatcccctcgtttcccttcatcaggcttgtaaccagcacagaacatgttgtcagtgatgcggntccgggtggagtccttgcagaccggccgttccacaatggggcaggttcaccacctgcaggacattggggttgcccttnaccaacgttggctgtcc

SEQ ID NO: 6518 - DNA, 671 bp, Homo sapiens
tcggcacgagggctttgtcctttgatgctgtcagcactctgaggggagaaatcctgatctttaaagacaggcacttttggcgcaaatccctcaggaagcttgaacctgaattgcatttgatctcttcattttggccatctcttccttcaggcgtggatgccgcatatgaagttactagcaaggacctcgttttcatttttaaaggaaatcaattctgggccatcagaagaaatgaggtacgagctggatacccaagaggcatccacacccttagtttccctccaaccgtgaggaaaatcgatgcagccatttctgataaggaaaagaacaaaacatatttctttgtagaggacaaatactggagatttgatgagaagagaaattccatggagccaggctttcccaagcaaatagctgaagactttccagggattgactcaaagattgatgctgtttttgaagaatttgggttcttttatttctttactggatcttcacagttggagtttgacccaaatgcaaagaaagtgacacacactttgaagagtaacagctggcttaattgttgaaagagatatgtagaaggcacaatatgggcactttaaatgaagctaataattcttcacctaagtctctgtgaattgaaatgttcgttttctcctgcctgtgct

SEQ ID NO: 6519 - DNA, 531 bp, Homo sapiens
cccccgtcggcttatcaggggggttctggacctggatcgccggtgagtggctggagaggctcgagatctagagcgtttccacggggctggtgatgtgcgtgagcgagaacgcttccgactggttgggggtgtccgagagcggcctcttcggcgtcgagaggaggtccgggaactttcctgccgggcaggtgaccttgagtgataaccagagcctcccctccgccgccgagtaacccgcgaccttgaccggctccgctgtcttcgccgagaggttgactgagaagatccagacctatctcgacgtcgggttgttcttgttttctctctccttgagcgggaacgggacctctggagtccacgaggctttggcgaaggagagcggcctctccttgaggttgtcttagtgcgtggagatgaagctgagcgccgtcggcgtgaagacctcgatttttcggctggctccggggaagacactgagggacttctccggtgcctttggggagttctagagcgagtttctggtgaggatga

SEQ ID NO: 6520 - DNA, 713 bp, Homo sapiens
  misc_feature 355: n = A,T,C or G
ttcggcacgagggcctactgtggctactcagctgtgcgcatggcccgcctgctgtcaccaggggcgaggctcatcaccatcgagatcaaccccgactgtgccgccatcacccagcggatggtggatttcgctggcgtgaaggacaaggtcacccttgtggttggagcgtcccaggacatcatcccccagctgaagaagaagtatgatgtggacacactggacatggtcttcctcgaccactggaaggaccggtacctgccggacacgcttctcttggaggaatgtggcctgctgcggaaggggacagtgctactggctgacaacgtgatctgcccaggtgcgccagacttcctancacacgtgcgcgggagcagctgctttgagtgcacacactaccaatcgttcctggaatacagggaggtggtggacggcctggagaaggccatctacaagggcccaggcagcgaagcagggccctgactgcccccccggcccccctctcgggctctctcacccagcctggtactgaaggtgccagacgtgctcctgctgaccttctgcggctccgggctgtgtcctaaatgcaaagcacacctcggccgaagcctgcgccctgacatgctaacctctctgaactgcaacactggattgttcttttttaagactcaatcatgacttctttactaacactggctagctatattatcttatat

SEQ ID NO: 6521 - DNA, 425 bp, Homo sapiens
ttcggcacgaggacattcaccactgtactgagtgaccaacaggtggtggagctgatccctgggggtgcaggcatcgtcgtgggatatggggaccgttctcgtttcatccaactggtccagaaggcacggctagaggagagcaaggagcaggtggcagctatgcaggcaggtctgctgaaggtggtaccacaggctgtgctggacttgctgacctggcaagagttggagaagaaagtgtgtggggatccagaagtcactgtggatgctctgcgcaagctcacccggtttgaggacttcgagccatctgactcgcgggtgcagtatttctgggaggcactgaacaacttcaccaacgaggaccggagccgcttcctgcgctttgtcacgggccgcagtcgcctgccagcacggatctacatctaccc

SEQ ID NO: 6522 - DNA, 453 bp, Homo sapiens
  misc_feature 12, 62, 186, 286, 401, 415, 445: n = A,T,C or G
ggtttcataagnaaattttattggtggtgaatacacaggggcaggcccaggacaagcagctnggctactccccctctgctggctgcccgaccggcagagggggctccatgtggcaggagctaggctcccaacgcccactgttcttgccaccctctgggctcccaggctgggctccgctaggctccngtctcccctgccagttaggcaagttcaggtgtggaggccgcagggatagatccaggtggctctgggctgggcctcttctcttcccagcggggaggtgctnttggcctggctgggctggcctgaatctgtttcaagttctcccttcctgcccagctcagttcaccagtgctggatccaggttcaaatgacagggacttggggtttttaaaacagcntggcaagtggtctntctcctggggcagccatatcccagacccantgggtttg

SEQ ID NO: 6523 - DNA, 564 bp, Homo sapiens
ccaagttctcacctcttaaagaaaacccaccccgtagattcccatcatacacttccttcttttttaaaaaagttgggttttctccattcaggattctgttccttaggtttttttccttctgaagtgtttcacgagagcccgggagctgctgccctgcggccccgtctgtggctttcagcctctgggtctgagtcatggccgggtgggcggcacagccttctccactggccggagtcagtgccaggtccttgccctttgtggaaagtcacaggtcacacgaggggccccgtgtcctgcctgtctgaagccaatgctgtctggttgcgccatttttgtgcttttatgtttaattttatgagggccacgggtctgtgttcgactcagcctcagggacgactctgacctcttggccacagaggactcacttgcccacaccgagggcgaccccgtcacagcctcaagtcactcccaagccccctccttgtctgtgcatccgggggcagctctggagggggtttgctggggaactggcgccatcgccgggactccagaaccgcagaagcc

SEQ ID NO: 6524 - DNA, 484 bp, Homo sapiens
ttcggcacgagggatgtcatgaggcggctgctgcagcccaagaacgtgatggtgtccacaggccgagaccgccagaccaaccactgctacatcgccatcctcaacatcatccagggagaggtggaccccacccaggtccacaagagcttgcagaggatccgggaacggaagttggccaacttcatcccgtggggccccgccagcatccaggtggccctgtcgaggaagtctccctacctgccctcggcccaccgggtcagcgggctcatgatggccaaccacaccagcatctcctcgctcttcgagagaacctgtcgccagtatgacaagctgcgtaagcgggaggccttcctggagcagttccgcaaggaggacatgttcaaggacaactttgatgagatggacacatccagggagattgtgcagcagctcatcgatgagtaccatgcggccacacggccagactacatctcctggggcaccc

SEQ ID NO: 6525 - DNA, 632 bp, Homo sapiens
ttcggcacgaggggcggcggcgcagagcttggggcttccttggtcgcacccaccacctgcctgcccactggtcagccttcagggaccctgagcaccgcctggtctctttcctgtggccagcccaaaactgaagcgctgcggcatggcgcgcgcctgcctccaggccgtcaagtacctcatgttcgccttcaacctgctcttctggttcttcctgctgctgctgctggtgttcctgctggaggccaccatcgccatcctcttcttcgcctacacggacaagattgacaggtatgcccagcaagacctgaagaaaggcttgcacctgtacggcacgcagggcaacgtgggcctcaccaacgcctggagcatcatccagaccgacttccgctgctgtggcgtctccaactacactgactggttcgaggtgtacaacgccacgcgggtacctgactcctgctgcttggagttcagtgagagctgtgggctgcacgcccccggcacctggtggaaggcgccgtgctacgagacggtgaaggtgtggcttcaggaaaacctgctggctgtgggcatctttgggctgtgcacggcgctggtgcaaatcctgggcctgaccttcgccatgaccatgtact

SEQ ID NO: 6526 - DNA, 219 bp, Homo sapiens
  misc_feature 100, 211, 215: n = A,T,C or G
gcgaccgcgcggtccagagccatcaccgccagaggacgcattcggccgaacccagagccagcgatgcgcacagtcgggccgtgcagtggctgcgcggcanagaagcgctggtccgcgcaggttggccagcagcggcggcaccacgctagtagtgaagcccgcgtctaccaaggccaggtggcagaggaagtagtacatgggcgtgtgcagncacnggtc

SEQ ID NO: 6527 - DNA, 606 bp, Homo sapiens
  misc_feature 428: n = A,T,C or G
cggcacgagggcacaggggcgtgtggcgggcgggtgaggctgctttgcacacctgtgttggtggctgtcccctgccgcccctccctgtggcagcagcaggacaggtgtgtgcccagcaccctccctacctgggcctggaagcagatgaggggaatacttcatgcaaagaaaaaagtaacatgtgcaaaagctccccgtccagctttgacagtcagtttcgatgtcagctcctcggcagggtaggcctgatgacagccctgtccctccctgcctctgccttgcccaaggccacggagggcgtctgcagagaggcctgccttccggattccaggcgggcatgccctgcaaaccccgcctgggcctcccttggtctgcccagccctcggttagccctgcctgaatcagtagatacttgaacgagtccccantctgcgggaggcagtggtggggccatggacccatgcggggggttccagggtcacacgccacataacagacaaaaatacacacacgtgtgtttttctttgcaatacttgaaatattgccactgtgcttggacttagaagaagaaaatccccgtgacttcttcctcatcaccttgatggc

SEQ ID NO: 6528 - DNA, 705 bp, Homo sapiens
  misc_feature 668: n = A,T,C or G
gaatgagtgatgagagctttgttagcacccagcaaacaggccaatgggtgggttgacaggccaatggtggggtgtttgggcaggcagcaggggacaagtgggcaggtgaacatggctcaggcaggtaggcagagagtaagcagggaaaatgtatttgggggctgccctgtgaggggtgtggcatccctccagccgctgcctgctggggcctcggtctgtggcttaaaactcggtgtccaccacgcggaaagctggcctgcctgagtcaggcatcgacgaagaccgaaggctggcctccttttgtagctgaatctcctttagtgcaaatatggaagtagtgtcaggaagtttgtggatccgctcccccagactgaggaagaatggatgtttcatggcatcctctgcggagatccgatttcgaccctcaaactgcaacagcttggtgaggaggtcggccccgtcgctatcaagtctgggtgcgtggctcaaaagggcctcggctcggttcttggggtagttgtatgtcttgaactcctcgttggacaggatgcctggccacgtctcctcagttggggttccttagatacggaagatgaagtgtagctgttccttcaccgtggagctctggaaagaggggactggctggtgccatctcatataaaatgcantccacaccccacatgtcaattctgattggattagtcc

SEQ ID NO: 6529 - DNA, 544 bp, Homo sapiens
  misc_feature 459: n = A,T,C or G
ttgaatttcaaatgcagtttattgcagcaaaacaaggaaatggggagtttaagacctctccacaaaagaaaaacaacttgcttacaccttatgtacaaaaccaaaacagcacagagataagatgctaaggagctgtccacaccctgggtctaactggtcctactctggctggcttaaggaggtgctttgaaatgtcatgtgggtggtggtcactgctgaactgtttctcagggaaagaacaaagcagggtcatagccaggggactgagattgccactgatctgaaaacttcattgggaaacagcagaaaagaaagagctgggggaataggatgagctagtgtaactaaccataagctcttttctccggtaaggctgggacaaatcgacctcggtcttgccaagcatatttgttagtgatgctgggggagaactagagctaattgaaacagagggcatcnccttatctggttactcccggaataaagtggtagaaaccaacctcacgctggaactgccaccagaggacttgacaccccagagctt

SEQ ID NO: 6530 - DNA, 619 bp, Homo sapiens
  misc_feature 42: n = A,T,C or G
cttaaaactaaaaacttgagtctaccatttcttggttgcacntgaaaataccgcccagcctgatggtgttcccgtgctgtccctcccccttcccttctccccgcgtctacctccccaccccgttctgttccccctccctccttctccctctccctcaaatccgtgagttttggaagccccagggcctctctcccccgcccctcctggatgaggccaccatcccccaaaccggcttgttttgcagtttccccaggatcctggaagctcgctggcgctcgagggtggcggggacacgggggggtgggtgaaggttcgttaccttttctagtgcgttctatcatagttaacggttgcacacttttttaaaaaaagtaaatggatttgccacaattaaatgtcataacacttatgacagaatataaaatattaacatattttaagccaagttttaggtgtattttttgaatcttggttataaacccaattttaaagggcgatgtatccagcgttgtgaaggcaacagagtgtacccatatttatatttttataaaatacctataagactgtgaatctcttgtgctaatggctgagttaattgaaggatcgttttgcccctttt

SEQ ID NO: 6531 - DNA, 531 bp, Homo sapiens; identical to SEQ ID NO: 1834

SEQ ID NO: 6532 - DNA, 484 bp, Homo sapiens
  misc_feature 423: n = A,T,C or G
tcggcacgagtggcctcaaggactccccaacaggggctaactcttatgtgatcatcaagtgtgagggagacaaagtccgctcggctgtgcagaagggcacctccacaccagagtacaatgtgaaaggcatcttctaccgcaagaagctgagccagcccatcactgtacaggtctggaaccaccgagtgctgaaggatgaatttctgggccaggtgcacctaaaggctgacccggacaacctccaggccctgcataccctccacctccgggaccgaaatagccggcagcccagcaacctgccaggcactgtggccgtgcacattctcagcagcacctccctcatggctgtctgacacctgcccacctacctggctctgaccgttcccaccaccatctgcatgtccccactgggcctgagtctancctgggagccaggatactggggtccttttcccactcttccactgacttgctgtgtgacctt

SEQ ID NO: 6533 - DNA, 653 bp, Homo sapiens
ttcggcacgagggtgctcctgaatgtggaccgtgtggctgagcagctggagaagctgggctacccagccatccaggtgcgaggcctggctgactccggctggttcctggacaacaagcagtatcgccacacagactgcgtcgacacgatcacgtgcgcgcccacggaggccatccgccgtggcatcaggtactggaacggggtggtcccggagcgctgccgacgccagttccaggagggcgaggagtggaactgcttctttggctacaaggtctacccgaccctgcgctgccctgtgttcgtggtgcagtggctgtttgacgaggcacagctgacggtggacaacgtgcacctgacggggcatccggtgcacgatggcctgcggctgtacatccagaacctcggccgcgagctgcgccacacactcaaggacgtgccggccagctttgcccccgcctgcctctcccatgagatcatgatgcggagccactggacagatgtccacgtgaaggggacgtcgctgccccgagcactgcactgctgggacaggagcctccatgacagccacaaggccagcaagacccccctcaagggctgccccgtccacctggtggacaagctgcccctggccccactgcaacccctcatgcccca

SEQ ID NO: 6534 - DNA, 624 bp, Homo sapiens
  misc_feature 365: n = A,T,C or G
ttcggcacgagggtcggggcgagaggctgaggggatctggcggtggagcgctaggatcagacgcccccgcgatgaccagctcccccgtctccagagtcgtgtacaacggcaagaggaccagcagcccccgctccccacccagcagcagcgagatcttcaccccagcccacgaggagaacgtccgcttcatttacgaagcctggcagggtgtggagcgagacctgcgaggccaggtgccgggtggcgagcggggcctggtggaggagtatgtggagaaggtccctaaccccagcctgaagaccttcaagcccatcgacctgagtgacctgaagcgccggagcacgcaggatgccaagaagtcctanagcgcccggtgcccctccccggcctccggaagatcagggtgcgaggtgtcggttccctcctgtcctgtggtcctgcccctgggatgggggtgccttgctccagcgggctgcagatcccagcactggcgtgactgacggctgaggcctgcctctccttcccaagcccccttccttcatccttgggggtctcaggctgcccccatcatgggggtctgggccctgcccaccctcctgccctcccccagccacctggctgcat

SEQ ID NO: 6535 - DNA, 396 bp, Homo sapiens
  misc_feature 74: n = A,T,C or G
aatctgtcacccctcctagatcattatcccaggctaatcaaccctctctaaggcagtttccattcttgacttantgggagggaggaacaagcccctcggtgctggggagctctgggggaggtagggactgactgggcccaacccactttgttttggaaggtcaagcttagtaattaacctgaatgcttgggggagggggtgaaggagaaagaactgagtctaaggatgtgccatgtctttcaaattgctaattatcagcgagcatgatgtcatccgtaaatatatctaattctttagcttgtaattaaggtgctcattaaaagtgcagggaagacttgttttcctaaaaggggaaaaaaacaacaacacaaaaagtctttgttttgacctgacacg

SEQ ID NO: 6536 - DNA, 698 bp, Homo sapiens
  misc_feature 433, 668: n = A,T,C or G
cccggctgcagcatcctgtccaagtgctgccacgcgatggtgggctgatctaccccttcgcctggcagcacacctacatcccggtgctgccacccgccatggtcgacatcgtgtgctcgccgacgcccttcctcatcgggctgctctccagctcgctgccactgctcagggagtgccgctggaagaggtccttgtggttgacctcgtcaacagccggttcctcagacagatggacgatgaggactccatcctgccccggaagcttcaggtggccctggaacacattctggaacagaggaacgagctggcttgtgagcaggacgaagggcccctagacggcaggcacggtccagagtccagccccttgaacgaggtggtgtctgaagcctttgtccgcttcttcgtggagattgtgggacactactctttgttnctgacgtcgggcgagcgtgaggagagaaccctgcagcgggaggccttccgcaaagctgtctcctccaagagcctccgccacttcctggaggtcttcatggagactcagatgtttcggggcttcatccaaggagcgggactgcgccggcagaatgcaaaaggtctgtttgaggtccgagcccaagagtatctggaaacactccccagtggagaagcacagggttgtcaataagttnctgaagggacttaggcaataaaattaaatt

SEQ ID NO: 6537 - DNA, 478 bp, Homo sapiens
attcggcacgaggaaaggaggctggggggcggcggaagcgagtagagtttgtgacatttgcgccagcccctccagcccagtcacctgaggagcctgtaggggcccctgctgtgcagtccatccttgtggcaggcgaggaggacatccgctgggtgtgtgaggacatggggctgaaggaccctgaggagcttcgcaactacatggagaggatccggggcagctcctgaccctccacagccacctggtcagccaccagctggggcaacgagggtggaggtcccactgagcctctcgcctgcccccgccactcgtctggtgcttgttgatccaagtcccctgcctggtcccccacaaggactcccatccaggccccctctgccctgccccttgtcatggaccatggtcgtgaggaagggctcatgccccttatttatgggaaccatttcattctaacagaataaaccgagaaggaaaccag

SEQ ID NO: 6538 - DNA, 525 bp, Homo sapiens; identical to SEQ ID NO: 1838

SEQ ID NO: 6539 - DNA, 490 bp, Homo sapiens
gtgattatacgttttattagactcgggaggggtatggcagggcttcatcagtgttccttcaaattaaaaaaaaaaatacaaaagctacgtagaaaacgtcagatcagacgactaaactttcccgactcagggccaagttcttcttgagcctgcgctctcgggacgcctgcgagtcggtctccgagtacgggggcggcgcgggcgggtagtaggcctcttcctcctcctgtttgtggggtctcctcctctcctccgaccccttcttcctcacagcctcctccagtagccgcccatcataggggaggtccccggacctggagccgttgtcccgagggtcccggttacggtggtggtgggacctggggtcggcaggagggcgctcccgagacctgaagtcgtcgtagtgggggtcccgggagcgtgggaagtccctcgagtcgtcttggtcatagaggtcgtcccggctgcggctcccggggggcatgtaggc

SEQ ID NO: 6540 - DNA, 584 bp, Homo sapiens
tcggcacgaggcttacttttaaccagtgaaattgacctgcccgtgaagaggcgggcatgacacagcaagacgagaagaccctatggagctttaatttattaatgcaaacagtacctaacaaacccacaggtcctaaactaccaaacctgcattaaaaatttcggttggggcgacctcggagcagaacccaacctccgagcagtacatgctaagacttcaccagtcaaagcgaactactatactcaattgatccaataacttgaccaacggaacaagttaccctagggataacagcgcaatcctattctagagtccatatcaacaatagggtttacgacctcgatgttggatcaggacatcccgatggtgcagccgctattaaaggttcgtttgttcaacgattaaagtcctacgtgatctgagttcagaccggagtaatccaggtcggtttctatctacttcaaattcctccctgtacgaaaggacaagagaaataaggcctacttcacaaagcgccttcccccgtaaatgatatcatctcaacttagcattatacccacacccacccaagaacagggtttgtt

SEQ ID NO: 6541 - DNA, 543 bp, Homo sapiens
ttcggcacgaggagtgcagtggcctggtcttggctcactgcaacctccacctcctgggttcaagggagtctcctgcctcagcctcccgagtagctgggattacaggtgtgagccaccatacccagactcatttgatgagttttgatgtaaaagcatgtaactcaaacccctatgtctggaacatctgtattacatctgaattttttcacctagtcaattcctgcacctctctctcctgtcccttcttccctcccctggcagtcagctactgttaggattttgttcactgtagattaattttgcctattctagaacttcatataacggactcacttatgcagtatgtattctgtaagttccttttactcagcatgtttgtatgttcatcagtgtgtttaagctttgttcctttttatggctgagcagtgttctatgtatgaatgccacattttaacgtttcacctgttaggtgaacaactaactggtgaacaatgggctgtttctagtttggggctatcatgaataaagttggtatgaacatgt

SEQ ID NO: 6542 - DNA, 337 bp, Homo sapiens
ttcggcacgaggctggtggccgccttcctgcttttcctggccctgcggagcattcgctgtctgcggaatgtgattcactggaacctcatcaccacctttatcctgcgaaatgtcatgtggttcctgctgcagctcgttgaccatgaagtgcacgaaagcaatgaggtctggtgccgctgcatcaccaccatcttcaactacttcgtggcagccccacctcttgagagcccccagtgccggagcagaaaggaccctggacccagaggcagatactgcggggtggtagaaaaggtagagtaggctgtggcaatggaataaaacacgattaaaaacgttg

SEQ ID NO: 6543 - DNA, 372 bp, Homo sapiens
gcggccgcccagagcaggtggggacgcgcaggcctcgaggtcgtcctcccgcgccaggcgacgcagccacaccagctcgcagttgcagtgcagggggttcccgccaaaggccagcaccagggcagaggcgggcgagccccggggcctggcgagcaggggcaggcgggagaagagtgggtcgggtgggattgtggtcaggcggttggaggtcatgtccagccgggccagcttgtgcaggcgggaaaaagcgccggcgggcacagaagccagcaggttgtggtcgaggcccaacgtgttgacgttgcccaggcggcccagggcctcccagggcagctgctcgaggttgttgtaggagaggtcgaggtcctccag

SEQ ID NO: 6544 - DNA, 568 bp, Homo sapiens; identical to SEQ ID NO: 1842
  misc_feature 431: n = A,T,C or G

SEQ ID NO: 6545 - DNA, 485 bp, Homo sapiens; identical to SEQ ID NO: 1843
  misc_feature 144, 443: n = A,T,C or G

SEQ ID NO: 6546 - DNA, 692 bp, Homo sapiens
  misc_feature 472, 485, 573: n = A,T,C or G
ttcggcacgaggggtgcctcctggcaggctctgaagagctggggctccgggaagacacgctgagggtcctagctgccttccttaggcgtggtgaggctgccgggtctcctgttccaactccacctaggcccagctactccagacttctatgctttggtggcccagcggctggaacagctggtccaagagcagctgaaatctccgcccagcccagaattacagggtcccccatcgacagagaaggaagccatactgcggaggctggtggccctgctggaggaggaggcagaagtcattaaccagaagctggcctcggaccccgccctgcgcagcaagctggtccgcctgtcctccgactctttcgcccgcctggtggagctgttctgtagccgggatgacagctctcgcccaagccgagcatgccccgggcccccgcctccttccccggagcccctggcccgcctggccctanccatggagctganccggcgcgtggccgggctggggggcaccctggccggactcagcgtggagcacgtgcacagcttcacgccctggatccaggcccacggnggctgggagggcatcctggctgtttcacccgtggacttgaacttgccattggactgagctctttctcaaaagctgctacaagatgacacctcatgtccctgccctcttcgtgtgctttt

SEQ ID NO: 6547 - DNA, 418 bp, Homo sapiens
tcggcacgagggccttctgcaagaactgttgcaatgaacatttgcacatgttcaccatctggctgggctacatcaactccacactgaaccccctcatctaccccttgtgcaatgagaacttcaagaagacattcaagaaaattctgcatattcgctcctaagggaggctctgaggggatgcaacaaaatgatccttatgatgtccaacaaggaaatagaggacgaaggcctgtgtgttgccaggcaggcacctgggctttctggaatccaaaccacagtcttaggggcttggtagtttggaaagttcttaagcaccatagaagaacagcagatggcggtgatcagcagagagattgaactttgaggaggaagcagaatctttgcaagaaagtcagacctgtttcttgtaactgggttc

SEQ ID NO: 6548 - DNA, 503 bp, Homo sapiens
gccaaggtcgtcactgatctcaagatttcaaccttgaccatgggcagtgaccatattgaaaggggagcaagttcggcagtgggagagttgaccgtgtcaccccctgcattgtgctgccatttggccagcctgtccaagggcatgacaccaagtatacactacagacagagaaacactacagcaacccagggttgtcctgaaacagacttttatacttgaacatggagactgcacatggactttacggtttgtgctgtgggataaacggaagctacagtgagaacatagccagtcccaaagacaatttcaaagaaaaatgacagtaaagattatctgggagtagtctttgacagtgcttatttgatactgtctctcagagtttgcaaaccagattgtacaagtcattaacgtcagatagctttaaagttgcgaccttcttgtacatgaatcttctagccagtttcctttcctttgtaacgaaacatgaaatcatagaatgtatg

SEQ ID NO: 6549 - DNA, 570 bp, Homo sapiens
  misc_feature 480: n = A,T,C or G
ttcggcacgaggcggctcgctggggcagcatggcggggtcgccgctgctctgggggccgcgggccgggggcgtcggccttttggtgctgctgctgctcggcctgtttcggccgccccccgcgctctgcgcgcggccggtaaaggagccccgcggcctaagcgcagcgtctccgcccttggctgagactggcgctcctcgccgcttccggcggtcagtgccccgaggtgaggcggcgggggcggtgcaggagctggcgcgggcgctggcgcatctgctggaggccgaacgtcaggagcgggcgcgggccgaggcgcaggaagctgaggatcagcaggcgcgcgtcctggcgcagctgctgcgcgtctggggcgccccccgcaactctgatccggctctgggcctggacgacgaccccgacgcgcctgcagcgcagctcgctcgcgctctgctccgcgcccgccttgaccctgccgccctancagcccagcttgtccccgcgcccgtccccgccgcggcgctccgaccccggcccccggtctacgacgacggccccgcgggcccggatgctg

SEQ ID NO: 6550 - DNA, 361 bp, Homo sapiens
tgtcccctgcaaaatggacaaagcttaccccttggctgtgcagggtcaactttctgactggtgatagggattctcatgcaggttaagcttgtgctgctcctcctcacctgcaaagcttttctgccacttttgcctccttggaaaactcttatccatctctcaaaactccagctaccacatccttgcagccttccctcatatacccccactactactgtaaccctgtccttccctccagccccactctggccctggggctggggaagtgtctgcgtccacctgtctcccctgacctcaaggttccttgggggctgctctgaggcctcagtacagatggggctctggaaatgtttgttgactg

SEQ ID NO: 6551 - DNA, 259 bp, Homo sapiens
tggtacgcctgcaggtaccggtccggaattcccgggtcgacatcatcatcatgatcgctcgacatcgatacgactttttttttttttttttttgttttttaaaaaaaaacggggtttccccttgtaacccaggagggtctaaatttcttaacctaataatccccccccttaaccctccaaaagggttggaataacaggcgtaaggaaccgaccccggccaaaagccttttttttttaaaaccccttgctggagaaaacc

SEQ ID NO: 6552 - DNA, 609 bp, Homo sapiens; identical to SEQ ID NO: 1847

SEQ ID NO: 6553 - DNA, 332 bp, Homo sapiens
  misc_feature 192, 239, 290, 314: n = A,T,C or G
gttgctggatccgctgccgctcagtctctggggtgaactcgaagctcagtggccgtatctcatctctccgcaccaagatggccctgctatccccagcattggccatgtacagctttccctgcagggacacagccaccagggctgtgcagccgcccatctggcctgaggctccagctcccgcccgatcacctnatcacattcctgaaaggcactctccaatgccccgatcaccatgtctnctgccctgatgcccttttcctccacaaactgagggtcactggggcagatgnagcggccattgaggtgcatggggnagctgagtggccaccaag

SEQ ID NO: 6554 - DNA, 209 bp, Homo sapiens
ggtcgacccccactgcactctgcctgggcaatagagcgagaaaaaaattttttttaaattaggttttcataattatctttttcatcattatgaaagcaatccttccacaccaagggaaacattgagaaaataccaagttttagaaaggcgaaatgaaaataaatctcctaacttcccatcaaaaaaaaaaaaaaaaaaaaaagtcgacg

SEQ ID NO: 6555 - DNA, 496 bp, Homo sapiens
tctcttcctcggcgctgcctacggaggtggcagccatctccttctcggcatcatggccgccctcagaccccttgtgaagcccaagatcgtcaaaaagagaaccaagaagttcatccggcaccagtcagaccgatatgtcaaaattaagcgtaactggcggaaacccagaggcattgacaacagggttcgtagaagattcaagggccagatcttgatgcccaacattggttatggaagcaacaaaaaaacaaagcacatgctgcccagtggcttccggaagttcctggtccacaacgtcaaggagctggaagtgctgctgatgtgcaacaaatcttactgtgccgagatcgctcacaatgtttcctccaagaaccgcaaagccatcgtggaaagagctgcccaactggccatcagagtcaccaaccccaatgccaggctgcgcagtgaagaaaatgagtaggcagctcatgtgcacgttttctgtttaaataaatgt

SEQ ID NO: 6556 - DNA, 550 bp, Homo sapiens
acagagggggagaatcaagggcctcggccgccgtcccgcagctcagtccatcgcccttgccgggcagcccgggcagagaccatgtttgacaagacgcggctgccgtacgtggccctcgatgtgctctgcgtgttgctggctggattgccttttgcaattcttacttcaaggcatacccccttccaacgaggagtattctgtaatgatgagtccatcaagtacccttacaaagaagacaccataccttatgcgttattaggtggaataatcattccattcagtattatcgttattattcttggagaaaccctgtctgtttactgtaaccttttgcactcaaattcctttatcaggaataactacatagccactatttacaaagccattggaacctttttatttggtgcagctgctagtcagtccctgactgacattgccaagtattcaataggcagactgcggcctcacttcttggatgtttgtgatccagattggtcaaaaatcaactgcagcgatggttacattgaatactacatatgtcgagggaatg

SEQ ID NO: 6557 - DNA, 559 bp, Homo sapiens
acagagggggcagagcttttgaaggcggcgggaggcggcgagcgccatggccagtccgggctgcctgctgtgcgtgctgggcctgctactctgcggggcggcgagcctcgagctgtctagaccccacggcgacaccgccaagaagcccatcatcggaatattaatgcaaaaatgccgtaataaagtcatgaaaaactatggaagatactatattgctgcgtcctatgtaaagtacttggagtctgcaggtgcgagagttgtaccagtaaggctggatcttacagagaaagactatgaaatacttttcaaatctattaatggaatccttttccctggaggaagtgttgacctcagacgctcagattatgctaaagtggccaaaatattttataacttgtccatacagagttttgatgatggagactattttcctgtgtggggcacatgccttggatttgaagagctttcactgctgattagtggagagtgcttattaactgccacagatactgttgacgtggcaatgccgctgaacttcactggaggtcaattgcacagc

SEQ ID NO: 6558 - DNA, 470 bp, Homo sapiens
agtggatccaaagaattcggcacgagatgatggttatgtagtctttaggaggatgcaattataacattgctcttcctttcacgcaccacatgatttagcaagtacttcatattggctccaccattaacatggtcaatggcttctggatacctcacagttcaggcacagtttctcctgaagattttttacctctcccatctttaagaaattgtctggatgtccatgaaagatgctgacacttgtattaattcattaaaaaacaccaccccctccctgaaataaactaaaaagtaatgaattcatagaaaaaaatttcaccaagattgaaactagagaatatacctagacttgcactttgagctttgagaaatgtgtacctattcaccattccaacgtgaagaagctctgcagtaggaaaaataattaacacacttatagtctactgcccatgtaaggatcagctccggcta

SEQ ID NO: 6559 - DNA, 551 bp, Homo sapiens
tcggcacgaggccgggagactgacacgaagccagcagaggtcagaggggactctgaccacagcccgctctctggctgtctgtctgcagtgcccggctgagggtgggaggcaaacacgccttgttcctgctcttcccagttcagcttggtgggagaaagtcattcgcgtggctcgggacgctcatgtaaatttggttttggtgctcaagggttctttcctcccaggggcaggtgtttctttcctgtttgtcttgtgtcttgagagcttggccttatgaccagtgagaactctctccctggtctctgccagcccaagcatcactgcccgaggcgccagctcagtttcaccgtccacgtccacaaggggcttttcccaccttcacctttgtcgctgggtcagtgctggaaagcgcccctcactcctgcgctgacaagggcccttctctactgtctgtggggtggttccgggctgggggggctgcctcctttgcacctgattttgaaggtgtctctttcatccatggttaagtcataaaaagcttattggttttg

SEQ ID NO: 6560 - DNA, 215 bp, Homo sapiens; identical to SEQ ID NO: 306

SEQ ID NO: 6561 - DNA, 539 bp, Homo sapiens
tcggcacgaggcacctgccgtaggcacatggaggaggagcccagagttgggcactggcaaatgtctcctccctcccatgctccttggcttctgaaggctgaagctcctttggctgggccaagaaggatctagtctgcccactacattctcaaacaagaggacttggaggaaaagagctgctatacatcatatgcagaggaagcttctacgcgctagagaggatcaaggggccacactggaccatgtgaacagccatcctgaactgccatcagctaccacactggactctgcagggcagccatcctggatgatggaagccaccatattgacttggggtataggcccaaactgccttcgtttggtccagggccatcgtgggtgatgacgattgctctcttgcactcaaggacatttgatgctggtagtatggattatgagatggactagcccctgccccagcccagctctcacattcccctttgttttttcccataccaactgcttctaccctcccctattacatacatctttcaatgtcc

SEQ ID NO: 6562 - DNA, 563 bp, Homo sapiens
ttcggcacgaggctgtatagagacaaccatttagatgacaatcacaagacttacagtctataaggcaggttttatttctggttcttctgtgaacctatttgggtaacccccgccccccaagacctcagttccctcatgaagatgagcctagactacctcataaaaatggcccagagtgtctccatggcccccgatagtctctgacttcgccatttggttgaatcagttttcattaactcacggggaatatttgatctgctcatctcatagggatatagcaaaggcaatttgttgagtgttgggggaatggataaaggtgagtaacactaagttcctatttgataagtgtcattactgagaacttaaggccacctaacaccaaactgggaaaagcacaaaaaaatgcactaaaataaataataggcaagttgtgacatttgaatttcacgtatcttcattttcatttttatattttatttactattttgctccacaatttgagtcaaacatgtgatgagagttctaacttgatatgtttacttcagtcccaaacatagtcatct

SEQ ID NO: 6563 - DNA, 551 bp, Homo sapiens
actaagacttgagcttttaaatgtctaacaatatcctgtaatcctttatgaacttcaggccttaagggatattgcgtttgatagggaaaagtggtggggtcttttagcctgatttggattgggcgggcatttttgccattctgcattgtccttccaatgcccagacttcagtgttgattccctccttaagcaggggacaacaaaagggtaacttgttccccatattcacgtagataatagctccagctttggctaatatgtccctccctaataaggatatgggactttcaggcataacaagaaaggcatgtgaaaagagcaaagtctcccaattacaattaaggaggtgggagaaatacctggttacatgctgtcccaggattcctcagatggtaatggactttgaggacagccgaccagggcaggagattaacactgagagggccgcaccagtatccaagaggaagtcaatttcctgtccctcaatagttaaatgtacctggggctcagtgagggtgatgacataagccggtgcttgttccaggcaccct

SEQ ID NO: 6564 - DNA, 435 bp, Homo sapiens
cggcacgatgagtgggagcggcgtcggagggccccctcaaggcatcctgggctacactgagcaccaggtggtctcctctgacttcaacagcgacacccactcctccacctttgacgctggggctggcattgccctcaacgaccactttgacaagctcatttcctggtatgacaacgaatttggctacagcaacagggtggtggacctcatggcccacatggcctccaaggagtaagacccctggaccaccagccccagcaagagcacaagaggaagacagagaccctcactgctggggagtccctgccacactcagtcccccaccacactgaatctcccctcctcacagttgccatgtaaaccccttgaagaggggaggggcctagggagccgcaccttgtcatgtaccatcaataaagtaccctgtgctcaacc

SEQ ID NO: 6565 - DNA, 627 bp, Homo sapiens
  misc_feature 90: n = A,T,C or G
tcggcacgagctggaccctcatgcaccctggacgactcacgcattaccatgaggggctccccaccaccaggggcacccgctacatcgcantctccttcgtcgatccctaattggccaggcctgaccctcttggacctttcttctttgccgacaaccactgcccagcagcctctgggacctcggggtcccagggaacccagtccagcctcctggctgttgacttcccattgctcttggagccaccaatcaaagagattcaaagagattcctgcaggccagaggcggaacacacctttatggctggggctctccgtggtgttctggacccagcccctggagacaccattcacttttactgctttgtagtgactcgtgctctccaacctgtcttcctgaaaaaccaaggcccccttcccccacctcttccatggggtgagacttgagcagaacaggggcttccccaagttgcccagaaagactgtctgggtgagaagccatggccagagcttctcccaggcacaggtgttgcaccagggacttctgcttcaagttttggggtaaagacacctggatcaaactccaagggctgccctgagtctgggacttctgcctccatggctggtcatg

SEQ ID NO: 6566 - DNA, 522 bp, Homo sapiens
cgcgtcgactgcccagagtccgcggccggggcgcggaggagccaagccgccatggcctaccacagcttcctggtggagcccatcagctgccacgcctggaacaaggaccgcacccagattgccatctgccccaacaaccatgaggtgcatatctatgaaaagagcggtgccaaatggaccaaggtgcacgagctcaaggagcacaacgggcaggtgacaggcatcgactgggcccccgagagtaaccgtattgtgacctgcggcacagaccgcaacgcctacgtgtggacgctgaagggccgcacatggaagcccacgctggtcatcctgcggatcaaccgggctgcccgctgcgtgcgctgggcccccaacgagaacaagtttgctgtgggcagcggctctcgtgtgatctccatctgttatttcgagcaggagaatgactggtgggtttgcaagcacatcaagaagcccatccgctccaccgtcctcagcctggactggcaccccaacaatgtgctgctg

SEQ ID NO: 6567 - DNA, 228 bp, Homo sapiens
gcatcattagggctgatctccctgctggtatcggggcaggcggcgggggtcctgacatccgagggccggcggggaccacgaagcacttggggaagatgccgatgcgccgtcacagtggccctccagccatgcctggtccacttcacacaggacgtccaccgtgtccccctgtcggaagcccaggtcctctggcccctggcgggagtagctgtgctgggccaccacctg

SEQ ID NO: 6568 - DNA, 595 bp, Homo sapiens
tggatcccccgggctgcaggaattcggcacgagggcagcaagatggtgttgcagacccaggtcttcatttctctgttgctctggatctctggtgcctacggggacatcgtgatgacccagtctccaaactccctggctgtgtctctgggcgagagggccaccatcaactgcaagtcgagccagagtgttttatacagctccaacagtaagaactacttagcttggtaccagcagaaaccaggacagcctcctaagttgctcacttactgggcatctacccgggaatccggggtccctgaccgattcagtggcagcgggtctgggacagatttcactctcaccatcagcagcctgcaggctgaagatgtggcggtttattactgtcaccaatattatagtactcctcacacttttggccaggggaccaagctagagatcaaacgaactgtggctgcaccatctgtcttcatcttcccgccatctgatgagcagttgaaatctggaactgcctctgttgtgtgcctgctgaataacttctatcccagagaggccaaagtacagtggaaggtggataacgccctccaatcgggtaact

SEQ ID NO: 6569 - DNA, 378 bp, Homo sapiens
ttcggcacgaggttttttttttttttggcccacttaattttttttttttttgaaaaaagggagtcgccctacggggccaatgctgatttaaaactccggaaatcaaaggatcctcccacctgggcctccctttttgaatatagagggggctaaataaaaaccacccaaatgcaggaggggataatttttttgctgggaattttgtggttgggggaaccttaactttaaggcccgggccccttaggcaagaaccttgtaaatccaggccgaatatttcgccacgggggggaaaatccggggttttttggggttgccgaaaacccccaaccccaagggaaccaccccttaaaccacccccccgaacacaagggggccccg

SEQ ID NO: 6570 - DNA, 628 bp, Homo sapiens
tcggcacgagccgctccagcacccccgaaaccgggcaacccacctcctggccaccccgggggccagagttcttcaggaacatctcagcatccacccagtctgtcaccaaagccacccacccgaagcccctctcctcccacccagcacacgggccagcctccaggccagccctccgccccctcccagctctcagcaccccggaggtactccagcagcttgtctccaatccaagctcccaatcacccaccgccgcagccccctacgcaggccacgccactgatgcacaccaaacccaatagccagggccctcccaaccccatggcattgcccagtgagcatggacttgagcagccatctcacacccctccccagactccaacgccccccagtactccgcccctaggaaaacagaaccccagtctgccagctcctcagaccctggcagggggtaaccctgaaactgcacagccacatgctggaaccttaccgagaccgagaccagtaccaaagccaaggaaccggcccagcgtgcccccacccccccaacctcctggtgtccactcagctggggacagcagcctcaccaacacagcaccaacagcttccaagatagtaacagactccaatt

SEQ ID NO: 6571 - DNA, 552 bp, Homo sapiens; identical to SEQ ID NO: 1861

SEQ ID NO: 6572 - DNA, 372 bp, Homo sapiens
  misc_feature 176, 257: n = A,T,C or G
gagcttcagtcccactccaggcttcacccccaccctgggcttcagtcccgtgcccagttccaccttcacctccagctccacctatacccccggtgactgtcccaactttgcggctccccgaggagaggtggcaccaccctatcagggggctgacccatccttgcgacagccttcgnctccgaccccatccccaacccccttcagaagtgggaggacagcgcccacaagccacagagcctagacactgatgaccccgngacgttgtacgccgtggtggagaacgtgcccccgttgcgctggaaggaattcgtgcggcgcttagggttgagcgaccacgagatcgatcggttgggagttgcagaacgggagttg

SEQ ID NO: 6573 - DNA, 467 bp, Homo sapiens
  misc_feature 406, 435, 449, 455, 463: n = A,T,C or G
gggaatgacacagagctggtagcctgccttcggacacgaccagcgcaggtcctggtgaaccacgaatggcacgtgctgcctcaagaaagcgtcttccggttctccttcgtgcctgtggtagatggagacttcctcagtgacaccccagaggccctcatcaacgcgggagacttccacggcctgcaggtaactagtggctagctggcgtgaagctggctcctctgggtcccaacggtccctcccctccctgcagggacccaggcatgagggcttctccaggcccattcccagaagtcccagaagtcctccctgagggctcagatcccagggtggtcagcagggcagacaggaaagccaccatgggtctattttctctttctctgcatcctcccctgattcgtccttnctgtccatggttcgggttgtaatgttcancctctggcttttgntgtcantgttctgntatt

SEQ ID NO: 6574 - DNA, 392 bp, Homo sapiens
  misc_feature 168, 293, 299, 322, 340, 385: n = A,T,C or G
atttatttcccggtcagaaaagaagcagggacaggcgcctctgcctgagcctggcagacacaacacgaagaccggggatggggcgggggaggcacaggagacggctctcagcaatgtgtgcacttggtcccttgtttgttcctggctgggtcagggaaggcctgccgngggtggtggcactgagagcctgggggaacaggcgccaggccagtggccagggacggcacggacggaggcaataaatactgatggccagggcggggctcctggctgggcccagggtggggtgggtnaggctntccatcgagggctcttggggggntttgggctctgggcactnccccttgagacagaaaaggcagaggcaggacaattacccagcctnctgggat

SEQ ID NO: 6575 - DNA, 605 bp, Homo sapiens; identical to SEQ ID NO: 1862
  misc_feature 325, 474, 545: n = A,T,C or G

SEQ ID NO: 6576 - DNA, 516 bp, Homo sapiens
tcggcacgagacaaaagcacaattgctagattggatggtaacaggttgtttagctttgtaagaaattgcaaaactgccttccaaaatggctgtcctattttgcattcccaccaacaatgaaggagagatcccattgctccatatccttaccagcatgtggtggtgtcagtgttctggattttagccattctaataggcaaataatggtatctccttgtttttttgtttcttgttttgttttgagacagtctccctctgtagctcaagctggagtgcaatggcacgatctcggcccactgcacccggcccaaaatgtttttaaaaggcatcacaggaaatgtaacacaaacagcttaatatttggttttatggaggtgatttaaggagcaataggaagtaatttattgataataaaaaagccgttaattttataattgtaaagaatgttaaggaatttgtggtcttcctgagtaaattacatctacttaattaagcggccgcaagcttattcccttt

SEQ ID NO: 6577 - DNA, 397 bp, Homo sapiens
acatacgttggttttgagggctattcagccattccattttactctctatttaaaggccgtgagcaagcttgtcatgagcaaatatgtcaagggagtcaatttctgaccaatcaagtacactaaattagaatatttttaaagtatgtaacattcccagtttcagccacaatttagccaagaataagataaaaacttgaataagaagtaagtagcataaatcagtatttaacctaaaattacatatttgaaacagaagatattatgttatgctcagtaaataattaagagatggcattgtgtaagaaggagccctagactgaaagtcaagacatctgaatttcaggctggaaaactatcagtatgatctcagcctcagttctcttgtctgtaaaatgga

SEQ ID NO: 6578 - DNA, 570 bp, Homo sapiens
tcggcacgagggacgcctacccgccgcagtactgatcattctatttccccctctttgatccccacctccaaatatctcatcaacaaccgactaatcaccacccaacaatgactaatcaaactaacctcaaaacaaatgataaccatacacaacactaaaggacgaacctgatctcttatactagtatccttaatcatttttattgccacaactaacctcctcggactcctgccttactcatttacaccaaccacccaactatctataaacctagccatggccatccccttatgagcgggcgcactggttataggctttcgctctaaaattaaaaatgccctatcccacttcttaccacaaggcacacctacaccccttatccccatactagttattatcgaaaccatcagcctactcattcaaccaatagccctggccgtacgcctaaccgctaacattactgcaggccacctactcatgcacctaattggaagcgccaccctagcaatatcaaccattaaccttccctctacacttatcatcttcacaattctaattctactgactatc

SEQ ID NO: 6579 - DNA, 549 bp, Homo sapiens
agactcaccgggctgtgttcaggttcatcccgcggcatccagacgagctggagctggatgtggatgaccctgtgttggtggaggccgaggaggacgacttctggttccgtggcttcaacatgcgcacgggggagcgcggtgtgtttcctgccttctacgcccatgcggtgcccggccctgccaaggacctgctggggagtaagcggagcccctgctgggtggagcgctttgacgtgcagttcctgggctccgtggaggtgccctgccaccagggcaacggcatcctgtgtgcagccatgcagaagattgccactgcccggaaactgaccgtccacctgcgccctcctgcctcctgtgacctcgagatctctcttcggggggtcaagctgagtctgagcggaggagggcctgagttccagcgctgcagccatttcttccagatgaagaacatctccttctgcggctgccatccccgcaacagctgctatttcggcttcatcaccaaacaccccctgctgagccgcttcgcctgccacgtctttgtctccc

SEQ ID NO: 6580 - DNA, 556 bp, Homo sapiens
  misc_feature 433: n = A,T,C or G
tgggcgctcttaaccacccccaacgcccttgtctgcatgtctttttctctgtctcctccttttctgtttcttctcccagacaggtgaagaaacaagaaaactaagaaatccgagcggttggagggggagtctgtgtggatgggatggggacgccgggggaggggctgggccgctgctcccatgccctgatccggggagtcccagagagcctggcgtcgggggaaggtgcgggggctggccttcccgctctggatctggccaaagctcaaagggagcacggggtgctgggaggtaaactgaggcaacgactggggctacagctgctagaactgccacctgaggagtcattgccgctgggaccgctgcttggcgacacggccgtgatccaaggggacacggccctaatcacgcggccctggagccccgctcgtangccagaggtcgatggagtccgcaaagccctgcaagacctggggctccgaattgtggaaataggagacgagaacgcgacgctggatggcactgacgttctcttcaccggccgggagtttttcgt

SEQ ID NO: 6581 - DNA, 488 bp, Homo sapiens
  misc_feature 324, 404, 448, 465, 475: n = A,T,C or G
aaattcatgtttttaattggacttaatacaaaggtcccccaggaggccctgggaggagggggacagcctgggagaggcagagattcatggccagcagcccacccccacctgccacccactccccaacaagggtcccagactctttcaataatcctaaaaaaaccgacgagagcgcaggcagatgaagagccccttcatcttcacacgggtgacaggctgccctgccctgcccagggccctggttcctccccagccaagtcaggtgcccagcccagaccctgccctggcaaggtggggcagagcaatctggtcctccagggaggncagggcgccatgttaaacattcaacagggccagaccccatttccttccagccagtgggggccccggagttccagttgttncaccccacagcttgtttcagttcagttcaatttccagggcattncttggtttcggttgganggttgacagnttgggggcaggtt

SEQ ID NO: 6582 - DNA, 440 bp, Homo sapiens
ctctctttgatggaatcgctacagggctcctggtgctgaaggacttgggcattcaggtggaccgctacattgcctcggaggtgtgtgaggactccatcacggtgggcatggtgcggcaccaggggaagatcatgtacgtcggggacgtccgcagcgtcacacagaagcatatccaggagtggggcccattcgatctggtgattgggggcagtccctgcaatgacctctccatcgtcaaccctgctcgcaagggcctctacgagggcactggccggctcttctttgagttctaccgcctcctgcatgatgcgcggcccaaggagggagatgatcgccccttcttctggctctttgagaatgtggtggccatgggcgtttagtgacaagagggacatctcgcgatttctcgagtccaaccctgtgatgattgatgccaaaga

SEQ ID NO: 6583 - DNA, 605 bp, Homo sapiens
  misc_feature 385: n = A,T,C or G
tttggggccagacccccactagctgggagcctgggggctcctctaaggctgaggaaggaaatttggccccaggttgttggggggtcttgggtctcccaggacggaaggcccagggcagggagggggcatgtggttgggctcctttatctccctgtgtccccttcctgctttgagctagggggctgactctgcctcccaggacacaagtctccaaagtgcctgtgagggcgggccctccgcaccctctgccctctgcctggcaggccaacctcagcccacctgcccagaggccctccctgtggacaccccctcacctatttggccaaacaattctggctgcagcttcaggggccatggctggaagcagcccctgcagatccctcangccccgaggtcagggtttgagggatgagaccaggtgatagtgggggaggggttacttcctttgttacctaacaagtagggctatttccatcggtattttaaatgtggggtcacagatcttttggggagggtgtgcttggcagggggcctcttggagccaaaggatgtggtgtgagttgcgattggctggcactcacacccccacccctcacccacatccc

SEQ ID NO: 6584 - DNA, 560 bp, Homo sapiens
cttgaagaagcaggcagctgagtatcgagaaattgacaaacgtatgaacagcattaaaccagaccttatccagctgagaaagacgagagaccaatacttgatgtggttgactcaaaaaggtgttcggcaaaagaagttgaacgagtggttgggcaatgaaaacactgaagaccaatattcactggtggaagatgatgaagatttgccccatcatgatgagaagacatggaatgttggaagcagcaaccgaaacaaagctgaaaacctgttgcgagggaagcgagatggcacttttcttgtccgggagagcagtaaacagggctgctatgcctgctctgtagtggtggacggcgaagtaaagcattgtgtcataaacaaaacagcaactggctatggctttgccgagccctataacttgtacagctctctgaaagaactggtgctacattaccaacacacctcccttgtgcagcacaacgactccctcaatgtcacactagcctacccagtatatgcacagcagaggcgatgaagcgcttactctttgatccttctcctga

SEQ ID NO: 6585 - DNA, 606 bp, Homo sapiens
  misc_feature 333: n = A,T,C or G
ctccccctcccccaccaccataccgaatgcatgggtcagaacccccgagccgaggaaagcccccacctccaccctcaaggacgccagctgggccaccccctcctcctccaccgcccctgaggaatggccacagagattctatcaccactgtccggtctttcttggatgattttgagtcaaagtattccttccatccagtagaagactttcctgctccagaagaatataaacactttcagaggatatatcccagcaaaacaaaccgagctgcccgtggagccccacctctgccacccattctcaggtgaagcctggcttggtcccgttcctcangaaaaggatggaccttctcttcttctcagatggtcccttccattcccctgaaacctgcatgagagctcctaacatgtttctccaatgcaatcaagccctaaactccaaatgtcctcccagctcacccccatctatgcatctcatctctggatttggtgatcagactctatattgacagtaggatctcaaaccctgcatccatccttcctccagcaagccctgctagccacatgaagaacaagtttccgtgtcttctgccttcctcttggggaa

SEQ ID NO: 6586 - DNA, 376 bp, Homo sapiens
tcggcacgaggccgcactttttttttttttttttgaaaagggaatctccctccgccccccaggttaaagggcaggggggcaatttgggttaattaaaacctttgcctccggggcccaccccttttttttgcctaaccctcccaagaagtgggaaccaaaggcgcttgccaccaccccgggttaatttttggattggtaaaaaaaaacagggccccaccttgtaacccaggagggtctaaatcccccaaccttggaacccccccccctaaccctccaaaagggctaaaataacagggggaacccaccgccccgggccaaatgtcccttttttataaggacaatttgttattgggagaaacctgcccaaacccccccc

SEQ ID NO: 6587 - DNA, 605 bp, Homo sapiens
  misc_feature 405: n = A,T,C or G
tcggcacgagggtttccgcctctcccgcatggtcccgagatgctggggacagcactccgaggctaatggctccagctcactaggccgatcctgctgtgcccccgagctgctccctttcctgcacctcccaggaccgcccctccctgaactgctttccctgagccccttattcccgctcactccctcttggaggaccttggcctgttcatttgcagagaagatagaaatggccacacttatgaccccttagctcccccactcctccctacaggcccacccctgaggacacccaggccaccctgcctcctcccgtccgccccaaagggaccagacacaggtccctgagccttggggagtccacaggctccccatcttctccttactgcatcccagcccacatctcancccttccccatggcaggggctccccgcagacgatgccaccttccttgtccccgcagctgcttgtggcggattcctcaccaagctcaacggctccatcaccagcccgggctggcccaaggagtacccccccaacaagaactgcatctggcagctggtggcccccacccagtaccgcatctccctgcagtttgacttctttg

SEQ ID NO: 6588 - DNA, 535 bp, Homo sapiens; identical to SEQ ID NO: 1870
  misc_feature 211: n = A,T,C or G

SEQ ID NO: 6589 - DNA, 625 bp, Homo sapiens
  misc_feature 391, 399: n = A,T,C or G
tcggcacgaggctaggcccctgtcagagacacagggccctgagctgcccccaccagacccggctctgcaggacctatctctgaccctcatagcctctcctccttcctcacccagttcctcaggaaccccggccttacccggccacatgtcatccgaggaaagtggtaccagcatcagccttctgcctgccctgtccttggctgctccagacccagggcagaaaagcagctcccagccctcaccagccatctgctcagcccctgccaccctgacccccaggtccccacacgccagccgtacccccagctccccactccagagctgcactcccagtctctcaccccgtagccatgtccccagtccacaccaggctcttgtgaccaggccccanaaacctancctggagttcaaggagtttgtagggttgccctgcaagaatcggccgccttttcccaggaccggagctaccaggggagcccaggagccctgctctgtctgggaacccccaaagagtcatcgtgatggttctgccttccagtatgagtatgagccaccctgcacgtccctctgtgctcgggtccaagctgtcaggcttcctccccagctcatggcctgggccttgcac

SEQ ID NO: 6590 - DNA, 377 bp, Homo sapiens
  misc_feature 1, 344, 372: n = A,T,C or G
ngaggccaccaccagcgacccccaggacctcgacatgaagaagcaccgttgtaaatgctgctccatcatgtgagccggcccccgagaccccggcccccaccccacaccacagacacccaccagcccggcccctcccggcgcctgcccaccctccacccacagcctcacgggtccaggacttggcgtgttgttacatgttccttccgagttttctttcgctggaaagagggacaggggcccccacccgtcaccacgccccaacactccccccgaaccagagccgtgcacttgtgcctggtaggagagagacaggacagacccgcttttcccgagacaaggacccnccatgttcacggcagctttcacagacgnggctc

SEQ ID NO: 6591 - DNA, 195 bp, Homo sapiens
taaaaccaaaaagggtttcttctaaaacccagggaaaaggggtccttttataaaggcaactttttgtttttttgccctggttgctgcccccacccggggaaccttgaaacatggtccctaaaaggcagccataaaggtttttcccccaccctcttttgaacggaaggttcattgccaggccaccctccaaaaggg

SEQ ID NO: 6592 - DNA, 658 bp, Homo sapiens
  misc_feature 550: n = A,T,C or G
tcggcacgaggatctgctcttcttcctctgtgccatgtacgcgcccatctgcaccattgacttccagcacgagcccatcaagccctgtaagtctgtgtgcgagcgggcccggcagggctgtgagcccatactcatcaagtaccgccactcgtggccggagaacctggcctgcgaggagctgccagtgtacgacaggggcgtgtgcatctctcccgaggccatcgttactgcggacggagctgattttcctatggattctagtaacggaaactgtagaggggcaagcagtgaacgctgtaaatgtaagcctattagagctacacagaagacctatttccggaacaattacaactatgtcattcgggctaaagttaaagagataaagactaagtgccatgatgtgactgcagtagtggaggtgaaggagattctaaagtcctctctggtaaacattccacgggacactgtcaacctctataccagctctggctgcctctgccctccacttaatgttaatgaggaatatatcatcatgggctatgaagatgangaacgttccagattactcttggtggaaggctctatagctgagaagtggaaggatcgactcggtaaaaaagttaagcgctgggatatgaagcttcgtcatcttggactc

SEQ ID NO: 6593 - DNA, 663 bp, Homo sapiens
tcggcacgaggaagatcatgacttgtgctgaccctggcgagattgccaacgggcaccgcaccgcctcggacgccggcttccccgttggctcccacgtccagtaccgctgcctgccagggtacagcctcgagggggcagccatgctcacctgctacagccgggacacaggcacacccaagtggagcgatagggtccccaaatgcgccttgaagtacgagccgtgcctgaacccgggggttcccgagaatggctaccagacgctgtacaagcaccactaccaggcgggcgagtctctgcgcttcttctgctatgagggctttgagcttatcggcgaggtcaccatcacctgtgtgcccggccacccctcccagtggaccagccagcccccactctgcaaagtgacccagaccacagatccatcacggcagctggaaggggggaacctggccctggccatcctgctgcctctaggcttggtcattgtcctcggcagtggcgtttacatctactacaccaagcttcagggaaagtcccttttcggcttctcgggctcccactcctacagccccatcaccgtggagtcggacttcagcaacccgctgtatgaagctggggatacgcgggagtatgaagtttccatctgaaccccaagactacagctgc

SEQ ID NO: 6594 - DNA, 403 bp, Homo sapiens
ggcgcataacgtcattgaaaggcacccttaggtggggagacgaggttcctgaggcgcagcggccagggggtcatccccgggcagacggtgcccctccaagctgacggcaccccactccaccccccccgcggaacctgccttcaaggctcagctccgcacacaaagaatctggagctgccgaggccactccctaccactcacccatcaatcctcccacgctcccggtcaccaacacgcgtcccgaaccgcgcctcttcatgtctggcaggaaggcctgcagcatccgcacagtccctactacattcacgtccagcacagaggccacggcgtcctcccccagcgcctccagcggccccagcaggcccaggccgcaagcttattccctttagtgagggttaatttt

SEQ ID NO: 6595 - DNA, 509 bp, Homo sapiens
tcggcacgagggggaggcggcggcggcggcggcgcgcgctgcgggcagtgagtgtggaggcgcggacgcgcggtggagctggaactgctgcagctgctgccgccgccggaggaaccttgatccccgtgctccggacaccccgggcctcgccatggctgaccatctgactgaggaccacattgcagaggtcaaggaggccttctccctctttgacaaggatggagatggcactatcaccaccaatgaggtggggacagtgatgagatccctgggacagaaccccactgaagcagacctgcaggatatgatcaatgatgtggatgcatatgggaacgggaccattgacttcccggagttgctgaccatgatggccagaaagatgaacgacacagacagtgaggaggacatccgacaggcgttccgtgtctttgacaaggatgggaatggctacatcagcgccgcagatctgcgtcacgtaatgacgaacctgggggacaatctgaccgatg

SEQ ID NO: 6596 - DNA, 579 bp, Homo sapiens; identical to SEQ ID NO: 1874

SEQ ID NO: 6597 - DNA, 388 bp, Homo sapiens
  misc_feature 336, 364, 382: n = A,T,C or G
gtccgttccaggagcacacggccctgcccatcctgggccttacctcccctgccagggctcgggcgctgtggctcctgcttgatgaagcccgtgtcctgccttgatgaagcctgtgccacctgcaagtgcccgccctgcccctgccccaacccccaccgaagagccctgagctcaggctgagccagccacctcccaaggactttccagtgaggaaatggcaacacgtggaggtgaagtccctgttctcagctccgtcatctgcggggcttctgggtggctcctgcacttgacctcaccggcatgctggcctgtggacggcctaaggaccttagggcnggggaggagggagctgccggaaaggccntggttcccagcaagaaanaaggga

SEQ ID NO: 6598 - DNA, 510 bp, Homo sapiens
tcggcacgaggcattttttttttttttttttttggcaaaaaccacaaaattttatttaaaaatcacagggtttaaccggaaatgccccgtccttagggggcccccttgaaaataaaaatttcttaaaaaggcccttccaaccccaaaaaaaggggggaaccagggcccatttgggggtttggaaggcttttggcccttccaattaattttggaaaggaggcccatttttaaggggttacttggaacaggttttgttgccggccttgtttttaaaggttctttttgacccagggggggttattcttaaccgtctgggggaggggggaccaaaactttgtttaaaatcccaaattctgggccctccttggggttaatgtaggggcccttttccttgggggattcaataacttgaaggttttgttgggggggctgggcgaaaatgttataaacctgtttttgaaccttaataatctcctttgccggaagggaaatgtttggggttggcccccg

SEQ ID NO: 6599 - DNA, 633 bp, Homo sapiens
ttcggcacgagggaccggcagcagacgcacatgctggatgtcatgcaggaccacttcagccgcgcgtccagcatcatagacgagctcttccaggacaggttcttcacccgggagccccaggatacctaccactacctgcccttcagcctgccccaccggaggcctcacttcttctttcccaagtcccgcatcgtccgcagcttgatgcccttctctccgtacgagcccctgaacttccacgccatgttccagcccttccttgagatgatacacgaggctcagcaggccatggacatccacttccatagcccggccttccagcacccgccaacagaattcatacgagaaggcgacgatgaccggactgtgtgccgggagatccgccacaactccacgggctgcctgcggatgaaggaccagtgtgacaagtgccgggagatcttgtctgtggactgttccaccaacaacccctcccaggctaagctgcggcgggagctcgacgaatccctccaggtcgctgagaggttgaccaggaaatacaacgagctgctaaagtcctaccagtggaagatgctcaacacctcctccttgctggagcagctgaacgagcagtttaactgggtgtcccggctg

SEQ ID NO: 6600 - DNA, 455 bp, Homo sapiens
ctggcctagttattgcttttattattagaaaacataaatatcctggaatgaagagtcagcattctggccacaggcgtcaggtcgcttgtagggtgggtggtggggacagaattgggctcagctcagatgtcttcctaagatggtgtaaaatggcacttgctgaaaattattttaggagcacagcagtaatttttaaaatgttccgtcttgtggtagccggtcaggtgacagatggtgccatcgccacacagtggtgaagtaaaaggttcaaaacccaccttgctttgtctcctttgctccaggttcaagacactaatgaccaataaatcagaacaggatggggacagcagcaagaccatcgagatcagcgacatgaagtaccacatttttcaggtgtgtgggtcttggtgccgccctcttctcagagggatgaccctcccccaggagcccacctt

SEQ ID NO: 6601 - DNA, 472 bp, Homo sapiens; identical to SEQ ID NO: 1876

SEQ ID NO: 6602 - DNA, 603 bp, Homo sapiens
ttcggcacgaggctttctgtactgaaggttttagtcctcaatcaaacaggaataacgtgggctgaggtgctgcggtgtgtcgcggggtgcccaggcctggaggaactctaccttgagtctaacaacattttcatttccgaaaggccaacagatgttctccagacagtcaagttattagatctttcctctaatcaattaattgatgaaaatcagctgtatctgatagcccacctgcccaggttagaacaattaatcctctctgacactggaatttcttctctacattttccggatgctggaattgggtgcaaaacgtccatgttcccatccttgaagtacctggtagtaaacgacaatcagatatcacaatggtcgtttttcaatgagctagagaagttaccaagtctacgggctttgtcctgcctaagaaaccccctgaccaaagaggacaaagaagcagagacggcgcgactactcattatcgccagcattggccagctgaagacgctgaacaaatgtgaaattctccccgaggagaggcggagagctgagcttgactaccgaaaagcttttggaaatgagtggaaacaggctggtggacat

SEQ ID NO: 6603 - DNA, 804 bp, Homo sapiens
  misc_feature 704, 706: n = A,T,C or G
tttggctaatttgtctgtttattcccacaaggtagccaggggtgggggctccgagccaagcccagcaggccatgggaccttcctccggcggggtgcacgctggattttcgggtctgccccaccagcaggtttgcaggcaggccgtcatgagtgccggtggaaggctccgagggcgtgggcaggggctcgggcggggccacacacttgtggagctagaaatagtggggcaggtccttctctatcaccaggggctcctccatgggtccgtagcgcttcaccacgcagccgttcttgtcgatgaggaacttggtgaagttccacttgatggcatttcccaggatgcccttgcccttgggttggatcttcatccacttccacagcgggtgggcgtcgtccccgttcacgcagatcttgctgaacatatcgaatttgacgttgtagcccgcgggaaactctttgatctcttcgttactccctggctcctgcttcccgaactggttacacgggaaggccaggatccgcaaaccacactcagcgtatcgggcgtgcaggtcgacgagctgagtgtagtttacttcggtcttgcctcactgggaggccacgttggtgacgatgcacacgaagccccggtacttgtccaggttaaacatgtgcacgtcgatgtccttggcggaaaacttgtgcatggagcgcgcacagcaagntncgtccccgggacgcgcacatggttcccggccaggccaaggcgcgggccagagctccaacagagcaacgccgccttcaataaagggggcaaaggcggcc

SEQ ID NO: 6604 - DNA, 427 bp, Homo sapiens
ggccacagccgcaccagctccccgacacccccttcctctgcaggtggaatcactccgacactcgatggggccagggggctatggggataacctcgggggaggccagatgtacagcccacgggaaatgagggcaaatggcagctggcaagaggctgtgaccccctcttcagtgacatccccaacggagggaccagggagtgttcactctgatacctccaactgatcttgcccctcagggtcacaggggtgggggctctcacaaggcgacttgaagaggacgcaggcttccagaggacaaaccccaatacaggagaagcacaagacagagaagggccaatggggtcatcccctccctaacgagactctctgtgctgggggtgctaatgacatggcaggaagaatggggcctctaaggggagtgtggggt

SEQ ID NO: 6605 - DNA, 505 bp, Homo sapiens
  misc_feature 278: n = A,T,C or G
tcggcatcctccttctcctcctcggcgccgttcctggcttccgccgtgtccgcccagcccccgctgccggaccagtgccccgcgctgtggcagtgctccgaggcagccgcacagtcaagtgcgttaaccgcaatctgaccgaggtgcccacggacctgcccgcctacgtgcgcaacctcttccttaccggcaaccagctggccgtgctccctgccggcgccttcgccgccggccgccgctggcagcgtggccgcgctcaacctcagcggcagcgcctnggacgaggtgcgcgcgggcgcttcgagcatctgcccagcctgcgccacgtcgacctcagccacaacccactggccgacctcagtcccttcgctttctcgggcagcaatgcaagcgtctcggcccccagtccccttgtggaactgatcctgaaccacatcgtgccccctgaagatgagcggcagaaccggagcttcgagggcatggtggtggcggccctgctggcggg

SEQ ID NO: 6606 - DNA, 391 bp, Homo sapiens
tcggcacgagggctcattttttttttttttttttttttcctttcccccggcccattaaccaaacttccgggggcccccaccccgggccttgctttacctggttttgaaaaattttgggggggttaattgggataaaaaattgttggcccctcccaaatttttgggaaagaaaaatggggggttgggctttgaaacccttggggccaacctaagggggttttgtttaaaactgggtttttttccccacctttaaaaaattttcaaattaaaaaggggggtattttaaaaaaaaaccccaaaaattccggttttaaaaaaaatttattggcttggccccagcccttggggccaaattaaaccccttttttcccatttccttttggaaaaaaaa

SEQ ID NO: 6607 - DNA, 325 bp, Homo sapiens
aaaattttttacttatcccatttttcccctttgaccgggaggtttgacccaaaaatttttcctaaaaaatcattccattctccaaattaaaaaaaaagggaaatagctttttatggccataaggtggtttttaaaaagtataaaaatttctttaaaaccctacttgaggctggccatgggaactcccccctgtaatcccacccttttgggaggttgaggcggccaaataacagggccaggaaatcgaaaccttccgggttaataggggaaacccctgtctttactaaaaatacaaaaaattacccggccacaggggcaggcccct

SEQ ID NO: 6608 - DNA, 63 bp, Homo sapiens
ttccgcctcctcaccactgtgcctcaagttcctcatctaagtggccctggcctcctgggggcg

SEQ ID NO: 6609 - DNA, 548 bp, Homo sapiens; identical to SEQ ID NO: 1878
  misc_feature 415, 441, 467: n = A,T,C or G

SEQ ID NO: 6610 - DNA, 576 bp, Homo sapiens
tcggcacgaggactacctggaccgcttcctgtcgctggagcccgtgaaaaagagccgcctgcagctgctgagggccacttgcatgttcgtggcctctaagatgaaggagaccatccccctgacggccgagaagctgtgcatctacaccgacaactccatccggcccgaggagctgctgcaaatggagctgctcctggtgaacaagctcaagtggaacctggccgcaatgaccccgcacgatttcattgaacacttcctctccaaaatgccagaggcggaggagaacaaacagatcatccgcaaacacgcgcagaccttcgttgccctctgtgccacagatgtgaagttcatttccaatccgccctccatggtggcagcggggagcgtggtggccgcagtgcaaggcctgaacctgaggagccccaacaacttcctgtcctactaccgcctcacacgcttcctctccagagtgatcaagtgtgacccggactgcctccgggcctgccaggagcagatcgaagccctgctggagtcaagcctgcgccaggcccagcagaacatggaccccaaggccgc

SEQ ID NO: 6611 - DNA, 526 bp, Homo sapiens
gcaccaaagtggcaactaggtcagtgttgggggatcaagctggcctcggggtggggggcccccactgcctctccctggttcccacagtgttagcgtccctgaaaagacaatattctctctaaagcaataaggggtgacgggccggggggagtgtttgctgctgctggcccccagctccccttccctcttgccaggtgtgggggagactcctgttgtgactgaatgtaacccccccacccctgccgcagccaatgcaggggaagggggacactcttcctgtcttctccccagctaaagagactttggacttagggggcccatgagcctggagaggccttaaccctgtgaggaagtatagggggagcctctcccacccccatccccttctgagagtggtcaatgtttacaagcccctgagcccccctgcccagggactcagaccctgttgctgtccttccccggccccggtcttcctgggccctcgctgctcccctgcccttcctggggttggggtgggtgcaggggt

SEQ ID NO: 6612 - DNA, 579 bp, Homo sapiens
  misc_feature 469: n = A,T,C or G
tcggcacgagggcccagcatcgtgtggcccctgatgttcagcttcaggaggcctgcttcccacctggccccatcaggctgcaggtcacacttgaagacgctgcctctgccgcatccgccgcgtcctctgcacacgttgccctgcaggtccacccccactgcactgttgcagctctccaggagcaggtgttctcagagctcggtttcccgccagccgtgcaacgctgggtcatcggacggtgcctgtgtgtgcctgagcgcagccttgcctcttacggggttcggcaggatggggaccctgctttcctctacttgctgtcagctcctcgagaagccccagccacaggacctagccctcagcacccccagaagatggacggggaacttggacgcttgtttcccccatcattggggctacccccaggcccccagccagctgcctccagcctgcccagtccactccagcccanctggtcctgtccttcctgcaccttcatcaatgccccaaaccgccctggctgtgagatgtgtagcacccaaaggccctgcacttgggacccccttgctgcagcttccacct

SEQ ID NO: 6613 - DNA, 377 bp, Homo sapiens
tcggcacgaggctcccctgctatgcaagtgcccctgtggcttgtccccaaccccctcagcaacaaagctcagctggggaacgagagtaatttgaagaatgcttgaagtcagcgtcttccattccagaaagacccccattcttcctttgggggtatgatgtggaagctggtttcagcccaggacccaccactgaggagaggatctagacaggtgggcctaattccaaggggcccttcctggcctggagaaggccttttacacacacacaacacatacacacacacacacacacacacatatcacagttttcacacagcccctgctgcattctctgtccatctgtctgtttctattaataaagatttgttgatctgttc

SEQ ID NO: 6614 - DNA, 549 bp, Homo sapiens
tcggatccatccaattgcgccatgtgtgctgctcggctagcggcggcggcggcggcccagtcggtgtatgccttctcggcgcgcccgctggccggcggggagcctgtgagcctgggctccctgcggggcaaggtactacttatcgagaatgtggcgtccctctgaggcaccacggtccgggactacacccagatgaacgagctgcagcggcgcctcggaccccggggcctggtggtgctcggcttcccgtgcaaccagtttgggcatcaggagaacgccaagaacgaagagattctgaattccctcaagtacgtccggcctggtggtgggttcgagcccaacttcatgctcttcgagaagtgcgaggtgaacggtgcgggggcgcaccctctcttcgccttcctgcgggaggccctgccagctcccagcgacgacgccaccgcgcttatgaccgaccccaagctcatcacctggtctccggtgtgtcgcaacgatgttgcctggaactttgagaagttcctggtgggccctgacggtgtgcccctacgc

SEQ ID NO: 6615 - DNA, 640 bp, Homo sapiens
  misc_feature 86, 458, 570: n = A,T,C or G
ttcggcacgagggggactttggggtgcccatcgccatcctcatcatggtgcttgtggattacagtattgaggacacctatacccanaagctgagcgttcccagtggattctcggtgactgccccagaaaagaggggctgggtcatcaaccccctgggagagaagagccccttccctgtgtggatgatggttgccagcctgctgcccgccatcctggtcttcattctcatcttcatggagacacagatcaccacgctcatcatctccaagaaggagcgcatgctgcagaagggctccggcttccacctggacctgctgctcatcgtggccatgggcggcatctgtgccctctttggcctgccctggttggctgctgccactgtccgctctgtcactcacgccaacgcgctcactgtcatgagcaaggctgtggcacctggggacaagcccaagattcangaagtcaaggagcagcgggtgacggggctgctggttgccctgcttgtgggcctctccatagttatcggggatctgctccggcagatccccctggccgtgctctttggaattntcctgtacatgggagtcacctcccttaacgggatccagttctatgagcggctgcatctgctgctcatgcc

SEQ ID NO: 6616 - DNA, 366 bp, Homo sapiens
atgatattcaccttcctggtctgttggatgccttatatcgtgatctgcttcttggtggttaatggtcatggtcacctggtcactccaacaatatctattgtttcgtacctctttgctaaatcgaacactgtatacaatccagtgatttatgtcttcatgatcagaaagtttcgaagatcccttttgcagcttctgtgcctccgactgctgaggtgccagaggctgtctaaagacctaccagcagctggaagtgaaatgcagatcagacccattgtgatgtcacagaaagatggggacaggccaaagaaaaaagtgactttcaactcttcttccatcatttttatcatcaccagtgatgaatcactg

SEQ ID NO: 6617 - DNA, 686 bp, Homo sapiens
ttcggcacgagggggaaaagttcgttatggactgatccctgaggaattcttccagtttctttatcctaaaactggtgtaacaggaccctatgtactcggaactgggcttatcttgtacgctttatccaaagaaatatatgtgattagcgcagagaccttcactgccctatcagtactaggtgtaatggtctatggaattaaaaaatatggtccctttgttgcagactttgctgataaactcaatgagcaaaaacttgcccaactagaagaggcgaagcaggcttccatccaacacatccagaatgcaattgatacggagaagtcacaacaggcactggttcagaagcgccattacctttttgatgtgcaaaggaataacattgctatggctttggaagttacttaccgggaacgactgtatagagtatataaggaagtaaagaatcgcctggactatcatatatctgtgcagaacatgatgcgtcgaaaggaacaagaacacatgataaattgggtggagaagcacgtggtgcaaagcatctccacacagcaggaaaaggagacaattgccaagtgcattgcggacctaaagctgctggcaaagaaagctcaagcacagccagttatgtaaatgtatctatcccaattgagacagctagaaacagttgactgactaaatggaaact

SEQ ID NO: 6618 - DNA, 548 bp, Homo sapiens
cggcacgaggaccttgggacccacttctgcctgcacggaagacttaaagttcacttgcaatacctcaaatcagctatgcatccacagccccagagctaagtgataacaccaggtatgactttttctctcgagtggttccgcctgactcctaccaagcccaagccatggtggacatcgtgacagcactgggatggaattatgttttgacactggcttctgaggggaactatggtgagagcggtgtggaggccttcacccagatctcgagggagattggttatccatccctgtttgggattcaaggctgccttcatgaatgttttgctatactatgtcaagttgtttaccaatttctgcttctaatgcagctgtcagatgctcaaactgtctattagtcgaagaggctctctactgaccacctttctcaagtttcttcttcttacatacaatgtttttgacaagactaagcatatcaaaccatcttttaacaattgtaaagcctaatattggccagcatacaattcaattcattaaacattgtagcactg

SEQ ID NO: 6619 - DNA, 525 bp, Homo sapiens
tcggcacgaggagcgaatcgtcttctttagctgccgttccatcagtggctccacctacacaccctcagaggcaggcaacgagctggacatggagctgggggaggaggaggtggaggaagaaagcagaagcaggggcagtggggccgaggagaccagcaccatggaggaggacagggtcccagtgatctgtatttgatgaggaggagccgaggccccagcttcatccagcttcaaccaatgcctggacctgtccacctgagaggcccctggggcctccccagctgctggccagaccctggcgctgccacagtcctggcactgcccaaggccatacctgcctagccctttggctccatcctgtggatgcccactcacccctcaaactcctgctgcccatgctgtggccggacttgtcagcagggggcctggtgggaggagcgactgccctgcccaaatgaactgccacagcagggacagctggaccgcagagtttatttttgtatttctactgggcctgcacactcc

SEQ ID NO: 6620 - DNA, 458 bp, Homo sapiens
gggcgggacttccgcgccaatccctgagggggtaacatcgcccgccaatccctgagctgggcagggtgggcccgctcacccccctgggctgcccaccccggggtgttcccgccgacttctgggcgggcctcccgggcagtgcctgccgtgggcggggcctgagcagccggactggccaggttcagcgcgcctcagtagggttgtattccgtctctcccgaggacacctgggagatgcgccgcgaggaccgccacagcttccgcgcgaactggctgctgcgcacctcagagggctgccccgcgaccaccacgatgagcttgccatcctccaggcccaccagcacgtggctgcgctccttggtcacggccacgctgcggatggccaccttcatgggcaagggaggcgcggcgggtagcagtgtgtttagttggaggatgtgcagggcgcactgggcggtg

SEQ ID NO: 6621 - DNA, 536 bp, Homo sapiens
  misc_feature 304: n = A,T,C or G
tcggcacgagggcctggggactttcactgatgctcttcctgattctagagcaaagtgtgggaaggggaaatggaggaatgccctcctgtctgtgtcgttctctgtgccacagctacagatgcagaaggtttctctggatagcacacctctgaatgtaaatcatgataaaatggatatttggaaacttactcctaagctgtgatttagggtgtatttctacttctggactgcctcaatatcaagggctgagacttttgaattttgaatattcgttgggtttcatgttaagaagcctgtggtctangagtgctattcagtgtttcttttcctgataaacactttgaatattttttttgtgtttttgtttccttttctgaagctgttcctccttttaaatatttttaatcacattgataaaatctatccttcaccacctctggttctactatagttgatttttattttaaatgtttaattgtatttgattaaacacttaactggattttggaataataaaactctcgtccaatttggct

SEQ ID NO: 6622 - DNA, 476 bp, Homo sapiens
ccccatcacactcacacgcacgctcacactttttatttgccataatgaaccgtccagcccctgtggagatctcctatgagaacatgcgttttctgataactcacaaccctaccaatgctactctcaacaagttcacagaggaacttaagaagtatggagtgacgactttggttcgagtttgtgatgctacatatgataaagctccagttgaaaaagaaggaatccacgttctagattggccatttgatgatggagctccaccccctaatcagatagtagatgattggttaaacctgttaaaaaccaaatttcgtgaagagccaggttgctgtgttgcagtgcattgtgttgcaggattgggaagggcacctgtgctggttgcacttgctttgattgaatgtggaatgaagtacgaagatgcagttcagtttataagacaaaaaagaaggggagcgttcaattccaaacagctgctt

SEQ ID NO: 6623 - DNA, 571 bp, Homo sapiens
cggcacgagcctgcttcaacagtgcttggacggaacccggcgctcgttccccaccccggccggccgcccatagccagccctccgtcacctcttcaccgcaccctcggactgccccaaggcccccgccgccgctccagcgccgcgcagccaccgccgccgccgccgcctctccttaatcgccgccatgacgaccgcgtccacctcgcaggtgcgccagaactaccaccaggactcagaggccgccatcaaccgccagatcaacctggagctctacgcctcctacgtttacctgtccatgtcttactactttgaccgcgatgatgtggctttgaagaactttgccaaatactttcttcaccaatctcatgaggagagggaacatgctgagaaactgatgaagctgcagaaccaacgaggtggccgaatcttccttcaggatatcaagaaaccagactgtgatgactgggagagcgggctgaatgcaatggagtgtgcattacatttggaaaaaaatgtgaatcagtcactactggaactgcacaaactggccactgacaaaaatgacccccat

SEQ ID NO: 6624 - DNA, 508 bp, Homo sapiens
gggcctccgcctgtggatgctgcgcctctccgaacgcaacatgaaggtgctccttgccgccgccctcatcgcggggtccgtcttcttcctgctgctgccgggaccttctgcggccgatgagaagaagaaggggcccaaagtcaccgtcaaggtgtattttgacctacgaattggagatgaagatgtaggccgggtgatctttggtctcttcggaaagactgttccaaaaacagtggataattttgtggccttagctgcaggagagaaaggatttggctacaaaaacagcaaattccatcgtgtaatcaaggacttcatgatccagggcggagacttcaccaggggagatggcacaggaggaaagagcatctacggtgagcgcttccccgatgagaacttcaaactgaagcactacgggcctggctgggtgagcatggccaacgcaggcaaagacaccaacggctcccagttcttcatcacgacagtcaagacagcctggctagatggc

SEQ ID NO: 6625 - DNA, 522 bp, Homo sapiens
cgcgcgcctggcaggtcgacactagtggatccaaagaattcggcacgagcctgctcggaggaatggcgccgccgggttcaagcactgtcttcctgttggccctgacaatcatagccagcacctgggctctgacgcccactcactacctcaccaagcatgacgtggagagactaaaagcctcgctggatcgccctttcacaaatttggaatctgccttctactccatcgtgggactcagcagccttggtgctcaggtgccagatgcaaagaaagcatgtacctacatcagatctaaccttgatcccagcaatgtggattccctcttctacgctgcccaggccagccaggccctctcaggatgtgagatctctatttcaaatgagaccaaagatctgcttctggcagctgtcagtgaggactcatctgttacccagatctaccatgcagttgcagctctaagtggctttggccttcccttggcatcccaagaagcactcagtgcccttactgctcgtctcagca

SEQ ID NO: 6626 - DNA, 434 bp, Homo sapiens
acagaaggggatagtcggcgagcaacgctggagcatcccgctctggtgccgctgcagcaggcagagatggttgagctcatgttcccgctgttgctcctccttctgcccttccttctgtatatggctgcgccccaaatcaggaaaatgctgtccagtggggtgtgtacatcaactgttcagcttcctgggaaagtagttgtggtcacaggagctaatacaggtatcgggaaggagacagccaaagagctggctcagagaggagctcgagtatatttagcttgccgggatgtggaaaagggggaattggtggccaaagagatccagaccacgacagggaaccagcaggtgttggtgcggaaactggacctgtctgatactaagtctattcgagcttttgctaagggcttcttagctgaggaaaagcacctccacgt

SEQ ID NO: 6627 - DNA, 583 bp, Homo sapiens
acagagggggggccgggggcgcgcgctctgcgagctggatgtccaggctgcgggcgctgctgggcctcgggctgctggttgcgggctcgcgcctgccgcggatcaaaagccagaccatcgcctgtcgctcgggacccacctggtggggaccgcagcggctgaactcgggtggccgctgggactcagaggtcatggcgagcacggtggtgaagtacctgagccaggaggaggcccaggccgtggaccaggagctatttaacgaataccagttcagcgtggaccaacttatggaactggccgggctgagctgtgctacagccatcgccaaggcatatccccccacgtccatgtccaggagcccccctactgtcctggtcatctgtggcccggggaataatggaggagatggtctggtctgtgctcgacacctcaaactctttggctacgagccaaccatctattaccccaaaaggcctaacaagcccctctacactgcattggtgacccagtgtcagaaaatggacatccctttccttggggaaatgcccgcagagcccatgacgattgatgaactgtatgagct

SEQ ID NO: 6628 - DNA, 536 bp, Homo sapiens
attcggcacgagccaccgctcaccatgggcccgggtcctcggctgctgctacctctcgtgctttgcgtggggctcggcgcacttgtgttttcttcgggggccgagggcttccgcaagcgaggcccctcggtgacggccaaggtcttctttgatgtgaggattggagacaaagatgttggcagaattgtgattggcctctttggaaaagttgtgcccaagacagtggaaaattttgttgctctagcaacaggagagaaaggatatggatataaaggaagcaagtttcatcgtgtcatcaaggatttcatgattcaaggaggtgacatcaccactggagatggcactgggggtgtgagcatctatggtgagacatttccagatgagaacttcaagctgaagcactatggcattgggtgggtcagcatggccaacgctgggcctgacaccaatggctctcagttctttatcaccttgaccaagcccacctggttggacggcaaacatgtggtgtttggaaaagtcattgatgggatgac

SEQ ID NO: 6629 - DNA, 545 bp, Homo sapiens
cggcacgagcccggcgccatcttcatcgagcgccatggccgcagcctgcgggccgggagcggccgggtactgcttgctcctcggcttgcatttgtttctgctgaccgcgggccctgccctgggctggaacgaccctgacagaatgttgctgcgggatgtaaaagctcttaccctccactatgaccgctataccacctcccgcaggctggatcccatcccacagttgaaatgtgttggaggcacagctggttgtgattcttataccccaaaagtcatacagtgtcagaacacaggctgggatgggtatgatgtacagtgggaatgtaagacggacttagatattgcatacaaatttggaaaaactgtggtgagctgtgaaggctatgagtcctctgaagaccagtatgtactaagaggttcttgtggcttggagtataatttagattatacagaacttggcctgcagaaactgaaggagtctggaaagcagcacggctttgcctctttctctgattattattataagtggtcctcggcggattcct

SEQ ID NO: 6630 - DNA, 557 bp, Homo sapiens
ggggggtctcaggaggcagcgctctcgggacgtctccaccatggcctgggctctgctattcctcaccctcctcactcagggcacagggtcctgggcccagtctgccctgactcagcctgcctccgtgtctgggtctcctggacagtcgatcaccatctcctgcactggaaccagcagtgacgttggtggttataactatgtctcctggtaccaacaacacccaggcaaagcccccaaactcatgatttatgatgtcagtaatcggccctcaggggtttctaatcgcttctctggctccaagtctggcaacacggcctccccgaccatctctgggctccaggctgaggacgaggctgattattactgcagctcatatacaagcagcagcactctcgatgtcttcggaactgggaccaaggtcaccgtcctaggtcagcccaaggccaaccccactgtcactctgttcccgccctcctctgaggagctccaagccaacaaggccacactagtgtgtctgatcagtgacttctacccgggagctgtgacagtggcctgga

SEQ ID NO: 6631 - DNA, 440 bp, Homo sapiens
tcggcacgagctctttctgcatcagtattaaggtgtatatttgaatgtcctcccctcccctttcccctccaggctgagtacctttgaggggctgggcgtttgctcacgaccttgctgtctcgctcaaaacatgctccgcaaagttctccgcacacacttcttccccatcaagcccatttccttccccaaccacaaaggtgtttgtgattcctcaccccgggaaaccaaggagctgcaaagtggactctggttcacccccgtgcacactcacccacaccttaacgttgtctttcaaacaccctgagccttcctaaacagccagtgcagacgttctctctgggccacgaatcccctcgggtcctccccgtcccctgctccgatgcatacctcagtgcagaaccacagaatctctgcagcggaaacgccgtgcatctcttgtc

SEQ ID NO: 6632 - DNA, 549 bp, Homo sapiens
gcggacgaggagcgctgtttgagttgcatcctagcccagcagcccgaccggctccgggatgaagaactggctgagctggaggatgcgctgcgaaatctgaagtgcggctcgggggcccggggtggcgacggggaggtcgcttcggcccccttgcagcccccggtgccctctctgtcggaggtgaagccgccgccgccgccgccacctgcccagacttttctgttccagggtcagcctgtagtgaatcggccgctgagcctgaaggaccaacagacgttcgcgcgctctgtgggtctcaaatggcgcaaggtggggcgctcactgcagcgaggctgccgggcgctgcgggacccggcgctggactcgctggcctacgagtacgagcgcgagggactgtacgagcaggccttccagctgctgcggcgcttcgtgcaggccgagggccgccgcgccacgctgcagcgcctggtggaggcactcgaggagaacgagctcaccagcctggcagaggacttgctgggcctgaccgatcccaatggcggcctggcc

SEQ ID NO: 6633 - DNA, 64 bp, Homo sapiens; identical to SEQ ID NO: 6451

SEQ ID NO: 6634 - DNA, 591 bp, Homo sapiens
tcggcacgaggcaggctttcaaggtggaaggtggccagtttggctctgtggaggagtgtctgctggacgagaacagcatgctgatccccatcgctgtgggtggtgccctggcggggctggtcctcatcgtcctcatcgcctacctcgtcggcaggaagaggagtcacgcaggctaccagactatctagcctggtgcacgcaggcacagcagctgcaggggcctctgttccttccccagggcctgtgcttgaacctgaggcactgcacacccccacactcatgaccacaccctccctaactcctttcacccccagcctggtcttcacctaccccagcactcctgagccttgtgcctcagctcatcgcaagagtagcagcagcagcggagacccatcctctgacctcctgaaccgcacagctcaggaggcgcccttggcttctgtgatgagctgatctgcggatctcagctttgagaagccttcagctccagggaatccaagcctccacagcgagggcagctgctatttattttcctaaagagagtatttttatacaaacctaccaaaatggaataaaaggcttgaagctgtg

SEQ ID NO: 6635 - DNA, 506 bp, Homo sapiens
gcatgatgggacagggcctgggtctttaatgggttgagctggggagggcctgtggtgagctcagttgtaggctatgacctggttgatccaggtgctgaacttgctaactcgagtatacacagcaggtgcgcgcacattgcagtttttggtgccccaggagacaataccaataagcacccatgtgtttcccttctggcagacaagagggcctccggagtcaccctggcacgaggaggcacctgcgccacctgcacagatcatggagtcagtgatacttgagccccagtactgccggcactgattcacagtgaccaggggcaaagcacctgctgcagacgtgctggtgtcacattgcccacgccactgaggcgaccccagccggtggtgacacacgtgaggccttcagtcagagcctcgtttgaggatgccaggcaaactggcgagatgcgtgttgtgtactgggctggcgaggcgagcttcagcagcgtcacgtcattgttcatggt

SEQ ID NO: 6636 - DNA, 512 bp, Homo sapiens
  misc_feature 277: n = A,T,C or G
tcggcacgaggcccgggtggcttacagacgctgccagcatcgccgccgccagaggagaaatgtctgaagtaagacccctctccagagacatcttgatggagaccctcctgtatgagcagctcctggaacccccgaccatggaggttcttggcatgactgactctgaagaggacctggaccctatggaggacttcgattctttggaatgcatggagggcagtgacgcattggccctgcggctggcctgcatcggggacgagatggacgtgagcctcanggccccgcgcctggcccagctctccgaggtggccatgcacagcctgggtctggctttcatctacgaccagactgaggacatcagggatgttcttagaagtttcatggacggtttcaccacacttaaggagaacataatgaggttctggagatccccgaaccccgggtcctgggtgtcctgcgaacaggtgctgctggcgctgctgctgctgctggcgctgctgctgccgctgctc

SEQ ID NO: 6637 - DNA, 86 bp, Homo sapiens
ctggatgctcctgtgctgaaccaggctgagtgtgaagcctcctaccctggaaagattaccaacaacatgttctgtgtgggcttcct

SEQ ID NO: 6638 - DNA, 605 bp, Homo sapiens
tcggcacgagggcaggagaaggccctgatgaaggcagttgcaactgtggggcccatttctgttgctattgatgcaggtcatgagtccttcctgttctataaagaaggcatttattttgagccagactgtagcagtgaagacatggatcatggtgtgctggtggttggctacggatttgaaagcacagaatcagataacaataaatattggctggtgaagaacagctggggtgaagaatggggcatgggtggctacgtaaagatggccaaagaccggagaaaccattgtggaattgcctcagcagccagctaccccactgtgtgagctggtggacggtgatgaggaaggacttgactggggatggcgcatgcatgggaggaattcatcttcagtctaccagcccccgctgtgtcggatacacactcgaatcattgaagatccgagtgtgatttgaattctgtgatattttcacactggtaaatgttacctctattttaattactgctataaataggtttatattattgattcacttactgactttgcattttcgtttttaaaaggatgtataaatttttacctgtttaaataaaatttaatttcaa

SEQ ID NO: 6639 - DNA, 385 bp, Homo sapiens
gcgtaaaggctggagctgctgtaggctggggatggggccgagtaggggcccgagccgaggacgtgctccaaggagaactggcggctatacttgggcatggaatgtgctgagccactgtcgatcaacatcagggggatctttgtcttgacccccaggatccggttggactgcaccagtgagatcaggaactgaatgaccttggtgacgactttctgttgctgggcatgcttctgccgaaggctggccaccttccgccacagagcctcattctcatgcttcatggccaggagcttggagtccatgcactgctgcttccccttcattagctgcacgtacgtcatcagcttggtgacgctgacctggcggatctttatgtcttcactct

SEQ ID NO: 6640 - DNA, 517 bp, Homo sapiens
  misc_feature 404, 433: n = A,T,C or G
tcggcacgaggaatagcgataatctgaaccatgcggttttggcagtgggatatggaatccagaagggaaacaagcactggataattaaaaacagctggggagaaaactggggaaacaaaggatatatcctcatggctcgaaataagaacaacgcctgtggcattgccaacctggccagcttccccaagatgtgactccagccagccaaatccatcctgctcttccatttcttccacgatggtgcagtgtaacgatgcactttggaagggagttggtgtgctatttttgaagcagatgtggtgatactgagattgtctgttcagtttccccatttgtttgtgcttcaaatgatccttcctactttgcttctctccacccatgacctttttcactgtggccatcangactttccctgacagctgtgtactcttangctaagagatgtgactacagcctgcccctgactgtgttgtcccagggctgatgctgtacaggtacaggctggagattttcacat

SEQ ID NO: 6641 - DNA, 501 bp, Homo sapiens
  misc_feature 306: n = A,T,C or G
ttcggcacgaggtggaaacggcgttttccacaacagggagccagcattgaggcgcccagatggcatctgctggaaatcacgggccgctggctgaacgagcgcgaccgcctgatcaagaggctgggccggaagacgcccccgacgctgttccggggcagctccctgcagcagggcgtcccgcatgggtatgctttttctcaagaagaacacggagctgttagtcaggaagaagtcatccgtgcttatgacaccaccaaaaagaaatccaggaagaaataagacatgaattttcctgactgatcttangaaagagattcagtttgttgcacccagtgttaacacatctttgtcagagaagactggcgtcagcagccaaaacaccaggaaacacatttctgtggccttagccaagcagtttgttagttacatattccctcgcaaacctggagtgcagaccacaggggaagctatctttgccctcccaactcgtctgcagtgctt

SEQ ID NO: 6642 - DNA, 386 bp, Homo sapiens
atcgatgaacttcaacttagctttgttttccacagactggagctaaactgggctttcaacatgatcatgaactttatcctactctgggccctcttgaatctgactgttgctttggcctttaatccatattacacactcagctccactcccccttacttggtctattagaaatctgactacttgccctgcgctggagtcctgatccacccgctttgggtgatcacagctgctcactgcaatataccaaaacttcaggtgatattgggggttacaatcccagcatactctaatgaaaatcatctgcaagcgattggctctgaaaatatgattcatcatccacacttctcaatcacttctattgatcatgacatcatgctaatcaagct

SEQ ID NO: 6643 - DNA, 83 bp, Homo sapiens
gggacctaccgtggggtgaacctgcgcatcattgcagcccatgaagtgggccatgctctggggcttgggcactcccgatattc

SEQ ID NO: 6644 - DNA, 559 bp, Homo sapiens
  misc_feature 316: n = A,T,C or G
tcggcacgagctgtgatgtccctcagtgtgcggccccttcatttgattgtgggaagcctcaagtggagccgaagaaatgtcctggaagggttgtaggggggtgtgtggcccacccacattcctggccctggcaagtcagtcttaaaacaaggtttggaatgcacttctgtggaggcaccttgatatccccagagtgggtgttgactgctgcccactgcttggagaagtccccaaggccttcatcctacaaggtcatcctgggtgcacaccaagaagtgaatctcgaaccgcatgttcaggaaatagaagtgtctangctgttcttggagcccacacgaaaagatattgccttgctaaagctaagcagtcctgccgtcatcactgacaaagtaatcccagcttgtctgccatccccaaattatgtggtcgctgaccggaccgaatgtttcatcactggctggggagaaacccaaggtacttttgggagctggccttctcaaggaagcccagctccctgtgattgagaataaagtgtgcaatcgctatgagtttctgaatg

SEQ ID NO: 6645 - DNA, 790 bp, Homo sapiens
caaatttctttcttttttaatttagattgagttcatttatttgaaacagactgggccaatgtccacaaagaattcctggtcagcaccaccgatgtccaaaggtgcaatatcaaggaagggcaggcgtgatggcttatttgttttgtattcaatgattgtctttccccattcatttgtctttttagagcagccatctacaagaacagtgtaagtgaacctgctgttgccctcagcaacaagttcaacatcattagagccctgtagaatgacagcctttttcaggttgccagtctcctcatccatgtatgcaatgctgttcttgcagtggtaggtgatgttctgagaggcatagttggccagcaggcgcatgaaggcaagttgggtagccatttccttggaagtcactccttctacattatattcaaactggctgccagcattgatagtttctcctagccagacgtgtttcttgtccttggagctcctataccagttcttggctgggatgttttcaggttgggcccggatacaggtttcgccagtagagaaatcacagtatactttgatagcatccatagtgcatccttggttagggtcaatccagtagtaaccactgctccactctgggtggctgagtctcaagtcacggcatgtgcgagctgggttctttctagagcctttcagagttaagaagggcttaaatctgtttggtgagagacttcagagtagcatcaaactcatagtcccttggtctgagaagaagtgcctgacgaagctggtcagccctgta

SEQ ID NO: 6646 - DNA, 557 bp, Homo sapiens
ttgacccagcctcaccaggccgggcccctctgctcaggaccaggccccaccccagtgccgccctgaggcctggcaggggcctctggagcccgcacacccctctccttggcagccccctccatcctgggcccttcgtctttcccacaggtgtgtccctcaggactttgcagccagggtgtggccggccgcaggtttcggatgcaggcggccggatcgtggggggtcacgctgccccggccggcgcatggccatggcaggccagcctccgcctgcggaggatgcacgtgtgcggcgggtcactgctcagcccccagtgggtgctcacagctgcccactgcttctccgggtccctgaactcatccgactaccaggtgcacctgggggaactggagatcactttgtctccccacttctccaccgtgaggcagatcatcctgcactccagcccctcaggacagccggggaccagcgggatcctgcccgtctgcctcccggaggcctcagatgacttctgccctgtgatccggtgctcggtgaccggctggggctatacgcgg

SEQ ID NO: 6647 - DNA, 488 bp, Homo sapiens
ttcggcacgaggcctgtgcaggatgaggtccagggggtgaccctgctgcccaccacaaagcagctgctgcacctgtgcctgcaagatggtggcagtcctccagggcctggggatctggccgaggagaggactgagttcctgcacagccagaactcgctgtcaccacgcagctctctgtcggatgaggccccagtcctgcccaacaccaccccggacctcctcctggccaccacagccaagccatcagtacccagtgctgacagtgagacacccctgacccaggacaggccaggcagtcccagtggctctgaggacaagggcaacccggcgccggagctgagggcctcctttctgccacgtaccttgtctctgcggaactccatcagcaggatcatgtcggaggcgggcagtgggaccctggaggacgagtggcaggccatctcggagattgcctctacttgcaacaccattctggagtcgctgtcccg

SEQ ID NO: 6648 - DNA, 553 bp, Homo sapiens; identical to SEQ ID NO: 1896
  misc_feature 325, 431: n = A,T,C or G

SEQ ID NO: 6649 - DNA, 594 bp, Homo sapiens
  misc_feature 457: n = A,T,C or G
tcggcacgaggcgcgagtgcttctgaaacgtcagctgcgctcccctaggagtgctgagcccgcggaaccgcagccatgactgaggctgatgtgaatccaaaggcctatccccttgccgatgcccacctcaccaagaagctactggacctcgttcagcagtcatgtaactataagcagcttcggaaaggagccaatgaggccaccaaaaccctcaacaggggcatctctgagttcatcgtgatggctgcagacgccgagccactggagatcattctgcacctgccgctgctgtgtgaagacaagaatgtgccctacgtgtttgtgcgctccaagcaggccctggggagagcctgtggggtctccaggcctgtcatcgcctgttctgtcaccatcaaagaaggctcgcagctgaaacagcagatccaatccattcagcagtccattgaaaggctcttantctaaacctgtggcctctgccacgtgctccctgccagcttcccccctgaggttgtgtatcatattatctgtgttagcatgtagtattttcagctactctctattgttataaaatgtagtactaaatctggtttctgg

SEQ ID NO: 6650 - DNA, 473 bp, Homo sapiens
tcttcctcttttttttcccctcctatccctattcacgcaggagctgctcttctggggtatcgcgatccacttaaggatgatgcatacttggtgacaatctggtctgatcatcgcttccagagccagaactgaccccagcgagagcgcaccctggggcaacctggattcctggggtgtccccggcagccacacacagccatgcactacccaactgcactcctcttcctcatcctggccaatggggcccatgcctttcacatctgcgccttcaatgcccagcggctgacactgtccaaagtggccatggagcaagtgatggacaccttagttcggatactggctcgctgtgacatcatggagctgcatgatgtggtggactcttccggcagcgccatcccgctcctgcttgaataactcaatcgatttgatggctctgggccctacagcaccctgagcagcccccaactggggcg

SEQ ID NO: 6651 - DNA, 552 bp, Homo sapiens
ttcggcacgaggcacgatgccgtcagcagggaaaacattccccaccgtcaatccgtccactggagaggtcatctgtcaggtagctgaaggggacaaggaagatgtggacaaggcagtgaaggccgcccgggccgccttccagctgggctcaccttggcgccgcatggacgcatcacacaggggccggctgctgaaccgcctggccgatctgatcgagcgggaccggacctacctggcggccttggagaccctggacaatggcaagccctatgtcatctcctacctggtggatttggacatggtcctcaaatgtctccggtattatgccggctgggctgataagtaccacgggaaaaccatccccattgacggagacttcttcagctacacacgccatgaacctgtgggggtgtgcgggcagatcattccgtggaatttcccgctcctgatgcaagcattttgaactgggaggagataagaagagaaagggccaagtgatccagttctaagtgtcatcttttattatgaagacaataaaatcttgagtttatg

SEQ ID NO: 6652 - DNA, 90 bp, Homo sapiens
cgggccgctccatccatgaaatcccgcgcgaggagctgcggcacacgcccgagctgcccctggtcccgcggccgcaagcttattcccttt

SEQ ID NO: 6653 - DNA, 606 bp, Homo sapiens
  misc_feature 498, 542: n = A,T,C or G
gcatggagtgttatatttcaaggtttttcacaggggttacagtaggacagtccccaccccaatcaggcaccaggataaaagcagggacttaaacagcaccccggttcttcagcctgagccatcacatgctatcagtctcctaacctccccctgggccttaagacagggcttgggcagagaagataaatggtgggacaaaaaaatgagttacattgccacctgagaaacctcagaggggaggacccagccttagcctccctcctcccaagtgcaaaatgtgtaaacagagtaaacggaacagaaaagtgcagtctaagtggttttctctcctgcccctcccaccgcccctccccccaccccctattatttggggataaagaatataaagacaaccctggcttttctattgccttgttgcttgctgaatataaggaatggggtggggcaggaaggggcttgcccttagccacagctctacggctgtgcctcattcatttncacagctgccagtgtccctagagtttatcaggtgaattggtcanggatcagtctccctcgagcctgacttacggctgggacagccccatctttctgttgatatgtggc

SEQ ID NO: 6654 - DNA, 388 bp, Homo sapiens
  misc_feature 324: n = A,T,C or G
cattattacccagaaatctttattacaaaaatattttgcaagccaaaaagtttaagttgcaactatatacaaaatggggcctgtttccttcccagcagtcttaaaataaactcctgaaaccatgctccttccgcagggttcggttcgacctcttccttttcctggggttcaatacacaaggtatgtggattctccaggttgccaggctaaagctaaagctatacatcttccttggccttattcccttatttccccctccaagaattaaaaaataaaataaaatgaaaatggcaccaagaaaacattcttttaaaatactgaatntgtgtgtgcatgcgtgttgcacacgtatgtgctgtctcctgggtaaaaagaagagggagacgaa

SEQ ID NO: 6655 - DNA, 646 bp, Homo sapiens
gctgaccccctccggccctctggctttgtgtctggagctcttgaagcaatgttcatcatgcctagtggcgtataagaagaccccgccaccggtccctccacgcaccacttcaaagccgttcatctcagtcacagtccagagcagtactgagtctgcccaggacacctacctggacagccaggaccacaagagcgaggtgactagccagtcgggcctgagcaactcgtcggacagcctggacagcagtacccgaccgcccagcgtgacacggggtggagtcgccccagcccctgaggccccagagccacccccaaaacatgcagctctgaaaagtgaacaagggacgctgaccagctctgagtcccaccccgaggccgcccccaaaaggaaactgtcatcgataggaatacaagagaggactagaaggaacggttcccacctctcggaggacaacggacccaaagcgatcgatgtgatggcaccctcctcaaaaagcagcgtcccctctcacagtatgtcctcccgacgggacacagactcggatacccaggatgccaatgactcaagctgtaagtcatctgagaggagcctcccggactgtacccctcaccccaactccatcagcatcgatgccggtccccggcag

SEQ ID NO: 6656 - DNA, 401 bp, Homo sapiens
tcggcacgaggcttgggattaattctttttttttttttgaaaggagtctcgctttgccaccaaggctgaagggcaggggggcaatctgggttaattgaaaccttaacctccggggttaacccctttttcctgcctaaccctcccgaaaagttggaactacaggcccctgcccccatgccgggttaatttttggaattttaagaaaaaatggaatttcaccgggtaacccaggagggcctcaatatcctgaccttggaatccgcccgccttgccctaccaaagggctggaataacaggcataacctgtcatgccgggccggaataaattttttatccatgtaatcggcataattttggattttcggctatataagggaatatgggaaaaacccattcccttt

SEQ ID NO: 6657 - DNA, 466 bp, Homo sapiens
  misc_feature 61, 396: n = A,T,C or G
acagccgcggcgcgaggaggcagtgagcgccctgtgttggggcaccggcggcgagacccanatgctggtgggctgcgcggacaggacggtgaagcacttcagcaccgatgatggcatattccacggtcagagacactgcccgggcggggagggcatgttccgtggcctcgcccaggccgacggcaccctcatcacatgtgtggattctgggattctcagattctggcatgacaaggacaaggacacatcctctgacccactcctggaactgagagtgggccctggggtgtgtaggatgcgccaagacccaccacacccccatgtggttgccacaggtgggaaagagaatgctttgaagatatgggacctgcatggctctgacgaacctgtgttcanggccaagaacgtgcggaatgactggctggacttgcgggttcccatctgggaccaggacatacagtttctc

SEQ ID NO: 6658 - DNA, 181 bp, Homo sapiens
tcggcacgaggatttatgtaccatattatacctttttattgttgttataattattatgggtatttctaattaatatgatgttgaaacctgtttggcaccttctggaagctaccaaaaaaatgacactccattgaagtgcttaaaagctgttctcataagaattctactggcctattgtaaa

SEQ ID NO: 6659 - DNA, 563 bp, Homo sapiens; identical to SEQ ID NO: 1903

SEQ ID NO: 6660 - DNA, 522 bp, Homo sapiens
  misc_feature 462: n = A,T,C or G
cggcacgagtgaaaaacctgaaagatatgaagggggccgaggcgagtcttctaagagggacaagtcaaagaagaagaagaaagtaaaggtaaagatggaaaagaaatccacgccctctaggggctcatcatccaagtcgtcctcaaggcagctaagcgagagcttcaagagcaaagagtttgtgtctagtgatgagagctcttcgggagagaacaagagcaaaaagaagaggaggaggagcgaggactctgaagaagaagaactagccagtactccccccagctcagaagactcagcgtcaggatccgatgagtagaaacggaggaaggttctctttgcgcttgccttctcacaccccccgactccccacccatattttggtaccagtttctcctcatgaaatgcagtccctggattctgtgccatctgaacatgctctcctgttggtgtgtatgtcactanggcagtggggagacgtcttaactctgctgcttcccaaggatggctgtttataatttgggg

SEQ ID NO: 6661 - DNA, 535 bp, Homo sapiens; identical to SEQ ID NO: 1905
  misc_feature 446: n = A,T,C or G

SEQ ID NO: 6662 - DNA, 458 bp, Homo sapiens
tcggcacgaggcgccccgtctccgccgccgcacccctgtccagctgttgagctgcccgccccacctgctcaagtctaactccgaggccagcctcctccagctgctggcaggggctggcacccatgggacaccctctgcccccaaccgcagcctgtcagaactctgcctggctgttccacccccagtattaggactcaaggctcccctcacgaagctgggcccagctgggattgccgacgggcccctaaccctggcagcggtcctgggctactcggctgcctggccggggaacctgcacgctcccacaggaagatgtgtggagacctgccctcgggggcctctcccagggtccatcctgagcccccaccacgggtctctgcccaccacacgaagctgaccctggcccagctctaccgaatcacgaccaccctgctgcttaactccacgctcactgcctc

SEQ ID NO: 6663 - DNA, 275 bp, Homo sapiens
ggggccccaaaaaatttttttttaaaaaaccgaaaaccgggccctttggcccctaaaatggaaatttccccatccttcctttaaaggaacctaaaaaaaccgggttccctaggggggctgggcccctgtttaattttttggaaaaggaaaacccttttagggtttctgggggccctggggttttaccccccggaaaaaaagggccttggtttggaaattttttaaccaaggggggacaccaaagggcaaaacggaaaggttgggcggaaaaaggg

SEQ ID NO: 6664 - DNA, 509 bp, Homo sapiens
  misc_feature 315: n = A,T,C or G
tcggcacgaggacatatggacctgccccggacctggtgatcatcaactcctgcctctgggatctctccagatatggtcgctgctcaatggagagctaccgggagaacctggagcgggtgtttgtgcgcatggaccaagtattgccagactcctgcctgctggtgtggaacatggcgatgcccctcggggaacgtatcactgggggtttcctcctgccagagctccagcccctggcaggctccctgcggcgggatgtggttgaagggaacttctacagtgctacgctggccggggaccactgctttgatgtcctanacctccactttcacttccggcatgcagtacagcaccgtcatcgggatggtgtccactgggaccagcatgcacaccgccacctctcacacctgcttctgacccatgtggctgacgcctggggcgtggagctgcccaagcgtggctatccccctgacccgtggattgaggactgggcagagatgaatcatccattc

SEQ ID NO: 6665 - DNA, 619 bp, Homo sapiens
tcggcacgaggcgcagcccgactagcagtctaaaggcctgaggcttctgggtcctggtgacggggctggcatgaccccgggggtcgtccatgccagtccgcctcagtcgcagagggtccctcggcaagcgccctgtgagtgggccattcggaacattggacagaagcccaaagagccaaattgtcacaattgtggaacccacattggcctgagatccaaaacgcttcgaggcaccccaaattacctgcccattcgtcaggacacccacccacccagtgttatattctgcctcgccggagtgggtgttcccgggggcacttgccgaccagccccttgcgtccccaggtttgcagctctcccctgggccactaaccatcctggcccgggctgcctgtctgacctccgtgcctagtcgtggctctccatcttgtctcctccccgtgtccccaatgtcttcagtggggggccccctcttgggtcccctcctctgccatcacctgaagacccccacgccaaacactgaatgtcacctgtgcctgccgcctcggtccaccttgcggcccgtgtttgactcaactcaactcctttaacgctaatatttccggcaaaatcccatgct

SEQ ID NO: 6666 - DNA, 620 bp, Homo sapiens; identical to SEQ ID NO: 1908
  misc_feature 431: n = A,T,C or G

SEQ ID NO: 6667 - DNA, 529 bp, Homo sapiens
tcggcacgagggctcatccacggccaacctcatctttgaggactgtcgcatccccaaggacagcatcctgggggagccagggatgggcttcaagatagccatgcaaaccctggacatgggccgcatcggcatcgcctcccacgccctgggcattgcccagaccgccctcgattgtgctgtgaactacgctgagaatcgcatggccttcggggcgcccctcaccaagctccaggtcatccagttcaagttggcagacatggccctggccctggagagtgcccggctgctgacctggcgtgctgccatgctgaaggataacaagaagcctttcatcaaggaggcagccatggccaagctggctgcctcggaggccgcgaccgccatcagccaccaggccatccagatcctgggcggcatgggctacgtgacagatatgccggcagatcggcactaccgcgacgcccgcatcactgagatctacgagggcaccagcgaaatccagcggctggtgatcgccgggcatctgctc

SEQ ID NO: 6668 - DNA, 285 bp, Homo sapiens
atacgaacatgtatgcacacaaaacatttaactatggtatttatggaagacaggtaacaacattaaatctagttgctttcccttactattagatctgttgagggttttttaaaaatcaggtctgttgaaagtcttctgtcataatctataaagcaccatcactcatgtgaaattgtagcatgccagtaatttttactcaccatcccatacatatgatttctgcagtccagtgtgtaatccgctccatgtgtattttgcttaatggaatgctttatttaagcactt

SEQ ID NO: 6669 - DNA, 598 bp, Homo sapiens
atcccgggcctggcgggggcaggaaattctgtattgctggtcagcaacctcaacccagagagagtcacaccccaaagcctctttattcttttcggcgtctacggtgacgtgcagcgcgtgaagatcctgttcaataagaaggagaacgccctagtgcagatggcggacggcaaccaggcccagctggccatgagccacctgaacgggcacaagctgcacgggaagcccatccgcatcacgctctcgaagcaccagaacgtgcagctgccccgcgaggtccaggaggaccagggcctgaccaaggactacggcaactcacccctgcaccgcttcaagaagccgggctccaagaacttccagaacatattcccgccctcggccacgctgcacctctccaacatcccgccctcagtctccgaggaggatctcaaggtcctgttttccagcaatgggggcgtcgtcaaaggattcaagttcttcagaaggaccgcaagatggcactgattcagatgggctccgtggaggaagcggtcaggccctcattgagctgcacagcacgacttcgggagaacaccacttgcgggtctctctccaagtc

SEQ ID NO: 6670 - DNA, 620 bp, Homo sapiens
  misc_feature 351: n = A,T,C or G
tcggcacgagggctacagtctgtggcagtttcagaagaggtgcagagtccagtggtgacatggatgttctcctgacccatcccagcttcacttcagaatcaaccaaacagccaaaactgttacatcaggttgtggagcagttacaaaaggttcattttatcacagataccctgtcaaagggtgagacaaagttcatgggtgtttgccagcttcccagtaaaaatgatgaaaaagaatatccacacagaagaattgatatcaggttgatacccaaagatcagtattactgtggtgttctctatttcactgggagtgatattttcaataagaatatgagggctcatgccctanaaaagggtttcacaatcaatgagtacaccatccgtcccttgggagtcactggagttgcaggagaacccctgccagtggatagtgaaaaagacatctttgattacatccagtggaaataccgggaacccaaggaccggagcgaatgaggcctgtatcctccctggcagacacaacccaataggagtcttaatttatttcttaacctttgctatgtaagggtctttggtgtttttaaatgattgtttcttcttcatgcttttgcttgcaat

SEQ ID NO: 6671 - DNA, 558 bp, Homo sapiens
  misc_feature 475: n = A,T,C or G
tcggcacgaggctgaatctgaccctgcttcccacccccacccttgtaagagcacctgtgggcatggaggggaaggatctggggctgatctaaatgtcttctctcctttttagacgactgcaagaacattgccaacatcatgaagacactcgcctatcgaggcttcatcttcaagcagacatcgaagccgttctgattggccgaggacaggatggggcaggacagggtagctgtttggcccagcccagaatcctcctctccctcaccagaagggaagagggagagtggcatagctctgtgtccagagtgtccccagctgccctgtgggctcatgcccttggcgtgggcttgtgcccttgcaagggcttggccacttggcccttctggagcagacactttgtgccccccatccccacccctcaatctcagcccagtatcagcccctcccattgcgggcctgggctagggggacccangcactcaccgcctcctccctggtacacaggcttctgtggggccaccaagcccctcctgtgccccctcccatccatagtgcatg

SEQ ID NO: 6672 - DNA, 479 bp, Homo sapiens
  misc_feature 331: n = A,T,C or G
tcggcacgaggggatgtggcaccaaatttctgagctacaagtttagcaactcggggagcagaatcacctgtgcaaaacaggactcctgcagaagtcaactgtgtgagtgtgataaggctgctgccacctgttttgctagaaacaagacgacctacaataaaaagtaccagtactattccaataaacactgcagagggagcacccctcgttgctgagtcccctcttccctggaaaccttccacccagtgctgaatttccctctctcataccctccctccctaccctaaccaagttccttggccatgcagaaagcatccctcacccatcctanaggccaggcaggagcccttctatacccacccagaatgagacatccagcagatttccagccttctactgctctcctccacctcaactccgtgcttaaccaaagaagctgtactccggggggtctcttctgaataaagcaattagcaaat

SEQ ID NO: 6673 - DNA, 438 bp, Homo sapiens
atccacagcctcagcctcccagagtgctggaattacagaattttgaacatattcctccatcatgttccggttcccactgacgctgttaaagaatccagtgccattcggatccatgatcctttgtatgaaatccactttttctctgcaaacttgtaggatattttcttcatgccagatacttgtgttcttcaattctgggtttttgaaaacaaaatatttttaaaattactttcttctttctttttttttaggacagagtctcgctccgtcgcccaggctagagtgcagtggtgtgatcccagctcattgcagcctcaaacccctgggctcaggtggttctcccacctcagccccccaggtagctaggactacaggtgtgtgccaccagtcctggctaattttttaattttttttttgaaaacacttatgcctattgac

SEQ ID NO: 6674 - DNA, 279 bp, Homo sapiens
tcggcacgaggtttttttttttttttttggggtcccaacaaacttttttttacaaaaacagaaaccaggccctttggcccctaaaactgaaatttccccatcactactttaaaggatcctaaaataacctggttccctaagggggctgggcccctgtttaattttttggaaaatgaaaaccactttagggtctcctggggccctaaggttttacacaccggaaaaacagggcactgctttggaaattttttaaccaaggggggacagcaaagggcaaaa

SEQ ID NO: 6675 - DNA, 454 bp, Homo sapiens
gcggccgcagagccccggcgggcagccctgagctccccagctggttgtgctgcagcaacaaatagcgcagaccacgcgccccgtgcagccgagccgcctccacctgccggatgcggttgcggcccaggtgcaggatagccagggtccggggcaggccggcgggcactgtggtcagctggttgtgggagagatccaggtattcaaggctatgcagcttgctgaaggtggtggcatccaggccactgtctgtcagctggttgtgctggaggtagagctcacggagttgagtctggcggctcagggctcctcggggcaccttggagatgagattgttagcagggctacctgcatgtggagccgctcgagtgagggcggcaggctgggcggcaggtagctgagctggttgttggagaggctgagggtggcgatggcctcggagccgcggaaggcgtcg

SEQ ID NO: 6676 - DNA, 419 bp, Homo sapiens
acgcggttgatggttctgacccgggccaaggcctcggagctgcacagcgtgcgcaagctcaactgctggggcagccgcctcacagatatctccatttgccaggagatgcccagcctggaggtgatcacgctcagtgtcaacagcatctccaccctggagcctgtgagccggtgccagcgcctgagtgagctgtacctgcggaggaaccgcatccccagcctggctgagctcttctacctgaaggggctgccgcgtctgcgggtgctgtggctggccgagaacccgtgctgcggcaccagcccccaccgctaccgcatgaccgtgctgcgcaccctgccgcgcctacagaagctggacaaccaggctgtgacggaggaggagctgtcccgtgcactgagtgagggagaggagatcactgc

SEQ ID NO: 6677 - DNA, 523 bp, Homo sapiens
ttcggcacgagggttaaaaattatctggaattaaaagtaaggctgttttttcttttttctcttacccattattaggtaagaattctctacgcctgtggttttagcgttttgttgaccagctatacacactctgctgttgacaatattcttttgaagttagccaagtttaaaataggatttttgcgtttgggtcagattcagaaggttcatccagctatccagcaatttacagagcaagaaatttgcagatcaaagtccattaaatccttagctcttctagaagaactctacaatagtcaacttatagttgcaacaacatgtatgggaataaaccatccaatattttcccgtaaaatttttgatttttgtattgtggatgaagcctctcaaattagccaaccaatttgtctgggccccctttttttttcacggagatttgtgttagtgggggaccatcagcagcttcctcccctggtgctaaaccgtgaagcaagagctcttggcatgagtgaaagcttattca

SEQ ID NO: 6678 - DNA, 627 bp, Homo sapiens
ttcggcacgagggccgtggaccgctacatctccatcttctacgcactgcgctaccacagcatcgtgaccctgccgcgggcgcggcgagccgttgcggccatctgggtggccagtgtcgtcttcagcacgctcttcatcgcctactacgaccacgtggccgtcctgctgtgcctcgtggtcttcttcctggctatgctggtgctcatggccgtgctgtacgtccacatgctggcccgggcctgccagcacgcccagggcatcgcccggctccacaagaggcagcgcccggtccaccagggctttggccttaaaggcgctgtcaccctcaccatcctgctgggcattttcttcctctgctggggccccttcttcctgcatctcacactcatcgtcctctgccccgagcaccccacgtgcggctgcatcttcaagaacttcaacctctttctcgccctcatcatctgcaatgccatcatcgaccccctcatctacgccttccacagccaggagctccgcaggacgctcaaggaggtgctgacgtgctcctgctctcaggaccgtgccctcgtcagctgggatgtgaagtctctgggtggaagtgtgtgccaagagctactcccacagcag

SEQ ID NO: 6679 - DNA, 705 bp, Homo sapiens
  misc_feature 548: n = A,T,C or G
ttcagttttttaagatttatttcaagtgttgtgcaaagagggcttatgcaattcttcagaccctatttattttatttatttatttatgtacattcttctggaaaggattactaaagccaaactaagaaaagtatgtaagtgatggattatcaggcgcccttgtttgaggtcagagtaaacagacagactcccgataggttggtttaaaagtagatacctagattgcctggaagcattcaactcagctttgtgggagcatttggtcaaacttccaagtcattgttttttttgtgtgtgttcattttgttacttttccagttcttcctttgttctgtttatgtgccaatgtgcacagagaagatcaacatccccattggcccatgcggcggcatgtgtctttcagtcaagagacgctgtgaacccgtcctgaaggaatttggatttgcctggccagagagtctgaactgcagcaaattcccaccacagaacgaccacaaccacatgtgcatggaagggccaggtgatgaagaggtgcccttacctcacanaacccccatccagcctggggaagagtgtcactctgtgggaaccaattctgatcagtacatctgggtgaaaaggagcctgaactgtgtgctcaagtgtgctatgatgcttgcttatacagccgctcagcccaagaagtcactggatatctggatggct

SEQ ID NO: 6680 - DNA, 425 bp, Homo sapiens
ttcggcacgaggatgagtaagctgtggcggcgtgggagcacctctggggctatggaggcccctgagccgggagaagccctggagttgagcctggcgggtgcccatggccatggagtgcacaagaaaaaacacaagaagcacaagaagaaacacaagaagaaacaccatcaggaagaagacgccgggcccacgcagccgtcccctgccaagcctcagctcaaactcaaaatcaagcttgggggacaagtcctggggaccaagagtgttcctaccttcactgtgatcccagaggggcctcgctcaccctctccccttatggttgtggataatgaagaggaacctatggaaggagtcccccttgagcagtaccgtgcctggctggatgaagacagtaatctctctccctctccacttcgggacctatc

SEQ ID NO: 6681 - DNA, 552 bp, Homo sapiens
tttctcactgcagcatgtagcaaattagactggccacctggagacccaggtcctcattcaggttatgctcacagaatgtgttacccggaaagagctgaagtctagggcctcagtttccccagtgcactggtggcaggtgggcctggctgagtcccagcccctcaggctctggcctctatgtccctacattctctccctgcaggaggctccactgcactcgcaactacatccacatgcacctgttcgtgtccttcatccttcgtgccctgtccaacttcatcaaggacgccgtgctcttctcctcagatgatgtcacctactgcgatgcccacagggtaatatgtctgggtgccccaggatgtcgccaggcccgcctgccttccccagcctagctttggagaggggagtagcctagttgtccttcccccaagcccctgctgaggctgcatttaataccaaggataaagcagccagtgctgacactgggccaggaggttcagggagattccacagccacatgtgcacaatctgggtcatgtaggagagaagctc

SEQ ID NO: 6682 - DNA, 595 bp, Homo sapiens
  misc_feature 289, 293: n = A,T,C or G
tcggcacgaggatgatccgtcagatctctagaccctcagctgctggtatcaaccttatgattggcagtacacggtatggagatggtccacgtcctcccaagatggcccgatacgacaatggaagcggatatagaaggggaggttctacttacagtggtggaggctatggcggtggctatagcagtggaggctatggtagcggaggctatggtggcagcgccaactcctttcgggcaggatatggtgcaggtgttggtggaggctatagaggagtttcccgaggtggctnttanaggcaactctggaggagactacagagggcctagtggaggctacagaggatctgggggattccagcgaggaggtggtaggggggcctatggaactggctactttggacagggaagaagaggtggcggctattaaaacttggttatgtcagttcctgtgtgtagacagtaaggaaaaaaaggcatgctatgtgttacgtgttttttccagtatgtttatttgccaccaaaaagtaaatgcattttcacccattctgtggttcattgtagtttaaggaaaccaagcatatagatgcattagtgat

SEQ ID NO: 6683 - DNA, 464 bp, Homo sapiens
  misc_feature 42, 47, 95, 375, 401, 420, 438: n = A,T,C or G
ctccgttgttggtccactgcagtgctggggtaggaaggactngcgtngtgattttgtcggagatcatgatcgcctgcctggaacacaatgaggtnctggacatcccgagagtgctggacatgctgaggcaacagagaatgatgctggtgcagactctctgccagtacacatttgtgtacagagtcctcatccagttcctgaaaagctccaggctcatctaagctcccacaatttcttacggggccagtcatgtgaagcgtttacagcttaaaaaaaaagcgcttgcctaactcatactttcccgttggacacttgatccacgcagcgtgggcactggggacgtaagttggcgcagtcttgaatgggcggcacttngaaagggaaacgtggcggacaagggncttgaaggagggggttttntaacctggggaaaggttnttcaagggaggatttggttttcaaaa

SEQ ID NO: 6684 - DNA, 496 bp, Homo sapiens
  misc_feature 436, 491: n = A,T,C or G
atatctggctgggtagctgccctcgtcaggtggaacatgtaaccatcaaactgaagcatgaattggggattacagctgtaatgaatttccagactgaatgggatattgtacagaattcctcaggctgtaaccgctacccagagcccatgactccagacactatgattaaactatatagggaagaaggcttggctacatctggatgccaacaccagatatgagcaccgaagccgagtacagatgctgccccaggcggtgtgcctgctgcatgcgctgctggagaagggacacatcgtgtacgtgcactgcaacgctggggtgggccgctccaccgcggctgtctgcggctggctccagtatgtgatgggctggaatctgaggaaggtgcagtatttcctcatggccaagaggcggcctgtctacaattgaccgaagnaggcagctagcccaggacacatttccactattattttacaaagttaaatttatangcttt

SEQ ID NO: 6685 - DNA, 230 bp, Homo sapiens
tcggcacgagggcctgtaatcccagctaaccaggaggctgaggcaggagaaatcacttgggcccgggaggcagaggttgcagtgagccgagaccatgccactgcactccggcctgggtgacagggcaagactctgtctcaaaaaaaaaaaaaaaaaattacccccacatgggtaacttaacaaaaatggattctaacagttttggaggcccaaagtctaaaataaaagtg

SEQ ID NO: 6686 - DNA, 222 bp, Homo sapiens
gaagctggtacgcctgcaggtaccggtccggaattcccgggtcgacatcatcatgatcgctcgacatcgatacgactttttttttttttttttttttttttgggaaaggggggattttttaacccccccgggggtgggtaaaaggctttttggggggaaggccccccttgccgggaaatttgccaaaaattttttgcccctttgggggtttttccccacccc

SEQ ID NO: 6687 - DNA, 542 bp, Homo sapiens
  misc_feature 516: n = A,T,C or G
atcggaatgtggttaccattttcagtgcacccaattactgttatcgttgtgggaaccaggctgctatcatggaattagatgacactttaaaatattccttccttcaatttgacccagcgcctcgtcgtggtgagcctcatgttacacggcgcaccccagactacttcctataaatttctcctgggaaacctgcctttgtatgtggaagtatacctggctttttaaaatatatgtatttaaaaacaaaaagcaacagtaatctatgtgtttctgtaacaaattgggatctgtcttggcattaaaccacatcatggaccaaatgtgccatactaatgatgagcatttagcacaatttgagactgaaatttagtacactatgttctaggtcagtctaacagtttgcctgctgtatttatagtaaccattttcctttggactgttcaagcaaaaaaggtaactaactgcttcatctcctttgcgctatttggaaattttagttatagtgtttaactggcnggggggggttttttgtggtgtggggg

SEQ ID NO: 6688 - DNA, 358 bp, Homo sapiens; identical to SEQ ID NO: 280
  misc_feature 320, 323: n = A,T,C or G

SEQ ID NO: 6689 - DNA, 363 bp, Homo sapiens; identical to SEQ ID NO: 1918

SEQ ID NO: 6690 - DNA, 571 bp, Homo sapiens
gacagagggggttttcctctggacctgggaaccactggcttactttcactcaccgcctgtccttcctgacacctcaccatgtgtacgggaaaatgtgcccgctgtgtggggctctccctcattaccctctgcctcgtctgcattgtggccaacgccctcctgctggtacctaatggggagacctcctggaccaacaccaaccatctcagcttgcaagtctggctcatgggcggcttcattggcgggggcctaatggtactgtgtccagggattgcagccgttcgggcagggggcaagggctgctgtggtgctgggtgctgtggaaaccgctgcaggatgctgcgctcggtcttctcctcggcgttcggggtgcttggtgccatctactgcctctcggtgtctggagctgggctccgaaatggacccagatgcttaatgaacggcgagtggggctaccacttcgaagacaccgcgggagcttacttgctcaaccgcactctatgggatcggtgcgtggcgccccctcgcgtggtcccctggaatgtgacgctcttctcgctgctggtggccg

SEQ ID NO: 6691 - DNA, 617 bp, Homo sapiens
ggatgctcagcgcgctgcccggctggggacccacgcacctgcagcgcccgctgctcggccctgcatcctgcctgggcatcctgcgcccgaccatgacggcgcactcattcgccctcccggtcatcatcttcaccacgttctggggcctcgtcggcatcgccgggccctggttcgtgccgaagggacccaaccgcggagtgatcatcaccatgctggtcgccaccgccgtctgctgttacctcttctggctcatcgccatcctggcgcagctgaaccccctgttcgggccccagctgaagaatgagaccatctggtacgtgcgcttcctgtgggagtgacccgccgcccccgacccaggtgcccagctctcggaatgactgtggctccactgtccctgacaaccccttcgtccggaccctcccccacacaactatgtctggtcaccagctccctcctgctggcacccagagacccggacccgcagggcctgcctggttcctggaagtcttcccagtcttcccagccagcccgggccctggggagccctgggcacagcagcggccgaggggatgtcctgctccaatacccgcactgctctggagtttgccctctttccc

SEQ ID NO: 6692 - DNA, 525 bp, Homo sapiens
gacagaggggcgggcttctgtgaaacatggcggtaggctgggaccataacacaagcatgactatatgaaggaagaggaaggttttcctgaagatgaggcgactgaatcggaaaaaaactttaagtttggtaaaagagttggatgcctttccgaaggttcctgagagctatgtagagacttcagccagtggaggtacagtttctctaatagcatttacaactatggctttattaaccataatggaattctcagtatatcaagatacatggatgaagtatgaatacgaagtagacaaggatttttctagcaaattaagaattaatatagatattactgttgccatgaagtgtcaatatgttggagcggatgtattggatttagcagaaacaatggttgcatctgcagatggtttagtttatgaaccaacagtatttgatctttcaccacagcagaaagagtggcagaggatgctgcaactgattcagagtaggctacaagaagagcgttcacttcaagatgtgatat

SEQ ID NO: 6693 - DNA, 538 bp, Homo sapiens
gggtgtgaggatccgaacccggggtggggggtggaggcggctcctgcgatcgaaggggacttgagactcaccggccgcacgccatgagggccctgtgggtgctgggcctctgctgcgtcctgctgaccttcgggtcggtcagagctgacgatgaagttgatgtggatggtacagtagaagaggatctgggtaaaagtagagaaggatcaaggacggatgatgaagtagtacagagagaggaagaagctattcagttggatggattaaatgcatcacaaataagagaacttagagagaagtcggaaaagtttgccttccaagccgaagttaacagaatgatgaaacttatcatcaattcattgtataaaaataaagagattttcctgagagaactgacttcaaatgcttctgatgctttagataagataaggctaatatcactgactgatgaaaatgctctttctggaaatgaggaactaacagtcaaaattaagtgtgataaggagaagaacctgctgcatgtcacagacaccggtgt

SEQ ID NO: 6694 - DNA, 486 bp, Homo sapiens
cagcgagcgcggtcgtccttggtggaaggaaccatgaactggcatctccccctcttcctcttggcctctgtgacgctgccttccatctgctcccacttcaatcctctgtctctcgaggaactaggctccaacacggggatccaggttttcaatcagattgtgaagtcgaggcctcatgacaacatcgtgatctctccccatgggattgcgtcggtcctggggatgcttcagctgggggcggacggcaggaccaagaagcagctcgccatggtgatgagatacggcgtaaatggagttggtaaaatattaaagaagatcaacaaggccatcgtctccaagaagaataaagacattgtgacagtggctaacgccgtgtttgttaagaatgcctctgaaattgaagtgccttttgttacaaggaacaaagatgtgttccagtgtgaggtccggaatgtgaactttgaggatccagcctctgcctgtgat

SEQ ID NO: 6695 - DNA, 413 bp, Homo sapiens
ggcacgaggcctcagtcttccagggcggcggtgggtgtccgcttctctctgctcttcgactgcaccgcactcgcgcgtgaccctgactccccctagtcagctcagcggtgctgccatggcgtggcggcggcgcgaagccggcgtcggggctcgcggcgtgttggctctggcgttgctcgccctggccctgtgcgtgcccggggcccggggccgggctctcgagtggttctcggccgtggtaaacatcgagtacgtggacccgcagaccaacctgacggtgtggagcgtctcggagagtggccgcttcggcgacagctcgcccaaggagggcgcgcatggcctggtgggcgtcccgtgggcgcccggcggagacctcgagggctgcgcgcccgacacgcgcttcttcgtgcccg

SEQ ID NO: 6696 - DNA, 569 bp, Homo sapiens
ctcatcttccaggcggcggtgggtgtccgcttctctctgctcttcgactgcaccgcacttcgcgcgtgaccctgactccccctagtcagctcagcggtgctgccatggcgtggcggcggcgcgaagccggcgtcggggctcgcggcgtgttggctctggcgttgctcgccctggccctgtgcgtgcccggggcccggggccgggctctcgagtggttctcggccgtggtaaacatcgagtacgtggacccgcagaccaacctgacggtgtggagcgtctcggagagtggccgcttcggcgacagctcgcccaaggagggcgcgcatggcctggtgggcgtcccgtgggcgcccggcggagacctcgagggctgcgcgcccgacacgcgcttcttcgtgcccgagcccggcggccgaggggccgcgccctgggtcgccctggtggctcgtgggggctgcaccttcaagacaaggtgctggtggcggcgcggaggaacgcctcggccgtcgtcctctacaatgaggagcgctacgggaacatcaccttgcccatgtctcacgcgggaacag

SEQ ID NO: 6697 - DNA, 548 bp, Homo sapiens
ttcggcacgagggatttttgtcactttctgtgtgaactaaagtgattcaatgtctcttttggattgcttctgcacttcaagaacacaagttgaatcactcagacctgaaaaacagtctgaaaccagtatccatcaatacttggttgatgagccaaccctttcctggtcacgtccatccactagagccagtgaagtactatgttccaccaacgtttctcactatgagctccaagtagaaataggaagaggatttgacaacttacttctgtccatcttgcacggcatactcccacgggaacactggtaactataaaaattacaaatctggaaaactgcaatgaagaacgcctgaaagctttacagaaagccgtgattctatcccactttttccggcatcccaatattacaacttattggacagttttcactgttggcagctggctttgggttatttctccatttatggcctatggttcagcaagtcaactcttgaggacctattttcctgaaggaatgagtgaaactttaataagaaacattctctttgg

SEQ ID NO: 6698 - DNA, 717 bp, Homo sapiens
  misc_feature 317, 497, 576, 616, 627, 714: n = A,T,C or G
caagctttctagtaatttaattttatcaaaacaccctcccctcctatctttatgacaccatttaattcttgccaaattcggtccacccccacacacacacccccaagctctaccaaatgcctactcaaagagctgttggacccctttgtgcggctatttacatcctccctcctaaaaaatattttcatcgcaaattcagtctgtcttaattctctcgggaaattccaggcacaataatttcttggcctttgctcagaagccactatcccagggaatcaaagaagaggtgcattcccagatgtagagaggggcctttntgtattgagtgggagcacaaaggctccagggctcctaagcttgggatttcctctgagaaagtgaaattggggcttgtggagaagagaagtagaacccagaagcttattggcgagctcaggaatcttcatccatgacatctagaatattgctcagaagaaatttgaagtgggacgctcatnctgcttctcatgcccagcactgtacatgatggtatataccttctctgaagccagatgaggcctgtagagacgtaggccntggggcatgtgttcagcagtctcactggtagtaaatctcntcatatgcatnctcccccaggagtaaaattccacatcaaaacccaaaagccaaatgtcagattgctgctgaactgctaacatcaggacttcggtgggngac

SEQ ID NO: 6699 - DNA, 505 bp, Homo sapiens
ttcggcacgaggccgggtaatctacttctaagccttaagaatattccctgggacacagacactataattggaagtgctgagctctggggcagaaggatcaggtgaccttcgcaacaaagtttgcccccacctcacataggacccggaagcagcctgagctgtggcggaggatccaggaagctacggagagaagcagccagcatggtgttccgtgcctcccggacgtttttcaagaggcctggttggacttgggttcctggatggtgggattgttgtacagcctctcaggagaccctgctgtcaagactgtgtgtgtggatttcccacccttagaagctctactaagacatcaacggaattagggccttcctttttgccttgtgagcgccaaggaaaagaaactatctcggtcacgtgagcgccagcgaaaagaaactgtatcagtcatccagagaccgtttattgcccaacacgttattcttgctgttggtggggtaactagccg

SEQ ID NO: 6700 - DNA, 538 bp, Homo sapiens
tcggcacgagggaccttcagcaatggcactggtaaagcattcagtattgctgtccgcttctagaaagagtgcagaacaattacgaatagaattgaatgccgaaaagttcaaaaattcacttttacaaaaagaactcaagaaagcacagatggcaaaagctgcagctgaggaaagagcactcttcactgaccggatggccactaggtccaccacccagagtaatagaacatctcgacttattggaaagaaaatgaaccgctctgtcagccttactatatactgagctactcctttcccacctccccctgaacactgtgacaagaggaagctaggttgaaatcactgatagaatccagtttgcaattactttctcgattggtgtcagtagttttactgattaggacttttattgtgaattacagttgaaagctgtattttgatgattgctatgtcaggctttcatctaatcttaccagtctgtcttctgtaggatgtgtcactgttggatgttacaccagcctttccagggttaaccact

SEQ ID NO: 6701 - DNA, 592 bp, Homo sapiens; identical to SEQ ID NO: 1926

SEQ ID NO: 6702 - DNA, 514 bp, Homo sapiens
tcggcacgaggctggagtaaatgaactggaccaaatctcaaaaatccacgatgtcatcggcacacccgctcagaagatcctcaccaagttcaaacagtcgagagctatgaattttgattttccttttaaaaagggatcaggaatacctctactaacaaccaatttgtccccacaatgcctctccctcctgcacgcaatggtggcctatgatcccgatgagagaatcgccgcccaccaggccctgcagcacccctacttccaagaacagagaaacagtccctaaagcaagaggaggaccgtcccaagagacgaggaccggcctatgtcatggaactgcccaaactaaagctttcgggagtggtcagactgtcgtcttactccagccccacgctgcagtccgtgcttggatctggaacaaatggaagagtgccggtgctgagacccttgaagtgcatccctgcgagcaagaaggtagcgcggaaccagcttctctgacggcgctgctcttcgaccc

SEQ ID NO: 6703 - DNA, 460 bp, Homo sapiens
  misc_feature 307: n = A,T,C or G
tcggcacgagggatacaagggcttggttttgttacccaggctggtttcaaggccatagctttaagagatcctctcaccacagatttccaaagtgctgggattgcaggtgtgattcatggcacccagactttgctgcctttcttacatgatccaggcccagaacccaaactcaggcactgtatagatgaccactttcgtaaactactgacctagcttgttgccaattgttgattgaacttcccataactccacttcgtgtctgttcctctgtatacagccaccttctgttcctgtcatgagcctttangtctccatttgcatattgcaaatactatgttccatgtaggtagctcattcagggccttgctcttcacttcaaaaaaggttcccttgaggactggctgtcaatttgtgttgctgtgttggttgttgatgaaaataataaaatgattgattacat

SEQ ID NO: 6704 - DNA, 173 bp, Homo sapiens
tgccatgtgcgtttgctctgtggggaacagagcacacagggtgagcgacatgtgcataacggccccttggctgcaattatgacctcattggctggtatggccaacctgctaccaagatgctgctgaccctgtgatcccaacagccctcccttgaccgtgacccctgacctttg

SEQ ID NO: 6705 - DNA, 449 bp, Homo sapiens
  misc_feature 306: n = A,T,C or G
gtcgcaccatgccatgcgaagcccagccctgcagagggtcgctaaggtgcccagctcttctggggggcttcgctgtctctgatgtgcgcatggatccagtcgaggtagcggctgactttggtgtaaacgccgtagttgtgaaggagcccacaggcctcagcccagctcagcaggcccaccagggaccaggtgccgtggaaggaggcgaccatgggccccccactgtcgccgctcgaggcatcctggcggtccccgaggatgcccggacaaagcatgttctcagacaccatgttgctcatgagctcnctgcactcattgttcgggaccacgggaatcttgatgaagttgaggaccaaggtgcggtttctcttgggctgcttctctcggctgctgtggtagccccaggccgtcacgagggtctcctggccgggctgattgagctcgcctct

SEQ ID NO: 6706 - DNA, 467 bp, Homo sapiens
tcggcacgaggcctggaggtgtcccaagcccctgaagaaccgtgatgtcatcaccctccgctcctggctccccatgggcgctgattacatcattatgaactactcagtcaaacatcccaaatacccacctcggaaagacttggtccgagctgtgtccatccagacgggctacctcatccagagcacagggcccaagagctgcgtcatcacctacctggcccaggtggaccccaaaggctccttacccaagtgggtggtgaataaatcttctcagttcctggctcccaaggccatgaagaagatgtacaaggcgtgcctcaagtaccccgagtggaaacagaagcacctgcctcacttcaagccgtggctgcacccggagcagaacccgttgccgagcctggcgctgtcggagctgtcggtgcagcatgcggactcactggagaacatcgacgagagcgcggtggccg

SEQ ID NO: 6707 - DNA, 569 bp, Homo sapiens
  misc_feature 504: n = A,T,C or G
tcggcacgagctcaagtacagcaattacgtgcggcccatctgcctgcctggcacggactatgtgttgaaggaccattcccgctgcactgtgacgggctggggactttccaaggctgacggcatgtggcctcagttccggaccattcaggagaaggaagtcatcatcctgaacaacaaagagtgtgacaatttctaccacaacttcaccaaaatccccactctggttcagatcatcaagtcccagatgatgtgtgcggaggacacccacagggagaagttctgctatgagctaactggagagcccttggtctgctccatggagggcacgtggtacctggtgggattggtgagctggggtgcaggctgccagaagagcgaggccccacccatctacctacaggtctcctcctaccaacactggatctgggactgcctcaacgggcaggccctggccctgccagccccatccaggaccctgctcctggcactcccactgcccctcancctccttgctgccctctgactctgtgtgccctccctcacttgtgggccccccttgcctccgtgcc

SEQ ID NO: 6708 - DNA, 96 bp, Homo sapiens
gggcacccgggtcacaccaagcactgtcagctctgtgatcagcagctgcccgggcctgctctacctcaacctggagtcctgccgctgccttccccg

SEQ ID NO: 6709 - DNA, 520 bp, Homo sapiens
agtggatcccccgggctgcaggaattcggcacgaggctaaatcggctgcgttcctctcggaacgcgccgcagaaggggtcctggtgacgagtcccgcgttctctccttgaatccactcgccagcccgccgccctctgccgccgcaccctgcacacccgcccctctcctgtgccaggaacttgctactaccagcaccatgccctaccaatatccagcactgaccccggagcagaagaaggagctgtctgacatcgctcaccgcatcgtggcacctggcaagggcatcctggctgcagatgagtccactgggagcattgccaagcggctgcagtccattggcaccgagaacaccgaggagaaccggcgcttctaccgccagctgctgctgacagctgacgaccgcgtgaacccctgcattgggggtgtcatcctcttccatgagacactctaccagaaagcggatgatgggcgtcccttcccccaagttatcaaatccaagggcggtgttgtgggcatcaag

SEQ ID NO: 6710 - DNA, 473 bp, Homo sapiens; identical to SEQ ID NO: 1932

SEQ ID NO: 6711 - DNA, 473 bp, Homo sapiens
  misc_feature 150: n = A,T,C or G
tgcggctgcccaacctgctgggccacgagaccatgaaggaggtgctggagcaggccggcgcttggatcccgctggtcatgaagcagtgccacccggacaccaagaagttcctgtgctcgctcttcgcccccgtctgcctcgatgacctanacgagaccatccagccatgccactcgctctgcgtgcaggtgaaggaccgctgcgccccggtcatgtccgccttcggcttcccctggcccgacatgcttgagtgcgaccgtttcccccaggacaacgacctttgcatccccctcgctagcagcgaccacctcctgccagccaccgaggaagctccaaaggtatgtgaagcctgcaaaaataaaaatgatgatgacaacgacataatggaaacgctttgtaaaaatgattttgcactgaaaataaaagtgaaggagataacctacatcaaccgagataccaaaatcatcctggag

SEQ ID NO: 6712 - DNA, 50 bp, Homo sapiens
tcccccggacttatttttttgctttgcccgtggggcccaggcggggaact

SEQ ID NO: 6713 - DNA, 487 bp, Homo sapiens
  misc_feature 370: n = A,T,C or G
tcggcacgaggaggccatggacttcctggggaagtcacctttgatacaaccaagtcggatgggcagtttaagaagacagccagtaacagcaagctgaggacctacctgcccgacttccggttcacacccttcaagcaggcggtgaaggagacctgtgcttggttcactgacaactacgagcaggcccggaagtgaagctggaagacaggatcaggtgccagcggaccatcggctggcagagcccagcggccaccacccgtcaaccctgccaggagctgagggcaccacccagcaacctgggcctgcattccatccgctctgcagccccaagcatctttccagtggggcccccattcacgttggtcctcanggaaaccagggtccggggcaggcccggcgctttgctccccacaccagccccctgcgcgtgtccactctgatcctgcatcccactccctgggagccaataaagtgcattttcacaggc

SEQ ID NO: 6714 - DNA, 356 bp, Homo sapiens
aaaactcaagtctattacttgtagagtccaattcttagcactggaatccctctaggattctaatttgggctttgtctggatttgcttttctcagttgtgctttgaagtgaataacctttgttacaaattaattttttattagttccaatattagttggagttaacttgaattgattgtatgtagcacatcacttttgcagtaagattggtgtgaaatactaaacactatggattttgtatgtgtcaggttaaatggtcaagggatacctacattaagtcatatattaggtattgatgatcttacttcttttctgttcccctgtacaaaacacttacctaacccagcttgtggtttt

SEQ ID NO: 6715 - DNA, 444 bp, Homo sapiens
  misc_feature 22, 89: n = A,T,C or G
gcacagcaacaagtacgaagantggcccgagggctggagatggaaggctgtatcccgcggagaagcacggccagctagcacggccagtncagggaccgggccgagggaggcagaccaagggaggcacgcgcgctgccgggcggacagaggctgaggctcacaccccacacccgggcaggagcgctccctggccccaacacatcggggctccgaggcagtgaccagaacgtggtctcaaggtggtgggggctatgggggctgcagggggtagccctgccgcactttgtcacgggagcccagggtacccgcctccttttcgtaacactgttccccccggtcagcccatctagccctgtcctccattcctcacgccatctccatccccatcttgagtcctgggaacgggcctgggtgcctgcccctcactgtgcatctctgggagca

SEQ ID NO: 6716 - DNA, 560 bp, Homo sapiens
ctgaacgcaggcacatacttactattctacaccctactaggctcccttcccctactcatcgcactaatttacactcacaacaccctaggctcactaaacattctactactcactctcactgcccaagaactatcaaactcctgagccaacaacttaatatgactagcttacacaatagcttttatagtaaagatacctctttacggactccacttatgactccctaaagcccatgtcgaagcccccatcgctgggtcaatattacttgccgcagtactcttaaaactaggcggctatggtataatacgcctcacactcattctcaaccccctgacaaaacacataccctaccccttccttgtactatccctatgaagcataattataacaagctccatctgcctacgacaaacagacctaaaatcgctcattgcatactcttcaatcagccacatagccctcgtagtaacagccattctcatccaaaccccctgaagcttcaccggcgcagtcattctcataatcgcccacggacttacatcctcattactattctgcct

SEQ ID NO: 6717 - DNA, 410 bp, Homo sapiens
  misc_feature 392: n = A,T,C or G
ggagaccagaattcagatgtttatgcccaagaaaagcaggatttcgttcagcacttctcccagatcgttagggtgctgactgaggatgagatggggcacccagagataggagatgctattgcccggctcaaggaggtcctggagtacaatgccattggaggcaagtataaccggggtttgacggtggtagtagcattccgggagctggtggagccaaggaaacaggatgctgatagtctccagcgggcctggactgtgggctggtgtgtggaactgctgcaagctttcttcctggtggcagatgacatcatggattcatcccttacccgccggggaacagatctgctggtatcagaagccgggcttgggtttggatgccatcaatgatggtnaacctcctgggaagcatg

SEQ ID NO: 6718 - DNA, 195 bp, Homo sapiens
  misc_feature 4, 10: n = A,T,C or G
gganctggtngctctcaccccgccgtcccccttcagagactcggtggactcggggagcacaacccccaactcgccagtgtccgagtcggccctctgtatcccgtcgtctcccaaatatgacactcttatcataagagattacactcagagctcctcgtcgttgtgaatgtccctggaaagcacgccggcctgcgc

SEQ ID NO: 6719 - DNA, 466 bp, Homo sapiens
atttgtctgactgtgttggggctgggccacttgtctccaactcataagggcttgcagcccaattgacccgatgtttcatggaacagtcacagaagaactaaccagtcatgaacaatggagtcgctataatgaaaacataagagaaggtcaaaaagattttgtttttgtgaagttcaatggccttcatttaaagtctatggaaaatttgcagtcttgcatctctcttacagtatgcatcttctcaaacaatgttattacagatattcatccacttcaaaggtgtataaaattaatcaaacttgatctccatggaaatcagataaagagtctaccaaataccaatttttggaatggattgaagaacctaaaactactctatcttcatgacaatgggttagcaaagttaaagaatatatgtgtattatctgcctgtccaaccctcattgccctcactatgtttgattgc

SEQ ID NO: 6720 - DNA, 524 bp, Homo sapiens
  misc_feature 520: n = A,T,C or G
gaagttggaaacacatgtccatcagaatttccttctaaaagcatcacctttacttccagaagcaccagccccagaacaagtacaaacttttcacccatgaggccacagcagcccaaccttcagcatctcaagtctagcccacctggatttccatttccagggcctcctaattttcccccacaaagcatgtttggatttccaccacatttgccacctccattacttccccctccaggctttggctttgctcaaaatcccatggttccctggacacctgttgttcatctcccaggtcagccacagcgtatgatgggtcctctctcacaagcatcaaggtatataggcccgcagaatttttaccaggttaaagacattcggaggccagaaaggcgccatagtgacccttggggtaagggcaagaccaacagcaactggatagggccatttaataggggtaaaggggaccgccagagattttatagtgattcacaccattttgaaaagagagcgacatggaaanggat

SEQ ID NO: 6721 - DNA, 561 bp, Homo sapiens; identical to SEQ ID NO: 1936

SEQ ID NO: 6722 - DNA, 628 bp, Homo sapiens
tcggcacgagggttttgaagaatttagctactgcatatgacaactttgttgaacttgtagctaatttgaaggaaggcacaaagttttacaatgagttgactgaaatcctggtcaggttccagaacaaatgcagtgatatagtttttgcacggaagacagaaagagatgaactcttaaaggacttgcaacaaagcattgccagagaacctagtgctccttcaattcctacacctgcgtatcagtccttaccagcaggaggacatgcaccaactcctccaactccagcgccaagaaccatgccgcctactaagccccagcccccagccaggcctccaccacctgtgcttccagcaaatcgagctccttctgctactgctccatctccagtgggggctgggactgctgcgccagctccatcacaaacgcctggctcagctcctcctccacaggcgcagggaccaccctatcccacctatccaggatatcctgggtattgccaaatgcccatgcccatgggctataatccttatgcgtatggccagtataatatgccatatccaccagtgtatcaccagagtcctggacaggctccgtacccgggaccccagcagccttcataccccttccc

SEQ ID NO: 6723 - DNA, 150 bp, Homo sapiens
cccttactttttttaaaaggcggggttaaaaggttaataaccaaggcccttttgaggtttcttgcaaggcaaaaccccaaaaaggggcctccttggaaaggcccccccgtccattcgggggccaaggggaaccaaggggccctccttttc

SEQ ID NO: 6724 - DNA, 353 bp, Homo sapiens
cggcacgaggtgaataacttttttattttgggttatgatgtcaaacgatcctaagcgaagatgatttcagttcatcaaatcatcattaatgactttatgtattatttgcacagggagaattgaaactgagtataatcaataagctagatacgaaatcagtttctcaaactgagcttcagaaaggggcattttgtactcttgtttttgcataactggttttgtttttttgcagaattaactataacaatcactggctaccgaagtaaactgatgtactgaattccataatacataacattcaatttttaccacttctgtttagcgaacttgtatacttattttctgttcagatt

SEQ ID NO: 6725 - DNA, 549 bp, Homo sapiens
gcatcataaattgaactctgaactttggaaacctgaatccttcaggaaagatttggtgagcaggaagtagacctagttaattgtaggaccaatgaaatcatcacaggagccacagtaggagacttctgggatggatttgaagatgttccaaatcgtttgaaaaatgaaaaagaaccaatggtgttgaaacttaaggactggccaccaggagaagattttagagatatgatgccttccaggtttgatgatctgatggccaacattccactgcccgagtacacaaggcgagatggcaaactgaatttggcctctaggctgccaaactactttgttcggccagatctgggccccaagatgtataatgcttatggattaatcactcctgaagatcggaaatatggaacaacaaatcttcacttagatgtatctgatgcagctaatgtcatggtctatgtgggaattcccaaaggacagtgtgagcaagaagaagaagtccttaagaccatccaagatggagattctgacgaactcacaataaagcgatttatt

SEQ ID NO: 6726 - DNA, 523 bp, Homo sapiens; identical to SEQ ID NO: 1937
  misc_feature 460: n = A,T,C or G

SEQ ID NO: 6727 - DNA, 586 bp, Homo sapiens; identical to SEQ ID NO: 1938

SEQ ID NO: 6728 - DNA, 671 bp, Homo sapiens; identical to SEQ ID NO: 1939
  misc_feature 472, 494: n = A,T,C or G

SEQ ID NO: 6729 - DNA, 497 bp, Homo sapiens
tcggcacgagggcggagacggccctcaggggaagagcagccctgtcctgaagaagacccccaacagggcctggtacaggtcaccacgcaccgactatgtcgcctgccaccgagccgggcccacctccccaccaaggaagcgtccagcctgcatgctgtgcggactgcacccaccagcaaggtgatcaagacccgctaccgcattgtcaagaagacgccggcctcgcctctcagcgccccgcccttccccctgtctctgccctcctggcgggcccggcggctctcactatccaggtccctggtgctgaaccgcctgcgtccagttgccagcgggggtgggaaagcccaaccgggctccccttggtggcggagcaaaggctaccgctgcatcggaggggtcctctacaaagtatctgccaacaagctctccaagacctccggccagcccagtgatgcgggcagcaggcccctcctgcgcacaggccggctggatcctgc

SEQ ID NO: 6730 - DNA, 602 bp, Homo sapiens
  misc_feature 457: n = A,T,C or G
tcggcacgaggatgaggccgggcggctttttgggcgccggacagcggctgagtagagccatgagccgatgtgttttggagcctcgccccccggggaagcggtggatggtggctggcctggggaatcccggactgcccggcacgcgacacagcgtgggcatggcggtgctggggcagctggcgcggcggctgggtgtggcggagagttggacgcgcgaccggcactgtgccgccgacctcgccctggccccgctgggggatgcccaactggtcctgctccggccacggcggcttatgaacgccaacgggcgcagcgtggcccgggctgcggagctgtttgggctgactgccgaggaagtctacctggtgcatgatgagctggacaagcccctggggagactggctctgaagctggggggcagtgccaggggccacaatggagtccgttcctgcattanctgcctcaactccaatgagctgctgcctctgttgctggatcgagccaccgacctgatcttggaccacatccgtgagcgaagccaggggccctcactggggccgtgacactagtggccatggctgcctgcctgactgtagtgccca

SEQ ID NO: 6731 - DNA, 515 bp, Homo sapiens
cggcacgaggggcgggcaggtggcggggcagagagatcccgtggccgggaacgtcggggcaggggcgccagtccccgagggggtggccctctcatcctgctggatcttaatgatgagaacagcaaccagagtttccattcggaaggttccctgcaaaagggcacagagcccagtcctgggggcaccccccagcccagccgccctgtgtcacctgccggacccccagaaggggtccctgaggaggctcagcccccacggctgggccaagagagagatcccgggggcataactgctggcagcaccgacgaacccccaatgctgaccaaggaggagcctgttccagaactgctggaagctgaggcccccgaagcttaccctgtctttgagccagtgccacctgtccctgaggcagcccagggtgacacagaggactcggagggtgccccccccactcaagcgcatctgcccaaatgcccctgacccctgaaaagccggcctgcctgtcctgttgcccc

SEQ ID NO: 6732 - DNA, 522 bp, Homo sapiens
gtgctgctccgggccccgtgctggcgcctacgcacctgcagacagagctggtgctgaggtgccagaaggagaccgactgtgacctctgtctgcgtgtggctgtccacttggccgtgcatgggcactgggaagagcctgaagatgaggaaaagtttggaggagcagctgacttaggggtggaggagcctaggaatgcctctctccaggcccaagtcgtgctctccttccaggcctaccctactgcccgctgcgtcctgctggaggtgcaagtgcctgctgcccttgtgcagtttggtcagtctgtgggctctgtggtatatgactgcttcgaggctgccctagggagtgaggtacgaatctggtcctatactcagcccaggtacgagaaggaactcaaccacacacagcagctgcctgactgcagggggctcgaagtctggaacagcatcccgagctgctgggcctgcctggctcaacgtgtcacagatggtgacaacgtgcattggtttgaatgttctgagg

SEQ ID NO: 6733 - DNA, 601 bp, Homo sapiens
  misc_feature 548: n = A,T,C or G
tcggcacgaggcctcgttccgaattcggcacgagggtggatgaggtgcgcgagctgcagaaggccatcggggccgtgccgctgattcagggcgagtacatgatcccctgtgagaaggtgtccaccctgcccgcgatcacactgaagctgggaggcaaaggctacaagctgtccccagaggactacacgctcaaggtgtcgcaggccgggaagaccctctgcctgagcggcttcatgggcatggacatcccgccacccagcgggccactctggatcctgggcgacgtcttcatcggccgctactacactgtgtttgaccgtgacaacaacagggtgggcttcgccgaggctgcccgcctctatttcccaaggcgtccgcgcgccagcacagaaacagaggagagtcccagatcatgaggcccctggcccagcggcccctcccacacacacccacacactcgcccgcccactgtcctgggcgccctggaagccggcggcccaagcccgacttgctgttttgttctgtggttttcccctccctgggttcanaaatgctgcctgcctgtctgtctctccatctgtttggtgggggtagagctgat

SEQ ID NO: 6734 - DNA, 495 bp, Homo sapiens
ttttggtaaggttgaatgcacttttggtttttggtcatgttcggttggtcaaagataaaaactaagtttgagagatgaatgcaaaggaaaaaaatattttccaaagtccatgtgaaattgtctcccattttttggcttttgagggggttcagtttgggttgcttgtctgtttccgggttggggggaaagttggttgggtgggagggagccaggttgggatggagggagtttacaggaagcagacagggccaacgtcgaagccgaattcctggtctggggcaccaacgtccaagggggccacattgatgatgggcaggcgggaggtcttggtggttttgtattcaatcactgtcttgccccaggctccggtgtgactcgtgcagccatcgacagtgacgctgtaggtgaagcggctgttgccctcggcgcggatctcgatctcgttggagcccttgaggagcagggccttcttgaggttgccagtctgctggtcca

SEQ ID NO: 6735 - DNA, 555 bp, Homo sapiens
  misc_feature 454: n = A,T,C or G
ttcggcacgagggttttctatgtggttcaaatatgaatttcgaacacaccaagccgctaatgagatagcagcttttttctgggacccagagtcacaaccaaattgatttaagaccggacccaagacacctttaacaataggactgaaaggaaaaaggatagggaaaaagcttattaaagaaatgtgtcaacaccaaatgtagaggggaagaaccacaaccaggcataataccaaaccggttccagggggaaacaaggctttggtattccgctggctccagcgctttttctgaaacccgaggctggccagggtgctgtcaccgtgtggtctttgattgcagccattcaatgcccacatgcttttccttcttgtttcagaacagcacatggtcacaacaagatattttctttccctccaaagccttttgtctccttgtgcctctttttatccttangaaaagatccaggtgcttgtgaaaagaatcatgaatgcaacaagggaggctggtcctgttgctgtcgccgattaagttttaaacttttatttattatttat

SEQ ID NO: 6736 - DNA, 555 bp, Homo sapiens
  misc_feature 495: n = A,T,C or G
ctcaggtagttgggctccaccctgtccccgcgcgctctgctccggcgaccggccctccctcctccccggttccccctggcccgcgccaggacccctgagaggaagccgggccgggccgcgctcgtgggtcggctggttgggatggcagctggacggcagcgcgcgtagtccacacgcgggtgggcatcacagggaaggcaggttccgggacgaggcgcccgctgtccggtggtccttcgagctctccgaggccgggcccgggggcggagggtagcgtccgccgctccagcgccgcgcagccaccgccgccgccgccgcctctccttagtcgccgccatgacgaccgcgtccacctcgcaggtgcgccagaactaccatcaggactcagaggccgccatcaaccgccagatcaacctggagctctacgcctcctacgtttacctgttcatgtcttactactttgaccgcgatgatgtggctgtgaagactttgcanatactttcttcacatctcatgaggagagggacatgctgagaactgatgaagtgcagacca

SEQ ID NO: 6737 - DNA, 648 bp, Homo sapiens
ccataattacaagtttattctcatacaatctctagcttctcaacagtggtgcctggcaaggggaggtgaagctgcatgcgggcggctccgggtgggcggctctggcacgtggtggttaccggctctgctcgatgtatgtggagatgtcgatttcctctggaagttctgccacattaacttcaaaccggtcctggacgtcattgaggattttggcatcattctcgtcagacacaaaagtgatggctaggcctttggtgccaaagcgacccgcccgggccacccggtgcaggtaggtgtccgagtcctcaggcatgtcgtagttaaagacgatgttgactcgctcgatgtccatcccccggccaaacagattggtggccaccaggatccgccgctggaaatccttgaactgctgatagcgtgacaggcgctcctcctgggccatgccccggtggatggcgatggccgggaagttctgctccacgaggagctgggccagggcatgcagcgctgcactgacttgacgaagattatcacctggttaaactccagcacatccaagagatcaaagagcttgcggttcttctcactgtctttgagtttgacgtagtactgctgcaggccgtgcagcgtgacgttggtctcgtcgtc

SEQ ID NO: 6738 - DNA, 487 bp, Homo sapiens
tcggcacgagggcaagtttcagaatttccttcttttttagggctgcatagtgttccattgtgtgtataaaccacattttgtttatccattcatccatagatggacacttggattgcttcaatttcttggctattgtgaataatattaatatgaacattggtgtgcaaatacctctttaagactctgatttcagttcttttgtgtgtatacccagaagtggaattgctgggtgatatggcaattttatttttaattttcgggggacctgccctactgttttccatagctgctgtgccacgttatgttcccaccagtattgcacaagggctccggctcaccgcattcttaccaacttgttatcttcagagttcgttcctttttttatttaatggcatccatcctgatgcgtatgagattgcacctcattgtggtacattattaatttttgttatgtaacaacatacattttataccttctgcaatattc

SEQ ID NO: 6739 - DNA, 562 bp, Homo sapiens
tcggcacgaggtgatactatagaaagaatgcaaaatctacatacgttatggctgcaacgaaatgaaataacatgcttgcctcaaacaatcagcaatatgaaaaatctgggtactcttgttctcagcaacaataaactgcaagatattccagtatgcatggaagaaatggcaaatctgaggtttgtcaacttcagagacaacccactgaaattgaaagtatcacttcctcccagtgaaggcacagatgaagaagaggaacgggaattatttggccttcagtttatgcacacatacatacaagagtcacggagaagagcagatcaccaagtcaacggttcaactactttaccaatctccataaatacggatggataatataattcaagatgcccttctaaagaggattactttggtgaattctctaatgtttggatttctgaagtaaaaagaaaagctattaccaaagtttaatgaggccacagcattttttaaagttcatattatttgctatttaaagtatatatttttttgatataaaaatataattaaaaaattttttttg

SEQ ID NO: 6740 - DNA, 533 bp, Homo sapiens
ttcggcacgaggtttttttttaacataaaatagaaactaactttatttctctggaagaagcaggtactgaatgccggagcagcaacttcgccaacaggctggtgggaaaacatggaaccgcgtgggggaattgggtggaagaggaagcactgatgtccctccagggcggctgccccttggtctccttccagccctggggccttgggccctggtccccgccagaaaatggtctggcaccctttctccgcttcctgagccacctcaggctatttccaggcacaagatcctgaggccagccaagtcccattcaagtccatggtaaggccacaagtcacattctgcccgacaccccagctgctgccaggggccccctggaagaaggcccagtcctaggaggtcccaccgggtgccggtccgcctctccctgtggccaacacatcccgcctgcccaggtccagcctggtttcctcccagtctgtcacccagggcagggcctgggggtactactccacccacaggccccgcccaggacc

SEQ ID NO: 6741 - DNA, 285 bp, Homo sapiens
ggaataggagggccaaagggccctaacccccggccgggtcccggggccaaaacttgggggaatttgaaccggcccggttcaaaaaaaaaccttaaccgtcctccggccttggggcccgtcttaaggccccggggggtttaacttgttttttcaaccccttgtgttgggccaaggggtcccaaaggctccactcccctttggagggggctgggaaaccccggagggaacctggcttttggaaggggcgcccccaccgtgggggagggaaaacggggccttttaaaa

SEQ ID NO: 6742 - DNA, 403 bp, Homo sapiens
gaagctgaactggatatacctatgtcacagcatctgtgggccccaaacctgactatgcagatgtagaggggaggtggggcctgtggtggacgctgggtgggagatggtgtgtgcaacccccaaaggtgcctgccggggcacactgtggtggtgggatgcaggcaggtatgtacagggtccaggcatgttgcggtggtggggtatgggcaggtgtgtgcagggccctggaggtgcctgcaggggcacactggggtggtggggtgcagtcaggtgtgtgcagggccctggaggtgcctgcaggggcatgctggggtggtggggtgtgggcaggtgtgtgcagcgccctgaaggtgcctgcaggggcacgctggggtggtggggtgcgggcaggtgtgtgcagggc

SEQ ID NO: 6743 - DNA, 498 bp, Homo sapiens
cggcacgaggacctgctcttccagctggagctgagtcgcaccagtgagaccaacaccctgttccggagcaacttctggcctcaaagtccatggagtcttttctgaaggtggccgggatgcagtacctgcacggcgtcctgggccccatcatcaacaaggtgtttgaggagaagaagtacgtggagctggaccccaccaaagtggaagttaaggatgtagggtgctccgggctgcaccgcccgcagaccgatgccgatgtgctggagcataacgcgcatacgctgcgcgcccacctgggggccctgctgagcgcgctcaaccgctcggttcgcgcgtgccccgccgtggtgcgcgccaccttccgccagctcttccggcgcgtgcgcgagcgcttacccggcgcccagcacgagaatgtaccgttcatcgccgtcaccagcttcctgtgcctgcgcttcttctctcccgccatcatgtcgcccaagctcttccacctgc

SEQ ID NO: 6744 - DNA, 618 bp, Homo sapiens
  misc_feature 612: n = A,T,C or G
gcacgaggcatatcagagaacatttgtacaattccccatgaaaattgctccaaagttgataacaatatagtcggtgcttctagttatatgcaagtactcagtgataaatggattaaaaaatattcagaaatgtattggggggtggaggagaataagaggcagagcaagagctagagaattggtttccttgcttccctgtatgctcagaaaacattgatttgagcatagacgcagagactgaaaaaaaaatttactttgatctctgtttttgaattcttattatttatattttgcttactaccttttttgccttttgtccttttgtggagagggcgatgaattaagagtagtggggtgggtggcgagtaagtaaaatttcaaatagcattttagtgaatgcaattcagtagtcctgaagcctgacttaataaaacaaaattcatttatggttgtttcatgaaagttattagataggatcaagttttgtttgtatattgtttgccttgctctggttttgcttttgtgcttaggcaagtgcaaaatactctatggaaatcataattgtcatcttcttcatggtgttagggatatattgtcacatgatttcaatanatcctt

SEQ ID NO: 6745 - DNA, 580 bp, Homo sapiens
gtctaaacaatggttgaaaagcaaaggaaatataaaacagacacctctttccatttcctaaggtttctctctttattaagggtggactagtaataaaatataatattcttgctgcttatgcagctgacattgttgccctccctaaagcaaccaagtagcctttatttcccacagtgaaagaaaacgctggcctatcagttacattacaaaaggcagatttcaagaggattgagtaagtagttggatggctttcataaaaacaagaattcaagaagaggattcatgctttaagaaacatttgttatacattcctcacaaattatacctgggataaaaactatgtagcaggcagtgtgttttccttccatgtctctctgcactacctgcagtgtgtcctctgaggctgcaagtctgtcctatctgaattcccagcagaagcactaagaagctccaccctatcacctagcagataaaactatggggaaaacttaaatctgtgcatacatttctggatgcatttacttatctttaaaaaaaaaggaatcctatgacctgatttggccacaaaaataatcttgct

SEQ ID NO: 6746 - DNA, 527 bp, Homo sapiens
gttctgaggttgcttttattccaagaactctgtgagctccgcccagataccattggcgcctgcttgtgtccccaggggacctacacacaacagcaccagcaccatgagggcgctctcgacccacacaagccctggtccccgtcagtcaatgtgactgagtccgccattgaggccagtctggctggccccaagtggtccctctgagtccccaactccctggccagcaaggagtgaagctccatgccccttggtccacgcctctagagtctgagcatatcctgcagcctcgatctcaggaggcaacgcatgcagcccccctgcactcagaaagggggcttctccagtcgtggtcttcttctctgtccacaagtttccagatggtctaggtgcttgtggtccaggaggccaaactggctttgcagatgctgaattcgcaggtgctgcttctccaggtgccgctgctgctgggccaccttgtggaagagttgctggatcctgctgttctgagccttgagttgtgtctgcag

SEQ ID NO: 6747 - DNA, 651 bp, Homo sapiens
  misc_feature 470: n = A,T,C or G
tgggaaagcacttgtctcctttattgaacatctgcagggggcacctctgcactgaccaggcagccagagaagcaagcaggcaggtggtggggggcaggggagcatggggcaggaagacgcccaccctcatttccagtccttgaaaaattgcttgaagatgggactctcatggccctgaggcagaatctccacctgagtgttcggggcgtactgcatgcgcgagatgaagccctcggccacctgcagggctgcctgccgctccttctcattcgcttttcgccccttccagatatagatcttgccacagagcccgttgtccagcacaaagcagtcatcagatatcagcagttcaagggcaaatgggctggagtcagccaccttggtcaggttcatctgtccagtggcatcagagaccttatacagagctgcggcctgggcatttgccttgtcagctgtgaggtcttcctcanggttgccctccttcagagcaggcttggggcccaggacctggatcatctcagcaggctcctccccatcagtgacaatctccacctgggccttgccctgtcgctcactgtcccggatggccagggccaggtccctcgccttggtgcgttccaagatgttggactttccaacacaccaggcgaa

SEQ ID NO: 6748 - DNA, 109 bp, Homo sapiens
ccttgcatccttttcttgtgtaaagaatttatttgtgccaaattgcaggaaacatcaggcaccacaccgcatgaaaaatctctcacagctagaaattgaaagggccttg

SEQ ID NO: 6749 - DNA, 565 bp, Homo sapiens
ttcggcacgaggcaggttttcatcctgaacatcctcttcttctgcctcttgctcccaacggctgtgatcgtgttctcctacgtaaagatcattgccaaggttaagtcctcttccaaagaagtagctcatttcgacagtcggatccatagcagccatgtgctggaaatgaaactgacaaaggtagcgatgttgatttgtgctggattcctgattgcctggattccttatgcagtggtgtctgtgtggtcagcttttggaaggccagactccattcccatacagctctctgtggtgccaaccctacttgcaaaatctgcagcgatgtacaatcccatcatttaccaagttattgattacaaatttgcctgttgccaaactggtggtttgaaagcaaccaagaagaagtctctggaaggcttcaggctgcacaccgtaaccacagtcaggaagtcttctgctgtgctggaaattcatgaagaggtatgaagatggatacagcatcactatggacactcgtattcacttatttgcctcttcactgctgtaaacatttgattgtggccac

SEQ ID NO: 6750 - DNA, 536 bp, Homo sapiens; identical to SEQ ID NO: 1949
  misc_feature 508: n = A,T,C or G

SEQ ID NO: 6751 - DNA, 484 bp, Homo sapiens
actcaggattaagaatctcactcaaaaccgctcaactacatggaaactgaacaacctgctcctgaatgactactgggtacataacgaaatgaaggcagaaataaagacgttctgttgaaaccaacaagaacaaagacacaacataccagtctggacaatttctaatgactgcctcgtcattagattgagaaacatactgaactgcagacaccctgccttacctcatccccaccacctgctccagcagacacacctcaagagtgcgtcacttgtcacacaaaggggactttcttctgaacagtcggggccctgtcactaccccccacctaccacacagcagcatctctatttccattcaggcccaactttaaaaaaaagaacccagatgagagatctggctgtggcacactgcgatctgggatatgttccatgaaggttcatgcgccacatacacaaaatgaatagctgatactcctccttcatc

SEQ ID NO: 6752 - DNA, 704 bp, Homo sapiens
  misc_feature 648: n = A,T,C or G
ggacattttcattcaagtatattaatgtagatattttaaagtgggttataagtttaacattgtctttaaaatagaagtcacagctatcttccagcctgtcttctctaggaacgctgttgacatgccagggctccgtctacactggaagcagctatacagctgtgaccacatcgagctttagccagtcacacttctggaactgtccgttcagtccatcccatttctggctaagctcctcacgtaggtgcgtaggttctggttaataaaattcactgttgtgtgaaagacatcacggagcaaggacggcgtgtgactggccaccttcttggccagcagcagggccagcaccagcatggtcttctccttctccatgtctctagggtaggcctgcagcagctgctccagggcagtggccaggtccctgttccggtcctcctccgaccggctggtgttcctgagctgcagggccaggccgttcaccaggcccggagggatgctacggtccatgctgtccccgacctgggcgaggtgcctggcaatattccggatgatgtcttcttgactttcagaatctgcctctattcttcccaagcgggagtggctgctgcgttgccatcagtctgcagctcatcgtagccctcccactgnggagccagcactggcagctcgtggccccatgcgtccagctctctgcggaagctgtg

SEQ ID NO: 6753 - DNA, 489 bp, Homo sapiens
atttttgaaccttttaatatacattacaaatattttagaccaatcacattttgttgtaacatatttacaaaacaaaaaatatattacaataaatatgatgaaacagtgaatctgatcaacaacaagctttgtcacaaccagttatttaaaaggaatgcaaagacctgttggtctgcatatattaagagttttgagataaataggggtccagaattataatgtatccggaaaagagatgtgggggaaaatctccaaatttaagtaagattctttctcattgtaattacataatgtttaatgatgttttaaactgtgaacattgatgaattatccaaacatgatacaaagctaatgtagttctatcatttcaaaatacgtgacatccacagaatatccttttaattgttatcattatatactgtagttcacacaatatctacaaatgtgaatgagaaagaaaaacaggtcacagcaacatgtctcacattc

SEQ ID NO: 6754 - DNA, 175 bp, Homo sapiens
ggtagaactggcatactgctttctcctgctcacaggtctctatggaccccgttcgtagtcgtcggatttcatcaatggaatctcctgcagtcaatccccgctccttctacaggtaacaggtcagcatggtgacaatgctgccaaagcctagagcacagtgcactccagtaggttg

SEQ ID NO: 6755 - DNA, 477 bp, Homo sapiens
tttcctggttcgtaaaactcatttattcaacaaagcagtacaagcctccccttcaatcaggacctgcctgcaggggtgggctacttcagtgtcttcagccaatgggagctagagggtttaatactttagtccacttcccttcatctctggccccatcgacaacatggggaaggggagtgagggcctggtagaagggtactaaggccccttatttcgttcgctggtagaactggaagactgctttctcctgctcataggtctcgatggagccgggtcgtagtcgtcggatttcagcaatggcatctcctgcagccaagccccgctccttcaccaggtaacaggccagcatggtgccagtgcggccaaagcccagagcacagtgcactcccacagcctctccccgtgcgttggcctcgtccacgatctgcacgaaacggtcgatctggtcgggggccggcgggcagaagtcggggatgc

SEQ ID NO: 6756 - DNA, 694 bp, Homo sapiens
tttcatcgtaaattagtttaattctgtacagacaaccacgggactgattacaaagtgcggggcaaacaccagggcccatgagcgccagcagcgtggcccaccacgtgccggggctccagaggccacgcccgaaacaccaaataaatcacagacgtgacaattgcgggaggagcatgaatcagctgttccttcgggaggagaaaaaggaaacaacaatcagaggctttggaatgctttctcttcatgtgcctggaacgctgggcgggcggtgacccggggctcggagccccaccctggccacacctgctgtcgcccacggggtcctcacggtggggacccaggtcccacgacggctcccaacctgtggagctgtgtgcgcagccaccaccactgcggcctcagaagaggggccgggagccctggttctcaaactccgaccaggcgtcattcagctccatgaagatcatcttggcgtgctgctcgtacggctgccccgcagccttgtcggggtgcacggccagcaccgcgcggcgatagtgcttcttcacttgctccggagccaccaggtcggccatgcccacgggcgtccagcggctctccccgtcccacagcactgtgtgcagcgtggacagcagggccccgatgttccgctccttgccctcatccagtccaggagcttcagcttgagtgggtc

SEQ ID NO: 6757 - DNA, 558 bp, Homo sapiens
ttcggcacgaggagctacggttctggctgcgtcctagaggcatccggggcagtaaaaccgctgcgatcgcggaggcggcggccaggccgagaggcaggccgggcaggggtgtcggacgcagggcgctgggccgggtttcggcttcggccacagctttttttctcaaggtgcaatgaaagccttccacactttctgtgttgtccttctggtgtttgggagtgtctctgaagccaagtttgatgattttgaggatgaggaggacatagtagagtatgatgataatgacttcgctgaatttgaggatgtcatggaagactctgttactgaatctcctcaacgggtcataatcactgaagatgatgaagatgagaccactgtggagttggaagggcaggatgaaaaccaagaaggagattttgaagatgcagatacccaggagggagatactgagagtgaaccatatgatgatgaagaatttgaaggttatgaagacaaaccagatacttcttctagcaaaaataaagacccaataacgattgttgatgttcctgcacacct

SEQ ID NO: 6758 - DNA, 70 bp, Homo sapiens
gtgagctgcccagatggctatacctgctgccgtctacagtcgggggcctggggctgctgcccttttaccc

SEQ ID NO: 6759 - DNA, 601 bp, Homo sapiens; identical to SEQ ID NO: 1953
  misc_feature 230: n = A,T,C or G

SEQ ID NO: 6760 - DNA, 482 bp, Homo sapiens
ggactccgggaccgtccctgcgcgctctgggcgcaccatggcccgcggggctgcgctggcgctgctgctcttcggcctgctgggtgttctggtcgccgccccggatggtggtttcgatttatccgatgcccttcctgacaatgaaaacaagaaacccactgcaatccccaagaaacccagtgctggggatgactttgacttaggagatgctgttgttgatggagaaaatgacgacccacgaccaccgaacccacccaaaccgatgccaaatccaaaccccaaccaccctagttcctccggtagcttttcagatgctgaccttgcggatggcgtttcaggtggagaaggaaaaggaggcagtgatggtggaggcagccacaggaaagaaggggaagaggccgacgccccaggcgtgatccccgggattgtgggggctgtcgtggtcgccgtggctggagccatctctagcttcattgcttacc

SEQ ID NO: 6761 - DNA, 435 bp, Homo sapiens
agtttgagcctctttggtagcaggaggctggaagaaaggacagaagtagctctggctgtgatggggatcttactgggcctgctactcctggggcacctaacagtggacacttatggccgtcccatcctggaagtgccagagagtgtaacaggaccttggaaaggggatgtgaatcttccctgcacctatgaccccctgcaaggctacacccaagtcttggtgaagtggctggtacaacgtggctcagaccctgtcaccatctttctacgtgactcttctggagaccatatccagcaggcaaagtaccagggccgcctgcatgtgagccacaaggttccaggagatgtatccctccaattgagcaccctggagatggatgaccggagccactacacgtgtgaagtcacctggcagactcctgatggcaaccaagtc

SEQ ID NO: 6762 - DNA, 569 bp, Homo sapiens
  misc_feature 317, 453: n = A,T,C or G
tcggcacgaggctctgcctgccgcctgcctgcctgccactgagggttcccagcaccatgagggcctggatcttctttctcctttgcctggccgggagggccttggcagcccctcagcaagaagccctgcctgatgagacagaggtggtggaagaaactgtggcagaggtgactgaggtatctgtgggagctaatcctgtccaggtggaagtaggagaatttgatgatggtgcagaggaaaccgaagaggaagtggtggcggaaaatccctgccagaaccaccactgcaaacacggcaaggtgtgcgagctggatganaacaacacccccatgtgcgtgtgccaggaccccaccagctgcccagcccccattggcgagtttgagaaggtgtgcagcaatgacaacaagaccttcgactcttcctgccacttctttgccacaaagtgcaccctgngaggcaccaagaagggccacaagctccacctggactacatcgggccttgcaaatacatccccccttgcctggactctgagctgaccgaattccccctgcgcatgcgggactggctc

SEQ ID NO: 6763 - DNA, 448 bp, Homo sapiens
tgcaggtcgacactagtggatccaaagaattcggcacgagctgcagcgggcctctgcgtgggcggcgggaatccgcggacatcgggtcgggtctaggctcccgagtccgcgctcctgggcgggagcccttgtctgggtctcgcggggggctgccagatgcgtaggccacactgactagttccttcttgtcgcttttcccagcaaatggcggatgacgccggtgcagcgggggggcccgggggccctggtggccctgggatggggaaccgcggtggcttccgcggaggtttcggcagtggcatccggggccggggccgaggccgctgagctcgcggaggcaaggccgaggataaggagtggatgcccgtcaccaagttgggccgcttggacaaggacatgaagatcaagtccctggaggatatctatctcttctccctgcccgttaagg

SEQ ID NO: 6764 - DNA, 499 bp, Homo sapiens
ccaagctgcagatccaggcttttctgggatagtgaggccaccatggctctggagaagtctcttgtccggctccttctgcttgtcctgatacagctggtgctgggctgggtccagccttccctgggcaaggaatcccgggccaagaaattccagcggcagcatatggactcagacagttcccccagcagcagctccacctactgtaaccaaatgatgaggcgccggaatatgacacaggggcggtgcaaaccagtgaacacctttgtgcacgagcccctggtagatgtccagaatgtctgtttccaggaaaaggtcacctgcaagaacgggcagggcaactgctacaagagcaactccagcatgcacatcacagactgccgcctgacaaacggctccaggtaccccaactgtgcataccggaccagcccgaaggagagacacatcattgtggcctgtgaagggagcccatatgtgccagtccactttgatgcttctgtgg

SEQ ID NO: 6765 - DNA, 98 bp, Homo sapiens
gggcccatgcagaatgccaccaagtatggcaacatgacagaggaccatgtgatgcacctgctccagaatgctgaccccctgaaggtgtacccgccact

SEQ ID NO: 6766 - DNA, 656 bp, Homo sapiens
  misc_feature 597: n = A,T,C or G
gcggccgctcctctagttccacaatgtccacgggcggagacttcgggaatccgctgaggaaattcaagctggtgttcctgggggagcaaagcgttggaaagacatctttgatcaccagattcatgtatgacagttttgacaacacctatcaggcaacaattggcattgactttttatcaaaaactatgtacttggaggatcgaacagtacgattgcaattatgggacacagcaggtcaagagcggttcaggagcttgattcctagctacattcgtgactccactgtggcagttgttgtttatgatatcacaaatgttaactcattccagcaaactacaaagtggattgatgatgtcagaacagaaagaggaagtgatgttatcatcatgctagtaggaaataaaacagatcttgctgacaagaggcaagtgtcaattgaggagggagagaggaaagccaaagagctgaatgttatgtttattgaaactagtgcaaaagctggatacaatgtaaagcagctctttcgacgtgtagcagcagctttgccgggaatggaaagcacacaggacagaagcagagaagatatgattgacatanaactggaaaagcctcaggagcaaccagtcagtgaaagatgctgttcctgctaatctccc

SEQ ID NO: 6767 - DNA, 386 bp, Homo sapiens; identical to SEQ ID NO: 1958

SEQ ID NO: 6768 - DNA, 734 bp, Homo sapiens; identical to SEQ ID NO: 1959
  misc_feature 300, 387, 628, 649, 673, 675: n = A,T,C or G

SEQ ID NO: 6769 - DNA, 670 bp, Homo sapiens
  misc_feature 501: n = A,T,C or G
agctctcttagaaattttattggtcctggagaaaggaaggcaaactctgcctcccgctcagagtccccccaaccctcactgtttcccgttgccattgatggggaggttcacgtactcaggggaggccaggaaggccttgagcttgggccgggcactgaggcgccccacatatgctgagagcagggggaacgcatccaggcagccaggggctaggacctcatggatcagcagcaagtccagcaggttgtagtcagcgaaggagatctggtctcccacaatgaaggtcttgcctccctggttctgggacagcagggtctcaaaaggcttcagttgcccgggcagtgccttcacatagtcatccttgcccgcctcatagttggtgtagatgagggagacgtatttgcagcggaggtcctccacgccgtcattcaccatgtccaccagggctgcctcctgctggtccttcccatagagcccaagggtgcggcccaggtgacgcangatggtattggactggtacagggtgaggtctccgtcctggaacttggggagctgcccgtataggcaggaggctttgagtgagcccttctgccacgtctccacggtcaccaccttcttctttcagctctggccctgatctgccagcaacatgcgcaaggccgcgcaacgg

SEQ ID NO: 6770 - DNA, 472 bp, Homo sapiens
tcactagtaatcctttacataacagacgaggtcaacgatccctcccttaccatcaaatcaattggccaccaatggtactgaacctacgagtacaccgactacggcggactaatcttcaactcctacatacttcccccattattcctagaaccaggcgacctgcgactccttgacgttgacaatcgagtagtactcccgattgaagcccccattcgtataataattacatcacaagacgtcttgcactcatgagctgtccccacattaggcttaaaaacagatgcaattcccggacgtctaaaccaaaccactttcaccgctacacgaccgggggtatactacggtcaatgctctgaaatctgtggagcaaaccacagtttcatgcccatcgtcctagaattaattcccctaaaaatctttgaaatagggcccgtatttaccctatagcaccccctctaccccctctagagcc

SEQ ID NO: 6771 - DNA, 60 bp, Homo sapiens
aaacatgaatgtttcgctcgacctggctgccttttgcttggcaatagcctccgctgttcc

SEQ ID NO: 6772 - DNA, 551 bp, Homo sapiens
gggaatgagcagttcatcaatgcagccaagacatccgccacccccaatacgacaggaagactctgaacaatgacatcatgttaatcaagctctcctcacgtgcagtaatcaacgcccgcgtgtccaccatctctctgcccaccgcccctccagccactggcacgaagtgcctcatctctggctggggcaacactgcgagctctggcgccgactacccagacgagctgcagtgcctggatgctcctgtgctgagccaggctaagtgtgaagcctcctaccctggaaagattaccagcaacatgttctgtgtgggcttccttgagggaggcaaggattcatgtcagggtgattctggtggccctgtggtctgcaatggacagctccaaggagttgtctcctggggtgatggctgtgcccagaagaacaagcctggagtctacaccaaggtctacaactatgtgaaatggattaagaacaccatagctgccaatagctaaagcccccagtatctcttcagtctctataccaataaagtgaccctgttctcactg

SEQ ID NO: 6773 - DNA, 476 bp, Homo sapiens; identical to SEQ ID NO: 1965
  misc_feature 85, 360, 396: n = A,T,C or G

SEQ ID NO: 6774 - DNA, 284 bp, Homo sapiens
tttgacagcagggccgctttatttggatagacactgcggagggaccgggggctctacgtgttcgcagggatggtgtcattaaccgagtccacatagtggtagaccttggagtagactccaggcctgtcctgccaggaacaccagtgggcccacgagacaactccttggagctgtccgtctgagatcacagggccatcaaagtcacgcgggcaggaatctttgccatcgcttaaggaagcccccactagaacagtgctgttggtaagctgtccgggggtagtagg

SEQ ID NO: 6775 - DNA, 409 bp, Homo sapiens; identical to SEQ ID NO: 1968

SEQ ID NO: 6776 - DNA, 62 bp, Homo sapiens
tggtcatttacaaccttaacttcaaggcagaactggaattaggttcaaaataaaccttgatc

SEQ ID NO: 6777 - DNA, 611 bp, Homo sapiens
acccctggggatttattaatcatgcggtttaattccaattaaatggactccttgggagaaaaggattggattgatgggggggttcccaatttaatccatggtacggcgaattaaagggcattcctaaatggtggttattcagttaaaattaattggcacctttgtggtaacacatgggaactcctggttttcacagtttttcccccaacttatcacagccccgacaatagttccatttgtggcatccatacagactaagggggcctcagagtctcccttacaggcatcgatgggaccatcatatgtacccgcgcattccattttcttttcatagaaacggatttcgtaaaacttagagcagttgcttattagttttacttcaccccactgcaagtgaaagactctttcgctatctatttctcgtccccagccagaaacgatgcatgtatcatagggttggatagggtatggagacaatgggacacaggcggggatggaacgaggcaagtcacaatctctttttggtgtccggctttttttccatttcattcaaggcggatgtccatttggggaagtggcctgccatgttggttttcttggaaaataaatct

SEQ ID NO: 6778 - DNA, 252 bp, Homo sapiens
cctatctgatcactcccagcgtatgcaacttatctaccatcttccctgccactccctccctgcactaactctgatacccattgcaagccactctcccataagatgccttccttaactggcttgggctctgacactccgcatcacgacacactccttcctcacattaacactgtcttcacccagagcaggttctgacacccataccatgctatgttagctctgtaccacctcccataccaaagatggtttacg

SEQ ID NO: 6779 - DNA, 619 bp, Homo sapiens
  misc_feature 347, 537, 582, 616: n = A,T,C or G
cggaacttggatcacatcagatcctctcgagctccagcaggagaggcccttcctcgcctggcagcccctgagcggctcagcagggcaccatggcaagatcccttctcctgcccctgcagatcctactgctatccttagccttggaaactgcaggagaagaagcccagggtgacaagattattgatggcgccccatgtgcaagaggctcccacccatggcaggtggccctgctcagtggcaatcagctccactgcggaggcgtcctggtcaatgagcgctgggtgctcactgccgcccactgcaagatgaatgagtacaccgtgcacctgggcagtgatacgctgggnacaggagagctcagaggatcaaggcctcgaagtcattccgccaccccggctactccacacagacccatgttaatgacctcatgctcgtgaagctcaatagccaggccaggctgtcatccatggtgaagaaagtcaggctgcctcccgctgcgaaccccctggaaccacctgtactgtctccggctggggnataacaagagccagatgtgacttttcctctgacctcatgtgcgtngatgtaagtcatttccccaagaattgaagaaggnttt

SEQ ID NO: 6780 - DNA, 584 bp, Homo sapiens
  misc_feature 385: n = A,T,C or G
ttcggcacgatgtttcaggacctgtacaacctcaagtcactggaggttggcgacaatgacctcgtctacatctctcaccgcgccttcagcggcctcaacagcctggagcagctgacgctggagaaatgcaacctgacctccatccccaccgaggcgctgtcccacctgcacggcctcatcgtcctgaggctccggcacctcaacatcaatgccatccgggactactccttcaagaggctgtaccgactcaaggtcttggagatctcccactggccctacttggacaccatgacacccaactgcctctacggcctcaacctgacgtccctgtccatcacacactgcaatctgaccgctgtgccctacctggccgtccgccacctantctatctccgcttcctcaacctctcctacaaacccttgtgtcgagggctgactttcaatagatcgcagcgagggagctgctctgctacgtacgaaaccccgacccaaaagcaggtcgtctacgaatggtttagcgccaggttccccacgaacgtgcggtgcgtgacgggcgaaggggcggccgcaagcttattcccttt

SEQ ID NO: 6781 - DNA, 532 bp, Homo sapiens
  misc_feature 322, 327, 328, 329, 499, 524: n = A,T,C or G
aatacctggagggcattatgagcgaggccccggggccattcaacttcaccatgttcctcaccatgtttggggagaagctgaacggcacggaccccgaggatgtgattcgcaacgcctttgcctgcttcgacgaggaagcctcaggtttcatccatgaggaccacctccgggagctgctcaccaccatgggtgaccgcttcacagatgaggaagtggacgagatgtaccgggaggcacccattgataagaaaggcaacttcaactacgtggagttcacccgcatcctcaaacatggcgccaaggataaagacgactaggccancccannnccctgacaccccagcccccgccagtcacccctccccgcacacacccgtccataccagctccctgcccatgaccctcgctcaggggattcccctttgaggggtttagggtcccagttcccagtggaagaaacaggccaggagaagtgcgtgcgagctgaaggcagatgttnccacagtgaccccagagccctgggntataagtc

SEQ ID NO: 6782 - DNA, 507 bp, Homo sapiens
  misc_feature 286, 362, 507: n = A,T,C or G
gcgaccgctgtcctcaccacgcacgttccgccgccggatcgccttaatccaggaatgttccaggctctgggcaatggtcattctccgcttgggatctttgacgagcagccggcgaatgaagtccttggccagctcgctgtcgttgctgaagtactcctcgtcgaagtcgtagttcacggctgagatgttggtgagcgtctcctgcttggtctcgcccaggaacggggatgcaccgctcaggaggatataggtgatgacaccgatgctccacatgtctgcctccagnccaagcggctcatagttcacaatctctggggccacaaactccggggtgccgaagatgttcttgaactcgttccccngcctcgatcttgtgcgcgatgccgaagtcgatgagcttgattcgtgggttgggcacgttcttgtccagcagcatgatgttttccggcttcaggtcaaagtgtgcgatgcgcttagagtgcaggtaatgaacgccgtccaagaatn

SEQ ID NO: 6783 - DNA, 378 bp, Homo sapiens
gggagcgaccgcgctttttttttttttttttgcccttggttttggaaaaaaccactttttgttttgtgccccaggcgggcctaaaatcccgggcctccggcgtaaccccccaaaaatacgggaatggcaccttttgaaccccccgccctcagttgtttttttaaaaaaaagaaaaaagggggtttttttttgccccccaggctgaaatgcaggggccccatccgggttaattgaaccctaaacctccaaggttaatgcaaccctcccacctaaccctttaaagcagcgggaactacgggggggcatccccacacccacccaatttttttttttttttaaaaaagggttttggtgggcccccccggggggaaaaaaggg

SEQ ID NO: 6784 - DNA, 587 bp, Homo sapiens
  misc_feature 374: n = A,T,C or G
cggcacgaggccactccccaccaccgtccccagccccgttctgttccgggctgggactctgcccccggagcaccctccccagctgacatcacccatcccactccagccccaggcccctctgcccacgctgcacccagcaccaccagcgccctgacccccggacctgccgctgccgctgccgacgccgcagcttcctccgttgccaagggcggggcttaaagctcaacccaaacacctgcaggtgccggaagctgcgaaggtgacacatggcttttcagactcagcagggtgacttgcctcagaggctatatcccagtgggggaacaaagaggagcctggtaaaaaacagccaagcccccaagacctcagcccangcagaagctgctctaggacctgggcctctcagaggctcttctgccatcccttgtctccctgaggccatcatcaaacaggacagagttggaagaagagactgggaggcagcaagaagggtcacataccagctcaggggagaatggagtactgtctcagtttctaaccactctgtgcaagtaagcatcttacaactggctcttcctcccctcact

SEQ ID NO: 6785 - DNA, 97 bp, Homo sapiens
tgcccacctttggctgatacccagagaacctgggcacttgctgcctgatgcccacccctgccagtcattgctccattcaaccaccgggaggtgggat

SEQ ID NO: 6786 - DNA, 466 bp, Homo sapiens
  misc_feature 24, 30, 32, 91, 299, 461: n = A,T,C or G
gaaatataaagatggaattgcttngctgangnacgcactggctaatcagagtgactgtgtcctgcatcggatcctaggagatttccttgtngctgtcaatgagtatcaggaggcaatggaccagtatagtatagcactaagtttggaccccaatgaccagaagtctctagaggggatgcagaagatggagaaggaggagagtcccacggatgccactcaggaggaggatgtggacgacatggaagggagtggggaagaaggggacctggagggcagcgacagtgaggcggcccagtggntgaccaggagcagtggttcggcatgcagtgagggggcggcactccattggccgcagtggcctgccctgctctgagcacttccgtggactgaaggaaccgtaggagcctgctctcagaaggacaatgatttccagcatgtgaattgcagccaggggtctctgnccccc

SEQ ID NO: 6787 - DNA, 494 bp, Homo sapiens
cggcacgagggctcccaggaccagtccagtcctctagtgccttatctgaggctgcagccgccagtctccaccccaaggagacagcccctgctcctatatgcccttggcctccgcagtgcagcccccaggtgtcctgactgaagcacaggccatagccccatttccccggtgcctgcagggctaacctccacgggagcccacgagctctggccggcaagtccatggcacagggcatcggaagactgcaaaactgctggacttaccctgggctgcagtccattgtcggcccctgggttgaatcaagatagtacttgcagctagatggatgcttttaaccaggggacattgtgaggggaagattcctccacccagtctggcctgtggtgtctgtctcctccctgagaccacagcttctccagtagcagactcatgggcgccaccaagtggaatcacctggagcggcctctgccatccagtggggaagccaggccccg

SEQ ID NO: 6788 - DNA, 501 bp, Homo sapiens
  misc_feature 314, 351: n = A,T,C or G
cggcacgagggtggctgcacgtgtcactggggtggccgtgagtgtgtgctcacaggtacgcggtggtgtcgggttcctgggcctgaggggcctgaactgatctcacttggctccgaaagcctttgctgtgttccctgcagcccctggccccccagccttggggctctggctccccccggcggaattgggggactgtttcctgacatcctggacaagggaagcccactagaggctggaacaggacctctccagcctcctcaccagcaccgtgcccatctcaactggacttcccgccctccttctccaccttctantgcccgtggccggggattcaaagccgccgttccccangtccctgggctgggccctgacagggagccgcccccctccccatggtaaccaggaagcccgtttcatgttcagttgcttttgtagaggaagcaagggctgggatggggacagctgtcaatcacaagcccttaaataaagcagccagcgcac

SEQ ID NO: 6789 - DNA, 617 bp, Homo sapiens
  misc_feature 63, 150: n = A,T,C or G
tcggcacgaggacttctggatcgttctccttcaggtcagcaaaaagaaaaccttaccatgtgngaaagcagcacattgtctaatagaaaccaagccggcaaaagtactgctttgcagtctcaccacagatctaacagcaaggacatccanaacctgagtgtaggcctgccccgggctgacgaaggtctccctgccaatgaaagcttcctaaatggaaaccttgctggagctagtcttaatccactgcacaccaaaacctaccaagcaagcagccagcctgggtctaccagcaaagatctcaccaacaacaacataccacaccttcttagcccaaaagaagccaagtcaaaaacagagtttgattttaatattgacccaaagccttcagaaggcccagggacaaagtacctcaagtcaaacagcagatctcagcagaaccgccactcattcatggaaagctctcaaagcaaagctgggacactgcagcccaatgaaaagcagagtcggcatagctatattgacacaattccccagtcctctaggagtccctcctacaggaccaaggccaaaagccatggggcactgagtgactccaagtctgtgagcaacctttctga

SEQ ID NO: 6790 - DNA, 519 bp, Homo sapiens
  misc_feature 201: n = A,T,C or G
tcggcacgagggcaggcaccggtggccgagctccgtgaccatgaaggtcaaggtcatccccgtgctcgaggacgcgctgtcggtggccggctgcggctcgtgcctggagggcagcgcccagcagatgtaccagagcctggccgagctgggtaccctgccccccgagacgaaggtgttctgcggccacgagcacacgcttancaacctggagtttgcccagaaagtggagccctgcaacgaccacgtgagagccaagctgtcctgggctaagaagagggatgaggatgacgtgcccactgtgcaggcgactctgggcgaggagcgcctctacaaccccttcctgcgggtggcagaagagccggtgcgcaagttcacgggcaaggcggtccccgccgacgtcctggaggcgctatgcaaggagcgggcgcgcttcgaacaggcgggcgagccgcggcagccacaggcgcgggccctccttgcgctgcagtgggggctcctgagtgcagccccacacgactg

SEQ ID NO: 6791 - DNA, 572 bp, Homo sapiens
  misc_feature 137, 517: n = A,T,C or G
tcggcacgaggcgcctctccagtcccagccagaggggaccctggcctttggtgaccactgagaaggacacttcacgggcccagagctcctggtactgcccttcctttgagggccgtggagggctgtggacagcccancaacctgtcgctcttggaggctggtgtggccttgaggagggaagcctcgcatggccgctggaagaaaggcgcctcctggcctggctctgcagaacccaggggcacgctctgggcctgggctgaggaagtcccgctctccccgcggctctgagttggactgaggacaggtgtgggcgccagtgtgggtgcaggcgcaggtgcaggcacagggccactgtcctccaggcaggctttttggtgctaggccctgggactggaagtcgcccagcccgtatttatgtaaaggtatttatgggccactgcacatgcccgctgcagccctgggatcagctggaagctgcctgtcatctcctgcccaatccccagaaaccctgattcangtctgcaggctcctgcgggctcaccaggctgctggctccggtaccatgtaaacct

SEQ ID NO: 6792 - DNA, 625 bp, Homo sapiens
  misc_feature 549, 571, 587: n = A,T,C or G
ctcctctacgtcttggctctacatgaagtactcagagctggttacagcaaaaaggatggagggaaaattatacagcagacttggaacagaacatttgaaggtatcgccgggcaggtgtccatagatgccaacggagaccgatatggggatttctctgtgattgccatgactgatgtggaggcgggcacccaggaggttattggtgattattttggaaaagaaggtcgttttgaaatgcggccgaatgtcaaatatccttggggccctttaaaactgagaatagatgaaaaccgaattgtagagcatacaaacagctctccctgcaaatcatcaggtggcctagaagaatcggcagtgacaggaattgtcgtgggggctttactaggagctggcttgctaatggccttctactttttcaggaagaaatacagaataaccattgagaggcgaacccagcaagaagaaagtaaccttggaaaacatcgggaattacgggaagattccatcagatccccattttcagtagcttaaaggaagccccccactttntttttttctgcctgagattctntaaggagatagacggnttgaaagacatcaatgaaacagaaggggcgttcttgaa

SEQ ID NO: 6793 - DNA, 487 bp, Homo sapiens
  misc_feature 156, 158, 384, 434, 479: n = A,T,C or G
agctgagtcaacaagctttattgtcatcaggcaaggaagcatggggaagggactgaagcagggggctgaggctggagaggccggagactgtggggcagatggggcggctgctccctgcctcctgggtggccggccggggtagctgagtcctcagcngngtggtctggtggacctgctcgcgggaggagatgaccttgccatcctggacctcttccacaatggtacgcacctgacgggtggtcaccggttctttcttgtactgagtcaggtgggcatcctctccctccagcaggcggcggtaggtggcaatctcctgctccagccgcgtcttcacatccagcaggattttgtattcctggttctgctgctccatctcgcagcganggggcccaagctgctcctccacgctgccaatcagcccctggatctggganagctgcacgcataacggtttctctgtctccgcagttggcctccangaatgctt

SEQ ID NO: 6794 - DNA, 535 bp, Homo sapiens
tcggcacgaggcagaaatcagctctattgacgaattctgccgcaagttccgcctggactgcccgctggccatggagcggatcaaggaggaccggcccatcaccatcaaggacgacaagggcaacctcaaccgctgcatcgcggacgtggtctcgctcttcatcacggtcatggacaagctgcgcctggagatccgcgccatggatgagatccagcccgacctgcgagagctgatggagaccatgcaccgcatgagccacctcccacccgactttgagggccgccagacggtcagccagtggtgggtgtccctcccagccaggcagagccccgcagtgcccgagaccctcccagccaggcggagccccgcagtgcccctgaggccctcagcccccacatgccctgtgctgcactcccaggctgcagaccctgagcggcatgtcggcgtcagatgagctggacgactcacaggtgcgtcagatgctgttcgacctggagtcagcctacaacgccttcaaccgcttcctgcatgcctg

SEQ ID NO: 6795 - DNA, 537 bp, Homo sapiens
  misc_feature 219, 444, 465: n = A,T,C or G
cggcacgaggggacatgtttgtggtgtgatgcacacttttgcaagcgtgtaagatgttacctggtttgtctcttttggaaaacaaaaatcataaggctgcattctacagggcagagaaattcccccgaagactgagctggttgcctgcatcctctatcttctttgacccttatgactgaaagatcatcagtttggaaggtactggtccaatttatttangaagtatctcttggagtttcagaaatgctagcttggacaactgaaaagtcacatcacagctggcattctgggggctaccaaaacaccccttctggagtagaagctgctggaaggcaggcctgagccattcaccacggacaggaagagcagctctggctatcaccactggcctctggggtcttcatatcttgccatctcatccagggttccatgaaagttacccanggtcctcatgtccttccttanagcctgagtggtgtgaggtgacaggtctctctctccactgcccctttctggtttaaaaaaatggtgcttgat

SEQ ID NO: 6796 - DNA, 490 bp, Homo sapiens
tcggcacgaggtgcgttccctgtgcgccggaagtgatcccctgcgtggctgggctgctcgggttacatcgtcaggaaaagcctaaagattacactgtgagaaaagaaaatagaagccatgtttcgaagacctgtattacatgtacttcgtcagtttgtaagacatgagtccgaaacaactaccagtttggttcttgaaagatccctgaatcgtgtgcacttacttgggcgagtgggtcaggaccctgtcttgagacaggtggaaggaaaaaatccagtcacaatattttctctagcaactaatgaaatgtggcgatcatgggatagtgaactttaccaactgggtgatgtcagtcaaaagacaacatggcacacaatatcattattccggccaagcctcacagacgtggcatatcaatatgtgaaaaaggggtctcgaatttatttggaagggataatatactatggtgaatacatggataaaaataatg

SEQ ID NO: 6797 - DNA, 338 bp, Homo sapiens
atcgtttttatgggaacctgcagggtgacccggcaccttgctaactgggcttagagtctaagggcttgggggctgcatctgatacaggttggagtttggggtgggagagtcctaggaagggggccccaagtagaaatgagagaaatcaggaagggatatcgggggcgtccacgggggtgctccgactggccttgcacccgtaccccagctctgcaccccccgtcacgagcagttcaatgcccgtgcagaagttggcttcggaggccagggaacactgccgcagccccgacctcagcgggctggcccatgcggcccagtggctggccagcattgccctc

SEQ ID NO: 6798 - DNA, 534 bp, Homo sapiens; identical to SEQ ID NO: 1981
  misc_feature 379: n = A,T,C or G

SEQ ID NO: 6799 - DNA, 567 bp, Homo sapiens
  misc_feature 491: n = A,T,C or G
ccccggaccagtgcagactccagccagaccctgccgtccatggttcatctcatccatgagggctggcggactgtgggtgtgctggtctcccagcggagcaccctcctgaaggagcggcaagtcttgacccagcgcctccagggcctggtggaggaggtggagagacgcgtcctgggatccagtgagaggcaggtgctgatactggggcttcggcgctgttgcctgtggacggagctcaaggccctgcacgatcagagccaggagctgcaggatgcagctgggcatcggcagctcctgctgagggagctacaggccaaacagcagcggatcctgcactggcgccagctggtggaggagacccaggaacaggtccgcctgctcatcaagggaaactcggccagcaagacccgcctgtgccggagcccgggggaggtgctagctctggtccagcgaaaggtggtccctacatttgaggcagtggcaccacaaanccgggagctgctgcgctgtctggaggaagaagtccggcatttgccccacattctgttgggcacgctgctgcggcac

SEQ ID NO: 6800 - DNA, 636 bp, Homo sapiens
acgcagcaagcccaggcggcggtggaaaggctggaggacacacctaaacatgtggaatcccaatgccgggcagccagggccaaatccatatccccccaatattgggtgccctggaggttccaatcctgcccacccaccacctattaatccaccctttcccccaggcccctgtcctcctcccccaggagctccccatggcaatccagctttccccccaggtgggccccctcatcctgtgccacagccagggtatccaggatgccaaccgttgggtccctaccctcctccatacccaccgcctgcccctggaatccctcctgtgaatcccttggctcctggcatggttggaccagcagtgatagtagacaagaagatgcagaagaaaatgaagaaagctcataaaaagatgcacaagcaccaaaagcaccacaagtaccacaagcatggcaagcattcctcctcttcctcctcctcttccagcagtgattctgattgaatacaggccctggacccttccctcaagtctcaccagttctgctctcccatcaagcttcagatgccatgttgtactgggggaatgtagcccttgtgctccccaccccctacctccacgccgagccctatgcagtctcaaaa

SEQ ID NO: 6801 - DNA, 541 bp, Homo sapiens; identical to SEQ ID NO: 1983

SEQ ID NO: 6802 - DNA, 683 bp, Homo sapiens
tcagccatagacacatctctatatttatatattagacgggtcagggaggtggcaggggcgccgggctctccacgccccccagctccacttctgctcaccacacacagaagcagcgagggcacgcgaagtgacagctttgacagggaggggattcggcccggcctggctcctcagggatgctagcccttaagactaaggaatgttccttcagggaaactagggtggggtttgaatgagatgaggggggcaggcatggcctgtagtccctactcagcgccccccaccctccacctctgcccttcagcaggttggggcagccagaacccttccattccagaactgccagagactgggacgctggggaaggtaagggcgcaagccagcagcgggagattgaactggggccacctgagctcccgaggccccgtggggagggcgggtggggaggagaaggccttggctgcctgaagctggaggcctcagcaaaggagagaggtggccaggcccatgctccaccccggcctgggctgccaaggtccgggctgggcacagtgttcattttctaacagtctggcgggagaggggcaggcaggaggcaggtccaggccccagggtgcagagatgtctgtctgggctaggggcctccagcactccgggctgaagagtgctgtctcctggaaatg

SEQ ID NO: 6803 - DNA, 541 bp, Homo sapiens
  misc_feature 188, 198: n = A,T,C or G
tcggcacgagcccttcactcctactgggaggtgggacccctttcattttcagttttgctcattctagggaaaataaggctttggtttccagtttaattgtttttgaccttctaaaatgtttttatgttagcactgatagttggcattactgttgttaagcactgtgttccagaccgtgtctgacttantgtaacctangagattttatagttttattttaatgaaaccctgattgacgcacagcagtggggagaacagcgtcttttacctgtcaccgaagccaggaagccccgtttgtaagcgtgtgttgtggtgctttattgtacatcctccagtggcgttctttttactctaatgttcttttggtttcccccctcagaagaatcatgaatttgcaacagacctaatttttggttactttttgtcttattgatggatttgaaaatgaaagatttaataaggcaaagcagaatctgttgtccttaattatatttgcaatttggaatttgtgtgagttgatttagtaaaatgttaaaccgtt

SEQ ID NO: 6804 - DNA, 266 bp, Homo sapiens
ctacaaacaaaatgtccaaaccttcacatttttgggcagggcatttaagggcacctgcctttattttccccgttaaatgggcaatttaaaccttttgttaaccccagggctgcctgaaacattagggcccaacacctttcttgccacctttgccccaaaaccccgcaaagggctgggaaaccctggggggggaaacctggaaaacccctggcatttttacaaaatttttcctcctgccggaaattccttccttccacccattcaaa

SEQ ID NO: 6805 - DNA, 496 bp, Homo sapiens
  misc_feature 360, 385: n = A,T,C or G
tcggcacgaggcaggagcctctgaagctcccaccaggccagctctcctcccacaacagcttcccacagcatgaagatctccgtggctgccattcccttcttcctcctcatcaccatcgccctagggaccaagactgaatcctcctcacggggaccttaccacccctcagagtgctgcttcacctacactacctacaagatcccgcgtcagcggattatggattactatgagaccaacagccagtgctccaagcccggaattgtcttcatcaccaaaaggggccattccgtctgtaccaaccccagtgacaagtgggtccaggactatatcaaggacatgaaggagaactgagtgacccanaaggggtggcgaaggcacagctcanagacataaagagaagatgccaaggctccctcctccacccaccgctaactctcagccccagtcaccctcttggagcttccctgctttgaattaaagaccactcatgctcttc

SEQ ID NO: 6806 - DNA, 489 bp, Homo sapiens
  misc_feature 105, 239, 389: n = A,T,C or G
tcggcacgagggatccggaccctgagactcccctaaggccagaaggtgcgcttctccgagaaggtcactgtccatttcctggctgtctgggcagggccggcccangccgcccgccagggcccctgggagcagcttgctcgggatcgcagccgcttcgcacgccgcatcacccaggcccaggaggagctgagcccctgcctcacccctgctgcccgggccagagcctgggcacgcctcangaacccacctttagcccccatccctgccctcacccagaccttgccttcctcctctgtcccttcgtccccagtccagaccacgcccttgagccaagctgtggccacaccttcccgctcgtctgctgctgcagcggctgccctggacctcantgggaggcgtggctgaaaccaactggtttgcctataatttattaactatttattttttctaagtgtgggtttatataaggaataaagccttttgatttgt

SEQ ID NO: 6807 - DNA, 508 bp, Homo sapiens
  misc_feature 16: n = A,T,C or G
gagcttctggtgatgnaggccctttcggtggggctggtgaaaggcagtatagacgaggtggacaaacgagtccacatgacctgggtgcagccccgagtgttggatttgcaacagatcaagggaatgaaggaccgcctggagttctggtgcacggatgtgaagagcatggagatgctggtggagcaccaggcccatgacatcctcacctagggccccctggttccccgtcgtgtctcctttgactcacctgagagaggcgtttgcagccaatgaagctggctgctcagacggtcgacattgaatttgggtgggggttgggatcctgtctgaagtacagactgttcttgctctaaaaacaggactgtccctgatgggagccaggccacagggaggaggcttctttgtgggtctctcctgcagagggtgggggtctcagggtcttaggtgatacgggagagaaggaactgccaggcaggaggccccctgaagtctgtgtactcctttttgg

SEQ ID NO: 6808 - DNA, 486 bp, Homo sapiens; identical to SEQ ID NO: 1984

SEQ ID NO: 6809 - DNA, 686 bp, Homo sapiens
tgcgtgtcggtctgcttttattacctcccagactgagcccccgacctggcccagcctggcccgtccccaatccagtgggctggccaggccacctgcaccagggaggacagctgctggcagggactaataaacccttccacctggccatggtggtggtgttctctatggaccgaggccctgaaacgcgggcagggaggggcagagaacacactagcttgggggtgggcaccagctcagacccctcagcagctttgggccctcggcgactttcccaggcagtgcaggctagcccagtccaggagtgtgcagcctggcttgggtcgagctctgtcacatctggataagcaactgggggctgagagtcccagggcagcctggcccagcaggtcaaggcgccacagggggccatcaggtccagctggcgcaggcggcaggaggagggtctgctctgacctgggtgctgcatgggtccctccagctgccaccacctgcaccaggcagtcccgaggggtcacaggctagcccagcacactgtcattgaagggcaggcagacaacagccttctggtggccgccatactctctcttgatctctccagtcttcacacaccagagacgggccaggttgttcgaggaagcagtgacgatgttactgggagtccccccagaaagggcacgccacatcca

SEQ ID NO: 6810 - DNA, 631 bp, Homo sapiens
  misc_feature 499, 535, 557, 613, 628: n = A,T,C or G
tttcctgtgaaaccaccatagagaatttatttttttctcaggtgaagtcagtaactaattcttcctattcccgttggacacaaggagtctgtgagggggtgtgaaggaaggaggctgcggctgcgtcctggactccgtcctgcggtagggagtccagcagggatggctcagcctccgcacctggtgtgcagccggatctccatcctgaggaaggccttgaggttctcatcagccacgtgctcctccagggcagccagggcccgctccccaccgtcctggaagtgctgcagcagcctgtccgcgtactccacccacacgcagttggggcagccactcatgcagcagtttgtgggcggctggagctcaggtggcagcgatgcctttgggcggcctggtgcgtccgcacctgcttgggagcccacctctacgtggtctgtcccgaattttctgcgcccatcaggggcttgcgctccgggatggtgcctttgaagaagctgcnacctccaggaagcctctggagcagtccgggctgganaaccggcgagccccaatttcantaattaactagtcctgcgaagggcatcatccggttcatgtcaaaggcaagtcccanagcccaggaggttgnaaa

SEQ ID NO: 6811 - DNA, 465 bp, Homo sapiens
  misc_feature 127: n = A,T,C or G
tcggcacgagaataattacaggccactcttgctctcaagtcccattgtaaaggaaaaatacctattaccctgtcttcattccacgtattgaaatgcttcttacaaagggatctaacatatttcttancaggggcccatggaaacacatttatttaatttttttattttttcaaaagcaatattactgctttgaaatctttcaaagtgaaggctgttatacagcttaataatggatctccttttacttgcctgaaattattctgaatcctgttaacatcatgccccgtattatccaaatagccatacagttaaatcaattttaaaacattgtaaaaggctgttttaacatcaatttttattttaattgaagcaacatacacatgtggtttagaaaaccaaattgtaaaaagacagcagctttgaatccctcctccccaccctgccccttccacacagtctgttact

SEQ ID NO: 6812 - DNA, 659 bp, Homo sapiens
  misc_feature 616: n = A,T,C or G
cggctgagcgtgtggctgcaggagcttctgtgggagtacggtcatgagccttttgctgtactatgccctccctgccctgggcagctatgccatgctctccatcttcttcctgcgccggcctcatctgctgcacacgcccagggctcccaccttccgcatccgcctgggggcccaccgaggaggatctggagagctgctggagaacaccatggaggccatggagaactccatggcccagcgctcggacctcctggagctcgactgtcagctgacacgggacagagtggtggtggtgtcacatgatgagaacctgtgccgccagtcgggcctaaacagggatgtgggcagcctggacttcgaggacctgcccctctacaaggagaagctggaggtttacttctctccaggccactttgctcacgggtcagaccggcgcatggttcgtctggaggacctgttccagaggtttccaaggacacccatgagcgtagagatcaaagggaagaacgaagagctcatccgtgagatagcaggcttggtgagacgctatgaccgtaatgaaatcacatctgggctcggagaagagctcggtcatgaagaatgcaaggctgccaancccgagatgccctgttcttcacaataagccgaggattttggtg

SEQ ID NO: 6813 - DNA, 517 bp, Homo sapiens
tgcggccgcaggcttccccgcctggcgcctgccctccagcgtggggctcgcctggcgggaccccgcagcagccccggccccatccccgcccagagccgggcgtcgtgtgggtccgtgggtgataattgagagcgtcagacccaggactgttcagggaggagccccggtcagactcccacgtgtgaagaccgggccccaagtggcaagggctggcctggggcgggcagcttgggtcctggacgttgataggaagcggaaggggaatcgcgggaagctggcccaggtcaggtccgcaaaggcttctgaagaagaggaagggcgagtaggggcacctggacgctgatggtggccaggatgctcagctggccaggagggcagcacctgctggggacggtggccctgccttcatgcccaggacaccagctgggtccagctagcagccactgggaatcagaggaatggggcagagctgggcattcaggaccttgaggacaggtgaccccacccgcccaccgcc

SEQ ID NO: 6814 - DNA, 445 bp, Homo sapiens
ggaacctgctgccccccaagcggcccatcaaagaggtgctgacggacatttttgccaaggtgctggagaagggctgggtggacagccgctccatccacatctttgacaccctgctgcacatgggcggcgtctactggttctgcaacaacctgattaaggagctgctgaaggagacgcggaaggagcacacgctgcgggcagtggagctgctctactccatcttctgcctggacatgcagcaagtgaccctggtcctgctgggccacatcctacctggcctgctcactgactcctccaagtggcacagcctcatggaccccccgggcactgctcttgccaagctggccgtgtggtgtgcctcagttcctactcctcccacaagggacaggcgtccacccgccagaagaagagacaccgcgaagacattgaggattatatcagcctc

SEQ ID NO: 6815 - DNA, 571 bp, Homo sapiens
tttctgactcaaaaatcatactttattcttgagcccattggtcagggtagattcgcacactccctctgcagtgactccaggagcccctctcacagctcagagcggaacgtgaggctgcacctgccatcttctccgcatagtccgcatcgaagcgctcattctgcgccacggtgaaggtggtcttccagtccccagccatgcctttcctcatgaagggggagatgctgtggtccatgagctcctgggggacggtggtgtagttggtcatagggttcttcttcatctccttgaacgacgtgtgctgaaccatgaagtccatggtctcctctggcagggagcgccccacaaactccaggatcttttgaatctcccttttggggttctccttcatgtcttcatagaagaggtagagaacagggtgggtgcggctcagctcccaccactcctgcacgtgctggtaccaggacccgtaggacacttctccagccatgaacttttccaggaagctgtcccaggtcccaggctcagggtgcgccttttccatacggtggaaatggtagtaggagaccgc

SEQ ID NO: 6816 - DNA, 571 bp, Homo sapiens
  misc_feature 302, 464: n = A,T,C or G
tcggcacgaggagcttagaagcaaagttaagagactcatcagattctgagctgctgcgggatattttgcagaagactgtgaagcatcctgtgtgtgtgtgaagcacccgccgtcagtcaagaaagcccggtgctttctctcagaactcatcaaaaagccctcgggaggctcagtcacactctccgagagcacagccatcatctcccatggtaccacaggcctggtcacatgggatgccaccctctaccttgcagaatgggccatcgagaacccagcagccttcactaacaggactgtcctanagcttggcagtggtgccggcctcacaggcctggccatctgcaagatgtaccgcccccgggcattcatcttcagtgactgtcacagccgggtcctcgagcagctccgagggaatgtccttctcaatggcctctcattagaggcagacatcactgccaacttanacagccccagggtgacagtggcccagctggactgggacgtagcgacggtccatcagctctctgccttccagccagatgttgtcattgcagcagacgtgctgtattgc

SEQ ID NO: 6817 - DNA, 58 bp, Homo sapiens
ggaggggcctagggagccgcaccttgtcatgtaccatcaataaagtaccctgtgctca

SEQ ID NO: 6818 - DNA, 520 bp, Homo sapiens
tcggcacgaggggcgtgttcacagcgccactggctggacgctacttgctgagcgcggtgctgactgggcaccggcacgagaaagtggaggccgtgctgtcccgctccaaccagggcgtggcccgcgtatactccggtggctacgatcctgagggcctggagaataagccggtggccgagagccagcccagcccgggcaccctgggcgtcttcagcctcatcctgccgctgcaggccggggacacggtctgcgtcgacctggtcatggggcagctggcgcactcggaggagccgctcaccatcttcagcggggccctgctctatggggacccagagcttgaacacgcgtagactggggtcccgcccgacgtgtctacgtcggctgaagagacagcgggggcggcgggctcctggggtctcgcctgagatggggcacctatccctgggcgagcgccgcacccgggcccgcagcggcaccgcgcccatagcggcctctccccacgcccggggcgcgccggctc

SEQ ID NO: 6819 - DNA, 520 bp, Homo sapiens
tcggcacgaggcgggactgggtcagctctcagctggcagccacctgcaacgtggagccctcacttttcaccaactggttcagcgggcacctcaacttccatatcgagcaccacctcttccccaggatgccgagacacaactacagccgggtggccccgctggtcaagtcgctgtgtgccaagcacggcctcagctacgaagtgaagcccttcctcaccgcgctggtggacatcggcaggtccctgaagaagtctggtgacatctggctggacgcctacctccatcagtgaaggcaacacccaggcgggcagagaagggctcatggcaccagcaaccaagccagcccccggcgggatcgatacccccacccctccactggccagcctgggggtgccctgcctgccctcctggtactgttgtcttcccctcggccccctcacatgtgtattcagcagccctatggccttggctctgggcctgatgggacaggggtagagggaaggtgagcatagcacatttt

SEQ ID NO: 6820 - DNA, 527 bp, Homo sapiens; identical to SEQ ID NO: 1986

SEQ ID NO: 6821 - DNA, 568 bp, Homo sapiens
attcggcacgaggcgctgggggagccccctgggttcctgcactcctggtggtgcgtcttctgggacctgtactgcgcggcgcctgaccgaagagaggcctgcgagcactccggcgaggccaaggccttccaggactatagtgctgcagccgcccccagccccgttatggggagtatggccccaggtgacacaatggccgcaggctccatggcggctggcttcttccagggcccccccggctcccagccgtccccccacaaccccaacgcccccatgatggggcctcacggtcagcccttcatgtcaccgcgcttcccagggggcccccggcccaccctgcggatgccgagtcagcctcccgcaggcctccctggctcccagcccctcctccctggcgccatggagccctccccacgagcccaggggcatccgagcatgggcggcccaatgcagagggtgacgcctcctcgtggcatggccagcgtggggccccagagctatggaggtggcatgcgacccccacccaactccctcaccggcccaggcctgcctgccatgaacatgggcc

SEQ ID NO: 6822 - DNA, 524 bp, Homo sapiens
  misc_feature 44: n = A,T,C or G
ttcggcacgaggccaaggctgtcctccccaaaacctggcctcanaacttctcatctcacttcaaccgtttccagcccttccacggcctctttgatggggtgcccaccactgcctacttctcaggccgcacccgggacctggaggcgctgctggcggtgatggggagcgcccaggagttcatctatgcctccgtgatggagtatttccccaccacgcgcttcagccaccccccgaggtactggccggtgctggacaacgcgctgcgggcggcagccttcggcaagggcgtgcgcgtgcgcctgctggtcggctgcggactcaacacggaccccaccatgttcccctacctgcggtccctgcaggcgctcatcaaccccgcggccaacgtctctgtggacgtggtgagggcgtgctcccggccgggcgtgggaaaggcggccctcctgccgcccttactgacgcgctgcctctgctcccctaagaaagtcttcatcgtgccggtggggaaccattccaacatccca

SEQ ID NO: 6823 - DNA, 546 bp, Homo sapiens
acatttcaaaaactaactttattgcatttaatacagatataagcacgaataagacaaattagttccattttcagacaggaagaaaaacattttgggtagggagaagttaattgctggtaaagtgtagtagtattattattctaaaagataatgagttcagaagtattaaggaaatatgtgtgtgtgtacgcataggtattcaggtaaacaccaataacaataaaactctataagcggtcacagacaacacaagtacaggaggaacatttaaatgttaaccaatgtcatgaaagaaagagtgatataagcaattctatacagcaaaaagagaatgaataacaatttaattgagttttatttatctacaaaaatatagcaatacagtgaacttcaccaaatcctaaatactcagtacctgaactggctacaacaccgtgtgcacacccagttcctgcagaatctcttgcagatatgggagagtcagccagtgaaaagatccatttcttgggaatccttgtcaacaagaccagttcagaaatccaggat

SEQ ID NO: 6824 - DNA, 541 bp, Homo sapiens
  misc_feature 383: n = A,T,C or G
tcggcacgaggcggtcgtctcgtaccgcgagacggtcagtgaagagtcgaacgtgctctgcctctccaagtcccccaacaagcacaaccggctgtacatgaaggcgcggcccttccccgacggcctggccgaggacatcgataaaggcgaggtgtccgcccgtcaggagctcaagcagcgggcgcgctacctggccgagaagtacgagtgggacgtggctgaggcccgcaagatctggtgctttgggcccgacggcaccggccccaacatcctcaccgacatcaccaagggtgtgcagtacctcaacgagatcaaggacagtgtggtggccggcttccagtgggccaccaaggagggcgcactgtgtgaggagaacatgcggngtgtgcgcttcgacgtccacgacgtcaccctgcacgccgacgccatccaccgcggagggggccagatcatccccacagcacggcgctgcctctacgccagtgtgctgaccgcccagccacgcctcatggagcccatctaccttgtggagatccagtgt

SEQ ID NO: 6825 - DNA, 529 bp, Homo sapiens
  misc_feature 435, 451: n = A,T,C or G
tcggcacgaggaggactgctgctgtcactgccatccattggagcccagcaccccctccccgcccatccttcggacagcaactccagcccagccccgcgtccctgtgtccacttctcctgacccctcggccgccaccccagaaggctggagcagggacgccgtcgctccggccgcctgctcccctcgggtccccgtgcgagcccacgccggccccggtgcccgcccgcagccctgccactggacacaggataaggcccagcgcacaggcccccacgtggacagcatggaccgcggcacgctccctctggctgttgccctgctgctggccagctgcagcctcagccccacaagtcttgcagaaacagtccattgtgaccttcagcctgtgggccccgagaggggcgaggtgacatataccactagccaggtctcganaggctgcgtggctcangcccccaatgccatccttgaagtccatgtcctcttcctggagttcccaacgggcccgtcacagctggagctgactctc

SEQ ID NO: 6826 - DNA, 561 bp, Homo sapiens
cacagtcacaataggaagtgtatgattacatcactatctcgtttgtaagtttcttttcctaatcaacattatgattgtcgaaatacatgtatgtgaaacaaatattaagagaaaaagaattaacattgtaatgctgattgtaatactctcttccagaaagagatgagatggtataacgataagaatgtacaacttgcaccttgaaatctttttttttaaataaattagtgctcaggggaggaaaagtagagaaagtgaacgtcaaaaatagaattccaaaattataaaaatgcaaaaggaaatggcctccttgctttaatagagccaccttttttagaacactgtcctcacacttgacctgtgttttgcattcagtactgaaataaaagtaacttgttctacatttgaatctaacattttctcagcaattgatctggtccttgtttactagaactggtggtttatgcttgtcagagcactattagttgaatcatattgtatacttatgtaatctacattagctagtactgtttaagactatattttaattgctcttcttat

SEQ ID NO: 6827 - DNA, 565 bp, Homo sapiens; identical to SEQ ID NO: 1989

SEQ ID NO: 6828 - DNA, 490 bp, Homo sapiens
tattaaacctcaaattgggggtttgatttggaagacattagcaagtaatttggaataagttcccatccccaataacttggatcctgtagtccaagtaatagtcatggtctatcattcagttacttgtgctaggcacctgtgttagatattaggtataaatattaacagaaggcagggaagtgaaagcccccaggcatagccagtcatgttgccctggaacacaagaggtgtccaatctcctgcaggaagaggagctgctgccattctgggaacctcaagcttagttcagaggaaacatctatgaggagaaagcccaaccaccttcaacttaaaaaaacaaaagagttctgtggaccccctctgtagaaaaggaggggcatgtgattcaagaggccacctggatatttagttgaagtttatctttaaggctcgctgcttctcttgctgtcatttataagttcattcaataaatactgagcactttctatgt

SEQ ID NO: 6829 - DNA, 625 bp, Homo sapiens; identical to SEQ ID NO: 1990

SEQ ID NO: 6830 - DNA, 582 bp, Homo sapiens
attcggcacgaggactttgacaccgtggctgacaagatccacagtgtgagcaggaagcacggggccaccttggtgcactgtgctgcaggggtgagccgctcagccacgctgtgtatcgcgtacctgatgaaattccacaacgtgtgcctgctggaggcgtacaactgggtgaaagcccggcgacctgtcatcaggcccaacgtaggcttctggaggcaactgatagactacgagcgccagctctttgggaagtcgacagttaaaatggtacagacaccttatggcatagttcccgacgtctatgagaaggagtcccgacacctgatgccttactgggggatttagtgccactgaagcctgcgtcagcagcccgagcggggccggcatctgctccccgccgtctgctccctctccactctcttctcaaatggctgacttctggttctccctcaagtgttttttacactgggtgttcaaatttattttaagagatagggagggaggggacataaagggaatgcatacattgctagtcacatttttaaaattaacattttggaatagtgtttatggaaatcttta

SEQ ID NO: 6831 - DNA, 403 bp, Homo sapiens; identical to SEQ ID NO: 1994

SEQ ID NO: 6832 - DNA, 591 bp, Homo sapiens; identical to SEQ ID NO: 1995
  misc_feature 470: n = A,T,C or G

SEQ ID NO: 6833 - DNA, 612 bp, Homo sapiens
ggagtccgacgccgactgaggcacgagcgggtgacgctgggcctgcagcgcggagcagaaagcagaacccgcagagtcctccctgctgctgtgtggacgacacgtgggcacaggcagaagtgggccctgtgaccagctgcactggtttcgtggaaggaagctccaggactggcgggatgggctcagcctgtatcaaagtcaccaaatactttctcttcctcttcaacttgatcttctttatcctgggcgcagtgatcctgggcttcggggtgtggatcctggccgacaagagcagtttcatctctgtcctgcaaacctcctccagctcgcttaggatgggggcctatgtcttcatcggcgtgggggcagtcactatgctcatgggcttcctgggctgcatcggcgccgtcaacgaggcccgctgcctgctggggctgtactttgctttcctgctcctgatcctcattgcccaggtgacggccggggccctcttctacttcaacatgggcaagctgaagcaggaaatgggcggcatcgtgactgagctcattcgagactacaacagcagtcgcgaggacagcctgcaggatgcctgggactacgtgcaggctc

SEQ ID NO: 6834 - DNA, 538 bp, Homo sapiens
gggccctactgctgcccctgtgcccctcgccccgccgggagtcgcgggccaacatgggccaggaagaggagctgctgaggatcgccaaaaagctggagaagatggtggccaggaagaacacggaaggggccctggaccttctgaagaagctgcacagctgccagatgtccatccagctactacagacaaccaggattggagttgctgttaatggggtccgcaagcactgctcagacaaggaggtggtgtccttggccaaagtccttatcaaaaactggaagcggctgttagactcccctggacccccaaaaggagaaaaaggagaggaaagagaaaaggcaaagaagaaggaaaaagggcttgagtgttcagactggaagccagaagcaggcctttctccaccaaggaaaaaacgagaagaccccaaaaccaggagagactctgtggactccaagtcttctgcctcctcctctccaaaaagaccatcggtggaaagatcaaacagcagcaaatcaaaagcggagagccccaaacacct

SEQ ID NO: 6835 - DNA, 574 bp, Homo sapiens; identical to SEQ ID NO: 1999

SEQ ID NO: 6836 - DNA, 493 bp, Homo sapiens
ggtccaagtttttagtttcagagactaggcatatggttaatatttaggtaggaaattcaggaaaaggagcttgtagggcaggaagggaaggaacggcagcttggggcactctgacatctttaacaagtcttgtaaaggcttactaaatacaacgaagcattgtaccaactataccctaataaagattaaaaatttacattccagttaactaccttaaaagttaagtccactttcatcccacgcccccatcctttccgtcatccctcacccctttgtcttgagaaaggaggtttagctgcttctttagttctgcaatttctttttcttgctctattatcttcatctgtagggtgaggttaacatttccagaattttggaaaagttcactctgcagcagctgaatggcagatggtctctgcgatgagttccttctcgttaagtgctggatatacttggcttgcaccggacaccttttacggagggattccggaac

SEQ ID NO: 6837 - DNA, 553 bp, Homo sapiens
aacctttcccgtgaaggcatttattttcatcagtgtaaccaactactagcgttaaataacatataccatgctattaacaatggaataagtagaaggagctgaccatgggtgtattaacaaagaagctgacagcctggaaatatttacttgatgggtactgttggtgaccccgagcgatgaaaatgaacattctgccactttccatcccggcggtgcacacacgagtctcttctgactgcattgtctttggcattccactgccatccatgtactgtgtgagcctaatatatgctatgcaggcggcatcatcccctaccagatgtacatgagggtttagaataatagtgtggattggtttattgcttttggacaaagcattttcaaagtagaatcggtgaaaatccatcccttccactaaattacccaaagcttcaggttcaaaagcagtaaggcctgggtcacagatttttgtgtaggcttcaaagtccccattgttgatagcttcgatcagttgttcagtgactttgataatctcttgctttcgtgctttcac

SEQ ID NO: 6838 - DNA, 352 bp, Homo sapiens
  misc_feature 341: n = A,T,C or G
tgtaaatatttttcaaggttttattgcaaaccaaaatcagtttatcacacacaaaaaaagttgtgtgatgggatgagggaaggattgtacgtattataaccatgttaattacagtacattaaaatggtggtttacattacaaataagcctgtaagtttaaatatactagtgttataacccaatgtacagacgttctttatacaatacatacaattatcaggaatgcaaaaaaaaaacataaataatgcccattttacaggtgacattttaaacaatgaaaaacaccaacggctctgactgacaactggggcattggtccataaaaaccctttctaaaaatngaaatatttgg

SEQ ID NO: 6839 - DNA, 618 bp, Homo sapiens
  misc_feature 479: n = A,T,C or G
tcggcacgagggacagcgagtactgggtcctgggccccacgcgctacagctggaagaaaggcgtgtggctcacggacctggtgcacgtggcggcccacgagatcggccacgcgctgggcctgatgcactcacaacacggccgggcgctcatgcacctgaacgccacgctgcgcggctggaaggcgttgtcccaggacgagctgtgggggctgcaccggctctacggatgcctcgacaggctgttcgtgtgcgcgtcctgggcgcggaggggcttctgcgacgctcgccggcggctcatgaagaggctctgccccagcagctgcgacttctgctacgaattccccttccccacggtggccaccaccccaccgccccccaggaccaaaaccaggctggtgcccgagggcaggaacgtgaccttccgctgcggccagaagatcctccacaagaaagggaaagtgtactggtacaaggaccangagcccctggagttctcctaccccggctacctggccctgggcgaagcgcacctgagcatcatcgccaacgccgtcaatgagggcacctacacctgcgtggtgcgccgccagcagcgcgtgctgaccacctactcctggc

SEQ ID NO: 6840 - DNA, 530 bp, Homo sapiens
tggatcccccgggctgcaggaattcggcacgagggatgccggtggaggcgggagcggaaggcgaggaggacggcttcggggaagcagaatacgctgccatcaactccatgctggaccagatcaactcctgtctggaccacctggaggagaagaatgaccacctccacgcccgcctccaggagctgctggagtccaaccggcagacacgcctggagttccagcagcagctcggggaggcccccagtgatgccagcccctaggctccaagagcccccacccgggacccaaccctgcctccctgggctaggctctggcctgggcactcaccccctggcttaaacaccttctcaagggctggccttcagggacccctggtgggtctgcctgcctgggccacccttcctgcctgggcctccccttggcctacctgggccagcccccaccacctggcatgccctcctggggccaagagtgggcctgcaacccacccacttgcctgcccacccaactcctgggcgctccccactctg

SEQ ID NO: 6841 - DNA, 536 bp, Homo sapiens
  misc_feature 109, 379: n = A,T,C or G
ttcggcacgaggagcagatggtgatttccctgacaccatccagtgtgcatacatccacctggtgtcccgtgaggagtgtgagcatgcctaccctggccagatcacccanaacatgttgtgtgctggggatgagaagtacgggaaggattcctgccagggtgattctgggggtccgctggtatgtggagaccacctccgaggccttgtgtcatggggtaacatcccctgtggatcaaaggagaagccaggagtctacaccaacgtctgcagatacacgaactggatccaaaaaaccattcaggccaagtgaccctgacatgtgacatctacctcccgacctaccaccccactggctggttccagaacgtctctcacctanaccttgcctcccctcctctcctgcccagctctgaccctgatgcttaataaacgcagcgacgtgagggtcctgattctccctggttttaccccagctccatccttgcatcactggggaggacgtgatgagtgaggacttgggtcctcggtcttacccc

SEQ ID NO: 6842 - DNA, 489 bp, Homo sapiens
gaacagtgagggtgcagggagcaaggacgtcctggcctggcctccgattcgctggaattgcaaggaccctcccccagtaagggggctccctcaagggtgggaatagagtggaggcccgcacgggagttcttgtctgtgtgcaatccactttgtgggcgtgtgggtttaggtctggctgggccgtttctgaacttgacccctgaggactcatagtaccttaggggcggggctctccagtgggtggggcctcccgctctgagagcaaggcctcggggtctggaggacccggcttttccgggagggcgcggcctccgggggagacggcgagccgagcgggctgtcagccgaagagcttcaggaagcagggctggcagtagggcttgcggcgcgctcctggaaggaccccttggtgagcgggcgcaggcagaaggtgcatgtgaagtggtccgggtggaagcggcgacccagggccgacacgcagcggccggt

SEQ ID NO: 6843 - DNA, 507 bp, Homo sapiens
ggtaggaggtgcaggctgccaccatcacaggtgagagggcagaggctcacctgatggggacgaggcttgaggtgggctcaggctggcccccacatcacatccagcccgtggcgagtgtccttcaggaggtggctgtgccctcctggactcgaacatgtgtgagctgatgtaccacctaggagagcccagcctggctgccagcacctcatccaggacgacatgctctgtgctggctctgtccagggcaagaaagactcctgccagggtgactccggggggccgctggtctgccccatcaatgatacgtggatccaggccggcattgtgagctggggattcggctgtgccggcctttccggccatggtgtctacacccaggtgctaagctacacagactggattcagagaaccctggctgaatctcactcaggcatgtctggggcccgccaggtgcccaggatcccactcaggcacctccagatcccacccagtgctgctgcttgagct

SEQ ID NO: 6844 - DNA, 510 bp, Homo sapiens; identical to SEQ ID NO: 2009

SEQ ID NO: 6845 - DNA, 80 bp, Homo sapiens
tcggcacgagcccagatctcctggctttaacccctccttggccaaggccacggttgcctgcgggagccaggcgtccggtc

SEQ ID NO: 6846 - DNA, 523 bp, Homo sapiens
cggcacgagtgagactgtgcgttcctgtaccagcgagtccacagcctttgtgcaggccatgatggaggggtcccacacaaaagcagacctgcgagatctcttccagaaggctgctaagaagcaccagaatatgtaccgcctggccatgaccggggcagggatcgacaggcacctcttctgcctttacttggtctccaagtacctaggagtcagctctcctttccttgctgaggtgctctcggaaccctggcgtctctccaccagccagatcccccaatcccagatccgcatgttcgacccagagcagcaccccaatcacctgggcgctggaggtggctttggccctgtagcagatgatggctatggagtttcctacatgattgcaggcgagaacacgatcttcttccacatctccagcaagttctcaagctcaaagacgaacgcccagcgctttggaaaccacatccgcaaagccctgctggacattgctgatcttttccaagttcccaaggcctacagctga

SEQ ID NO: 6847 - DNA, 500 bp, Homo sapiens
  misc_feature 321: n = A,T,C or G
tcggcacgaggccgggttctcggggtcctataggaccacctggtcgagctgggaaacgtggattacctggaccccaaggacctcgtggtgacaaaggtgatcatggagaccgaggcgacagaggtcagaagggccacagaggctttactggtcttcagggtcttcctggccctcctggtccaaatggtgaacaaggaagtgctggaatccctggaccatttggcccaagaggtcctccaggcccagttggtccttcaggtaaagaaggaaaccctgggccacttgggccaattggacctccaggtgtacgaggcagtgtangagaagcaggacctgagggccctcctggtgagcctggcccacctggccctccgggtccccctggccaccttacagctgctcttggggatatcatggggcactatgatgaaagcatgccagatccacttcctgagtttactgaagatcaggcggctcctgatgacaaaaacaaaacggac

SEQ ID NO: 6848 - DNA, 485 bp, Homo sapiens
  misc_feature 395, 444, 453: n = A,T,C or G
acagactcagagagaacccaccatggtgctgtctcctgccgacaagaccaacgtcaaggccgcctggggtaaggtcggcgcgcacgtggcgagtatggtgcggaggccctggagaggatgttcctgtccttccccaccaccaagacctacttcccgcacttcgacctgagccacggctctgcccaggttaagggccacggcaagaaggtggccgacgcgctgaccaacgccgtggccaacgtggacgacatgcccaacgcgctgtccgccctgagcgacctgcacgcgcacaagcttcgggtggacccggtcaacttcaagctcctaagccactgcctgctggtgaccctgggccgcccaccttccccgccgagtttacccttgcggttgcaagncttccctgggacaagtttcctgggttttttgagcaaccttgttgaattncaaataacntttaagttggagctttggttggccatgttttt

SEQ ID NO: 6849 - DNA, 532 bp, Homo sapiens
ttcggcacgaggaacgcgggtccacgcgtgtgatcgtccgtgcgtctagcctttgcccacgcagctttcagtcatggcctccggtaacgcgcgcatcggaaagccagcccctgacttcaaggccacagcggtggttgatggcgccttcaaagaggtgaagctgtcggactacaaagggaagtacgtggtcctctttttctaccctctggacttcacttttgtgtgccccaccgagatcatcgcgttcagcaaccgtgcagaggacttccgcaagctgggctgtgaagtgctgggcgtctcggtggactctcagttcacccacctggcttggatcaacaccccccggaaagagggaggcttgggccccctgaacatccccctgcttgctgacgtgaccagacgcttgtctgaggattacggcgtgctgaaaacagatgaaggcattgcctacaggggcctctttatcatcgatggcaagggtgtccttcgccagatcactgttaatgatttgcctgtgggacgctccgtggat

SEQ ID NO: 6850 - DNA, 474 bp, Homo sapiens
  misc_feature 302: n = A,T,C or G
ttcggcacgaggctttattaatgaccagggtaacccgttcagctagggagctcctcaatgagagttcttggggcaggtggcacggggcctccccaaagccgctccagctccccagtgagggcggccacctcctcggctaccacagcatgggcttggtgagccctggcgcagtctaaagccaggggtgtgagggccgcctcattttcgttggtccaggccaggaggaactggcactttttccgggcccggtaaagatgatctcgctcttctctagccacggcctgtttccgggcacggcccanggtctgtgccaggtcccccagtgctgccagcgtgtagcctttctggttggtcgggccctcgcccagcaggatgcgggcgacctcgtgcatagcccctcgtgtgcccaggggccccggcgggtgctcgcctgcttccagcacgtgggctgccgcctgcagggcttcttccgca

SEQ ID NO: 6851 - DNA, 596 bp, Homo sapiens
tcggcacgaggaccgcatcgaaacgccgctgagacctcagccttgacctccctcagcgtggccgggaccctgagcctctgcgcagagccacccgccccgacgtacttaggcggcatagccctgagacctctggccagcgccaggcaggcagcgggggcggcagaagcctgggcctgagtcttctggctctgcctctccctggggacaggagggagcctgggggtgtgggtggggagccggccggccgtgacccagcgcctggctctgcccgcaggagtggacagtgcaatgaaggaagaagtgcagaggctgcagtccagggtggacctgctggaggagaagctgcagctggtgctggccccactgcacagcctggcctcgcaggcactggagcatgggctcccggaccccggcagcctcctggtgcactccttccagcagctcggccgcatcgactccctgagcgagcagatttccttcctggaggagcagctggggtcctgctcctgcaagaaagactcgtgactgcccagcgccccaggctggactgagcccctcacgccgccctgcagcccccatgcccctgcccaacatgc

SEQ ID NO: 6852 - DNA, 499 bp, Homo sapiens
tcggcacgagcattaatcttggccactgacatggcaagacatgcagaaattatggattctttcaaagagaaaatggagaattttgactacagcaacgaggagcacatgaccctggtgagtggcttattctgcctgggtgggcagccaggcggtgggctggcgaagcaggtcatccatccagctcacactggaagccaagaagctgaaattattagtcttcttggaacaaggtgtctataaatctggttttcaaggtcatgactcttactaggaaagtccgggcagggcctccctcctgatgggtcctccttcatggtcagaggcagcattctcccattcctccatctcttttggatttgaaggagataagtgggtgaaggccgtgcatctcgctctgctttccagaaaataaaaccagctctcccatgaaggcacagccccagcatggcactctgaaagcccacctatgtgggggcaactccaacacagctcccgctcc

SEQ ID NO: 6853 - DNA, 463 bp, Homo sapiens
  misc_feature 38, 456: n = A,T,C or G
ggaatgtacatctaattgacactacattgcattaatcnatagctgcactttttgcaaactgtggctatgacagtcctgaacaagaagggtttcctgtttaagctgcagtaacttttctgactatggatcatcgttccttctgtggcagatttttacagttcctctaatgcatttgggacgactgtctcaaagtaacctgcagctttcctgacaactcctagctctctctcctgctaagaactgtagcccttttctgctgtttttagaaccttctgctaccatatccaccacttccaccaccagatccataaccaccaccatagggactgcccgagcttcttccaccaaaactgccccctttcatgggtccataatttgattgctgttgtcactataatttccaaaatcattatagttcccaccaccaccatagttaccacgccaaaattcctcctncattgta

SEQ ID NO: 6854 - DNA, 414 bp, Homo sapiens
aaagccacagtctgttccttccacagccacaagatggcgacatgagcctaagtcaagtcctgtccctcaacccacgcccctcgctggcttccccacctctctcaggatgaaagcccaagtcatcagggtggcacgtcaggccctgcacaatgtgccccgtcacctccctgccctcccgtcatttgccctgggtctcccccaccaaaatgggagccaggagtcccagccaggcacaggaccgagcctggctctcggtcaacaggtgatgagctgggagcagctccttggccagaggcttacaggcaacaagcggccaggcagggtctggccccgggctgctgggctcacaaaggcacactagaccacagtgacgatctctgtaagcacaaagggactccgatgtgggtggggtga

SEQ ID NO: 6855 - DNA, 443 bp, Homo sapiens; identical to SEQ ID NO: 322

SEQ ID NO: 6856 - DNA, 563 bp, Homo sapiens; identical to SEQ ID NO: 2014
  misc_feature 134: n = A,T,C or G

SEQ ID NO: 6857 - DNA, 409 bp, Homo sapiens
  misc_feature 153: n = A,T,C or G
cccggcgctggcttttattgcctcctggagagaggaggtgtcccaggccaggccaggcaggagagggctggggcaggggagtttcagtctatgtggtggaggctcagatttggagctggaggggttggtggcggttcttagagctgagctttngggccagggtccctgggtctgggctgggagactcagtcagaaataggtattgcttatcctctgggactatgacagcccctccctggggttgggggtgtgacagggacagaagccgacccagggggtccctgagagcccaggggaaggaggatgcctgggactgcatctgcctcctgcggggcctggacagggagggggccagaccacagcggcccctcctccggtcattgtgcgggcctctgaggctgtggcaggt

SEQ ID NO: 6858 - DNA, 653 bp, Homo sapiens
  misc_feature 225, 544: n = A,T,C or G
tcggcatgaggacagacgcggcttctgcctccgcctgcataattagttgggacttctctgcctcggctaggcgctccagcttgtagcgctccgcttccgctggcttccgcacccgggcctccagctccttctcccgccgggcgatctcctgctcctgcactgccacctgctgggcccgctccaccacctgcacctgcacccgctgctcctcaatctgctgcttantcttggccacctgaagctgataggccaggtcagcctgtgctcggcgggtgttgacctcgatgtcataggcggccttcttcagttcgtaatctctctgtgccttggccatctcgatctcactcaggtactgagcagacaccttttcctgcttggctttagcttcccggatcccagcatctctcttggcctctgcttctccaatccgtgcatctttttggacttgagctgttcgagccttccccaaagagtgcaaatagtcctggtcatcgtgaatgtccttcagagtgtagctaaccacactgatgcccatgttgaccangtctgaggaggccactttgaaaacctgttctgagaatttctgcctgtccttatagatctcctccacagtcatgtgggccatgatggccctctggtggccctctaacgtc

SEQ ID NO: 6859 - DNA, 502 bp, Homo sapiens; identical to SEQ ID NO: 2017

SEQ ID NO: 6860 - DNA, 370 bp, Homo sapiens
tctccaccatggcctgggctctgctcctcctcaccctcctcactcagggcacaggatcctgggctcagtctgccctgactcagcctccctccgtgtccgggtctcctggacagtcagtcaccatctcctgcactggaacctccactgacattggttcttatagccgtgtctcctggtaccaccaggccccagccacagcccccaaactcatcatttatgaagtcagtaatcggccctcagggtccctgatcgcttctctgggtccaagtctggcaacacggcctccctgaccatctctgggctccaggctgaagacgaggctgattattactgcgcctcatatgcagccagcagcactgtaatattcggc

SEQ ID NO: 6861 - DNA, 567 bp, Homo sapiens
cggcacgaggcggacctcatcctggtggccgactccctcattgaggtgttcaacctgcacgagcggtactacgacatcgccgtcctgtgcaccttcatgtcgctcttcctgcaggtcaacatgtacagcagcgtcttcttcctcacctggatgagcttcgaccgctacatcgccctggccagggccatgcgctgcagcctgttccgcaccaagcaccacgcccggctgagctgtggcctcatctggatggcatccgtgtcagccacgctggtgcccttcaccgccgtgcacctgcagcacaccgacgaggcctgcttctgtttcgcggatgtccgggaggtgcagtggctcgaggtcacgctgggcttcatcgtgcccttcgccatcatcggcctgtgctactccctcattgtccgggtgctggtcagggcgcaccggcaccgtgggctgcggccccggcggcagaaggcgctccgcatgatcctcgcggtggtgctggtcttcttcgtctgctggctgccggagaacgtcttcatcagcgtgcacctcctgcagcggacgcagcct

SEQ ID NO: 6862 - DNA, 554 bp, Homo sapiens
  misc_feature 286, 423: n = A,T,C or G
cggcacgaggatcttcctgcaggcagctgggctggactccctccctggctacccttcccttcgtctctgatggtgacatccaaacaataaatatgcaataaatagcgctcctgggctgggccgggccggctgccttcaaaccccactcggcccctaccagtcttctctggccaggacaggcctactggggtgctagatagtaaagtccccaaacatcccagggtcccacaagacctgggatccatctccattttgaggcccaggcctggtttccaaggagacctancaaagctgggtccaggacagggccaggcaagcagggctggcaggtgggtgctgggaagaggctgttaccccagaccacagcttgttatgtcctggccaagacctcgactccaggccacaagatgacactgggctcangagtagatggtgatgacttcacggccaccaccgcgcaccaacagcacccgctcaaggccctcggtcagcacctcgaggaactccatgtagttctcgtcgccctcactgttcctgggtgggccaggcatgtt

SEQ ID NO: 6863 - DNA, 525 bp, Homo sapiens
  misc_feature 213, 350: n = A,T,C or G
cggcacgaggggcccggctccctaggcgtcccatctcgcttcctgggtctgcaggtccagccggctggcaccctccatgtacccaggggagattccagccagacacccgccccccggccctggctaagaagttgcttcctgttgccagcatgacctaccctcgcctctttgatgccatccgctgccacctccttttgctcctggaccctttancctctctgcccttccactctctgaccaccgcccccgccctccccacccagctccgcttcttgttacttgggggaggaaagaaactcctgatcattggccaaagggacttacccctggagaggccaagtgccttctangaagttaggaggttgaggcacagcctgtgcagagagggtgggtcacccccccagatccaaggggaaactgcaggtcaagggctgataacggccatgcaggatgcttgatgctgcgtcccccgctgcttgccgccccccaccccgccattttgtataataaagctccctgtgtatt

SEQ ID NO: 6864 - DNA, 493 bp, Homo sapiens
  misc_feature 449: n = A,T,C or G
tcggcacgaggctcctgggccggggcccttaggacgagataggggaccccttggcatagggccctgccccgtcggactgcccccagaaagcctcctgccccctgccggtgaagtccttcagtgagcccctccccagccagcccttccctggccccgccggatgtataaatgtaaaaatgaaggaattacattttatatgtgagcgagcaagccggcaagcgagcacagtattatttctccatcccctccctgcctgctccttggcacccccatgctgccttcagggagacaggcagggagggcttggggctgcacctcctaccctcccaccagaacgcaccccactgggagagctggtggtgcagccttcccctccctgtataagacactttgccaaggctctcccctctcgccccatccctgcttgcccgctcccacagcttcctganggctaattctgggaagggagagttctttgctgcccctgtctgga

SEQ ID NO: 6865 - DNA, 108 bp, Homo sapiens
atatggatgccccccaccctaccacacattcgaaaaacccggatacataaaatctacacaaaaaaggaaggaatcgaaccccccaaagctggtttcaagccaacccca

SEQ ID NO: 6866 - DNA, 530 bp, Homo sapiens
tcggcacgagggttattaagaaaagtcatatttttgcatttcagccaaaataaagaccgcctgtaataatctgttagaaacagataatacatgtgctgaaatccatatgtttcatatgatctaaactgtattttccaatttaaattaaaaatgtaatatagattcagaaaggttcatatttttctaatgacttcattctatattattttgttaggttgcataaagaagcaaggaattgtacttgtattaaaagatgaagaaagctattaggtatatttgtacatgactgcaaatgagtctatgcccgtttaaaagaaaagatggacactattttaaagtgagctttaatatgcttttatataaacaaatttgaagtacagtttagtttggttgtgtttacctaacaagtaccataagccttgtgtttgttcttatttgtataatcctaacctgtgacttaatgttgatgctttgctttgtcttttggctggcctaacctacattgacatgtacacagaacattttaaaac

SEQ ID NO: 6867 - DNA, 578 bp, Homo sapiens
  misc_feature 131: n = A,T,C or G
tcggcacgaggtcgggctgctggttgcgggctcgcgcctgccgcggatcaaaagccagaccatcgcctgtcgctcgggacccacctggtggggaccgcagcggctgaactcgggtggccgctgggactcanaggtcatggcgagcacggtggtgaagtacctgagccaggaggaggcccaggccgtggaccaggagctatttaacgaataccagttcagcgtggaccaacttatggaactggccgggctgagctgtgctacagccatcgccaaggcatatccccccacgtccatgtccaggagcccccctactgtcctggtcatctgtggcccggggaataatggaggagatggtctggtctgtgctcgacacctcaaactctttggctacgagccaaccatctattaccccaaaaggcctaacaagcccctcttcactgcattggtgacccagtgtcagaaaatggacatccctttccttggggaaatgcccgcagagcccatgacgattgatgaactgtatgagctggtggtggatgccatctttggcttcagcttcaaggcgatgttcgggaacc

SEQ ID NO: 6868 - DNA, 603 bp, Homo sapiens
  misc_feature 516: n = A,T,C or G
tcggcacgagggacggcttctctgtgttgatgagggccatgcagcagcaggtgcagaagctcaaggtcaaatcagcattcctgctgcagaacctgctggtgggccaccctgaacacaaagggaccctgtgctccatggggatggtccagcagctggtggccctggtgcggacagagcacagccccttccacgagcacgtgcttggagccctgtgcagcctggtgacagactttccgcagggtgtgcgcgagtgtcgggagccggaactgggcctggaggagctcctccgccaccgctgtcagctgctgcagcagcatgaggagtaccaggaggagctggagttctgtgaaaagctgctacagacctgtttctccagcccagcggacgacagcatggatcggtgaaaccaggtggcttcttgcccccttctccgtgggaaccccaggcctcttgcctccctccccacctacaaggccctctcccaagggatcgcagggcctaagtgcctggacccanggtgtgccagcccgtctctgtgcagtccctggaaggggcgctgagaaaggcaccagctccttggaccccacctcccatgctctcact

SEQ ID NO: 6869 - DNA, 422 bp, Homo sapiens
cggttcccccaacatgttcccgttcactctgcccccacccccaaaggctcagcctctaaatctcagactccaccaccatcttaatggctcagtccccttcaccccatttccaagtgcccccaggactcctgggccctgcttccctgaaccctgttctccaaaaccctgccccaggctaagggtggccagagaaggtcaccatgtaccacacaccaaagaagggggtcggcccaggggtgggcgacactaggcagcttcttcggcagcctcacggcagcaaccccagccttctcaaagcagcaggcgcctccaggctggtggccaacctagaaggcaggggtcaatctaacaaaaccctaacgttgacttttttccctggtggggcttcttctgtaacatgacttgcgaatatttatataaaa

SEQ ID NO: 6870 - DNA, 572 bp, Homo sapiens
tcggcacgaggagaagtttggagtccgctgacgtcgccgcccaaatggcctccaggctgaccctgctgaccctcctgctgctgctgctggctggggatagagcctcctcaaatccaaatgctaccagctccagctcccaggatccagagagtttgcaagacagaggcgaagggaaggtcgcaacaacagttatctccaagatgctattcgttgaacccatcctggaggtttccagcttgccgacaaccaactcaacaaccaattcagccaccaaaataacagctaataccactgatgaacccaccacacaacccaccacagagcccaccacccaacccaccatccaacccacccaaccaactacccagctcccaacagattctcctacccagcccactactgggtccttctgcccaggacctgttactctctgctctgacttggagagtcattcaacagaagccgtgttgggggatgctttggtagatttctccctgaagctctaccacgccttctcagcaatgaagaaggtggagaccaacatggccttttccccattcagcatcgccagc

SEQ ID NO: 6871 - DNA, 468 bp, Homo sapiens
caggaggctgcagttcagctttattttcatgcccctcatgtccagttaaggctcaagatcagccccggccacagtcccccagcactgggactcagcttcccacctggacagggcagggggttctcttgccaactcctgccagcctccttcagctgggggatccccagagaccgctgcctcaacgggagccacctggaagaaccagaactccagcctggagctgctcgtgggggccagccatcccccctgtccacacactcgtcccagctccatctccgggccccggcgctgaccgtggaggatctcagggcccaggctccttgtccaaggctccccttggtccctggctcctgagtcttgggctgcctgggcagtgcggaagtggacaagcttgcaggagacacaggggaaagaaggaagctcctccccaagagctggtgggtcaaaagagttggggggctggtggta

SEQ ID NO: 6872 - DNA, 574 bp, Homo sapiens; identical to SEQ ID NO: 2025
  misc_feature 388: n = A,T,C or G

SEQ ID NO: 6873 - DNA, 539 bp, Homo sapiens
  misc_feature 119, 366: n = A,T,C or G
acttcagggctgtgaggaaggggtgcctggagttctgcaggacgcggttctcggtgagtgtgtgggccacctcgtccttggccacgatgacttccttcttgaggatcttcatggcgtantagcggcctgtggccttctccttcaccaggatcaccttgccgaaagtgcccttgcccagcagcttcaggtactcaaactcgttcatggtcacgcggtgcttgggcttggccagggacacctccatctcttcagcccctgagttgtcactgggtgagcccgaccggaagtccatctcctcctcctcctgcttcttgaggccgtcagccacagtctggatggcggttgtccactcctcccgctcctcangagtctccacatggaaggtgcgttcgatgacagtggtccactgcaggcagcggatgatgaaggtgttgggccggggccgctccgtcttcatcagctggcactgcgccacagagaagttgttgaggggagcctcacgttggtccacatcctgcggccgcaagcttattcccttt

SEQ ID NO: 6874 - DNA, 643 bp, Homo sapiens
ttcggcacgaggaccaatctgaagtaggaacggccgagggttgggggagaggcccttctctaggcagggcagactcctcggggatttaagtgctgaagtaaactatgatgatgatgaggatgatggcgcaaatcactcccaagatgatcatcatcttgaggtttttccaccagtatttgcgcttgagcttggctgcgcttgtttcaaactgggaggcccccgcctggagtgcatctgcacggtcgtccagctccgacagcttctggtctcgctccaggaccttgtccacgttcaccctcatgatgtccaccacctcatccacctgggcctgggtctgctgcagtctcctgttactggtgaggtttggagggggtgcagggggaccaccctccccagccggggcagcagggggggccgtggcagcggtagcagacctgtccatcctcgtccctccagtcctccttttcgggaggaaggccacccgatgtaagccctggtctcggtccagccctgccgccgatgagctgcgtgaccttgagcgaggccccccggcctcagtttccccgcctgtcaactgagggcgacctcacagatgcgatccgggtcgacccgaaagacaggcggccgcaagcttattcccttt

SEQ ID NO: 6875 - DNA, 638 bp, Homo sapiens
tatttattagtgaataaataaaagtttatcattccgtacaaacgcactcattttccacaacagtttttacacgagccgcggtggcccggtggtggcacgtggggagcggccccgcgacggacgttctcgcgggcggcgtcacagcggctccaggtcctcgtccccgcatgcgtactcgtacaggtccacggcgcccagcggtgaggagcgtcgaagaagggcctctgggcagcggggagcgcagcactcagcttctgctccacagggctgagctcggcctcgaacccgtcctcccagggctctcccgcggtctcctcggccaccaggatgtcgtactcctcggccgcgtacttctcccagtccgagagctcggggccgccgctgtcaccgtccctgagcagggagatctgctctttctgctcgtggtcgaggtacttctcgatgttgaagaaggtgtcgaagaagacgttggccagcttgcagcgcttcaggtcctgcagcgtgatcttcccttcagtcctcggcttgaccaggtccagcatctggcagaggcagtcctggaatggcagggcatcgatgggcatgctgttcagccttcggcactggctctcgtagaagtactcgagctcgatcatgga

SEQ ID NO: 6876 - DNA, 399 bp, Homo sapiens
ggccgccaactggacggcgggcttcggccgcgggcccacgccgcccgcgcttgtgggcatccggcccgcagggccgggccgcggcgcgcgccgcctcctcgtgctggaagaattcaagacggagaagaggctgtgcaagatgttctacgccgtcacgctgctcttcctgctcctctgggggccctacgtcgtggccagctacctgcgggtcctggtgcggcccggcgccgtcccccaggcctacctgacggcctccgtgtggctgaccttcgcgcaggccggcatcaaccccgtcgtgtgcttcctcttcaacagggagctgagggactgcttcagggcccagttcccctgctgccagagcccccggaccacccaggcgacccatccctgcgacctgaa

SEQ ID NO: 6877 - DNA, 541 bp, Homo sapiens
  misc_feature 315, 363: n = A,T,C or G
ttcggcacgaggcccaggcagccagtgggaaaagaaaaagagaaagatggaactacagactctgggatcaaactagaacctgttccaggattgccaggagctcttcctcctcctcctgcagcagaagaagaagcctctgccaactacttcaacttgcccccaagtggtcctccagctgtggtgaacattgctctgccaccgccccctggcattgctccacccccacccccaggttttgggccacacatgttccacccaatgggaccaccccctcctttcatgcgggctccaggaccaatccactatccttcttangaccctcagatgatgggagctcatgctggaaaacacaacagcccctancaccttgtcaccactctggggctctgtggaagaaagggcacttaaaactcccagtaaatcttggaataaatatatttttccttcccttgtactttccatggtagctgaatgtgctcagatgtgagcagtcagagactgacagccatgctttcctatacttgttcaaaggatcgatgga

SEQ ID NO: 6878 - DNA, 532 bp, Homo sapiens
  misc_feature 463: n = A,T,C or G
cttctcttctgcttccatattacaggatggccatttggaaacacgatgtgcaagatcagtggattggtccagggaatatctgtcgcagcttcagtctttacgttagttgcaattgctgtagataggttccagtgtgtggtctacccttttaaaccaaagctcactatcaagacagcgtttgtcattattatgatcatctgggtcctagccatcaccattatgtctccatctgcagtaatgttacatgtgcaagaagaaaaatattaccgagtgagactcaactcccagaataaaaccagtccagtctactggtgccgggaagactggccaaatcaggaaatgaggaagatctacaccactgtgctgtttgccaacatctacctggctcccctctccctcattgtcatcatgtatggaaggattggaatttcactcttcagggctgcagttcctcacacaggcnagaagaaccaggagcagtggcacgtggtgtccaggaagaagcagaagatcattaagatgctcctgattg

SEQ ID NO: 6879 - DNA, 83 bp, Homo sapiens
tggcggataatcttatagcagatgccttgttagattggaatcgcatttcaacccaaaggattccctttatcattccttgcaga

SEQ ID NO: 6880 - DNA, 614 bp, Homo sapiens
  misc_feature 486, 532: n = A,T,C or G
tcggcacgaggcagaacttcacagtgacactggaccaggtcctgctccgctgcctggaacaccagcagcactggaaccacctggacgaagagcaggccagcccggacctctggagtgcccccagcccaaagcccggtgggtccgcatccctgcttctggcgccccacccaccccacacctgcagtgccagctccctcgtcttcagctgcatttcacatgccttgcaatggatcagccaaggccgagaccccatcttccagccacctagtcccccaaagggcctcctcacccaccctgtggctcacagtggggccagcatactccgtgaggctgctgccatccatgtgctagtcactggcagcctgcacctggtgggtggtgtcctgaagctgctggagcccgcactgtcccagtagccaaggcccggggttggaggtgggagcttcccacacctgcctgcgttctccccatgaacttacatactangtgccttttgtttttggctttcctggttctgtctaaactggcctangggccagggctttgggatgggaggccgggagaggatgtcttttttaaggctctgtgccttggtctctccttcctcttggctg

SEQ ID NO: 6881 - DNA, 400 bp, Homo sapiens
gctcggaaggtgcgtggatgcccttgctgtcctggggtggccctgtgggagccggatgaggttgttggacaagttcaggtagatgagtctcgggagcgcggccaggtcggggaaatggagcagtttgttctcccgcaggtcaagccaggtgagctggaactcagcctggggtgggtaggccgtctgaaaggcctcgatgctgttgcagctcaggtctagcacccgcagctgctggaggctgaagtcggagatgcaggtgagggaattcctggagaggttgagatgggtcaggcggggcaggccctcgaaggcgccatcctcgatgtccatcagcacgttgctatgcaggtcaagctgctccagcgcaggcatgtcccggaaggtgtggcgggtgagggag

SEQ ID NO: 6882 - DNA, 56 bp, Homo sapiens
tacctttagtgggccctttatgtggtcatcctgaacttccactgttgaagaatcat

SEQ ID NO: 6883 - DNA, 515 bp, Homo sapiens; identical to SEQ ID NO: 2026

SEQ ID NO: 6884 - DNA, 467 bp, Homo sapiens
  misc_feature 429, 431: n = A,T,C or G
taaatagtggcaactggtatttattacaattatatacagtcctatcttccgttctgaggtctatacatgatcacacaaatgaacatgtgtttcctggggggaaggacagagctggctgttggtcaggaaggccctgctgcctggctcctcctccgggtgagccccatctcgccatgggattagctgaaccattacacggcaagcgggggcatcggaagcgcagtaggtttcatttgtctgggaggacgacggggcatgagtggggttggggctggggacaggcacctgacgggtccagggccgggccacgggagggagggggatgctagctctggccatgcgtggtgtcacggtagtcaagacactcagcaaacacaccctgggcaaggcgtctgtccgggagagggggctggggaggggcttgggcgngngcttcgctgccttcagcctgacttgagatcaaagcc

SEQ ID NO: 6885 - DNA, 601 bp, Homo sapiens
tcggcacgagggtgaaaaggcagaagaattaaaggacattgtgcctgaaaagaaagcctttaaatgaaaatcagcctgagataaagcatcagtctcttctccagaaaaatgtgagtaagagggatccacccagcagtcatgggcacagtaacaagaaaaatctattaaaagtagaaaatggtgttacacgaagaggtagatcggttagtcccaaaaagccagccagtcaacattcagaggaacatttggataagattcctagtcctctaaaaaataaccccaaaagaagacccagagatcaatccctcagccccagcaaaggggaaaataaaagttgtcaggtcagcaccagggcaggctctggacaagatcagtgcagaaaaagcagaggtcggtcggccagcccaaaaaagcagcaaaaaattgaaggaagcaaagctccatcaaatgctgaggccaaattattagagggtaagagtcgaagaatagcaggctatacgggcagtaatgctgagcagatcccagatgggaaggaaaaatcagacgtcatcaggaaagatgcaaagcagaatcagttggaaaaaagcagaacaaggtctcc

SEQ ID NO: 6886 - DNA, 460 bp, Homo sapiens; identical to SEQ ID NO: 2030
  misc_feature 385: n = A,T,C or G

SEQ ID NO: 6887 - DNA, 600 bp, Homo sapiens
  misc_feature 80, 563: n = A,T,C or G
tcggcacgaggtaaactcatcgccaccacccactgctgcatcaaccctctcctatatgcgtttcttgatgggacatttancaaatacctctgccgctgtttccatctgcgtagtaacaccccacttcaacccagggggcagtctgcacaaggcacatcgagggaagaacctgaccattccaccgaagtgtaaactagcatccaccaaatgcaagaagaataaacatggattttcatctttctgcattatttcatgtaaattttctacacatttgtatacaaaatcggatacaggaagaaaagggagaggtgagctaacatttgctaagcactgaatttgtctcaagcaccgtgcaaggctctttacaaacgtgagctccttcgcctcctaccacttgtccatagtgtggataggactagtctcatttctctgagaagaaaactaaggcgcggaaatttgtctaagatcacataactgaggaagtggcagaactgattctccagccctggtagcatttgctcagagcctacgcttggtccagaacatcaaactccaaaccctgnggacaaacgacatgaaataaatgtattttaaaacatc

SEQ ID NO: 6888 - DNA, 619 bp, Homo sapiens
tcggcacgaggctgtgggtgacgggtcccgtgctggcagtcatcctcatcatcctcattgtcatcgccatcctcttgttcaaaaggaaaaggacccactctccgtcctctaaggatgagcagtcgatcggactgaaggactccttgctggcccactcctctgaccctgtggagatgcggaggctcaactaccagaccccaggtatgcgagaccacccacccatccccatcaccgacctggcggacaacatcgagcgcctcaaagccaacgatggcctcaagttctcccaggagtatgagtccatcgaccctggacagcagttcacgtgggagaattcaaacctggaggtgaacaagcccaagaaccgctatgcgaatgtcatcgcctacgaccactctcgagtcatccttacctctatcgatggcgtccccgggagtgactacatcaatgccaactacatcgatggctaccgcaagcagaatgcctacatcgccacgcagggccccctgcccgagaccatgggcgatttctggagaatggtgtgggaacagcgcacggccactgtggtcatgatgacacggctggaggagaagtcccgggtaaaatgtgatcagtactg

SEQ ID NO: 6889 - DNA, 622 bp, Homo sapiens
gtttctgggggcagtgtgagctttgagggttggaatattgggaagcattccttagtttcctcaactagcctggaaagttaggagtctagggtaattaccccccaatgagtctagcctactattcactgctttgtgtgcatttttttctccctctttaaaaaaccctttaaaagaaaaaaaaaagtagatagtgctaaatattttagctcatgaaacttggttaggatggctgggggtacaagtccccaaactacctcttgttacagtagccagggagtggaatttcgtcaaccggtacttttaaggttaggatgggacgggaaaagtgaagcaggatattagctccttataccttctcccttccatttctgagatctcacattccatctatcacagggttttcaaagagatgctgagggtaacaaggaactcacttggcagtcagagcatcatgctttgaggtttggggtgctcaggctgggagggtagaatgccattccagaggacaagccacaaaaatgccttattttgagctcgtatttacccctgctgataagtgacttgagagttcccggttttttcctcttgtccttccctcccttctgtccttccatgtgtgggg

SEQ ID NO: 6890 - DNA, 97 bp, Homo sapiens
gctgctaaaggacgacagaagggtactgctgcaagaagacgacgcaagggtaccgctgctagaagactacagaacggtacggctgctagaagactac

SEQ ID NO: 6891 - DNA, 319 bp, Homo sapiens
gggatgtttccaaatttacttgattttcaagacttacactagaactgtgagaacagggtaataaataagcatatgtattaatatcacctttggtcaactcttgggtagccccaacggtagtgtaggaattaacgtaatttttcctactaaaagtattggatttgttttgagagaccacagttgaaaatcattgacatacaaagtttaaaaattgttaggttaaaaaattttaaatgcatttgaagtggttttatagaaaaataattatctaacttggtttatattgacaggttgttttcttggataagaactagacgaa

SEQ ID NO: 6892 - DNA, 160 bp, Homo sapiens
gtgaccttgagtgatgttatttctcagtacgcatatgtgcttattaaggtttctgcttatagcagcctgatagtattccatcatgctaactctctgactatattctactctaagctcaccttactgattgattgcctcacgcagagagtaaatacttact

SEQ ID NO: 6893 - DNA, 550 bp, Homo sapiens
  misc_feature 468: n = A,T,C or G
acagaaggggatatgggttagggattctccatggactccagaaaccctaaatacaattttgaggttttccaataataccatagcagaaatgtccaaggggttgggggaagatattaccttgagaaaacagaaatgtaaaggatttttgaccttatatatgtgtgtggttttgtttttgtttttgttcttgagagagtctcactctgtcacccaggctggagtgcagtggcgtgacctctgctcgctgtaacctctgcctcctgggttcaggtgattcttctgcctcagcctcccaactagctgggactacaggtacaccacacccagctcatttttttgtatttttagtagagacaggagtttgagaccagcctggccagcatggtgaaaccccgtctctactaaaaatgcaaaaattagctaggcgtggtggtgcatgcctgtaatcccagctacttgggaggctgnagcaggagaattgcctgaactcatgaagcggaggttgcagtgagccgagattgcgccactgcagtctagtctgggtgacata

SEQ ID NO: 6894 - DNA, 631 bp, Homo sapiens
acatttatatttaattaaacatgaggtccatttagattttgggttgattcattcatctgtgattactgagcatttgccatgtgccagtcaatcagtattaggcaccagagttaccacagtgagcaagagagacatggaccccttctgcaagatgcctagacaattaaatggccaatgaaactaaagtgaggtaagggttctgatgtgaaaagctgagggtgtgatgaggacaagtggcagaaagttcacctggcttggtggaagggaaggtcagagaagacctcttagaggactcagtaatgtccattgaggattttaggttgaagggaatgtttgaagtttgagggcccttttgaggaccaccaagaacttcactgtgctgtaggatattgagcaggaggtgaagctagagagatgtgtaggccacattgcagagtttgaacttggggcaatgggaagccattgaagggttttaaacaacccaagtggtgcattcttctgtaaatgttagagagatcagtggctgccctgcacatcaaaggggagaacgattggagacaggcagattagatggaaggacggagttgtactccaagccaaagatgatggagagtgaattaagttagtgcaa

SEQ ID NO: 6895 - DNA, 443 bp, Homo sapiens
gacagaaggggctcctccccagccatggcgttcacgttcgcggccttctgctacatgctggcgctgctgctcactgccgcgctcatcttcttcgccatttggcacattatagcatttgatgagctgaagactgattacaagaatcctatagaccagtgtaataccctgaatccccttgtactcccagagtacctcatccacgctttcttctgtgtcatgtttctttgtgcagcagagtggcttacactgggtctcaatatgcccctcttggcatatcatatttggaggtatatgagtagaccagtgatgagtggcccaggactctatgaccctacaaccatcatgaatgcagatattctagcatattgtcagaaggaaggatggtgcaaattagctttttatcttctagcatttttttactacctatatggcatgatctatgt

SEQ ID NO: 6896 - DNA, 415 bp, Homo sapiens; identical to SEQ ID NO: 2036

SEQ ID NO: 6897 - DNA, 463 bp, Homo sapiens
gtaaactcaagtgggaagagctttgaatttgtagtttcagctgacataagcctaaaattcagctctacacacagcatcatggccacattaaattgcttaacctttttgattttaattttccttacatataaaacatggaaataatagctaatatataaggccatcagttaactgaatgcttgccatgtgccaggcaccactttaaaataacatctgattttcctcatttcagtgataaggaaccagaggctgggattacaggcatgagccactgcacccagcctgttctttttattcttaaatgcatccaggaacacgctcccaggcactatgcccagcgacttcttgccagcattttattacaggccacttctgacttataaccaaattgattcctggatcaaagcctttgcaagccaaccacagttgaatctttatttcctgtcagcacaatttccacatt

SEQ ID NO: 6898 - DNA, 479 bp, Homo sapiens
tatgaatataaaatttgaaggtttggccaattagtacaagtctcatgatataatcactgcctgcatacatatgcacagatccagttagtgagtttgtcaagcttaatctaattggttaagtctaaagagattattattccttgatgtttgctttgtattggctacaaatgtgcagaggtaatacatatgtgatgtcgatgtctctgtctttttttttgtctttaaaaaataattggcagcaactgtatttgaataaaatgatttcttagtatgattgtacagtaatgaatgaaagtggaacatgtttctttttgaaagggagagaattgaccatttattgttgtgatgtttaagttataacttattgagcacttttagtagtgataactgtttttaaacttgcctaatacctttcttgggtattgtttgtaatgtgacttatttaacgccttttttgtttgtttaagttgctgctttag

SEQ ID NO: 6899 - DNA, 184 bp, Homo sapiens
ggactcctccctggctggggagactgcttgtgtggaacaggctggggaggaagaggataatcaacatttgctgcttcctaacgtgtgtgccaggcattgcactaaatgctttacattggcaaggcacagtggctcacgcctgtaattccagcactttgggaggccgaggtgggtggatcacctg

SEQ ID NO: 6900 - DNA, 413 bp, Homo sapiens
cattttttattaacagcatcggtagcagaatggtgtccagccagtagcagctcctctcccctggtgtcacaaacctcactgcagagtcgtgcccatcaaaatgggcactccaaggagtgttgtatgtgaaatggaatatccacagactagcatgtcttttttttttttattataatactttaagttttagggtacgtgtgcacattgggcaggttagttacatatgtatacatgtgccatgctggtgcgctgcacccactaaactagcatgtcaaaagggagtggctgggattatagacaacctggacccagggtaccgaaagttttactttttaaaattgggaatgtttgatgttaaagttttaggggtcagtaaatggcaaagccctgttacctgaccaggttcaaaatca

SEQ ID NO: 6901 - DNA, 472 bp, Homo sapiens
ggctgagtcccaggccctctctatggccacggctagcctccagatgggcaatggtgccccagctgggccacagccagggagcgaggcaggtgccgggagagccctcagtgacaggcggcagaacaaaggccacccagcacctgctgcctaggtagccctcaaccacctcagctgaacctgtgcattacccacaggcagccaggctcccgagtgggggcagggactcgcttcccaagtagcacctggctggggacacgggaagtgaggtcagcagtgcgcaggcagctgagtggctctttctcaagggaacacgagtagcagactcagaggggccaggaccattgagagggaaggcataggggatagaagttcacttcactgcatgtgttcacatgcctggcaatgtgctacgcacttttcatacaacattctcaatctcatcttcacaaacctctttgggcatctgtattaa

SEQ ID NO: 6902 - DNA, 493 bp, Homo sapiens
gggaaagtaggcagggctgtgttcctttgtgtagtctgtatatattttccatatgtagagccctgattaacttcaaggacaaacactggctggagaaagccagactgatgggaatgagactttggccaaaaatcccaaaacatcattttcaatcagtagagaagtgcttagggttgaaaattgatttcatttgctactgaatttggtaaatcctgggtaacttttatcaagatgaagacattttaccctacctactctagaaatatacaacaatgttatattttacactccttggaaacatttgaggaaaaaaatgcaatttgcacttcactttgttggaatatcccatagcactcaataaactcagctgctagagtgccgatgtcaggagggctgtgtcgggtaatgcgtgtggctgaatgggcataaccactgtggcttcttgtgctgcagaagctcgttgacaagactgaggaggatttcaagagcaacc

SEQ ID NO: 6903 - DNA, 51 bp, Homo sapiens
attgaagtcacttttgacattgatgccaatggtatcctcaatgtctctgct

SEQ ID NO: 6904 - DNA, 446 bp, Homo sapiens
gggcccaccctttcaaacaaatttggttgtagtttgctataataatatactaaatctatgtttatttgaaaggagcctttaccttttaaagcaaaatgcactttccttaaatataaaagtaatatggtttactttaacatttaaagttcaccttatctggggaggcagaaggaattttcatagtgcttactgtgttaattattatgagagatgaaccatatgtgataggtaaagtacatgtgtaagaaagacaaaaaaattttcctctttttataatccatgaaattcgaaaacagaaaattattcaaagaataggcaaatgtcatgacagaacttagtgtgagcaagtcattgagaattaaaatctaacttttcaggtcagagagccttgaaatacttacaataaagttataaaggcctaggtatttttctttcttttttttttt

SEQ ID NO: 6905 - DNA, 604 bp, Homo sapiens
acagaaggggtcaaactatacagctgtctgtcctacagttttttattatggtgtagctgtatttaaatacaaagagggccaggtgcagtggctcacacctgtaatcccagcagtttaggaggccaaggcaggggatcacttgaggtcaggagttcaagaccaccttggccaacatgatgaaaccccatctctactaaaaatacaaaaattagctgggcatgatggcacaagcctgttatcccagctacttgggaggctgagacaggagaatcacttgaaccctggaggtggaggttgcagtgagccgagattttgccattgcactctagcctggacaacagagcgagacttcatctcaaaataaataagtaaataataaaaataaaaagagatctaattgcatctgtcttttaaaattgacttatcttttaagttatttgacatgttttatagtttttataaaagtcgtaggaataggaaaaggatttacatatatcccttttcgcatctgaaagctgactaaataaccagtattacaggctggtcatagtggctcacgcctataatcccagcactttgggaggctgaggtgggcggatcacct

SEQ ID NO: 6906 - DNA, 590 bp, Homo sapiens
  misc_feature 541: n = A,T,C or G
acagaagggagttaaaaacatgccattttcatttctaacattttaagtatatggtttagaagtggtaagtatagttctatttttttttgcaataggttttagataatttttgtcttacaaaagtaaaagtgaatactcattaattctgaaacaagttagttagcttgctttagttagatagcaagagaagggtccctggaaagtccctggcccttgggtcagtgtctcatccctgcataatataaaaggaatcctggaaaaaatcaagctgcagacactaacaaggtaactagcacatggtgttgtgcttggagacctgcccatggctgcacagacagaaaaacctctggcatatttggataaaaacttgtacaaacctccagctcactgagataagggaacaagaccgacctggcatagaaatgcctttgtttgtccaggcacagtggctcatgcccgtaattccagcaatttgggaggcagaagtgggcggatcacctgaggtcgggagttcgagaccagcatgaccaacatggagaanaatacaaaattagccgggcatggtgcctcatgcctgtaatcccagctac

SEQ ID NO: 6907 - DNA, 494 bp, Homo sapiens
gatgctgaagaatatgacccgtcccatggaaaacattcaaaaatgtgtgtagcgctttcttcccaagggtgtgtgtgcgcatattttaacactaattcactttctacttccgttgctatcctttctgtgagtctttctcagaatctcagaaaagaaactaaattgttcactctagttatcaatgctgtactctatacctggaatttgctaaaagggcagattttaagtattctcaccacagaaaagagaaaagaaaatggtaattatgtgacgtggtggacatgttaactagctttattacggtgagcatttcacagcggatatccagtcatcacgctgtacacattaaacatgtacaattgggttttgttgagacaaggtctccttctgtcacccagtctggagtgcagtggctcagtcatggctcattgcagcctcgacctcctgggctcaatccatccttccccctcagcctcctgaaaagctggggccgc

SEQ ID NO: 6908 - DNA, 576 bp, Homo sapiens
  misc_feature 497: n = A,T,C or G
gattcacgagtgccggctccgcggtgagagctgccttgtacactgcctggccggggtctccaggagcgtgacactggtgatcgcatacatcatgaccgtcactgactttggctgggaggatgccctgcacaccgtgcgtgctgggagatcctgtgccaaccccaacgtgggcttccagaaactgctccaggagtttgagaagcatgaggtccatcagtatcggcagtggctgaaggaagaatatggagagagccctttgcaggatgcagaagaagccaaaaacattctggccgctccgggaattctgaagttctgggcctttctcagaagactgtaatgtacctgaagtttctgaaatattgcaaacccacagagtttaggctggtgctgccaaaaagaaaagcaacatagagtttaagtatccagtagtgatttgtaaacttgtttttcatttgaagctgaatatatacgtagtcatgtttatgttgagaactaangatattctttagcaagagaaaatattttccccttatccccactgctgtggaggtttctgtacctcgcttggatgcctgt

SEQ ID NO: 6909 - DNA, 608 bp, Homo sapiens
gacagaggggcttttttgcgggaacaagatggcagcccccatacctcaagggttctcttgtttatcgagggttttgggctggtggtctcggcagccagttctggtgactcagtccgcagctatagttccagtaagaactaaaaaacgtttcacatctcctatttatcaacctaaatttaaaacagaaaaggagtttatgcaacatgcccggaaagcaggattggttattcctccagaaaaatcggaccgttccatacatctggcctgtacagctggtatatttgatgcctatgttcctcctgagggtgatgcacgcatatcatctctttcaaaggagatgatagagagaactgatagagagaactgaacgaatgaagaagactatggcatcacaagtgtcattttattggctgggtgcggtggctcacgtctgtaatcccagcactttgggaggctgaggtgggcagatcacctgaggtcaggaatcgaaaaccagcctgaccaacgtggagaaacctcgtctctactaaaaatgcaaaattagccgggcgtggtggcacatgcctgtaatcccagctactcaagaggctgaggcaggagaatcgctt

SEQ ID NO: 6910 - DNA, 660 bp, Homo sapiens; identical to SEQ ID NO: 2044

SEQ ID NO: 6911 - DNA, 233 bp, Homo sapiens
gaggcagaggtcgcagtgagccgagattgcaccactgcactccagccttggggagagagggagactctgtctcaaaaaacatatatggagtaattatatatatcataaaagatgtataagtagaaataaagcactaggatatttaggattcaaatggtttattttgccatatgatattaaaagttgctttgaagtaagagcattttgtgttttccagtgaatgacagtggact

SEQ ID NO: 6912 - DNA, 645 bp, Homo sapiens
gatttggttaatggctccgttttcagcattgcaaataacaatctcagctactgggatgcccccctgggaagttcttatatgtgcaacaaagagcagactgtttcagtgtctggagcatttcaaataaatacctttgatctaagggtccagcctttcaatgtgacacaaggaaagtattctacagctcaagactgcagtgcagatgacgacaacttccttgtgcccatagcggtgggagctgccttggcaggagtacttattctagtgttgctggcttattttattggtctcaagcaccatcatgctggatatgagcaattttagaatctgcaacctgattgattatataaaaatacatgcaaataacaagattttcttacctctcagttgttgaaacactttgcttcttaaaattgatatgttgaaactttaattcttttatcaatcccagcattttgagatcagtctttattaataaaacctgttctctttaatcagcttaaaatccaaagtgtcatatttactggtcctggagacaaacttgttcaaaagaacatcaacgtgcaatgttttaaggtctatcttaagaagccctggccaaattttgatcctaaccttgaagtatgccttgaacttattaacatg

SEQ ID NO: 6913 - DNA, 466 bp, Homo sapiens
gacgcgcgggctcgcgcttcggtttccccagacctgctcgcagcaccctgctgtcttcccggtccggcccgctgcccgcggctccagcaccatgctcttctattcttttttcaagtcccttgtgggcaaggatgtggtcgtggaactaaagaatgacctgagcatctgtggaaccctccattctgtggatcagtatctcaacatcaaactaactgacatcagtgtcacagaccctgagaaataccctcacatgttatcagtgaagaactgcttcattcggggctcagtggtccgatacgtgcagctgccagcagatgaggtcgacacacagttgctacaggatgcggcaaggaaggaagccctgcagcagaaacagtgatggctcctcctcctcttcccctccctctttcattggtgacccataaccccaagtcccagcccagaacccctaacccccaatacttga

SEQ ID NO: 6914 - DNA, 426 bp, Homo sapiens
gacggaggtgaggtttgttaccgcgattctgagaggtgggcttttagtccctccagacctcggctttagtgctgtctccgcttttctttcaccttcacagagaattctgcttggtcagaatcgtgatggcattgtgttcagcactgatgactattttcaccatcaagatgggtacaggtataatgttaatcaacttggtgatgcccatgactggaaccagaacagaggtttgttttgggctaagtgtcccaggatagaatatttggctaggagtcaaaagacctagattttattttcagcttaggtttttaccagctgaatgactgtaggcaagccgtttaaatagctttgagacctaatttctccatctgttagaggtggtgataattatacttgccctacctgatcagggtttttgtgaaaagc

SEQ ID NO: 6915 - DNA, 502 bp, Homo sapiens
  misc_feature 411: n = A,T,C or G
ggttataactatcttttgggaaaggatgccattcctaaaattaactcccttctggcaaatttctccctgccaggtacctaacctccccagcatgatgtttttctaccatttgccttttggattcctagaagtattttatttggatgtgactggtttgaatttggagcttttagagcaagacatttggaaagatagcatgtgagtgaatttatgtatggaatgaatgacatgtgagaaaactcttgttagacatgatgtttcctatacagaagaaaagatacaaacttgattgcttcagtaaaaacacttttagagattgtgtttccttttttgtgagacagcatctcgctccgccacatacactggagtgtagtggcacaatcttggcttactgcaacctctgcctcctgngttcaagtgattctcgtgccacagctacccgagtagctgggattggatgcacccaccaccacacccagctaatttcgtatttttagtagag

SEQ ID NO: 6916 - DNA, 496 bp, Homo sapiens
cagcagcaggaggaggaccgcagcaagctgagatctgtatctgtggacctgaatgttgatccctcgcttcagattgacatacctgatgcgctcagtgagagagacaaagtcaaatttacagtgcacacaaagaccacactgcccacgtttcagagcccagagttttctgttacaaggcaacatgaagactttgtgtggctacatgacactcttattgaaacaacagactatgctgggcttattattccacctgctcctacgaagtccgactttgatggtcctcgagagaagatgcagaaactgggagaaggtgaagggtctatgaccaaagaagaatttgccaagatgaaacaagaactggaagctgagtatctcgctgtgtttaagaagactgtttcctcccatgaagtctttcttcagcggctttcttctcaccctgttctcagtaaagatcgcaactttcatgttttcctggaatatgatcaggatctaagtg

SEQ ID NO: 6917 - DNA, 481 bp, Homo sapiens
gggccgctgtgcccatcacttccggtcgcgccagccgcccgttgccagttctgcgcgtgtcctgcatctccagtatggaatgtatgtttggccctgtgctgtggtcctggcccagtacctttggtttcacagaagatctctgccaggcaaggccatcttagagattggagctggagtgagccttccaggaattttggctgccaaatgtggtgcagaagtaatactgtcagacagctcagaactgcctcactgtctggaagtctgtcggcaaagctgccaaatgaataacctgccacatctgcaggtggtaggactaacatggggtcatatatcttgggatcttctggctctaccaccacaagatattatccttgcatctgatgtgttctttgaaccagaagattttgaagacattttggctacaatatattttttgatgcacaagaatcccaaggtccaattgtggtctacttatcaagtt

SEQ ID NO: 6918 - DNA, 440 bp, Homo sapiens
acagaaggggattagggggctaagcatttagttactgcatggggcagccaataataaaatcacagccctgtgtatttacctccacagtgtgtgctgataagtgcaaaaggtttgtgcaaattcttttgaagttatattgtaaccatggtatatgtattgaaaacttggccattttaccccattcctatgaatgaaaactatttggtgaatcagaggatagtctgaattgggatatgaaggccagtataagtgtcagttagcaaagtcagctctagtttagttttttttttttttttttaaggcgtaccattactaaaagtatagctttgggaaccttgtagcatcttaaaaacttttaaagggttgacagctattggcaaattgactaatacagagaactaaactttggttcatgtattcaatgtctaaatgaaaaatgg

SEQ ID NO: 6919 - DNA, 366 bp, Homo sapiens
tatttcagaaaatgtttcctcattgccatccccacaagattttaattccacacatatactgtatatctctttatgtactatatgtatatctgtactttgtacataaaaaggctaagtatagagcttactgtttttattcaatacaggctcaagaagagccgaataaagcatttaagctgaaaattaaattaaaaattaaagacctattaataccaaatttagctttgcacctatacttgctgaataacttttcatgtaatttatttacttatatatatatatatatatatcatcacaatgtgtcaatttacatacataaattagcgattcataaaaaacaacagcgatataataaattcttataaa

SEQ ID NO: 6920 - DNA, 284 bp, Homo sapiens
gtgccctttacttgctggtgaggtgtcataggtagaaaagggctggcccttcagatctgggggtgtggtgagtggcaagtaagggcagaattttaggagaaccagagtcacccgctggctctactgagattgttacacccagaatccttttgtgttttttgtggttttttttttttgagggggatttttgctttgtcacccaggctgaatggctggggggcaatttgggttaattgaaacctttgtttccggggttaaaccttttttcctgtttaaccctcccc

SEQ ID NO: 6921 - DNA, 646 bp, Homo sapiens
  misc_feature 577: n = A,T,C or G
acagaagggatcgccgcggggcggaggcgacagtgtctagcgggagctccgcgtgtagctacgccggccgcctggctttgagacaacgtgattctccgcagctggtcgcctacccgtgatgttctgcccacgtcgagacctgagctgaaatggcagacgatctcggagacgagtggtgggagaaccagccgactggagcaggcagcagcccagaagcatcagatggtgaaggagaaggagacacagaagtgatgcagcaggagacagttccagttcctgtaccttcagagaaaaccaaacagcctaaagaatgttttttgatacaaccaaaggaaagaaaagagaataccaccaagaccaggaaaagaagaaagaagaaaattactgatgttcttgcaaaatcagaaccaaaaccagggttacctgaagacctacagaagctgatgaaggactattatagcagcagacgcttggtgattgaattagaagaactgaacctgccagactcctgtttcctcaaggccaatgatttgactcacagtctttcctcatacctaaaagaaatttgtcctaagtnggtaaaacttaggaagaaccacagtgagaagaaaatcgtcctgatgctgatcatctgcagctcgggcgt

SEQ ID NO: 6922 - DNA, 626 bp, Homo sapiens
gacagaggggacgctgtttttccttttcgttggcgctttatagctacacagtgctatgccagagccagcgaagtctgctcccgccccgaaaaaggctccaagaaggcggtgactaaggcgcagaagaaagacggcaagaagcgcaagcgcagccgcaaggagagctattccatctatgtgtacaaggttctgaagcaggtccaccctgacaccggcatttcgtccaaggccatgggcatcatgaattcgtttgtgaacgacattttcgagcgcatcgcagggctaccctgagaggaatctacatgcagagaagttcaggagactgaactaacggaacgtcaggaagcgctgcgggctggagagctgctgttggaacagggaggagttctccgggccgcaccctgcctccgtcccgcaggtggagtggctgaaacttctcagcaggcgcatctacactagtgacctgaggagagaaaccctaaccccacaatggctgcatcttccctgaagacgagactgatgctcatctttgaaatgaagggcagtgtgtgcatttctccatgaaggtatccagaaacagccatgccagagctgctgtggggtggctgaactgctattccttttct

SEQ ID NO: 6923 - DNA, 525 bp, Homo sapiens
ttgccaagtcttacttcagaaaggcagatggtgttttgctgctgtatgatgttacatgtgagaaaagctttcttaacatacgagaatgggtagatatgattgaggatgcagcccatgagactgttcccattatgctggtaggaaacaaggctgacattcgtgacactgctgctacagagggacaaaaatgtgtcccagggcactttggagagagactggccatgacgtatggggcattattctgtgaaacaagtgccaaagatggttctaacatagtggaggctgttctgcaccttgctcgagaagtgaaaaagagaactgacaaggatgacagcagatccattaccaatctaaccgggaccaattccaaaaagtcaccacagatgaagaattgttgcaatggctaaatcccaaacatccttggcctgtgaagtcttcatttccagaatactgaatttgtgtgacttatttggctcttaacagagtggcacatcctactgacactgtcctatggagagttaccgt

SEQ ID NO: 6924 - DNA, 489 bp, Homo sapiens
taaataaaaaatcaaaagtttcaaaatcaccatgttggaggattattgatgaactttggcaatttgtatcagcaatttgaactttgacaatttgtatattcagttttgggtgggccaagaaataaattgctgtgtgattgagatttatgctggaaacagctcagttttaatagaatatccacatgtcatcactatctttattcttctcttcattccttaaggaaaggaaccatatatttttctttattagcacctgttcagcgcctagcagtatactttttgatgaatgaatgaaagggtgtggtatgtatgaggagtacaaggaagagcattacagattgagggaaccccagggaaatcaggtacttattcttgttatgcactttaagcttttaaagggaaagaaaagtaaagaatacaatgagaaggaaatgttatagaattctagaacttttgtaccactttatagcagaatgccttgcacatagt

SEQ ID NO: 6925 - DNA, 76 bp, Homo sapiens; identical to SEQ ID NO: 2053

SEQ ID NO: 6926 - DNA, 90 bp, Homo sapiens
cttgggaggcttcccctcactatcctaccccacccgctccttgaagggcccagattctaccacacagcagcagttacaaaaaccttcccc

SEQ ID NO: 6927 - DNA, 406 bp, Homo sapiens
gccgcctccggaactaaacggggtgaggtcacattcggttatctctaacgttggaaaacgatggagctaacacccattatggagattaaccacttttcatcaggtttttaacttaagtcgtgaggaatacaacggtgaacacaagattcattttattttcatcaccatgggacgtatcctgttgttgagttctctgggtcagacctctgaagacttctcagatggatcctagtctctgggcttgccctgaaattactcgctgctcagggagagagttgaaatggttggcatcctcccactctgttgctccggctgtgtcccctcgctctgttgttccagctatgtcccctctgttgctccaactgcagctcattctgttagagttcctcattcagctggtcactgt

SEQ ID NO: 6928 - DNA, 378 bp, Homo sapiens
gtccccagagccgagccagggtgtgagtgcatgtgaacgttgagtacacatgagtgcgtgtatgcccccaggctgggtcagctcttctgtggattgcatggcgtgtgattaaaagcccatgtgttcccacacatccacatcatgggaaggttaatgtgtgcctccttggaactgggtgttggtgtccatggaacttcctctctgtatctcaggtcagtaggcgcagaaacgcctcatgatgaagattcttgagccccatttccaagacccctcacatccaatcctgtcctgtaacatccatcaaggatttccacaggggtgactggtgcccacccaagactgcaccagtgcctgctcgttgaggagagtaactgctgg

SEQ ID NO: 6929 - DNA, 535 bp, Homo sapiens
gacatagcactgggtgaaggtcaggttgacatgcttgcattcctggcacgtgttgacctgggtacttcctgagtaccaggtataccaggatagctggccgggccatctgagcccttcagagagccccaggaggatgctagttacccatctgtggcacctgatttctacctgtgacgtcatctgtcttgttctcttttaaaacatggcattgtgccagttaccagtgattgccagtacctcttccctgccaaggttgtctctcgcctggtgaaatgggtgacaattgcccatgaggattacatggagctgcacttcaccaaagacattgtggatgcgggactggctggggacaccaatctctactacatggcgctcatcgaaaggggcacagccaaactgcaggccgctgtggtgttgaaccctggctactcctccatcccacctattttccagctctgtttgaactggaaaggggagaaaaccaaccaacgatgacaacattcgggccatggagggcgaagtcaatgtgtgctac

SEQ ID NO: 6930 - DNA, 79 bp, Homo sapiens
caataatccccatcctccatatatccaaacaacaaagcataatatttcgcccactaagccaatcactttattgactcct

SEQ ID NO: 6931 - DNA, 521 bp, Homo sapiens
acagaaggggaatgaagtcagccagaacttccagaccaccaaagacagtgtccagctaaaggagcatctagaccggcttatgaatcttccgctgcattccgtgaagatggaaccttgttatactaaagtcaacctgcttcacgagcgcctgcaggatctcaagagccacttcagattcccccacattgatctggtggttcagaggacacagaactacatgcaggagctaatggagaatgcagtgttcacttttgagcagttgctttccccacatctccaaggagaggcctccaaaactgcagttgccattgagaaggttaaactccgagtcttaaagcaatatgattatgacagcagcaccatccgaaagaagatatttcaagaggcactagttcaaatcacacttcccactgtgcagaaggcactggcgtccacatgcaaaccagagcttcagaaatacgagcagttcatctttgcagatcataccaatatgattcacgttgaaaatgtctatgaggaga

SEQ ID NO: 6932 - DNA, 501 bp, Homo sapiens; identical to SEQ ID NO: 2057

SEQ ID NO: 6933 - DNA, 90 bp, Homo sapiens
gccatacgcttttcttgagtttgacagcatcattcagaaagtgaagtggcattttaactatgtaagttcctctcagatggagtgcagctt

SEQ ID NO: 6934 - DNA, 435 bp, Homo sapiens
acagaagggataaaataagaattataaaatgtaaagtgaatggaatgcattgaaatttgatcctgtagcaaagtcatcccttttgaattttgaacatttgtttaatgcctcttttccaagcatattttgaatattcagagataaatgagcaagttactgccatcaagaaactcctatttttctaggagagaaaggggaaagacgtgtagttgtacacatatggtttgctctaatagagtggtataaatcaaatgctattggtatacaaaaggacaaattttgtcagccaagtgtatgggtatcttcaaagagcacaggtgccatctgttctgagctaatgacccattgaagaaggccacaccaaatttgggggaaaagcagcataaacaaatgccagagtattttccaggcaggttgtatttggagaatctccta

SEQ ID NO: 6935 - DNA, 500 bp, Homo sapiens
gggaaggataattagctgaaagctatgatgatataaataaaaacagctctccatcccaatacgcacctttgtattttcaagaactcttctatttattaaggaaaatgtcacattgtgatgtattaagccagtacttcaattacgggttgacttgggatgacatattacatgctgtagttaacatttataattctttttccttgtttgagtatttctgtctctgaaataaccttttacttggcttttctagatagctttatttgatttcgagtggcaaaatgttttttattacggcttttctattgctgtatgatacagaactcttttggcataaatatttgtgttcccagtacctcacttgttcggatttgactgcctgtatatgttttgtgaaatggtcctgtttttgggtaggtgacacgtggactctagtatgtaaatgttacttgaatctgtgcttcataatagtgtgtggcatgtatgtgcagactcttggatgc

SEQ ID NO: 6936 - DNA, 50 bp, Homo sapiens
gcagccagtgtgacactgctttaaactgcatttttctaatgggctaaacc

SEQ ID NO: 6937 - DNA, 91 bp, Homo sapiens
gcttgcggccgcggtttttttttttttttttttaaaattaaatcccctttttttaaagtttcgccagtctgggtccccttttttttttaaa

SEQ ID NO: 6938 - DNA, 616 bp, Homo sapiens
gacatgattacgaatttaatacgactcactatagggaatttggccctcgaggccaagaattcggcacgaggcagtcacagacctgcccaatgcctttgatggaccaattaccataactattgttaaccgtgatggcacccgctatgtccagaaaggagaatacagaacgaatcctgaagacatctaccccagcaaccctactgatgatgacgtgagcagcggctcctccagtgaaaggagcagcacttcaggaggttacatcttttacaccttttctactgtacaccccatcccagacgaagacagtccctggatcaccgacagcacagacagaatccctgctaccagagaccaagacacattccaccccagtggggggtcccataccactcatggatctgaatcagatggacactcacatgggagtcaagaaggtggagcaaacacaacctctggtcctataaggacaccccaaattccagaatggctgatcatcttggcatccctcttggccttggctttgattcttgcagtttgcattgcagtcaacagtcgaagaaggtgtgggcagaagaaaaagctagtgatcaacagtggcaatggagctgtggaggac

SEQ ID NO: 6939 - DNA, 508 bp, Homo sapiens
gggtcggagctggaagaactcatgaacaagtttcattccatgaatcagaggaggggggaggacagctaggcccagctgccttgggctggggcctgcggaggggaagcccacccacaatgcatggagtattatttttatatgtgtatgtattttgtatcaaggacacggaggggggtgtggtgctggctagaggtccctgcccctgtctggaggcacaacgcccatccttaggccaaacagtacccaaggcctcagcccacaccaagactaatctcagccaaacctgctgcttggtggtgccagccccttgtccaccttctcttgaggccacagaactccctggggctggggcctctttctctggcctcccctgtgcacctggggggtcctggcccctgtgatgctcccccatccccacccacttctacatccatccacaccccagggtgagctggagctccaggctggccaggctgaacctcgcacacacgcagagttctgctccctg

SEQ ID NO: 6940 - DNA, 156 bp, Homo sapiens
ttgcggccgcggattttttttttttttttttttttttaacaaaaaaaaaaaaattttatttttggttttccaaaaattttttacttgggggctacttaaattttaggggggaaccaaaattttttaaaaaaaaaattttttttaaaaacaaaattt

SEQ ID NO: 6941 - DNA, 619 bp, Homo sapiens
ttcggcacgaggcgtctcccatcagcactaacaggcaaatccaaaagaactgccctccatcaccattaccacttatttcaaaacagtcaccacagacttcttttccttataaaataatgcctattcaacacaccctgtctgtgcaaagtgcatcaagtactgtcaaaaagaaaaaagaaacagtttctaaaaccactaacagatgtgaggctttgagccaaaggcatatgatctatgaagagtctggtaataagagtactgcaggtattatgaatgccgaggcggcaacaaaaattttgacagaattgcgccgccttgctcgtgaacaaagagaaaaagaggaagaagaaagacaacgggaagaaatgcagcaaagggtcattaagaaatcaaaagacatggcaaaggaagcagttggaggccaagcagaagaccacttgaaactcaaagatgggcagcaacaaaatgagactaaaaagaagaaaggatggctggatcaggaagaccaggaagcaccactgcagaaaggggacgccaaaataaaagctcaagaggaagctgacaaacgcaagaaagaacacgagagaattatgttacaaaatttacaagaacggttaga

SEQ ID NO: 6942 - DNA, 530 bp, Homo sapiens
aagcttgcggcctctcattttttttttttttttttaaggggaaaaacataaacctgtttaaacaattttcttaaggtaaaattccttgaaataccttcagttgggagggataccccccctaaatatcctcttaccttttttttataaaaaaaatgccagggggggggagggaaaagtaccgggatacctttttaaaaaattttaaaccccccatttaggggttttttttttttgcaataacaaaaacaaacacttggaactgcagggccgtccccccccccccggttaatttttgttttttaaaaaaaaacggggtttccccattttgcccaggctggttttaaacccctaacctcggaatccccccccctcggccccccaaagggctggaattacaggcccatccctgcagtctaaactcctcagggccctgaggcggaaaaatcctttaaccctggaaggcaaaggctgcattgacccaaaattgccccactgccctcctccctgggcaacaaaccaaaacttcccct

SEQ ID NO: 6943 - DNA, 57 bp, Homo sapiens
aacggagcccccaagtaaagcacaaccctgaaagattatgaactatgaattgtctct

SEQ ID NO: 6944 - DNA, 440 bp, Homo sapiens
acagaaggggtaagtttccagtttaatgcagctgcagagactgcgtcccacccgaccgcctcccaagatacagcgctcgaggcccgtgagtagctggtggttctgccctccccacctaacactgcctgagccattctccctcagcctgactaaacctccagagtttggaccctcctgcctggcaaaagaaaactgggaattgggtttttcagcttccctctctgtgtggcatgaacttgagcttgcattctctgggcttctcttgctttttcgtgaataagtttggtgacttgcagatcagagccataggtagcaagggggccactgtgtgctgcgtgtgctgcgtgtgcattatttgagcaagtctcctagggtgagcaatgggttggaagccttcctccagacgtctgttcctcacaaacgaagcagaagtccggggg

SEQ ID NO: 6945 - DNA, 459 bp, Homo sapiens
aagggaaaactatttgtgtagagacacatgtctgtaaatacacatagatatattaactttttaagctttaattgaagcctttctcttcacaggttttatatatttgactgcagatgactaacagattgaattttaagagtgcgaaacactctggtgctatagggaaggaacttcataaatagcccctcctgtaagggaccagtctttaatttaaaacagtccagcccaggaatcttgcaagaattttgtaattatttgaggagagatgtagatataccctggagttctttgactttaagttattctagagtcatcccagagatggcctagaagacttgaatgtaccccaaaggattctgaatccctttgggaaatttagactatgattttcagtaagaattaaaagccccaggataagcgtggtggttcacacctgtaatcccagcaatttgtgaggcc

SEQ ID NO: 6946 - DNA, 523 bp, Homo sapiens
gggaaaaatattatctataaatggtagatacaactttcgaaagtctggatacttaggtgatatgagaaatgaatataattaaagtattagagaatattgttgagatttttttttcttagttgtcttgctttttcaattaaaaaaattagaggaatattagaaatgaatttaataatcctggaagattaatccctctttgccaagttaaactcaaatgactagaaaaaaaattaacttgtgaccttaaagtgtaattgaaattcagtaaactttaggagctagaaacctcaaagaccaaggccagatatattatacttggcatattaaaataatttcctgtttcatcagggttggtaagaaatgaataaatattcataagaaggatattcatttgaacattcaaatgaagcctaaattagcaggagaagggaaacctttgaagtttattaactaaaaattaggaaataaaatggttttttaatagctgagtgatttaatagtttgtctttgatttaatgaatat

SEQ ID NO: 6947 - DNA, 405 bp, Homo sapiens
acagaagggaagtacaataagactgtcccattaatttgtttaaaaatctctaattggttggccatagctgactatgtaaataaatatttatgcttgccttcagtcaacctgtattacttcaataatgagaaatctttaaaaaaatgtccttcaaaacctaaaagtatggtcaagttttatagtcatataaagctagcctagacaggaggatattttatcacaatgttacaaattggattattttattaatctctttattaatcatagaattctatggagttcaactggaaattgtagattgttaaataaacaacttttaacacataaaaccctgatgatggaataggaaagatcagaaaaatagaaggattttttaaatccggaagaagaagaaaaaaaaaaaca

SEQ ID NO: 6948 - DNA, 531 bp, Homo sapiens
ggaatgtcaggtacgtcttcattgattttacatcccagcacctagcagcacatatgacagaacaggtgaggtgctcaaaaagaattttttgtttcgaccatctataaagttgaatgtaagaggccatggaatgacctgtttgttcatctcattgattcattaagacatggaatgtaaaaggccatggaatgaccatctactgaaactaaaattagacattttaccataattatttttaaaccactataagtagatattggttaaaaactttattattgataaactcatgctgggtgagttttttaaaaactttctttcataaagtcacaagaaaaattgctatatttgaagatcttcattgtatatttatacaagttagcaaatgctgcctaacaaaccacctcaaaggtaattgcctaaaacaacacacgttattactcttgagtttgtgtatcagcagaatgactcctcctgtctcagtttgccttcattgtgtatctggagtcagctgtgcatcagtcagtcaactct

SEQ ID NO: 6949 - DNA, 54 bp, Homo sapiens
tgtggttctgggcaagatgcctcacttctcctcctggcctcagtttgcttttct

SEQ ID NO: 6950 - DNA, 221 bp, Homo sapiens
ctttgatatctgatcaaatgtatagacttggctttgttttttgtgctattatgaaattctgatgagcattactattcactgatgcgggggggggttcttttgcataaaagacttttatttaacactttggacttctatgaaatatttaaaagtgctaatttctggcccacccccaacaggaattctatagtaaggaggaggagaaggggggctccttccct

SEQ ID NO: 6951 - DNA, 518 bp, Homo sapiens
gattcctttcacagagggctgttggtagcccttgcttagaatcagtttttttttatctagagaagatagatttgcttgagtcctaccacactcacatacttttgtgagatggctgcttatggaaaggatattgtttttctttgggacagttatgatcttggcctctgatactaggatctaataaagcaagctgactagaaaagtaaaagcagtagttctgtgtaatgtgtgagctgtgaatttgttgctttcaagctgtttgttgtgttgtggcctgttctagtggactgggatcctgaggttttataacttaattttattgtagtagtaggcaaaatgctctttgtacctcagtttcctttcctgctctgtttcctcttttgagaagataaatgtgtacacgttaattctcccagtttcataacatgatggtgaaagaaaatactgtaaccaggggtgttttttaaaaaatgaagtgcaaggttgatagcaatttttgcatataaatgagtattacc

SEQ ID NO: 6952 - DNA, 129 bp, Homo sapiens
gtcttttaccaaggacccgccaacatgggccgcgttcgcaccaaaaccgtgaagaatgcggcccgggtcatcatagaaaagtactacacgcgcctgggcaacgacttccacacgaacaagcgcgtgtgc

SEQ ID NO: 6953 - DNA, 566 bp, Homo sapiens
ggaaaagttcttgacaaagagttagaagaaatgactctgaaaactccgaatttgaagatgacggctctgaaaaatgttagatgaggaaggctctgagagagagtttgacgaagattcagatgaaaaggaagataggaggatacatatgaaaaagtatttgatgatgagtctgatgagaaagaggatgaagaatatgcagatgaaaagggcttgaagctgctgataaaaaggcggaagaaggtgatgcagatgaaaagctgtttgaagagtcagatgacaaggaagatgaagatgcagatggaaaggaagttgaagatgctgacgaaaagttgttcgaagatgatgattccaatgagaagttgtttgatgaggaggaagattccagtgagaagttgtttgacgattctgatgagagggggactttgggtggttttgggagtgttgaagaagggcccctatccactggcagcagctttattctcagtagcgatgatgatgacgatgatatttaatcccttaaacttgctttttagggagagtcctccatctacatttgcctgtgcttc

SEQ ID NO: 6954 - DNA, 472 bp, Homo sapiens
acagaggggtttgtttgtttttgagatggagccttgctttctcgtccaggcaggagtgcagtggcacaatctcggctcactgcaacctctgcctcctgggttcaggcgattctctgcctcagcctcccgagtggctgggattgcaggaacccgctaccacgcctggctaatttttgtatttttagtagagacagggtttcaccatcttggccaggctggtcttgaattctgacctcaagtgatccacccgccttggcctcccaaagtgctgggattataggcatgaactaccatggccagcctggatttggatatttctttagatagaatatagtatccctatatcctaggaatttttaacttattggtgcttgctatctaaaactcaagaatcaagtagaggctgggtgtggtggcctcaccctgtaatctcagcactttgaggggctgaagtgggaggagcagttgagcc

SEQ ID NO: 6955 - DNA, 76 bp, Homo sapiens
gtagtagagtttaacgtgtataagctaaaagtgaaagtaactgagtgttctcttgtttctttgcattaatgtaact

SEQ ID NO: 6956 - DNA, 480 bp, Homo sapiens
  misc_feature 347: n = A,T,C or G
aaatcttttaaaacaacacacacacacacacacacacacactcacatactcacccacaaaaaacccaccaaaacttctgggttggatctggtgaggtcacaattttggatttggttcccacgtggtccagttttgttattatggagtaaatctgtgtttcagaggccaccatatcacatttctcgagtctccttgtagacacctaacttgtccgtgatgatatgaggtaataacaggagataatgattcagcaaagctttgtcccgccactgagaaattgctttgaaacagtggcccatccacagttgcaaagtgggggtgattcttcttcagggagcatagcgtancagattttcccctgcgtcctctgtgtttgttcctcagtgtctggaaagtgcttaccctagagagtgagcttgggaccatttttattaaagctattattattattatttgagacaaagtctcactttgtcaccc

SEQ ID NO: 6957 - DNA, 454 bp, Homo sapiens
gagaaacttatactaaaactattactcatcagtcattcactgatcagcagctaaagtccatgagaccaaatggttttatatggaaccaacaaagtgggagctaaaactgcacagtggtcattctttggcctctccttggctttatgacttaaaccaactacaacttccctatagcttctaagcagtttcatcagcattacttgggaaaacgtgttgcaagtcaaccagtcactaggatatttctacccatgcaacggaagaaaaacccattactccagaagagtatatctaagtaactaaaatggaggcagaaaatgttttaaggattttcttcaaagaataagccacagcaatggttttgtagaaaactcctgtgcttttgagcaaggacttttgccctctagaaagcaactgaggccaggtgcggtggctcacgcctgtaatccagtacttt

SEQ ID NO: 6958 - DNA, 568 bp, Homo sapiens
acagaagggagctttattcagattattctaagtctggcatgaactaaatgtcttaaattgttatcctaacaattggtaacctcaaattgatctgtagatatatgtgatgatcttttagataagagtacctaagaatgggtcagacacagtggctcatgcctataattccaacactttgggaggctgaggattgcttgagcccaggagttcaagaccagtctgggcacaatgacaagaccccatctctgcaaaaaattacaaaattagccaggcatggtggcgcacatctgtacacccagctactcaggaggctgaggcagaaggatcccttgagcccaggaatttgaggcaacagtaagctatgattgcaccactgcaatctggcctgggctataaagcaagactctgtctcttaatttttttaaaaaaaggtacctggcccaggcatggtggctcatgcctgtaatcccagcactttgggaggccgaggtgggcagatcacaagttcaggagtttgagaccagcctgagcaacatggtgaaaccccatctctactaaaaatacaaaa

SEQ ID NO: 6959 - DNA, 427 bp, Homo sapiens; identical to SEQ ID NO: 2065

SEQ ID NO: 6960 - DNA, 226 bp, Homo sapiens; identical to SEQ ID NO: 2066

SEQ ID NO: 6961 - DNA, 516 bp, Homo sapiens
acagaaggatggaaacatccccaccacctattaagagatgagacttccatgacagatgggctaattacaaaattgattgattggctttgggttgccttgcaatgaaatgaatggtagaagcaatgcactgtcttctcccttactatctccctccttttgggaacccaagatccaatataaaatagcacacttaattttggcgatctgcctttgcttcactgtgcctgcttattaagccctaaagatgcatgctttcctggccctgttcctccaaaggctccaccctgaagccagtaatccaattaagaaactagaaataaaaaatcttacaaacactaaatcttcagactgtctgtctgtctctctctctgtctctctctctctctatatatatatatatagtgtgtaatgtctataaaaacgaagctataattaattggcttaaaaaataagcacttaggtggctcacacctgtaatcctagcactttgggaggccgaggcgggtgaattgcctg

SEQ ID NO: 6962 - DNA, 436 bp, Homo sapiens
acgacagagggggaggctgaggtcaatcacttgagcctgggaggtcaaggctgcagtgagttatttatttattgtgtttatttactttatttatttatttatttattatttttgagatggagtttcactcttgtcgcccaggctggagtgcagtggcgtgatctcagctcactgcagcctccgcctcccaggttcaagtggttctcctgcctcagcctcctgagtagctgagattacgggcacctgccaccacacccggctaattttttgtgtttttggtagagacgggatttcgccatgttgggcaggctggtctcaaactcctcacgtcgggtgatccacccaccttgacctcccaaagtgctgggattacagacgtgaaccaccacacccagcctgctacagtcagttataatcacaccactgctttccagtc

SEQ ID NO: 6963 - DNA, 535 bp, Homo sapiens
acagaagggatatgaagtgtgggatatattcttatagtttgtaaaatgtagtcaaccaatactgtcttctaatttggtaatttatttataaaattacttaaacattaggtaattatatttgttaggatttgaaattatttgtagttaaattgtcatgctgtttgaaataattgatacttggctacgtaatacattttactgtatgttttgaagatggttataatttcactttcaaaatttaaaaaatcaattttaaatgttttaaaaacatatagcttagggattttttttaaaaaggttttcttagtaaaaacataaatttaaaagcccctgagttctaggagagggcttattgaattgctataagaaagctggagttactttgataagtaataaattataaatagcactgatctataatgctttatttctatcggaaggtactttttcttctttcatcatcagttttagccagttagtaaatgggaatactcagttttagggatttgatttttgtttggtttaattttctttc

SEQ ID NO: 6964 - DNA, 263 bp, Homo sapiens
cgctcgggtgaggagctggtggcgtcggcaggttcgaggcgattcgagctccagctaggatgatcgaggttgtttgcaacgaccgtctggggaagaaggtccgcgttaaatgcaacacggatgataccatcggggaccttaagaagctgattgcagcccaaactggtacccgttggaacaagattgtcctgaagaagtggtacacgatttttaaggaccacgtgtctctgggggactatgaaatccacgatgggatgaacctg

SEQ ID NO: 6965 - DNA, 127 bp, Homo sapiens
tctgagtggaggatcaatgaataggtgatgaatgaatggatatctacatgtcagtgcattgacagtgaatacatcttgcttatcatagtgaaagaaacagccggacacagtggctcatgcctgtaat

SEQ ID NO: 6966 - DNA, 116 bp, Homo sapiens
gcaacatagtgagaccccacccatctcaatttaaaaaaagagagaaaaaggccaggtgtagtggctcacgcctgtaatcccagcactttgggaggccaaggcgggtggatcacctg

SEQ ID NO: 6967 - DNA, 504 bp, Homo sapiens
tggtgtgtctgatggaaatttcgaggtggtcccacaaaaatattttatgtagtgtgccttcaaagagaaccatttatttctcttcacttatcgtcccacaaagtcacatttggtggtggtcagccaagtcgcatctggtctagttttactcttgtcccaattttaaagagaaatgggaatgagtttgccctggtgagacccataccattgcaatgattatcttgagcacttaaagtccagtgttggctgttagtgtatttgatattctgcctgtctcctcatggttgaaatatgtctgaagaatagcagcataatctcttggctgtttatacttttttaaactttcctgtgttgtaaatattgtatacttttggtgattccagctatgtaacctctatgctctgtaaggtgattatttgtatatagcaacatggcccagtgatattatatagtttcccaatggagaggttattgagtaacctttgcattagtttaaacactacc

SEQ ID NO: 6968 - DNA, 501 bp, Homo sapiens
agagggccttggcacctcttgcatccaggcagtcttgtgagatgggggcacatagcactggggaaagcagaactccattctcacctctattttgagcttcagtgctttatttcagtatgaggaaaaacaacaacaaactgaagtgcgctttccgtcctttcaaaggacaactgtcgggaagggagagccgagttgcgaggtaggaggggagcactggcagggagagacattcttgactcctctcttccctggtgtgttgtgatccagggaatgaaaagaaatttgaccctggattggttctctccttggacttaaggaatcttaccttttccttccacaaagttctcccaggcaaggaccagctgcccattctgagcccagggcagcctcttcaaccattattggtctaacctggcttgtcaggaaaccaagcccacccttccacattgggcctggctgctctattctgtaccaagtactggagaaaaagcatcaagttct

SEQ ID NO: 6969 - DNA, 379 bp, Homo sapiens
cttatgttactctcctttatgtttcactttctcaaatgaatgtcaagctggtgatttttagattcaaaaattctaaaataaattgctcaaatttccacattatgtaagctattaataaaatgtcttgtgggtgcgaggtatttattaaaatttttggttgtaattttaagctcactgcaggcagaaaggaatcattaacatttatattcttttttttagtctgtatctaaatgatggtatattttaattccagatattttctttatactgcagtaatgctcgtcatattttgcaaaagtgatgttgttcttttatttggaaatataaggcttttttagctcctgaaatctatattatagtcatataattttattatgtt

SEQ ID NO: 6970 - DNA, 508 bp, Homo sapiens
gatattaatatttttcaaatatgtttgataaaacattttttgaaactttaaaagtatccagaaaacttaaacataaacatttaaatcatgcattttaaagatgattgcttttctcctaaagtgtgttgttaaaatattcctgattgtcataaattgggaatgggtaatctctcagtgccttcataaaactctattcaacttaaatgactgaagattatgacataaattaattttcagagatagttttgaattattttaaatacacaacttttttttttttcaagactctgtcatccaggctggagtgcagttgtgtgattccagctcactgcaacctccgcctctggattcaagcaatcctcctgcctcagcctcccaactagctggtactacaggcacgtgccaccatgcctggctaatttttgtatttttagtagagatggggtttcaccatgttggccaggctggtcttgaactcttaacctcaggtgacctgcccaccttggcc

SEQ ID NO: 6971 - DNA, 533 bp, Homo sapiens
agttccagtttgatggtgataagaaatcattcctggaggacattcggaaggcactctacgcttccaagatcatctcttacgctcaaggctttatgctgctaaggcaggcagccaccgagtttggctggactctcaattatggtggcatcgccctgatgtggagagggggctgcatcattagaagtgtattcctaggaaagataaaggatgcatttgatcgaaacccggaacttcagaacctcctactggacgacttctttaagtcagctgttgaaaactgccaggactcctggcggcgggcagtcagcactggggtccaggctggcattcccatgccctgttttaccactgccctctccttctatgacgggtacagacatgagatgcttccagccagcctcatccaggctcagcgggattacttcggggctcacacctatgaactcttggccaaaccagggcagtttatccacaccaactggacaggccatggtggcaccgtgtcatcctcgtcatacaatgcctgatcatgc

SEQ ID NO: 6972 - DNA, 401 bp, Homo sapiens
aattatgtagagttaggtccctaaacaaaattctttgtttctcttgtatttcttcttgttcttgtcttgatttttttttttttcccttctttgttagctgggttctataattatgagagtagcacctttgaggcatttgatagttaccttagggatatttactgatcacagtaaagcaccaaggtactgcctggggagtagttgaataaaataaaaaaacttcagaagtaacttttattgttctcttactaaatgaagtgatgagtttatagccatcttttatcagttaggatcagttagcttttttgttggagtcagtgcttttgattacaagtaatagaaaatcctgataactctctttaaacttcagggaaattcattatctgtcataattagtccaa

SEQ ID NO: 6973 - DNA, 493 bp, Homo sapiens
tggtaccacaataacaaaaataaggaagataatcctggattgagttgctaactgctccctggccttctgtaaccaggctgaatttagaaagataataatgactcatactccttttttagatatgtaaaatttgagcagctggcaggagagctaagtgtatgtcagacgttgggaaatgagaacggaagctcagagggataagtggagttgccactgtggtttacttagactagctcatatttaatcctggctgattctttcctttactttaaactcctgttctaatctttgatgtacaaatccatatattgactttataaaaggttcaaatatataggagaaacaaaagataatctgcaaataggttggtggtctccagattgtttaaaaatcaccagaaatgattccacaatctctaccattttaaaaacataaaacttttctaaagacttgtcacacctaatgtatgagaacaaaagcatgtgcaatgttt

SEQ ID NO: 6974 - DNA, 97 bp, Homo sapiens
aataaaaataaatttgaagtgtattgccatcttaacggaagttgttactggtggacggtatccaagttactggtggtaaatctgcagcaacctcaat

SEQ ID NO: 6975 - DNA, 433 bp, Homo sapiens
aactattgttttatcctgtctttgggggcaatgtgtcaaaagtcccctcaggagttttcagaggaaagaacattttatgaggctttctctaaagtttcctttgtataggagtatgctcacttaaatttacagaaagaggtgagctgtgttaaacctcagagtttaaaagctactgataaactgaagaaagtgtctatattggaactagggtcatttgaaagcttcagtctcggaacatgacctttagtctgtggactccatttaaaaataggtatgaataagatgactaagaatgtaatggggaagaattgccctgcctgcccatctcagagccataaggtcatctttgctagagctatttttacctatgtatttatcgttcttgatcataagccgcttatttatatcatgtatctctaaggacctaaaagca

SEQ ID NO: 6976 - DNA, 445 bp, Homo sapiens
attcctctttcctctctgctgctgcttctcctgcatcttgttcctgcttatttaaatagtctgagagtaagagtatatttctgtgaaataattataagtcagtataattgcatttggcattttttaaccacttgctcagtttggagccactgctcacctcaaacagtacaaagaaagtggttccatattttacaaacagaagagtagcatcagagccctgacctcctgtctttgggtgtaaaatggtgagaggccggtgtccggctccttcccctgtggtttgggctggtgaactgagcccaagtgtattctctggcctgggccccttccagaatcagtgcgagcgtcctgcagaggcatggccttcctgccactgcagagtgggaagcttcctgggggacctcagccagctccggggctctcatcttccactcggatctcagat

SEQ ID NO: 6977 - DNA, 474 bp, Homo sapiens
aactatcttttgggaaaggatgccattcctaaaattaactcccttctggcaaatttctccctgccaggtacctaacctccccagcatgatgtttttctaccatttgccttttggattcctagaagtattttatttggatgtgactggtttgaatttggagcttttagagcaagacatttggaaagatagcatgtgagtgaatttatgtatggaatgaatgacatgtgagaaaactcttgttagacatgatgtttcctatacagaagaaaagatacaaacttgattgcttcagtaaaaacacttttagagattgtgtttccttttttgtgagacagcgtctcgctccgccacatacactggagtgtagtggcacaatcttggcttactgcaacctctgcctcctgggttcaagtgattctcgtgccacagctacccgagtagctgggattagatgcacccgccaccacacccagc

SEQ ID NO: 6978 - DNA, 186 bp, Homo sapiens
tagcctctgctactcgagaggctgaagcaagaggattgcttcagcctgaggaagtcgaggctgcagtgagccatgatcgcatcactgcactctagcctgggtgacaaagctagaccctgtctcaagattaataaataaataaagactcatttctacagtcagttcctgtggtctggattagtgttg

SEQ ID NO: 6979 - DNA, 529 bp, Homo sapiens
ttatcagttgatgaatctcaaagtcttgccgtcttaagaaagggctttttcatcgagtgcttgaaatgtaggtttgtgagttgatcagaggcctcaaagcttcaggtgggttgaagttgcaatagataattctttgtattctgactttgaaagcgtttattttcacttcagtgtccaaaattttcacacacagaaaagttgaaaaagtgatagatacatatgcatatatactctttctagattctatgacgttttgctgtatttgttatatttgcctacaaaaatgattatttatttatgtggagacggagtttctctcttgttgcccaggctggagtgcaatgccgcgatctcggcttaccgaaatctccgcctcccgggttcaagcgattctcctgcctcagcctcctgaggcaggcatgcgccaccatgcccggctaattttgtgtttttgttttgttttgtttttgagacggagcctcagtttgtcgcccaggctggagtgcagtggcgcaatctccactcactg

SEQ ID NO: 6980 - DNA, 541 bp, Homo sapiens
gttttaatcattttgggtgttttcaaaacaaatggtgagattaggggttttttttctcttctatttttggcccctttcctctggagagtccttctcttgtgtttagttcttggtgttcttagtatatttgaagaatgcttttaagtatttgaaatgtgtgtacatggttgaaaggggatgaggaagaagaaaccgaaaacttcatgaccctgctcaaaccaatacccataccccagccctaaagcagtgtccgggcaccacatcttcaaggaaggccccttggaaacccctcatgggccagtcctctgacccaggtgatctcctaaccccctttatgtattcttatgaggatatatgataaagaacggactgtgagatttgttgttcaaatttttccccttagaatgtgagctcagtgggtaatagtaccatgttggctctgtccacagttctactatcttcagcatagggcctggtatacagtaagcgcttaaaaatacatgtcaaatggctgggtgcagtggctcacacctgtaatcct

SEQ ID NO: 6981 - DNA, 51 bp, Homo sapiens; identical to SEQ ID NO: 2074

SEQ ID NO: 6982 - DNA, 391 bp, Homo sapiens; identical to SEQ ID NO: 2075

SEQ ID NO: 6983 - DNA, 405 bp, Homo sapiens
gatattatctgtgtagtagcctgtttaaagtgatcattgctagtgcatggtatagaattacaaacttgtaaatacttctcaagattgccactttaaaaaaaaaagcaaaaagagctctgtagccctatttttttttttatttccaacaggaaatttgttcttgtttcaaaaggggggaacacccattattctctgttggccacatgaatgtcatccatttgtttattgcagcaaaaaaaaagtgaaaaatggttgatacaggggcaagctgttccttttaggttactttaaaaagtcatggaatttcggatttacaaagaaagcataaggaatactctaaccagtatatatgtatacagtatccagtataaaaatgaaaatgtaatgtagttattaaaacattat

SEQ ID NO: 6984 - DNA, 588 bp, Homo sapiens
  misc_feature 521: n = A,T,C or G
gatcacagcctacgtctgccaggcagtcatcatccccccagaggtgacaggctacaaggccggggtttcctcacagcctgtcagccttgctgatcgacttattggggtgacaacagatatgactctggatggaatcacctccccagctgaacttttccacctggagtccttgggaataccggacgtgatcttcttttataggtccaatgatgtgacccagtcctgcagttctgggagatcaaccaccatccgcgtcaggtgcagtccacagaaaactgtccctggaagtttgctgctgccaggaacgtgctcggatgggacctgtgatggctgcaacttccacttcctgtgggagagcgcggctgcttgcccgctctgctcagtggctgactaccatgctatcgtcagcagctgtgtggctgggatccagaagactacttacgtgtggcgagaacccaagctatgctctggtggcatttctctgcctgagcagagagtcaccatctgcaaaaccatagatntctggctgaaagtgggcatctctgcaggcacctgtactgccatcctgctcaccgtcttgacctgctt

SEQ ID NO: 6985 - DNA, 54 bp, Homo sapiens
agcagcacttttattttgcacattgataatgctgtatgtatactttcttttttt

SEQ ID NO: 6986 - DNA, 486 bp, Homo sapiens
gacacgcagttgctcgcttttcctgccctgtcaagcttctctgttctggcgtgagttgtgaaagagttgaagacagcttcccatgccggtacacagccagtagcctaaatctccagtacttgagctgaccattgaactagggcaagtcttaaatgtgtacatgtagttgaatttcagtccttacgggtaaacagattgagcatggctctctattccctcagcctaagaaacactcatgggaatgcatttggcaacccaaggaaccatttgcttaaacctggaacatctcacctttttaaatcctaaaaaacactggcagttatattttaaattagtttttatttttatgatggttttatcaaaagacttttattattagattgggacccccttcaaacctaaaaatcaagttatttccttttataatacttttcttccccatggaacaaatgggatcaatttgtgagttttttcctttaatgatac

SEQ ID NO: 6987 - DNA, 471 bp, Homo sapiens; identical to SEQ ID NO: 2084

SEQ ID NO: 6988 - DNA, 608 bp, Homo sapiens
agcagtagcattgcagatgacaccagggttcaggaaagaggatgtctacagttgctttcgcttcctacgtgatgtttttgcagatgagttcatcttccttccaggaaacacactaaaggactttgaagaaggctgttacctgctttgtaaaagtgaagccatacaagtgactacgaaagacatcctagttacagagaaaggaaatactgtgttagaatttttagtaggactctttaaaccttttgtggaaagctatcagataatttgcaagtaccttttgagtgaagaagaggaccacttcagtgaggaacagtacttggctgcagtcagaaaattcacaagtcagcttctcgatcaaggtacctctcaatgttatgatgtattatcttctgatgtgcagaaaaacgccttagcagcctgtgtgaggctcggagtagtggagaagaagaagataaataataactgtatatttaatgtgaatgaacctgccacaaccaaattagaagaaatgcttggttgtaagacaccaataggaaaaccagccactgcaaaactttaataatcaacaaatagttatggaaaattcggtcacgtaattactctcatcg

SEQ ID NO: 6989 - DNA, 509 bp, Homo sapiens
gacagaaggggatggcaggtttggtggggcaacaggtagcagtggaactagtagaaaatattcatgggcagcgggacccatggtgaagtcactgtgttcttctctccaccctcacccaatagagatttaggtcaaaggagtaatggtgactacaagaataaggccttccagaatcaatctagaggtggatgccacagagatccagtggttcagatttttttctgaggtcactctgaaagatttctcctgtaaaacagtcagctgcttgtttctgtcttgtgatagtagctgggtagcttcctttcctctacaggaactcttactaggttccatcttcctgtccgtgattgaacttctggactctcctaataagttctctctgcatttttatgatgtagtgcttcaggtaatcagccaggctccctgcaggcctcttctacctgcctactgtctaacaaataggaaggctgggcacagtggctcacacctgtaatcccagcactttggga

SEQ ID NO: 6990 - DNA, 576 bp, Homo sapiens
acagaagggactgcccttaccacacagcagaaactggcaggtgtcactgcactcagttgctggcttccacttcgggcttcctttccacagggtcctatcggtggtgctaatagagatatttctattctccagtgccacggggattgtgaccctttggttcccctgatgtttggttctcttacgtggaaaaactaaaaacattggtgaatccagccaatgtgacctttaaaacctatgaaggtatgatgcacagttcgtgtcaacaggaaatgatggatgtcaagcaattcattgataaactcctacctccaattgattgacgtcactaagaggccttgtgtagaagtacaccagcatcattgtagtagagtgtaaaccttttcccatgcccagtcttcaaatttctaatgttttgcagtgttaaaatgttttgcaaatacatgccaataacacagatcaaataatatctcctcatgagaaatttatgatcttttaagtttctatacatgtattcttataagacgacccaggatctactatattagaatagatgaagcaggtagcttcttttttctc

SEQ ID NO: 6991 - DNA, 572 bp, Homo sapiens
acagaagggagtgacattagagacatggtcatacaaattatcacataaacatggacttgaaaaattaggcttttcataaaacacatcacatgtcattgactgctttttagaaatacacttccaaggcagtacatctgtattgctactgaaaagtgccatttcacagaacacagacttctttttgctctttgacatcttgaaaacatctgtttttcttttttaatacaaaactttgtgctcaagacaaatcttacatgaaactctcataaaccatgaaaatgtagctggccttcgggccttaggcatgaaataagcatgaggaacatattcccctaacttctacccccagcccagcaagttatcctttaagaaatctcctaggaattctggagtttgaaaacaattgctctatgttattcctgcttccagtctctaagtaacaagggcatttaaaagcatagtctcttaaggtccacttagtggttctttatttaaggaataactcagctgggtgcagtggctcacgcctgttatcccagcactttgagaggctgaggcaagcagatcacttg

SEQ ID NO: 6992 - DNA, 566 bp, Homo sapiens
atgggaatattctgtttctggaacataccacacccaatgcctccaggacctaaggctctttaaaagaaaaacagtgcttaaaaaattataagcgttatacacaggctgagcacagtggctcatgcctgtaatcccagcactttggaaggctaaggcgggaggattgcttgagcccaggagttctagatcatactagcctgggtaacacagtgagatcttatctttactaaagataaaaaaattagctgggcatggtggtgcacacctgtagtcccagctacttgggagactcaggtgggaggattgcttgagtctgggacattgagactgcagtgactgatgatggcaccactgcactccaccctggacaatagagcaagaccttatctttctttttttttgagacagagtttccctcttgttgcccaggctggagtgcaatagggcgatctcggcttaccgcaacctcctcctcccggattcaagcgattctcctgcctcggcctcccgagtagctgggattacaggcatgtgccaccacactcggctaattttgtatttttagt

SEQ ID NO: 6993 - DNA, 499 bp, Homo sapiens
gtgaccaacagcaaacctgaatttagcatttcttctttaaatggactgatgtacagttccaatcagcccagcagttgcatggataacaggacattttcatacccaggtgtagtaaaaactcctgtgagtcctactttccctgagcacttgggctgtgcagggtctagaccagaatctgggcttttgaatgggtgttccatgcccagtgagaaaggacccattaagtgggttatcactgatgcggagaagaatgagtatgaaaaagactctccaagattgaccaaaaccaacccaatactatattacatgcttcaaaaaggaggcaattctgttaccagtcgagaaacacaagacaaggacatttggagggaggcttcatctgctgaaagtgtctcacaggtcacagccaaagaagagttacttcctactgcagaaacgaaagcttctttctttaatttaagaagcccttacaatagccatatgggaaataatgcttctc

SEQ ID NO: 6994 - DNA, 490 bp, Homo sapiens
acgtcctccgataacaaaaatccttgcttcctctgtctgtgactttacacgcagttgttcaaagttgttaaatgtcaagagtcaatcacatccctaggacatacctcccaactctcctgactcttatgttattgaaaaaacaaacaaacaaaaactcctttatgatgatattcaacttgagtggggttttttttccactttggtcctggatataatgaaatgatacatattaggataaattttcactgtgtatagtagcaatacgaacacacatgccaatgtatcaacatatctacttggttacattttggtttatgataattaaccttgattcatgtattgggaagctacagggactacgtaatacctgcttatcacataggaaaattatgtccatgattctgagctcccttcttcaaaagtttcctcctgggtgttctatgttctctctttatcctgaaatacatttattaggttgtgaggtatgttg

SEQ ID NO: 6995 - DNA, 486 bp, Homo sapiens
ggacagtttggttgcatactcggtcaaaatagaaaccaacgagaacaatctggaatcagccaagggtttactagatgacctgaggaatgatctggataggttgtttgtgaaagtggagaagattcacgaaaaggtctaaatgaattgcgtgtgcagggcgcggatttaaagtccaatttctcatgaccaaaaaatgtgtggttttttcccatgtgtcccctaccccccaatttcttgtcccctcttaaagagcagttgtcaccacctgaacaccaaggcattgtattttcatgcccagttaacttatttacaatatttaagttctctgcttctgcatttggttggtttcctgaagcgcagcccctgtgaataacaggtggcttttcatggatgtctctagtcagagaaaaatgataaaggcttaaattgaggattaacagaagcagattaacctcagaaatcctgtctggctggcagatttcaagt

SEQ ID NO: 6996 - DNA, 600 bp, Homo sapiens
  misc_feature 472: n = A,T,C or G
acagaaggggagcggcaacatggcgtccaggtctaagcggcgtgccgtggaaagtggggttccgcagccgccggatcccccagtccagcgcgacgaggaagaggaaaaagaagtcgaaaatgaggatgaagacgatgatgacagtgacaaggaaaaggatgaagaggacgaggtcattgacgaggaagtgaatattgaatttgaagcttattccctatcagataatgattatgacggaattaagaaattactgcagcagctttttctaaaggctcctgtgaacactgcagaactaacagatctcttaattcaacagaaccatattgggagtgtgattaagcaaacggatgtttcagaagacagcaatgatgatatggatgaagatgaggtttttggtttcataagccttttaaatttaactgaaagaaaagggtacccagtgtgttgaacaaattcaagaagttggttctancgcttctgtgagaagaactgtgaaaagagcatggttgaacagctggacaagtttttaaatgacaccaccaagcctgtgggccttctcctaagtgaaagattatttaatgtccctcacagatcgctctg

SEQ ID NO: 6997 - DNA, 604 bp, Homo sapiens
atatcaactttcagaattacagtaagtcagagcaaagagaatgaaatctgtagctcagcttgtttatttttttggtttgcttctgctgaattttgtttcccccaagtcagaatacgagtctttttgtgttctctctcttctcttattcttccgagaagtgaaggtggtgggtgtacagcccatatttgtttactttttctgtagctcatatatctattattactggtggtttcttagtggaaatttttctttcactctcactttggctttacctccaagtgctttcttctcttggctgcaattgagcactataatttgtggctttccggagggggagccttggtggtcaggtggaggaggcaggccacattccaaaagtggagtggtaggtgttccagacagagtgctgattcaagagtgagtaggggtgtagggtgaaagttggctactaattcaagcctcacctgaggcagtgttgctcaaacagaaaagtgccctctctaattagctgcccccctatgcgcttagattaatgacagccaactaacttagaaaccccttccagagtaagctagccaaacaatagatgttccatggacatgac

SEQ ID NO: 6998 - DNA, 373 bp, Homo sapiens
gatattcttttttttagtctgtatctaaatgatggtatattttaattccagatatttactttatactgcagtaatgctcgttatattttgcaaaatttatgttgttcttttatttggaaatataaggcttttttagctcttgaaatctatattatagtcatataattttattatgttttgtggtaagaagtgcagcaacatattgagaacataataaaattatcctgtatttttaatgattatttattaaattcctctcattagagcctgttattaatgattgtaatgtattttctgtataattttactgcaatttattaaattctaatgacttaaattgtctgcttttcatgagtgcacacagttgaatgct

SEQ ID NO: 6999 - DNA, 531 bp, Homo sapiens
gttattgggaaaatttcaatttgtcagtttctcagcttggaaaagtcacctgaatgactcccacacctctacccactcatctccctgtcttgtggggggtatctgacctctagtactggtgccaggaaaggtgatagaacagtggttctcaattttgatttaattcatatgaactgtggctcgggcatcagattaaggcacatcaggtgattatggtgtacagccagggttgagggtcactgtcttcaaggaaacttctacacctcttacacagtggtttcacctgcagaaggaggcacctgtcctagactgctctagtgttcacaaccaatgataaatctgctgtgggtggagaatgcttgttgagccaaaagcctgcatccttcttgcttctgtcttgactgatctcatattccttcttgggcatagctcttggcaagcagtaaatcttcactctcccactgccgtcagccaagtgttcattttgtccaccacaaagataggtgtttttgggatttgataggttgcatg

SEQ ID NO: 7000 - DNA, 567 bp, Homo sapiens
gtatagtgtcatttcttatgttttgtatattaacgttttacaaacacaatttgtgtgggtttgtagcatttcttatagtttaaagtatgattcagcattctaagttaaaactaatatgtgaagtcagtcattagtctgcataatctctgtctccctctgtgtgtgtctttctataaagcacatgtgtacacacacacacacaaatatactgaaagctagggtaagttctaaactgaatatcaaaaaccaaaatcaagaacaaagaagtgatattttccaaacaaacatggattctctgccgggtgcagtggctcagcctgtaataccagcctccactttgggagtctgaggtgggagtattgcttgagctcaagagttggagaacagcctgggcaacatggtgagacctggtctttacaaaaatttttttggccggacgcagtggctcacacctgtaatcccagcactttgggaggccgaggcaggttgatcatgaggtcaagagatcgagaccatcctggccaacatggtgaaaccccgtctttactaaaaatacaaaaattagct

SEQ ID NO: 7001 - DNA, 529 bp, Homo sapiens
aagccaagaagattttgcactgtgcagatcctttgctatctgacttgcatctcttcccccacctgtcagctagccacctgcttgtttgtgttgggatattttttagcacctgaagcaccatctgaaaggggcaccattttcttcttccctttgatctcacatatgctccctaaaaatccttaagttgtcaatctgatccccagtgtgaggttaatgagcaaaattggtctttggggccctttttgtccaagccccactgaaaggcctcttcagaaaactattatctttaaagccctactttaactccttaattccagcatacagctaaaactggatgtatattctggcaagtaaaggctgaggactcctctttaatcctcagatctagataactcatgacattttatttgaccaacatagcacatgatgagatatcaaggtaattaaaatagcatgcttgaaaaaaaaatacgtaatctgtttcacctgtaactgtttaagccaataaacttttcaaaatttatgtaat

SEQ ID NO: 7002 - DNA, 658 bp, Homo sapiens
  misc_feature 91: n = A,T,C or G
gattctatgttggatattaatgctttgtttgctgaggctaaacactatcatgccaagttggtgaatataagaaaagagatgctgatgcttncatgaaaaaacatcaaagttaaaaaaaagagcacttaaactgcagcagaagaggcaaaaagaagagttggaaagggagcagcaacgagagaaggagtttgaaagagaaaagcagttaactgccagaccagccaaaaggatgtgaaaagttgtgtttgtgtgttttcttctcctgtcccatatttgggttatgatgactcaagtgtagactgaagttgaggtagtgccttatgccattatgtcatatgttgaaatccttattccggtattactgtgtctccatgccttttttccaagtagcagacgtcatgttgcatggtttttgatatttatatgtaagtttttcaaattttgcttaattttaaaatttattattttgatcttgaattatttataaactggaaagtggtttgattattgtgagtcaaaactctaagtggttaaaaattagtatgaattttttagcttcttaatgatatggatttaaactctccagttcctattttatgaaatgacttgcctttctggtatacaatgctgattttttagtaattgccttttcattact

SEQ ID NO: 7003 - DNA, 613 bp, Homo sapiens
acagaggggtggaatatttaagccacgagaataagtactataaaagcaagaatttataatagggtctttaatgatcagttctgttcttacacagcttctccccactcctactccttggaagcaaccaagtggtatgagttggcccctactcaccccctccctggtgtcagtggaccacatcagggaagtgaggttattttttcacttggaggaaacaaagatatgtaactcagtaccctacttttgccatgaggttgccagtgggtggagggagaagacaaacttccacctaaccagtctgcaagaaggaagtataagttagtactctacttttggtaggatggtattagtaggtcccatcaggaagataaacacgcacacccacccagctctcaggttacacatcaatagggaaccatctacgaaataataagagagaaaaattctcataatataaaaaaaaattcaggacacaataaaaatcacttataagacaaaagaactaggaaatcataacctgaatgagagaaagacaacagacaccaacacagacataaaaaaggggttggggctgggcgcagtggctcacacctgtaatcccagcactgtggga

SEQ ID NO: 7004 - DNA, 605 bp, Homo sapiens
acagaagggccgggcgcggtggcgcgtgcctgtagtcccaccttagcctcctaagtagctgggaccacagagagtctcactctgtcacctggggtggagtacagcagccggatctcagctcactgcaacctccaccccctgggctcaaccgatcctgccacttcagcctccagaggagctaggaccacagacacgcactaccaagtcaggctaagtttttggttttttttggtagagagggggtttcatcatgttgccaggctggtcttgaactcctgagctcaagcgatcctcaggctcccaacgtgctgggattataggcatgagccactgcacccagccaaattgcttcattttttattactccatacttcctacataagatacttcctacacctggccaaattgcttcattttttaaaaatatattttatttaatgtagtctcactctgttgccctggctggagtgcagtggcatgatctcagctcactgcaacctctgcctcctgggttaaagcgatttctggctaatttttgtatttttagtagagatggggtttcaccatgttggccaggctgctctcaaactcctgacctcaagtga

SEQ ID NO: 7005 - DNA, 517 bp, Homo sapiens
ggcgaagaaactgccccagagaatcagaagttcatcttgcaggaggatggatctttatttcacgaacagtccaagaaatgtgtccaggctgcgaggaaggagtcgagtgacagtttcgttccactcttacgagactgcaccaactcggatcatcagaaatggttcttcaaagagcgcatgttatgaagcctcgtgtatcaaggagcccatcgaaggagactgtggagccaggactctgcccaacaaagacttagctaagcagtgaccagaacccaccaaaaactaggctgcattgctttgaagaggcaatcattttgccatttgtgaaagttgtgttggatttagtaaaaatgtgaataagctttgtacttattttgagaactttttaaatgttccaaaataccctattttcaaagggtaatcgtaagatgttaacccttggtatttagaaaattaaaaccttataatatttttctatcaagatgtatattttacagtcgtgccttttactctcatt

SEQ ID NO: 7006 - DNA, 507 bp, Homo sapiens
cggggtggaacttcttggccatggcggtgatgcagcggccggtgatgggcttctggcagccagaacacagcgagccgcgccgctcgtggtagtgcacctcacagtagggctgcccgtcgtgctcgaagaagctgccgttcacgaatggcgtgaagcattcctgccaggcggagagaggggctcagggagctgcccctcgggctagagctgcaccctgtgtgatggggccgaggtgggcatagtcggcacgctcggagtgactcctacttgctaggcgtttcccatgtgccgtgttgtcctaaacgctcatttttcatttttattttattaaataaattttttttgtagagatgggggtctcactatattgcccatgctggtcaaatgtggcctcctgcaatcctcccacctcggcctcccacagggctgggattatttagttctcccaacaggggaggcaactgaagcacacaggtgaagtaacttgcccagggtcatgcagctact

SEQ ID NO: 7007 - DNA, 517 bp, Homo sapiens; identical to SEQ ID NO: 2095

SEQ ID NO: 7008 - DNA, 552 bp, Homo sapiens
ggatttcttagatcagcacttctcattctgtggaaggagaagaaggtatcagtcacatagagggttttttcgcaataactcattacctggctctaaactagagctgtgtaatcagaatgggggaggagctgagagtaagagaacagatggagaatgggttggcattttgaaacagcttcaccagataaacttgaaatctcccagatttagaaccattcttttagattatctagcaagactggccaacattgttcggaaatctaacattgagatggtaatggcccaggcacggtggttcacgcctgtgatcccaacactttgggaggccaaggcaggcagatcacctcaggtcaggagttcgagaccagcctggccaacatctctactaaaaatacaaaaattagccgggtgtggtggcaggtgcctgtagtcccagctacacagaaggctgaggcaggaaaatcgcttgaacccatggggcggagcaggttgcagtgagccgagatggcatgactacactccagcctgggcaacagagcaagactatgtctc

SEQ ID NO: 7009 - DNA, 453 bp, Homo sapiens
gatttggatctaagctataaccacttgaccttcattccagaagaaatccagtatctgagtaatttgcagtactttgctgtgaccaacaacaatattgagatgctaccagatgggctgtttcagtgcaaaaagctgcagtgtttacttttggggaaaaatagcttgatgaatttgtcccctcatgtgggtgagctgtcaaaccttactcatctggagctcattggtaattacctggaaacacttcctcctgaactagaaggatgtcagtccctaaaacggaactgtctgattgttgaggagaacttgctcaatactcttcctctccctgtaacagaacgtttacagacgtgcttagacaaatgttgacttaaagaaaagagacccgtgtttcaaaatcatttttaaaagtatgctcggccgggcgtggtggctcatgcctataatcccagcact

SEQ ID NO: 7010 - DNA, 453 bp, Homo sapiens; identical to SEQ ID NO: 2097

SEQ ID NO: 7011 - DNA, 252 bp, Homo sapiens
agctctgatcaaatccctcctaagcagaacccttccaagctcccctccataaggctccaggggtttacttaccttgcctgtcagggcttctgcagctagcttactacctgctatctccactcctctccaaaccaccgataggctgaggcttctataaagcaaactctggcggcttggggttaatgggtctgtgtacccatgacactgtacctgggtgctgtcatctgcctgactgaccttcctgtgtcctgg

SEQ ID NO: 7012 - DNA, 550 bp, Homo sapiens
catggcggcgctgtgtcggacccgtgctgtggctgccgagagccattttctgcgagtgtttctcttcttcaggccctttcggggtgtaggcactgagagtggatccgaaagtggtagttccaatgccaaggagcctaagacgcgcgcaggcggtttcgcgagcgcgttggagcggcactcggagcttctacagaagggttctccaaaaaatgtggaatcctttgcatctatgctgagacattctcctcttacacagatgggacctgcaaaggataaactggtcattggacggatctttcatattgtggagaatgatctgtacatagattttggtggaaagtttcattgtgtatgtagaagaccagaagtggatggagagaaataccagaaaggaaccagggtccggttgcggctattagatcttgaacttacgtctaggttcctgggagcaacaacagatacaactgtactagaggctaatgcagttctcttgggaatccagagagtaaagactcaagatcgaaagaagacatcatgaaaataaatgaac

SEQ ID NO: 7013 - DNA, 78 bp, Homo sapiens
tgtgttttatgcacctcgtctgagaatcaataagcggattttggccttatgtatgggaaaccatgaactatacatgcg

SEQ ID NO: 7014 - DNA, 592 bp, Homo sapiens; identical to SEQ ID NO: 2098

SEQ ID NO: 7015 - DNA, 491 bp, Homo sapiens
gacagaaggcctctacagagaccaaaactcattctcttaaagagattttatggggctactgcagataaaaataggacacaatattaaaggagctacagaaggaagggagtcccatctcaaaaaaaaaatgaatgtatgccactgcaattagagtatccaataaaggagacagtttagagtcaggacagaaaagcttccataattgaactagattacataatagtatttctagaaaaagagatatttttagattgtatgccacttttgtttaagaactgtgctgtgatcactgtattaattttggtttatcttggcatatatccttcagtttgtttttatttttaatttttcctttttttccgattaggctttggtcagcatttttcatttaaagaaaagtaacactcccatccactcataagcttggtacaaaaacttctctggcagttacttttgaagcttcactctgctttctgtataaagggcagtct

SEQ ID NO: 7016 - DNA, 58 bp, Homo sapiens
gataccttcctggtgctatgcccccgtatgggcagggaccgccaatggtgccccctta

SEQ ID NO: 7017 - DNA, 673 bp, Homo sapiens
acagaagggacttacccaaacactaattgtagactatgccttctgaattgtttgtcataaacttggagtaaggaatcctcacaggcactggacaattcaaaaaacgtaaagttgtttgttagaatactggtgcttttgggtagaaaccctcatccatatcctggtaaggcttgaagttgcacaggagttttcatttgtcaaaacccagaaaaccataagctttagatttgtgaattttatattgtattatatgtgacctttctttttaaaaaatgagctgtaagcagtctcccagacagtagctcagcctccagaactctctttctgcatagttgaagactcctcttcacacaagatggtagcaacaaatcataggtgcaattgcaccaaattcacagaagatcaattgaaaatcctcatcaataccttcactcaaaaaccttacccaggttttgctaccaaacaaaaacttgctttagcaatcaatgcagaagagtccagaatccagatttggtttcagaatcaaagagctaggcatggattccagaaaacaccagaacctgactttagatttaagccacagccatggacaagattaacctggtgtggagtttcaaaatagagaagccagatggtgttgtaccatctatagcacctttcaattacacacagt

SEQ ID NO: 7018 - DNA, 422 bp, Homo sapiens
ataacaagcacattgtcgatttcgtgagtattattgcttaagatcgggttaagtaataagtaaaccaattgaatattttatttcagttgaaaagaaaaatactgaagaattttaatgcctttaatggggtacttgagtatggcaaaaatcgggaaggctgagagtgtcatttgggagctgtgtcccaagtccctcgtgggcctttaatcagcagttacagatctgcagctcctcctgtaggatggaagcactttgctctttggccttttgaggtcacccagctatttgaaggtcaggggcaactcgattctaatgagatcaaggtcacagggtcatgttgcccccatgaaagtgggagatggagttctgtggtccaggctgtggccctgctgcagggctgggaggtggagaggtgtggacag

SEQ ID NO: 7019 - DNA, 372 bp, Homo sapiens
acagtagggatgtgaagtaagggagtggcatttggtttttttgtcagtaagtctgtcttgctcgatatctcaactttccaggaattacagtaagtcacagcaaagagaatgaaatctggagctcagcttgtttatttttttggcttgcttctgctgagttctgtttcccccaagtcacaatacgaggctttttgtgttctctctcttctcttattcttccgacaagtgaaagcgatgggtgtacagcccatatgtgtttactttttctgtagctcatatatctattatcactgggggttacctagaggaaatttttctttcactctcactgtggctttacctgcaactgctgtcttctcttggctgccattg

SEQ ID NO: 7020 - DNA, 113 bp, Homo sapiens
tacggttgcgaaaaaacgacaaaagggtacggttgcgaaaaaacaacagaagggtacggttgcgaaaaaacgacaaaagggtccggttgcgaaaaaacaacaaaagggtccgg

SEQ ID NO: 7021 - DNA, 463 bp, Homo sapiens
ggaagttgatatgcagtttattgaacaaacagagtgtacagtaactaaacgaactgtgtatttccaaaggaattaagaccgcatatctggattcacacctaaaagcacatagaaaattaaaccaaagaagggcaagttttgtactaaaatcacttgggcccaggttattctataagaagattctcactggcatttgatagtaacttatcaccttctgtgcgagcttgggaaccagctgactcagtgaactgcttcctgtcttcagtgcgtgatgacacagatgtgtcaagcttaatagaacttatatgtaaatttaagaataagaagttttatacccaccctggttttattccaaagttactgctctgcaattttgggctccatccttaggaagatactggaaaagcaagagaacctttctcagctgcctgtgtgaagtgacgttgttctagaacggtgccct

SEQ ID NO: 7022 - DNA, 198 bp, Homo sapiens
ctgaaaccttaagtgttaacatgagcaccttaataaagtttggacagtatttcttttataaacaatattaattgatattgctaactattaacattagaaatgaaagtcgagaaagataattacctggaacgttagtacccagaaatacccaattgtgttggtatttgttttaagttttcaatttttatgcatctccac

SEQ ID NO: 7023 - DNA, 847 bp, Homo sapiens
ccaggttcttatttttaatagaaaagagaacagggaaggaacacaggtcagtgtgaagaagggggtcatggtagacacagaggtggactgtttctctacctcctcacattgtgctaacagggacacagacagattcagaggcccttgcaaaaagagaagccagagtcccctaagacacataagggaggcgtgaggaaatcctgcatctcagtcgcacacaaggcagctgtgcatctcagtcgcacacaaggcagctgtctcaggctttacaagctgtgagactcagacccctgggcactgtcgctccactcagccttagagtagctccctccttttccacctgagctcttcttcctccatatcacagcagcaaccacagctccagagaccacagatccaaggagaaccaggccagcaatgatgcccacgatggggatggtgggctgggaagcgggcttccatctcagggtgacgggctcgggtagccctcatgctgcacatggcacgtgtatctctgctcctctccagaaggcaccaccacagctgcccacttctggaaggttccatcacctgcagggctggttctcaagagctcggtgtcctgggtatggccctcaccatcctgcctgaaggtcagtgtgattttcgcaggtgagaagccaagggcccagcacatcagggttggcctaatgtcagagatggggtggtgagtcaagtgtgtcatatgggagttcaggtgaagaaaggtctccttcccctcatacagttatttggggaacgaatccacgaatgtggcttgcaagtaggggtctttggtggtccgcctcagaaggaaaattggactttt

SEQ ID NO: 7024 - DNA, 619 bp, Homo sapiens
ccagttttgtccaaaataatttatttaccagccttacaaaaaacatgtcggcaagagaagaatcagtcccgtaggagcaggcaaacctctccttccttccggtggctcccctaggacctgccggagagtggagagtccggtgggggggtccccaagcccagggtggacgaggaaaaggtcaggaaatagaggattgtcctgagccctcctggccatgggggccgacccagtgggcactgaggcacttgtgggcaaaggctggaggcccatgcccctttgtggggggcgagagctgtcctgggagggccaggtggggagggagggggtgctgagggctgcttagggagaaaccagccactcagttggtctctgaggcaaggctcctggggcggggctgaggggggatagctgggggagtggggaccccactgatagcctcaggggctcctccctctgctgtggcagcccccaggtccacctgtgcagggttactcaaagagactgggctgggggaggctggacctggggaggccgggcttggggaggctggtgaacgcccgctttggcgcccggcaggctgagggggtggtgggtgtaaacggggtgcactgtgggggct

SEQ ID NO: 7025 - DNA, 167 bp, Homo sapiens
aagcttgcggccgcggttttttttttttttttcggcttcccttttttctatatctttcccttaaccttaaaaaaatcagggttaatatttaaatgttgcaaataacaaaaacctaaatgggattttggcctacgggtttaagggacggggaaaataagggggccaat

SEQ ID NO: 7026 - DNA, 658 bp, Homo sapiens
tcggcacgaggatagaacgttaaagtgtgaaggaaccatcaggacagctcaagaagccgaaaccaagcaaatcagatggcccagggccacacagggaaggagtggaggggtccctgcgggagtgctgccccttccaggcctcctctgtcaccagaggagctggtcctgctgcttacagtcatattaaacctttggatggggtatgtaaggacactttcccctggaaaaatgctacgtcactcactttatatcctggccttaggccaactgagccttcaccccaccctccctgcctaagtcacctcaccaagcatcctctggtactgacgacgatgcttttggcctggttaccaagctttcctgaccacctgatggtagggcccctccacatgggctattcatcctcccagaagcaggtcctccagtgactgatctgcactaatgtgggcaaacagagggcatcctcctcctctctctgcttcttttctttgcaaaattagtgggacaaataggtacaagttgcatgaaaatgagatacagttcttcatttgccatccacaccaggagcaccaggtcccggagcccagctgtgcattagatgttgtctctgcagcacaaggtaggaggctgcaggatgtacctgagaaacgcaatcgca

SEQ ID NO: 7027 - DNA, 408 bp, Homo sapiens
ttttcacttcatttcatcaattcattctttattcaacatacacttgttgatgcccggctctgtgcccgacaagatggtagctgtggagactgatctgaaaaagcaaccttcgtgacaggtggaagttggatgggaacaacccacccagccaattaggttcctcagttgcatgacaccaaggagctgctgtctgggaaatgcacttattacgagagggacaaagtgtgactgagccacaggctcacctcagccagtcaaaaggacttgggcactgcctcattcaagccaccttggagcagacgtggctacgctcccagcagccctgtacccatcggccactgaagatctcagctctcgtcagccttgcaaagcttgctgcatctgagtcttgggctcccggtccactgc

SEQ ID NO: 7028 - DNA, 98 bp, Homo sapiens
taatgtaacctggagcttttatacactacatttcttttttattatgaagaatgggatacctccaggttccagtaaaattcttctgaccgaaaccaatg

SEQ ID NO: 7029 - DNA, 394 bp, Homo sapiens
tctgtcactcactacatgaataagcaaatattgtcttcaaaagaatgcacaagaaccacaattaagatgtcatattattttgaaagtacaaaatatactaaaagagtgtgtgtgtattcacgcagttactcgcttccatttttatgacctttcaactataggtaataactcttagagaaattaatttaatattagaatttctattatgaatcatgtgaaagcatgacattcgttcacaatagcactattttaaataaattataagctttaaggtacgaagtatttaatagatctaatcaaatatgttgattcatggctataataaagcaggagcaattataaaatcttcaatcaattgaacttttacaaaaccacttgagaatttcatgagcac

SEQ ID NO: 7030 - DNA, 566 bp, Homo sapiens
agtgcaaaagactgttactttattattgtattcaaaattcattgtgtatattactacaaagacaaccccaaaccaatttttttcctgcgaagtttaatgatccacaagtgtatatatgaaattctcctccttccttgcccccctctctttcttccctctttcccctccagacattctagtttgtggagggttatttaaaaaaacaaaaaaggaagatggtcaagtttgtaaaatatttgtttgtgctttttccccctccttacctgaccccctacgagtttacaggtctgtggcaatactcttaaccataagaattgaaatggtgaagaaacaagtatacactagaggctcttaaaagtattgaaagacaatactgctgttatatagcaaggcataaacagattataaacatcagagccatttgcttctcagtttacatttctgatacatgcagatagcagatgtctttaaatgaaatacatgtatattgtgtatggacttaattatgcacatgctcagatgtgtagacatcctccgtatatttacataacatatagaggtaatag

SEQ ID NO: 7031 - DNA, 513 bp, Homo sapiens
cccggaagcgttggaggacattccctgttgactgcgtcgcgatgtgtggcgactgtgtggagaaggaatatcccaaccggggtaatacctgcctggagaatggatctttcttactgaactttacaggctgtgcagtgtgcagtaagcgggattttatgctgatcacaaacaaatccttgaaagaagaagatggagaagaaatagttacctatgatcatttgtgtaagaattgtcatcatgtaatagccagacatgagtatacattcagtatcatggatgaatttcaggagtataccatgctgtgtctgttatgcggcaaagccgaagatactatcagtattctccctgatgacccccgacaaatgactctcttattctaaggatccttctacagatctgttataactatattgtgttggtttacaatacagcaagcctgatggtttgtcttatttcattcatactgaaaattctttgcatattttttttctgcttagacttacttattctttg

SEQ ID NO: 7032 - DNA, 554 bp, Homo sapiens
cagatcatccattttaactttgcattttccccttacattgcgttgtcttacatggcacattctttcttctaccacggtatctttggccgtgcttgtacctgatgttaagatgcctttccttttcctctgcatctgttttgttttaggaatgatttgtttgcaagaatagttcccaccccaacaaacttaagtaaaagcttatgttatttgataggacagggatttattatagagtaaaaatgaaggaaagtacagtcacctgagactgaaaacagccactcagtgaccaaaacagctcttctcacaccttttttgaggctgcttgtttggttgtttcttatttctgcatctctattcttttttaaaattttttctggtcgagcgcagtggctcatgcctgtaatcccagcactttgggaggccgaggcgtgtggatcacatggtcaagagatcgagaccattctggctaacacagtgaaaccccgtctctgctaaaaatacaaaaaaaatattagccgggcatggtggcaggcacctgtagtctcagctactcg

SEQ ID NO: 7033 - DNA, 557 bp, Homo sapiens
gttaaaaggaattcatgcatagaaagagataatagactatctgcagttcattagtagttgtattcagattgggaaaacaaagtgttaattgttgaaagttgtttagggactgctgggtcttggagtcagcacctgggtttgcattccttctctgcaattttctgtatatgatctcaggcaagttacttgaccactctaaaccctggcttcctcatctatataatatagatgatagcatctgcctcacagggttatcatgagaattggatgcagatgtgtacaaactgttccgtgaggcatcaggcactcagtcagtcactaatactatcagcttacaaagctgaggattcaatcatccagtcattagcaatctgttgttgggatgtgccagtgttatctagcaaccagttggaatctgatagcaatcagaaattagataggttattcctggattaaacagtatattcatataagtgattgcttggatcctcatcagaagctgctattgaaaaatagtgatatggctggccgggcatggtggctcatgggtgtaatcc

SEQ ID NO: 7034 - DNA, 342 bp, Homo sapiens
gcccagtgttctttctgtatacttggtctctgtggcttatttcttttctcagtctcttatcccagctgatgagaaatagccacaggtgtggaggggctggccccccttcagggttttatgccttgggcttaggttgtaatttggcagggcggccttccaccctttggcacagagctgggtgttcgcacgaccacaaggggttttaggccctggaccccggcatgttccaagactctatattatgtcagactagcaagccctgcgtcggcttttccccaacatggaacgctgttctaaaagcacccatgattcttttttttcttttttttctttttttttttt

SEQ ID NO: 7035 - DNA, 373 bp, Homo sapiens; identical to SEQ ID NO: 2103

SEQ ID NO: 7036 - DNA, 60 bp, Homo sapiens
tgcaccgctcactaaactgccgatcaaatgtttcctagatttcaaagcgggaggctcctt

SEQ ID NO: 7037 - DNA, 464 bp, Homo sapiens
tagtaggattgctgggtcaaatggtatttctgtctttaggtctttgaggaattgccacactctcttccacaatggctgaagtaatttacactcccacgaagagtgtaaattaaaaagcattcctttttctccacaaccttctcagcatctgttattttttgactttgtaataatagccattctgactggtgttagatggtatctcattgtggtttttgatttgcatttctctaatgagcagtgatgttgagcttcttttcacatgactgttggtcacatgtatgccttcttttgaaaagtgtctttttctaacttttcatctgctccttaagacctgcttttggagaaaagtgtatcagtgccaaaaagtgtggtaaggggtgttttccttacatgatattgttacatgtctacatgatcttgttacatgtagtaaacaagatgttcatgcctaattgaattct

SEQ ID NO: 7038 - DNA, 533 bp, Homo sapiens
gacagagggggagtttcgctcttgttgctcaggctggagtgcaatggtgtgatctcggctcactgcaacctccgcctcccgggttcaagcgattctcctgcctcagcctctcgagtagctgagattacaggcatgatccgttgctcccagccacccatgtattcctgattgaaaaaatttgcttatgtcttagttctacagctgaccccctttcgctattttcaaggtcaatagctgtgtgttcacacttctgcattttataaatgttactgtgattttcttctaaggaaagattaaatgtcaggaatcagtggcatcagaaccttgcaaaagaagtttctttagcccaggcctgtgaaagatgcttctgtaattttcaaggataggggtgataaagaccaagccttcccattagcccttccaggcccccatgtaagaattcaggcacaccttctcactcatctcagaccttctcaaggtaacttggtgaaaatttccctgctctgagcccagtgagcctccctgcaacttgg

SEQ ID NO: 7039 - DNA, 472 bp, Homo sapiens
gagtgcgcaaccgttcgctaactgaaatgatggcgactggaacgccagagtctcaagcgcggttcggtcagtccgtgaaggggcttctcacggagaaggtgaccacctgtggtactgacgtaatcgcgctcaccaagcaggtgctgaaaggctcccggagctccgagctgctaggtcaggcagctcgaaacatggtactccaggaagatgccatcttgcactcagaagatagtttaaggaagatggcaataataacaacacatcttcaataccagcaagaagctattcagaagaatgttgaacagtcatcggatctacaggaccagttgaatcatctgttgaaatagaatgacatgtaagagtgctgtaggactcctttgcctaatgctgaggagtaaataccttacacagctgtcctctgggtttggttttctattttcttctccaaaagttaagtcagaaaagttctgtg

SEQ ID NO: 7040 - DNA, 147 bp, Homo sapiens
atctattgagcttgtttcttgtaaacttttctttatcttataaaggcatatctcgcttttgtatcgacctgttccttaaaaaatgtatttgataaaacaggctaaaattcatttgagtattgaaaagaattcttttttttttttaaa

SEQ ID NO: 7041 - DNA, 58 bp, Homo sapiens
gataaggaatggagtttgacccaaccccaagatatgccctggggatattggttttctc

SEQ ID NO: 7042 - DNA, 524 bp, Homo sapiens
atcttctaaaaactaactggtatggaaatattacagtcctgtaattctttcttctaggtcatattgaacattccagatacctatcattactcgatgctgttgataacagcaagatggctttgaactcaagactaagaaagcactgtgcatcaccttgaccctggggaccttcctcgtgggagctgcgctggccgctggcctactctggaagttcagtaagtgcagggagcctcgatcccaccatgtgctcctgcagtccccagtgctctgagccagaccctgctctctgggctattgagacctctggaggccctccatgaggttcctctcttacataacgaggctgtctctcttcccttctcttgtttagctatgagattgacacatcatggggaaagcatttaaaatgtacccagtgctttggggtgcttggtgccacccagcactgtgagcacaggttcttctaccttggggccacacccagttacctgtatctcactgcacagcagtggctgttggggacc

SEQ ID NO: 7043 - DNA, 560 bp, Homo sapiens
gacattctttggtcaaggatacagccaaggcactggtacagataagaacaaaccaaatatcaaaatttgtactcaggtgaaaggaccagaggctggctatgtggctacccccatagctatggttcaggcagccatgactcttctaagtgatgcttctcatctgcctaaggcgggcggggtcttcacacctggagcagctttttccaaaacaaagttgattgacagactcaacaaacacggtattgagtttagtgttattagcagctctgaagtctaaacactggaagaattaactgaagtcataacgtgcgtgaattaacagcttctctatttgatatttgaaattcttctgtaagcctgtctgagtgtatgtggaaacgattgtcaaatctaaaatatctatatattaaaaagtaggaaattgtcctagcttaccctaaatttcaaatctgagttgattttgtgattttattgcttataacagagaactcatatttgacatatttttttcattgatgtgttcctggtagattttcacgaatgaactggcaggtctaatg

SEQ ID NO: 7044 - DNA, 124 bp, Homo sapiens
tacggctgcgagaagacgacagaagggtacggctgcgagaagacgacagaagggtacggctgcgagaggacgacagaagggtacggctgcgagaagacgacagaagggtacggctgcgagaaga

SEQ ID NO: 7045 - DNA, 538 bp, Homo sapiens
cacagtggaagactacctacattagctatgcatttcaagagctcacacttatattgtggcatatagtcaacatggaagtagaccagctctgctgatttgaaatttagattttttaaattatgtactggggacaggtttttgtcgcggtacattgcttcctagtttacagcatgatgcaaatgattttctaacttagtgttaggagaaattattttccatctttaacctcttagttgtctaagagttaaatattactgaatttcagacgttcaaattgatcatcacaaatcctttaaaacaattacctaaaagaaaccaaaaatcctgccttctttgtgggggaggggggagagaggggaaggaaatggaacaagttgtgtttgtgttagcatgtgggtgatgtaaacttcaaattgggagatgttccgacccccactcccatataagcattcaatcagtgtaacttgcaaaatgcataaacatccgacagtttgaatttatagtgttgatggaagaaatcatttttaatgtgtactgt

SEQ ID NO: 7046 - DNA, 483 bp, Homo sapiens
gggggctggagaagcagcatccaaagaaagcgaacccaaacaatctacagagaaacccgaagagaccctgaagcgtgagcaaagccacgcagaaatttctcccccagccgaatctggccaagcagtggaggaatgcaaagaggaaggagaagagaaacaagaaaaagaacctagcaagtctgcagaatctccgactagtcccgtgaccagtgaaacaggatcaaccttcaaaaaattcttcactcaaggttgggccggctggcgcaaaaagaccagtttcaggaagccgaaggaggatgaagtggaagcttcagagaagaaaaaggaacaagagccagaaaaagtagacacagaagaagacggaaaggcagaggttgcctccgagaaactgaccgcctccgagcaagcccacccacaggagccggcagaaagtgcccacgagccccggttatcagctgaatatgagaaagttgagctgccctc

SEQ ID NO: 7047 - DNA, 664 bp, Homo sapiens
tgcagaggacgctgtgcccactcttactccatgccgcttcactggcagtgagatccgccaccgtgatgatgctctaccttttgcccacgtggccattgcagtagagggtcctggctgggccagcccggacaatgtggccttgcaagtggccaatgccatcatcggccactatgactgcacttatggtggtggcgtgcacctgtccagcccactggcttcaggtgctgtggccaacaagctatgccagagtttccagaccttcagcatctgctatgcagagacgggcttgctgggtgcacactttgtctgtgaccgaatgaaaatcgatgacatgatgttcgtcctgcaagggcagtggatgcgcctgtgtaccagtgccacggagagtgaggtggcccggggcgaaaacatcctcggaaatgccctggtatctcatctagatggcactactcctgtgtgtgaggacatcggacgcagcctcctgacctatggccgccgcatccccctggctgaatgggaaagccggattgcggaggtggatgccagtgtggtacgtgagatctgctccaagtacatctatgaccagtgcccagcagtggctggatatggccccattgagcagctcccagactacaaccggatccgtagcggcatgttctggctg

SEQ ID NO: 7048 - DNA, 504 bp, Homo sapiens
gggaggatggaagaggctgattctctcattgaatctctctgtcgtgacaaggacccaattcttcgaaggtctggaatgtatactgtagccatggcttattgtggctctggtaacaacaaagcaattcgacgcctgctacatgttgctgtaagtgatgttaatgatgatgtcaggagggcagcagtagaatcacttgggttcattctattcagaacccctgaacagtgcccaagtgttgtctctttgttgtcagagagttacaaccctcatgtgcgctacggagctgcaatggccttggggatatgctgtgctggtacaggaaacaaggaagccattaatttgctagaaccaatgacaaacgaccccgtgaactacgtgaggcaaggggcactcatagcttcagctctcatcatgatccagcagactgaaatcacttgtccaaaggtgaatcagttcagacagctgtattccaaagtcatcaatgataagcatgatgatgtcatg

SEQ ID NO: 7049 - DNA, 72 bp, Homo sapiens
attcattttttagcaggtagtatggcattgtggttaagaatttacatttgtgaacatttaccagctgatgac

SEQ ID NO: 7050 - DNA, 535 bp, Homo sapiens
atcacataaacatggacttgaaaaattaggcttttcataaaacacatcacatgtcattgactgctttttagaaatacacttccaaggcagtacgtctgtattgctactgaaaagtgccatttcacagaacacagacttctttttgctctttgacatcttgaaaacatctgtttttcttttttaatacaaaactttgtgctcaagacaaatcttacatgaaactctcataaaccatgaaaatgtagctggccttcgggccttaggcatgaaataagcatgaggaacatattcccctaacttctacccccagcccagcaagttatcctttaagaaatctcctaggaattctggagtttgaaaacaattgctctatgttattcctgcttccagtctctaagtaacaagggcatttaaaagcatagtctcttaaggtccacttatagtggttctttatttaaggaataactcagctgggtgcagtggctcacgcctgttatcccagcactttgagaggctgaggcaagcagatcacttg

SEQ ID NO: 7051 - DNA, 117 bp, Homo sapiens
gggggggcgcccggaaaccccaaggcccaaacggctctcaaatccggggactgcggataaatggccttaggccgcgggcagcgaaatgttgcgttccggtgtgggtgtgggtgtgcc

SEQ ID NO: 7052 - DNA, 544 bp, Homo sapiens
acagaagggagggaattttctacacacattaggcaaatgtatgcttttcatcctctgggcttacctctctcctctgcaatcctggaagcattgtgcatagttctttcattgtaagccgctatttaaattcccacaatgcaaaactgttagaccagtaattgtgctactgaaattgtcacaaaacgttattccttgatttggtttttaaattttgcttttgtgtgtgtgtctttaaacaggtaatgtgtatttaagtgttgtctaaacagttgatttttactttagaaaagatcatcttcaactgtttattgacttctgagttatatagttcatgccctgccaaggcattgttcgactccatgatactaaaacataatgaaagaaacaaactccagtatggagaagagaaagtttaattatttggttccatctagaaaagcaacaacttaaaggaatccttcactaggattgtcttatcacctttattagataaatcatgaagtgtccctgtgaaattgaagtgaaactatctctgtaggactta

SEQ ID NO: 7053 - DNA, 646 bp, Homo sapiens
acatttatatttaattaaacatgaggtccatttagattttgggttgattcattcatctgtgattactgagcatttgccatgtgccagtcaatcagtattaggcaccagagttaccacagtgagcaagagagacatggaccccttctgcaagatgcctagacaattaaatggccaatgaaactaaagtgaggtaagggttctgatgtgaaaagctgagggtgtgatgaggacaagtggcagaaagttcacctggcttggtggaagggaaggtcagagaagacctcttagaggactcagtaatgtccattgaggattttaggttgaagggaatgtttgaagtttgagggcccttttgaggaccaccaagaacttcactgtgctgtaggatattgagcaggaggtgaagctagagagatgtgtaggccacattgcagagtttgaacttggggcaatgggaagccattgaagggttttaaacaacccaagtggtgcattcttctgtaaatgttagagagatcagtggctgccctgcacatcaaaggggagaacgattggagacaggcagattagatggaaggacggagttgtactccaagccaaagatgatggagagtgaattaagttagtgcaatgggaccaagtctag

SEQ ID NO: 7054 - DNA, 511 bp, Homo sapiens
aaaactcaatagttctgttacttaggctgttagatccaagttgatttttgtgtctacagctaaattttgtttacaattaggctattttttaatataggatttagaaaccaagggtatgtgttttaaaattacactttttcttaacctgtctagctgtcggaaaaggtaacagaagatggaactcgaaatcccaatggaaaacctacccagcaaagaagcatagcttttagctctaataattctgtagcaaagccaatacaaaaatcagctaaagctgccacagaagaggcatcttcaagatcaccaaaaatagatcagaaaaaaagtccatatggactgtggatacctatctaaaagaagaaaactgatggctaagtttgcatgaaaactgcactttattgcaagttagtgtttctagcattatcccatccctttgagccattcaggggtacttgtgcatttaaaaaccaacacaaaaagatgtaaatacttaacactcaaatattaacat

SEQ ID NO: 7055 - DNA, 557 bp, Homo sapiens
acagaagggatatatgaagtgtgggatatattcttatagtttgtaaaatgtagtcaaccaatactgtcttctaatttggtaatttatttataaaattacttaaacattaggtaattatatttgttaggatttgaaattatttgtagttaaattgtcatgctgtttgaaataattgatacttgtctacgtaatacattttactgtatgttttgaagatggttataatttcactttcaaaatttaaaaaatcaattttaaatgttttaaaaacatatagcttagggattttttttaaaaaggttttcttagtaaaaacataaatttaaaagcccctgagttctaggagagggcttattgaattgctataagaaagctggagttactttgataagtaataaattataaatagcactgatctataatgctttatttctatcggaaggtactttttcttctttcatcatcagttttagccagttagtaaatgggaatactcagttttagggatttgatttttgtttggtttaattttctttcaaaaattaaaagtatatttc

SEQ ID NO: 7056 - DNA, 569 bp, Homo sapiens
agaaagcatgtcaggacagagctgttggattggctttgatagaggaatggggatgatgtaagtttacagtattcctggggtttaattgttgtgcagtttcatagatgggtcaggaggtggacaagttggggccagagatgatggcagtccagcagcaactccctgtgctcccttctctttgggcagagattctatttttgacatttgcacaagacaggtagggaaaggggacttgtggtagtggaccatacctggggaccaaaagagacccactgtaattgatgcattgtggcccctgatcttccctgtctcacacttcttttctcccatcccggttgcaatctcactcagacatcacagtaccaccccaggggtggcagtagacaacaacccagaaatttagacagggatctcttacctttggaaaataggggttaggcatgaaggtggttgtgattaagaagatggttttgttattaaatagcattaaactggaattgacaagagtgttgagcatacctgtctaacctgctctttctctttggtgccccttatctcaccccttcctt

SEQ ID NO: 7057 - DNA, 599 bp, Homo sapiens
acagaagggacatgaccaccaaatggtggtgttcgggtatgaggctgggactaagccaagggattcaggtgtggtgccggtgggaactgaggaagcgcccaaggttttcaagatggcagcatctatgcatggtcagcccagtccttctctagaagatgcaaaactcagaagaccaatggtcatagaaatcatagaaaaaaattttgactatcttagaaaagaaatgacacaaaatatatatcaaatggcgacatttggaacaacagctggtttctctggaatattctcaaacttcctgttcagacgctgcttcaaggttaaacatgatgctttgaagacatatgcatcattggctacacttccatttttgtctactgttgttactgacaagctttttgtaattgatgctttgtattcagataatataagcaaggaaaactgtgttttcagaagctcactgattggcatagtttgtggtgttttctatcccagttctttggctcttactaaaaatggacgcctggcaaccaagtatcataccgttccactgccaccaaaaggaaaggttttaatccattggatgacgctttgtcaaacac

SEQ ID NO: 7058 - DNA, 375 bp, Homo sapiens
tacggctgcgagaagacgacagaagggtacggctgcgagaagacgacagaagggtacggctgcgagaagacgacagaagggtacggctgcgagaagacgacagaagggtacggctgcgagaagacgacagaagggtacggctgcgagaagacgacagaagggtacggctgcgagaagacgacagaagggtacggctgcgagaagacgacagaagggtacggctgcgagaagacgacagaagggtacggctgcgagaagacgacataagggtacggctgcgagaagacgacagaagggtacggctgcgagaagacgacagaagggtacggctgcgagaagacgacagaagggggctcacgcttgtaatcccagcac

SEQ ID NO: 7059 - DNA, 610 bp, Homo sapiens
acgaagggactcgctaagtgttcgctacgcggggctaccggatcggtcggaaatggcagaggtggaggagacactgaagcgactgcagagccagaagggagtgcagggaatcatcgtcgtgaacacagaaggcattcccatcaagagcaccatggacaaccccaccaccacccagtatgccagcctcatgcacagcttcatcctgaaggcacggagcaccgtgcgtgacatcgacccccagaacgatctcaccttccttcgaattcgctccaagaaaaatgaaattatggttgcaccagataaagactatttcctgattgtgattcagaatccaaccgaataagccactctcttggctccctgtgtcattccttaatttaatgccccccaagaatgttaatgtcaatcatgtcagtggactagcacatggcagtcgcttggaacccactcacaccaatccagtgaccgtgtgtgggctggcggctcttctcccccaccaacggaacccctgtgtgcaccaaccttccccagagctccggagcgccctctcctcacttacaggttttggagcaagagcttgcaggaagcccgcacccagcttccttctgac

SEQ ID NO: 7060 - DNA, 382 bp, Homo sapiens
gacagaagggtggttgaaatgctctgatggaagactcccattataccagcatcagcagtgtggaggggccagccagtaaagtgatctctctctggttggaatatgtagagaaaaggagacaacaccgtcgcccagaagtggaggttgccatattacttgcacaaacctcatgccgttaggtcttcagccacagccgatatttgcagagatgtatctccagcgatctatctccagagatggaacctggagaaatgaccaaacttgacacagccttcaatggttggataaatagctcattaacccaattagtagagaaagctgtgcaatccaagcactagcactgtttgtaggagttattaatggataacacaatgtattatta

SEQ ID NO: 7061 - DNA, 554 bp, Homo sapiens
aattatcttattctctctgaaattctgtgtaagtgttagttacacgaagttaccttgaaaacactgcctcgcatttattcagtactcaccatgttcggtgcttgatatatatctcatccctataacaacactaaaaagtaatcttattagaaggcaggtattttatttattttattttatgttattttattttatttttttcagacagaatcttgctctgttgcccaggctgaaatgcagcggcatgatcacggctcactgcagtcttgacctcccaggctcaagagatcctcccacctcagcctcctaagtaggtgggacaacaggcacatgtcaccacacccagctaacttttgtattttcttgtagagacaggattttgcagtgttgcccaggctgatctcgaactgctgggctcaagcgatccgccagccttggcccctcaaagggctggaattgcaggcctgagccacatgcctggtctggtattttattttaaatcataatcccttgcaaaacatcctgcatggtagatatataacaaatgtttactg

SEQ ID NO: 7062 - DNA, 489 bp, Homo sapiens
gacagaggggtaaatcatggtcagttcttatgggccttgtaagccaagttaagaacattcaagatgaaagaacatgaggaggttgacagttcagatggacctccctggcagccgagtctgtggagtgaagggagggaagttaaaaacattcgagatgaaagaatgtgaggaagtttgcagttcagatggacctccgtggcatctgagtctgtggagtgaagggagggcacgcttggaggcggggccttcaggccttcctgcgcttgtgtctgtgagataaaggcctgaactaaggtaacagggaaggagaaaatgaaactgaaggaggtaaactggaatttggagactgacgaggagagaaaggaaagcattccagggaaaccccagttttttgcttggctactttgggtaggtgatggtgtcattaaccagaatcaaaaatgtcagtggtagattagatttgagtggggaaataaaaagttctctttg

SEQ ID NO: 7063 - DNA, 609 bp, Homo sapiens
acagaagggggcgcggctctgggtccgtctcgccgcgtccgggttgtcactctctcgggttgttactctgtagcttcccggctcgcgaaagggaggacctgtctgggtcatggattttgagaatcttttctcaaaaccccccaacccggccctcggcaaaacggccacggactctgacgaaagaatcgatgatgaaatagatacagaagttgaagaaacacaagaagagaaaattaaactggagtgcgagcaaattcccaaaaaatttagacactctgcaatatcaccaaaaagttcgctgcatagaaaatcaagaagtaaggactatgatgtatatagtgataatgatatctgcagtcaggaatcagaagataattttgccaaagagcttcaacagtacatacaagccagagaaatggcaaatgctgctcaacctgaagaatctacaaagaaagaaggagtaaaagataccccacaggctgctaaacaaaaaaaataaaaatcttaaagctggtcacaagaatggcaaacagaagataatgaagcgaaaatggcctggccctggaacaaaggatcaaatgctttgctgaggaacagcggctcacagga

SEQ ID NO: 7064 - DNA, 520 bp, Homo sapiens
ggagaggctaagccataatagaaagaatggagaattattgattgaccgtctttattctgtgggctctgattctccaatgggaataccaagggatggttttccatactggaacccaaaggtaaagacactcaaggacagacatttttggcagagcatagatgaaaatggcaagttccctggctttccttctgctcaactttcatgtctccctcctcttggtccagctgctcactccttgctcagctcagttttctgtgcttggaccctctgggcccatcctggccatggtgggtgaagacgctgatctgccctgtcacctgttcccgaccatgagtgcagagaccatggagctgaagtgggtaagttccagcctaaggcaggtggtgaatgtgtatgcagatggaaaggaagtggaagacaggcagagtgcaccgtatcgagggagaacttcgattctgcgggatggcatcactgcagggaaggctgctctccgaaacacaacgtcacagcctctgacagt

SEQ ID NO: 7065 - DNA, 538 bp, Homo sapiens
acagaagggtagggagcattctcctcctcctctgtgcacggttgcggtggaactctgtgggcatccctctgagcctttgctggtgctctgcacacgctattaattacatgaaaaatattattacagcatttttaaaaacctatcaagcagctaatattttccgcccacccacatttaccacaagcaattttgcttccacttacctgcctgccactcatttcattagtttaagagaatgttcgtttgtgcttagagaccagtagatttcgagatggcacagagccacagtcattccacctgaaaggaatgtgtgcagaagcaaatataagagaagcagttgtgtcattgctcctgttagtaagcagtggatttcttgtaaagtttttttttgttcgtttgtttgtttttttaaaaaaaggaagaaaaaccggccaggcatggtggctctagcctgtaatcccagcactttgggaggctgaggcaggtggattacctgaggtcaggagttcgagaccagcctggccaatatggtgaaacc

SEQ ID NO: 7066 - DNA, 536 bp, Homo sapiens
gatccccaagaggcggccgttaaggacagttgtggcaaaggagaaatggccacagggaatgggcggcggctccacctggggattcctgaggccgtgtttgtggaagatgtagattccttcatgaaacagcctgggaatgagactgcagatacagtattaaagaagctggatgaacagtaccagaagtataagtttatggaactcaaccttgctcaaaagaaaagaaggctaaaaggtcagattcctgaaattaaacagactttggaaattctaaaatacatgcagaagaaaaaagagtccaccaactcaatggagaccagattcttgctggcagataacctgtattgcaaagcttcagttcctcctaccgataaagtgtgtctgtggttgggggctaatgtaatgcttgaatatgatattgatgaagctcaggcattgttggaaaagaatttatcgactgccacaaagaatcttgattccctggaggaagaccttgactttcttcgagatcaatttactaccacagaagtcaatat

SEQ ID NO: 7067 - DNA, 459 bp, Homo sapiens
atgaaggagaggtagatttctgagtgattcaggtttaaccagctgggtatggtggttccacgtattcaggtggcaaacaggaaaaacatgtgttcgaagaagaatggaggtaggtggtctcttaagaatggttaagaggcttgggagtcagactgcttgggtttgcatcccagctttgccgttttctggctatcaaacttgtcagctattatttgttgagtacgtactatttgatttatgaccacaggcagctgagcctcagtgttggtgcctagtgtacaagattgttaaagaataaagttattttgcaaagtgtaacccatttttagcactgacatagcactgacagtagctgctgatctcattatgggctaaaataagacaatattcaaaggtcagagatatctagccagaatctgatgggggctggatttcagattttgttacagaattagacag

SEQ ID NO: 7068 - DNA, 552 bp, Homo sapiens
ggattccgccgccggcttcgctatggcggcaattcccccagattcctggcagccacccaacgtttacttggagaccagcatgggaatcattgtgctggagctgtactggaagcatgctccaaagacctgtaagaactttgctgagttggctcgtcgaggttactacaatggcacaaaattccacagaattatcaaagacttcatgatccaaggaggtgacccaacagggacaggtcgaggtggtgcatctatctatggcaaacagtttgaagatgaacttcatccagacttgaaattcacgggggctggaattctcgcaatggccaatgcggggccagataccaatggcagccagttctttgtgaccctcgcccccacccagtggcttgacggcaaacacaccatttttggccgagtgtgtcagggcataggaatggtgaatcgcgtgggaatggtagaaacaaactcccaggaccgccctgtggacgacgtgaagatcattaaggcatacccttctgggtagacttgctaccctcttgagcagctcttctg

SEQ ID NO: 7069 - DNA, 471 bp, Homo sapiens
ggacacactctgcgtcctcgcctcaccaggaaactactaaagttcctggggaagcaaagtagaatttcataagaacaaaatggatggagaggagaaaacctatggtggctgtgaaggacctgatgccatgtatgtcaaattgatatcatctgatggccatgaatttattgtaaaaagagaacatgcattaacatcaggcacgataaaagccatgttgagtggcccaggtcagtttgctgagaacgaaaccaatgaggtcaattttagagagataccttcacatgtgctatcgaaagtatgcatgtattttacgtacaaggttcgctacactaacagctccaccgagattcctgaattcccaattgcacctgaaattgcactggaactgctgatggctgcgaacttcttagattgttaaataaaataaattataataaactgttaactcttttcagtatttaatacctgtag

SEQ ID NO: 7070 - DNA, 517 bp, Homo sapiens
ggaaccaaatcctcactggcaccctgtgctgcgcacactaaagaaccgcattgaagagaacactggccacaccttcaactccttactctgcaatctttatcgcaatgagaaggacagcgtggactggcacagtgatgatgaaccctcactagggaggtgccccattattgcttcactaagttttggtgccacacgcacatttgagatgagaaagaagccaccaccagaagagaatggagagtacacatatgtggaaagagtgaagatacccttggatcatgggaccttgttaatcatggaaggagcgacacaagctgactggcagcatcgagtgcccaaagaataccactctagagaaccgagagtgaacctgacctttcggacagtctatccagaccctcgaggggcaccctggtgacgtcagagctttgagagagaagcttcactgaaacggagcaaaccttccactgagaagccacttcaagaggctggtgctgctagatctcatgatgtggct

SEQ ID NO: 7071 - DNA, 556 bp, Homo sapiens
acagaagggggacggtcatgggacttcagcatggcggtgtttgcagatttggacctgcgagcgggttctgacctgaaggctctgcgcggacttgtggagacagccgctcaccttggctattcagttgttgctatcaatcatatcgttgactttaaggaaaagaaacaggaaattgaaaaaccagtagctgtttctgaactcttcacaactttgccaattgtacagggaaaatcaagaccaattaaaattttaactagattaacaattattgtctcggatccatctcactgcaatgttttgagagcaacttcttcaagggcccggctctatgatgttgttgcagtttttccaaagacagaaaagctttttcatattgcttgcacacatttagatgtggatttagtctgcataactgtaacagagaaactaccattttacttcaaaagacctcctattaatgtggcgattgaccgaggcctggcttttgaacttgtctatagccctgctatcaaagactccacaatgagaagaatgtaattatatctagtgctgcaga

SEQ ID NO: 7072 - DNA, 490 bp, Homo sapiens
gacagaagggactggagtacagtggtgcgatcatggctcaccacaacctccgcctcccaggttcaagggattcccctgcctcagcctccctagaggcacgcgccaccacacccggctaatttttgtatttttagtagaaatggggtttcaccatgttggtcaggctggtctcaaactcctgacctcatgatccgcccgccttggcctcccaaagttctgggattacaggcatgagccactgtgctcggccttcacagttttttttttttaagtctattgctaatgcaacagctatgtagcatgcttaagccaaaacattgataacaatttggcaaataaacagcatgccagtgtgcaagccaagcctctagactctcaaacttttattctgctaaatttccaccgtagtttttagtcctaggaatatatatatcttaggctaaaacttcaaaatcatgggtgaatttttggatggcctaacttatttaag

SEQ ID NO: 7073 - DNA, 557 bp, Homo sapiens
acagaagggattattccagctgcctcccagattaatgcataaagccaaggaactaccccgctccctacgctatagggtcactttaagctctggggaaaaaggagaaagtgagaggagagttctctgcatcctccctccttgcttgtcacccagttgcctttaaaccaaattctaaccagcctatccccaggtagggggacgttggttatattctgttagagggggacggtcgtattttcctccctacccgccaagtcatcctttctactgcttttgaggccctccccccctctctgtgggtaggggttacaattcacattccttattctgagaatttggccccagctgtttgcctttgactccctgacctccagagccagggttgtgccttattgtcccatctgtgggcctcattctgccaaagctggaccaaggctaacctttctaagctccctaacttgggccagaaaccaaagctgagcttttaactttctccctctatgacacaaatgaattgagggtaggaggagggtgcacataacccttaccctacctct

SEQ ID NO: 7074 - DNA, 399 bp, Homo sapiens
gtactggaaatgcagcattgtttgaatatctattgtgtgtgagttgctttctaaatgtaccttaatccttacaaacctggaggaaaaaaatgtttttgaccctgttttacaagttcgtgaactgaaatttacataggtattttttgtatgcccaagccatactgccaatgccagaactagaacttgaacccaagttgtgactctcctttaccacttgatcaggagtttgctgatttagccaagtaacttgtaagatcttcacatgctttcttttagtgggattgcccagcaaagtgcttatcaggtgatgatcccagtgaagtatgtcacagttatgcagtaacttaaggctgctgtaatacggagatacattgaagttcattagtaacttttcagtga

SEQ ID NO: 7075 - DNA, 462 bp, Homo sapiens
acagaagggtagaacacaataggacagtgactgcacagttgtgaaaaaggaagagaatcattaaagaaaaagaaaaaagattttaagaccgttgaaatcaattatcaagaacgtcctaaaacacctatggctttgactttgttattgatccagattattttccttgcattggggaaaatatctttcatatttgtttgctgtaaagatggttttgcaagaataagtcatgaccaagacaaactgccaatacaaaagcccactgatactaattatataatgagaaaaaaatgtatccaactaggacacatatcttttgagttatttggactgaaagcttaagaaaacttggaaaattctattttgtgatctagtcaagccacagttatcaaaggctacattttcagtgtaagataaatggatgagtaaactcaaatatgtatcacgtgtgctttgtatcttaag

SEQ ID NO: 7076 - DNA, 564 bp, Homo sapiens
  misc_feature 511: n = A,T,C or G
aaaagctgcctgtgacttgagaaattgctcttactccctccttttctgttccttgtcagtgccctgaagtaaggagttgtagagttgggctcttctctgctgtggctgggcctgtgggaggcagctcatgagcctgactgccctagtgaatttcttcccaggtgtagtttttcaggtcacaattgaagcagtactggaaatgactctttgctcctaagaatcttcgagacaaataaggacttgggttaaaaaaacaaaacaaaacaagactgtttctattccattttattaattcagcagaagtcatactgaagacttgttcttctcctgttctcagctgcctgtctttttgccttttgcctctggttagcccatgtatgtgccaagtgtggcagtaaaggctgagtagtttttgaccacttactatgtgccaggcactgtgctaagatctctctgtacattgccacattcttcaatggcagtttgaaataagttctatcattattatccncattttaaagatgggaaaacagactgcaagaacttaagttgttacccaaggtc

SEQ ID NO: 7077 - DNA, 99 bp, Homo sapiens
gcttactggaaggagttaagggagcatgtgtggatgtggctgtggctgtgtgtgtgtctgtgtgtctgtgtgtatgtacagtttacatgaatgttcctc

SEQ ID NO: 7078 - DNA, 88 bp, Homo sapiens
aagctgtctggttcaagcaggagcttcacttacatctgactgttggtgctagttgtcagccaggccatgtggactcggagttatgact

SEQ ID NO: 7079 - DNA, 70 bp, Homo sapiens
ttgcagtcaggcttcatacgctattgtcctgcccgttagagcagccagcgggtacagaatggattttgga

SEQ ID NO: 7080 - DNA, 533 bp, Homo sapiens
agatcatcctatgggggcaagaaaagggtcaggctactctcgagggaagcgcgtcagctgattggcaatatgctgacggtggggggagtagataggggaggcagatgcagttggtgggtatggctggtacttccaaatacagccaaagtttatgcacttaacatgtattaggcacagcgctaattactataagtgattgatttgacttccccacatctttatgaagttgagtatgttattcctttccctcttttatttacttttcgatttatttttatttttttagacacatggtcttgctatgttgccagtctgggctcaaacttctggccttgagtgattctctcacctcagactcctgagtagctgggattacagatgcgggccaccacacctggctgtacaaactttaaaatgtttgagcaaattcaatgagtatagtaaaatatcttcctccctttaccgattcccaccctattctcccccacccccaccccaggcatcaatattatggtttcttgtgcactgagtga

SEQ ID NO: 7081 - DNA, 549 bp, Homo sapiens
tatccagtagtgggattgctggattggtagttctacttttagttctttaagaaatctccatactgttttccatagtggtactaatttacattcccaccagcagtgtaacagtgttccctttcattacatccacaccaacatctattgttttttgactttttaattatgagtcttcattattaatagagttcattccaaggtcttttttatttattgttttgatttgtgccctcaagctgtaatggcagacaggtaaagactgcaaatccttaaagaagaaaacaaatggatattaaaacagaaaaaagagaaaatgctaaattgtgaagaaggttaaaagacaagagaggggccgggcacggtggctcatgcctgtaatcctagcactttgggaggccaaggcgggtggatcacctgagatcaggggttcaagaccagcctggtgaaacattgtttctactaaaaatacaaaaattagctgggtgtggtggtggacacgtataatcctagttacttaggaggctgaggcaggagaatctcttgaacccg

SEQ ID NO: 7082 - DNA, 459 bp, Homo sapiens
atgtattgaaaacttggccattttaccccattcctatgaatgaaaactatttggtgaatcagaggatagtctgaattgggatatgaaggccagtataagtgtcagttagcaaagtcagctctagtttagttttttttttttttcttttaaggcgtacctttactaaaagtatagctttgggaaccttgtaccattttaaaaacttttaaagggttgacagcttttggcaaattgactaatacaaaaaactaaccttgggttcatgttttcaatgtctaaatgaaaaatgggaaaataaaaaagctaaaaatgaaatgggatttcatgtgcttctcctttttagctcttataataaattgaacaaatttgatatttggggtaaatccactcaggcaaagtgacaaaggcttggttgtcatttaccctttagggtcttagtggagttaatgaaaactgcaa

SEQ ID NO: 7083 - DNA, 434 bp, Homo sapiens
attttcaactttgaattgtaatcagaaagaaaatatattttaaccattgtttagtgcttctgttatatattgaaaacttcagtcttaattttttagttacattgttgatagggcattatataaatatacttctatagtcattgtaggaaatgtcttttataaggaaatatttcttctacctctgaattacacagttttgtatttacttggactgcatggcaacattcaaaaaacactttgaataacagataaaaatgacattttctaaagctctaggtttgctagatgcatgaagtctcagcaaagtataaatttgtaaatatttcattgtaaaatatcataaattgactccttcaagtgttcagtagtacaataggtaatcaataattggcctcttgggactgactgtaacgttttggtgtttgtatgttttg

SEQ ID NO: 7084 - DNA, 318 bp, Homo sapiens
atcatcatggctaccaactgcgagaactgtgggcatcggaccaatgaggtgaaatctggaggagcagtagaacccttgggcaccaggatcaccctccacatcacagatgcctcagatatgaccagagacctcctcaagtctgagacttgcagtgtggaaatcccagagctagaatttgaactgggaatggcagtcctcgggggcaagttcaccacactgggagggctgctgaaagacatccgggaactggtgaccaaaaatcctttcacactgagcgacagttccaatcctggacagacggagagactacaggagttt

SEQ ID NO: 7085 - DNA, 557 bp, Homo sapiens
gaatatgatcagatttctccaccaaattctcagcctgataaggaaaatcccgttttgtcaacctaatgaagcattcaaagaagacatatgactcttttcaagatgaacttgaagattatattaaagtacagaaagccagaggcttagagccaaagacttgtttcagaaagatgaaaggggactatttggaaacctgtgggtacaaaggagaggttaattccagacccacgtatagaatgtttgaccagagactcccatctgaaaccatccagacctacccaagaccatgcaatattccacaaacagtggaaaatcggttgcctcagtggttaccagcccatgacagcagattgagactagactctctgagctactgtcagttcacgagggactgtttctcagaaaaaccagtacccctgaactttaatcaacaagaatatatttgtggctcacatggtgtagaacatagagtttacaagcacttctcctcagataacagtaccagtactcatcaagccagtcacaaacagatacatcagaagaggaaaaggcaccca

SEQ ID NO: 7086 - DNA, 530 bp, Homo sapiens
acagaagggacaaccatcttaatgaacttcctgtacctgctgggaaaagttctgaacaactatatctgggatacacagaaaagtatggaagaagagaaagaaaagcctaaattgtaatgagatccaagtctaaacgcaagagctagattgagccgccattgaagactccttcccctcgggcattggcagtgggggagaaaaggcttcaaaggaacttggtggcatcagcacccccctcccccaatgaggacaccttttatatataaatatgtataaacatagaatacagttgtttccaaaagaactcaccctcactgtgtgttaaagaattcttcccaaagtcattactgataataacattttttccttttctagtcttaaaaccagaattggaccttggatttttattttggcaattgtaactccatctaatcaagaaagaataaaagtttattgcacttctttttgagaaatatgttaaagtcaaaggggcatatatagagtaaggcttttgtgtatttaatcctaaa

SEQ ID NO: 7087 - DNA, 434 bp, Homo sapiens
gggtcggggagtagaatagtgtgctcttatcagcatccttgtacaggtctttttatccttgtacaggtcttttcatccttgtacaggtcttttgttgagcacatgggaacatttttgttggatctatgcccagaagtataaatgctgagcagtagggtatgttcatgttcaactttagtaaattatctcaaaccattttccaaaatggttgtaccagtcgaaagtcccaccagcagtgtaagagaatttcagttgctctacatcctcaccacacatttgtctttttaatgttcatgagggatattagttggaagttttctgttttatactgtctttggctagttttgatatcagggtaatactgatcttataaaatgaattgagaagggtcccctgcccttttctcaaaaagattatgcttttaaaaaatgatg

SEQ ID NO: 7088 - DNA, 538 bp, Homo sapiens
acagaagggaactcacactttggataatactatcaaaaactaaggctaaacattccttgtgtatctttaagcatgcttctcctgaaatttaactacattagtagttgacatttgtatacatatatcctaatacaagagtaggataaggtggaaatgtaatggcctgagggatggtgaagcattcttttagtatttttcatcatgttgggctcctagattgtactggggttgcccataaatcaaaccccatactcttagaattcattatattatggtgatatccgaacctagtgaatggtatgcttgggtgttttccattgagagcggatggacctctttataaagttggttgctgcaaaatccagttcttccaaaagccactttatttagggtttattcacaagtcatatccattttggtacagtgtttgtttcctaatatttattaaccaccttataccaaatgtcttgcaaagaaatgttattaaaaccttgaatttttacaaatgtaaaaaacaaaaagtgtattaatgtatttg

SEQ ID NO: 7089 - DNA, 520 bp, Homo sapiens
tgtctgtaaacaatgggtataataatagtttttttgtgggaaaaaaataagattcgacaaaaaattatttggaacagtgatgtgattcggctgtgtcccctcccaaatcgcatcttgaattgtagcttccacaattcccatgtgtcatgagagagacccggtggaagataattgaatcatgggggcatgtctttcccatgctgttcttgtgatagtgaataagtctcacgagatctgatggttttataaagagcagtttccctgcacaagttctcttttcttgtctgctgccatgtgagatgtgtctttcaacttctgccatgattatgaggcctccccagccacatggaactgtgaatgcattaaacctcttttccttatacattaccctgtctcaggtatgcctttatcagcagcatgaaaacagactaatacagacagtatctagtgcacagtaagagctcagttaatattgaattaaaaatgcaagtaaaatgatgctacaccaattgtgttggca

SEQ ID NO: 7090 - DNA, 508 bp, Homo sapiens
aatccctacgcgtccctttgggtttagcacgatgagctcaatcggcactgggtatgacccgtcagcctctacattctctcctgacggaagagtttttcaagttgaatatgctatgaagactgtggaaaatagtagtacagctattggaatcagatgcaaagatggtgttgtctttggggtagaaaaattagtcctttctaaactttatgaagaaggttccaacaaaagactttttaatgttgatcggcatgttggaatggcagtagcaggtttgttggcagatgctcgttctttagcagacatagcaagagaagaagcttccaacttcagatctaactttggctacaacattccactaaaacatcttgcagacagagtggccatgtatgtgcatgcatatacactctacagtgctgttagaccttttggctgcagtttcatgttagggtcttacagtgtgaatgacggtgcgcaactctacatgattgacccatcaggtgtttcatac

SEQ ID NO: 7091 - DNA, 664 bp, Homo sapiens
acagaggggtcttgctctatcaaccaggctggagtgcattggtgtgatcatagctcaccataacgccaaactcctgggccgaagcgacctgtgtgtgccatcatgcccagctaatttttgatattttttttagcgatggatctccctctgttgcccagactggtcttgaactcctgagctcaagcaatcctcctgccttggcctctcaagctactgggaccacaggtgtgagacactgagctcggcccatcaacatttaaaaaatatccaccacttgtggggactgtgttaggtacagggattagagggtagaaggatacaaagatggataagctacatccctgctttcaatgcacctagtctcctcagagagacagtcacacaaagagatgattatatcgtatgatgtggaaagtacaataatggcgcatgtgcagttatagaagaggactgaggagaggcgggagttaggcacagcttctgggagttcagacctctgaactgtgcctcaaagaaccagtaaaagtcagtaagacaggcagggcactgtggctcacgcctgtaatcccagcactttgggaggccgaggtgggtggattgcttaaggtcaggagtttgagaccagcctgaccaacatggtgaaaccctatctctactaaaaata

SEQ ID NO: 7092 - DNA, 535 bp, Homo sapiens
acagaaggggtggcacgatctcggctcaccgcaacctccgcctcccaggttcaagcgattctcctgcctcagcctcctgagtagctgggattacaggtgcatgccaccacacccagctaatttttgtatttttagtaaagacagggtttcaccatgttggccaggatggtctcgatctcttgacctcatgatccgccctcctcggcctcccaaagtgctcagattacaggcgtgagccactgcgcccagcccatcacccaacacttctaatctactgaaaactgtgcctcagtgagacactatatgtgaaagtgctttaaaaattatatctgtatcttattcttgtaatcaagatcatgtctgacataaacataaatattggctcttctaaataaagagttaaatatacagtatacactttactacatttacattattttggttactcagagcccccccccccacacacacacctttttttgcttatattctaatctgactttgttttagattcatgattcttaattttcaaact

SEQ ID NO: 7093 - DNA, 208 bp, Homo sapiens
ggtccctgcattgcgcgcgactcggcggcgggacaggcttgctgcttcctcctcctcggcctcaccattccagaccaaaattgaaaaaatggttgacctcacccaggtaatggatgatgaagtattcatggcttttgcatcctatgcaacaattattctttcaaaaatgatgcttatgagtactgcaactgcattctatagattgaca

SEQ ID NO: 7094 - DNA, 422 bp, Homo sapiens
ggtactcttgtggcaaaactgctggcaagtgtaccctttctgcagaaagtaaaaatggccttgctgaggaaattaaatttatgttcaagtgctatcctttacagcaccagggaacaagcatttctaacaatagcttatatttactacttaatgtttgatttacttttattgcaaataaggtcaaatcaaacatttacaaactggtacaataatacttttttgtaattagatatacaccaattcatactgacaatataacaaataattgtaatattcagttctagtattctactcaccacaaatccaacatttatttttccttctctattcttcctgctgaaaatgttaatctcttcagacaattatttgctatgaattcaaataactgctccaatctaataattgttcatataattcatctt

SEQ ID NO: 7095 - DNA, 364 bp, Homo sapiens
  misc_feature 204: n = A,T,C or G
acagaagggatcatgcatccgcccagcctccaaattaatccacattgtagataagttctatccagagggaggttgcttaacatatactgcaggggcctttgcctgtaggttgccacataggtaggaaacccttaatactcatgcatttgccctgagtgatgtgcctgcccttagctatgtgcgtctctgccagacgctgtgcgntgtgtaggtcagaaagagaagaatccgtacagtctgtgtctcgtgagcagctgtcacaggtttacttgaaccagagagactaaaaagtttgttcatgtaatatttgtccttggggccaaaatggcatcatctgcagttggaattctggaagtgaggaaag

SEQ ID NO: 7096 - DNA, 504 bp, Homo sapiens
gacagaaggagatacagggtttctccatttggtcaggctggtctccaactcccaatctcaggtgatctgcccgccttggcctcccaaagtgctgggattacaggtgtcagccactgcccccggccacttttagtttttaaattatatgcagttagtttttaaaaactacctaaaaggtagctcagactgtttgagggacgtgggggtagatcgcgtgggcagggcagagtttacagctgaaatataaaatctttaccccaaagtgttaaatgaccatgaacatttccttgtttagaaacttcagagttgtcctctctctccaaagtccacttggtgaaaaggaaataattttccatttgaatcacgccaacaccaaatggaaaatgtctttatgtgtgtgtagttacgcaagttggcacctcaccttatacctcccaacctttattaaacatcgacttcctgcacccttttcttgaaaatgattacctatgttaggctttctgc

SEQ ID NO: 7097 - DNA, 297 bp, Homo sapiens
tctcgctgagctcgaggaggtggcgcgatggagggactggaagataatggaggtgttgtccaagttggagaattgttaccttgcaagatttgtggaagaacattctttccagtagcattaaaaaaacatggacccatttgccagaagactgcaactaaaaaacggaagacttttgattcaagcagacagagagctgaaggaactgatattccaacagtaaaacctctcaaaccgaggccagaaccaccaaagaaaccatctaattggagaaggaaacatgaagaattcattgctacc

SEQ ID NO: 7098 - DNA, 83 bp, Homo sapiens
attttttactgtctcctgaagaatttaacacaaacatggatatcagaccaaatcatacaatttatatcaacaatatgaatgac

SEQ ID NO: 7099 - DNA, 543 bp, Homo sapiens
gacagaagggtattgacaaaggcatgaaagatggccagaagataacattccatggtgaaggagaccaagaaccaggactggagccaggcgatattatcattgtgttagatcagaaggaccatgctgtttttactcgacgaggagaagaccttttcatgtgtatggacatacagctcgttgaagcactgtgtggcttccagaagccaatacctactcttgacaaccgaaccatcgtcatcacctctcatccaggtcagattgtcaagcatggagatatcaagtgtgtactaaatgaaggcatgccaatttatcgtagaccatatgaaaagggtcgcctaatcatcgaatttaaggtaaactttcctgagaatggctttctctctcctgataaactgtctttgctggaaaaactcctacccgagaggaaggaagtggaagagactgatgagatggaccaagtagaactggtggactttgatccaaatcaggaaagacggcgccactacaatggagaagcatatgaggatgatgaacatcatccca

SEQ ID NO: 7100 - DNA, 312 bp, Homo sapiens
gggaaaaaaaaaaaaaaaaaaaaaaaaaaatgggaggggcccattgggggggaaaacccctttaaaaatttttttgttaacaaaaaagggttttggataaaaaaaattaacctgaaaaattcttttttgggccctccctttttaccatggttaaccaaatggggggggggcaatttttaaagtttaaaaaaaaatttggcctttgaaacaccttccctttttttgaacaccgggtgggaatggccaaaaattttttttcccctaaggaattttgaaggaattaaattagggtggtttgaaaaaaagggggcc

SEQ ID NO: 7101 - DNA, 427 bp, Homo sapiens
gtgcctgatcattccctggagacaccactgaccccgggcttagctaatgaaagtggggagcctcaggctgaagtaacatctctgcttctccctgcccaccctggagctgaggtctccccttctgcaacaaccaatcagaaccataagctacaggcacgcactgaagcactttactgatattcattccattattccatatgacagttgttttgagtttcgtaccaccttattgtccccttatacagataaggaaactggggtgcagaaaggtgaattaactttacaaagtagacatgacaagtgaacagcagagctgggatctaaacagcaataactaacattaacagagaatttaaaatgttcttagtgctgtgttataagctttggtggatgtcactcctttaatcctcacaacaccctgtcgggt

SEQ ID NO: 7102 - DNA, 264 bp, Homo sapiens
gagacagatcactcctggaggctggggatggtaggattgctggggatttttttttttttaaacagggtctcactttgttgcccaggctaaagggcaatggggcaatcacagttaattgaagcctaaacctcctgggttaaagcaatcctcctacctaaccctccggggtagctagcaccttggcttgccccaccatgccctatttttttttttaaaaacggggttttgtttttttccccaggggggttttaaacggggctaaag

SEQ ID NO: 7103 - DNA, 520 bp, Homo sapiens
aggaacagagtatgagctcattgatgcagaccgattctaattgccaggccctaatttgcagactaactctcataataaacagaggcccatagttgtttatgaactgcttatcccttaaaggagcacaagaacccctccctgccctccttgggcaccctgcctccaggagatggaggcgcgtgataagacaaaagactgcaccaactcaccctgacacagatacatagtcactgggagtggggaagatgggacagcccacatgctgcataagatgggccttatgcagcaggcccaggtcgtcattaaggagtgacccctttcctgtaacctgcactttgggatggtagaagtttctttacctgctgacaggtttggtggcactgctggttacccctgggccctgaatggagctaaaatcacatttggtaccagcagcacctatcccaagtgtgatccttcatcccaacactccctcttggagctgttccctgggtagagctagcatgccagcagcttctgc

SEQ ID NO: 7104 - DNA, 643 bp, Homo sapiens
gacagaagggcccctagcattccaggaggcgaaagctatgcactgcgcagaggctgggaaggctttaattaaattcaaccactgtgagaaatacatctacagcttcagtgtgccccagtgctgccctctctgccagcaggacctgggctcgaggaagctggaggacgcacctgttagcatcgctaatccatttactaatggacatcaagaaaaatgttcattcctcctcagaccaactcaggggacatttcttagagagtatgatggaaggtctgatcttcatgttggaataactaacacaaatgtgcacatggtgtccagcgagacggagaagggtgggaagagagcataagcatcccattactgcagcccaacatgtatggaatgatggagcaatgggacaagtacctggaagacttctccacctcgggggcctggctgcctcacaggtatgaagacaaccaccataactgctactcttacgcactcacgttcattaactgcgttctgatggcagaaggtagacagcaactggacaagggtgaattacggagaagtacgtggtcccgcggacaaggctggcatccaagttcatcacactctaccgggcgatacgggagcatggcttctacgtcactgactg

SEQ ID NO: 7105 - DNA, 568 bp, Homo sapiens
  misc_feature 476: n = A,T,C or G
ggagaaaagcagcagccatgttcagtcaggctcatgctgcctcactgcttaagtgcctgcaggagccgcctgccaagctccccttcctacacctggcacactggggtctgcacaaggctttgtcaaccaaagacagcttcccccttttgattgcctgtagactttggagccaagaaacactctgtgtgactctacacacacttcaggtggtttgtgcttcaaagtcattgatgcaacttgaaaggaaacagtttaatggtggaaatgaactaccatttataacttctgtttttttattgagaaaatgattcacgaattccaaatcagattgccaggaagaaataggacgtgacggtactgggccctgtgattctcccagcccttgcagcccgctaggtgagaggaaaagctctttacttccgcccctggcagggacttctgggttatgggagaaaccagagatgggaatgaggaanatatgaactacagcagaagcccctgggcagctgtgatggagcccctgacattactcttcttgcatctgtcctgccttctttccctctgcgag

SEQ ID NO: 7106 - DNA, 577 bp, Homo sapiens
gacagaagggagaatttcggcgtttttgctgcaactgccactaattttgcatttaaaagaacaaaagaggaatgtatttttcaaaggagtgaatgaggttaaaatcaagattttgaatggtataaatatgcaactaattcagttgtaggatattattaaattttttattgctaaatatgtttctttcatacgttgcagtgcttacagttccaacagctttccaagaaaacatttccatatttgtgttatttgtaaagtatacataaataatgtaaaataatttgggattatttcaactttacattgtatgtctgaatttcatcgatgttgtacctggctcagtcaatagttgtcacaggtattaagccattttggaatttgccacttttttctgggtaacctgttttagtttagtttacagcatttagaaacagaaggtaactttatagaagtaacaccaatatcctagtctgcttgccccgaatataactaatagtattaggatgtaagcaatattaagatggtttttattattttttatacactgtgtgcttttactttttatttaaattacagc

SEQ ID NO: 7107 - DNA, 453 bp, Homo sapiens
tttttttttttttttttttttctttaccaaaaaaaaaacaggggaccagggggcccttttttttttttaaaacccccttccttggtgttccccgggaaaaaaaggggcaaattccccccgggagggaaaacaaaacatttttaaaacccccttttttaaaagggaaaaatggggggaaatttaaatatgggttgtaaatccaaataaaaattttttcaaagggaccctttttccaaagcccgggaaacaaacttttttaaccccctttaactcccaaaaggatccaaactttccccccaggggttttacccccctttccccaaaaaaaaaaatggaccccctgccccccccttttaaacggtcccaaacccaaattttaacctttaaccccccccattttgggacccgggggacccccaggacccaaaagcgggttctccccggggcccttga

SEQ ID NO: 7108 - DNA, 690 bp, Homo sapiens
ccagcacctgctcccagtgggagcttcccgggataaactgagcctgttcattctgatgtccatttgtcccaatagctctactgccctccccttcccctttactcagcccagctggccacctagaagtctccctgcacagcctctagtgtccggggaccttgtgggaccagtcccacaccgctggtccctgccctcccctgctcccaggttgaggtgcgctcacctcagagcagggccaaagcacagctgggcatgccatgtctgagcggcgcagagccctccaggcctgcaggggcaaggggctggctggagtctcagagcacagaggtaggagaactggggttcaagcccaggcttcctgggtcctgcctggtcctccctcccaaggagccattctgtgtgtgactctgggtggaagtgcccagcccctgcccctatgggcgctgcagcctcccttccatgccccaggatcactctctgctggcaggattcttcccgctccccacctacccagctgatgggggttggggtgcttcctttcaggccaaggctatgaagggacagctgctgggacccacctccccctccccggccacatgccgcgtccctgcccccacccgggtctggtgctgaggatacagctcttctcagtgtctgaacaatctccaaaattgaaatgtatatttttgc

SEQ ID NO: 7109 - DNA, 491 bp, Homo sapiens
tggtacgcctgcaggtaccggtccggaattcccgggtcgactactactactactttctcggccgcgtcgacagattttgttttttcctgttggtgtcccagggactctgtcagtgccttcagcccaccagcaggagcttggagtttggggagtggggatgagtccgtcaagcacaactgttctctgcgtggaaccaaagaagcaaggagctaggacccccagtcctgccccccaggagcacaagcagggtcccctcagtcaaggcagtgggatgggcggctgaggaacggggcaggccaggtcactgctcagtcacgtccacgggggacgagccgtgggttctgctgagtaggtggagctcattgctttctccaagcttggaactgttttgaaagataacacagagggaaagggagagccacctggtacttgtccaccctgcctcctctgttctgaaattccatccccctcagcttaggggaatgcacctt

SEQ ID NO: 7110 - DNA, 317 bp, Homo sapiens
aagcttgcggccgcaaacctttttttttttttttttggaaaaaatccatttttttttttattttcccccccacctttaccttattaaaccccaaggaggaggaggggggtaaggaaaaaaataacctgaagaccccaattaggggtagcccccttgggaaaaaggggtcaaagcccaaagaatggaaggggttaagcttaaaactaaaaaccagggggggccatttttcctttaaacattttcccttgtaaaacttttttgaaacggccaacctaagcccttgaggggaaatttccaaggcgaaaattttggttttt

SEQ ID NO: 7111 - DNA, 125 bp, Homo sapiens
ttatttgaagaaagccactttaatgtattctggaggaatgtcctaaactaacaaataaaacgattagatctaaggagttgttttcattctccaggcaggaacccttagtgtccctaagtagggtg

SEQ ID NO: 7112 - DNA, 176 bp, Homo sapiens
aattttaaagatacatgaaaagggttttatttatttaacaaacagacaattgaacaaacaaacaatggaagcaagtcatttgccaaaaggaacacagagggtcatgatgatctactccaccaaggatttcagggttcccagacgcctagttttctgtctagttctggaagatgtta

SEQ ID NO: 7113 - DNA, 524 bp, Homo sapiens
gaaaagcagtggtgttttaccactctgcggagaaagctaaggttgctaaccaaacaaaataactttacactgacaatgccaatttttacatttctttcagaacaagggacactcaaactaccagaggtaagattaacattttaaatattttttataacctttgcatttcaagttgtttgctaacttaatcaggcttgggcttttacactgttaaatgtgccttttaaaataaatagaaataaacagaaacagagggaacaaccaagtgattgtgaacaaaatgcaaaagttaaatccaaggaatgttcactgtcactgtccgaaggtcttaagtagagaaaaaatgtgaatatttaatcaaagactgtgtatgaaatgggactgtaagtacagagggaagggtggcccttatcgccagaagttggtagatgcgtccccgtcatgaaatgttgtgtcactgcccgacatttgccgaattactgaaattccgtagaattagtgcaaattctaacgttgttcatcta

SEQ ID NO: 7114 - DNA, 452 bp, Homo sapiens
acagaaggggtcaatgagagctattatttttgttgttattgtgtttatgattacaagagaccataagagacaaggaatcaaaagctgtgtttctccattatcagattatcaagggaacatcagtgaagaatatacataagacctcatgtaaggaacaaattaagcatgattgtgtctgtattctagcagtttatcatctacaacatacaattatttgagagaggaggcgtaggaagagggagcgagggagcgagaacatgcatataggtaaatagaccagtatacatgctattctgttctgttttgtaagcatgttttctggaaaatgactgttagacagcagatgtagcactcacatttatgagttttcatttcagcagtttactgaagtgaaatttagagaaatgggataaagtctctaacatttctagtaagttctatcaatcagaaaa

SEQ ID NO: 7115 - DNA, 219 bp, Homo sapiens
tacggctgcgagaagacgacagaagggtacggctgcgagaagacgacagaaggggccgggggggacataatagaggctggaaatgtgatccccacctgaaatgccagttcccaattacatccctacagcttggatggagagcatagatctttggtggatcaatagctgtgtgtcatgaccgcagagagctctacagcagatccagcaatttatggtcaa

SEQ ID NO: 7116 - DNA, 556 bp, Homo sapiens
acaaaaaactcatggacacaacagacactgggatcttcttgaaggtggaggttgggaggaaggagaggatcagaaagaataactattgagtactaggattagtacctgggtgatgaaataatctgtaaatgaaaccccaatgacaccaatttacctacataacaaatgtacacctgtacccctgaacctaaaataaaagttaaaattaaaaaaaaaacctagctattatggaaaaaagaaagtcattgtaaccccttctgttagatatacttttaaaacgttaaagtaacttttcacttgtaaatacaatgtgtttttgataaacacctgtcagagcactgtgttgctatatgtggcatccagactcttagcataacctctcatgatctatggcagctttaggtcagtcttaaaaaaaatgttgaaagggccaggcacagtggctcatgcctgtaatcccagcactttgggaggccgaggtgggtggatcacctgaggtcaggagtttgagaccagcctgaccaacaaggtgaaaccccatctctactaaaaatac

SEQ ID NO: 7117 - DNA, 93 bp, Homo sapiens
ggcagaagcttatgggtatagttaataaagtgtcttctaaccacattggctgtttagtacatgggtgtttcaatgcctccattcctaaacctg

SEQ ID NO: 7118 - DNA, 514 bp, Homo sapiens
agaaaacttttcaggaaggtttccctgtgcatttgcaccagatgaatgtttgatgctatgaaaagctttccatatcatcaaaactaatttgtgtagatttttgcatgaaaaaaatcataaatttccctcaaaatagactgtgttgcagtacacaagttgccataatagtataaaacagtaaaatgtgcttaaaaggccatccttttcattttcagagataacataaagatctttgcatgaggtaaatctacagcatagttcatttttagattttgttgagtcctgtaaagaagaagaagaaaaaagtttcagttgtggtagaataccgtgctgtgtttaaatgttacttgttttcaaactttgttttctatgaaaatgatatggaaacttctaaaatggaatttggtgcatatctactgctgaataaagaccgatgaagaagtttgagtagatgtacaaatcaagtaatggtttgaacacctttaataatatgcctaatctgttcaattgtttt

SEQ ID NO: 7119 - DNA, 436 bp, Homo sapiens
aacttcagaaaatatcagcaacaattctgaaaacattcaagagaatacataatttatggagctaggagaaaatacataagactggaaatcattgaacaaccttaagttttctaattaccagtagaatcatctgggctaggatcaaaattcagccattccacactcagaggatatgcagacaagagtatatcatggtgtacataaaaagagtcttcttcttgattataaactgaaaagattgggaaaagagactttaatgtatcagaatgagtcatcaaaaatcacatcccgctcaaaaaacaaattctattaaatgtacgtgagccatgtgctttaaagtgagacatctgatattataaagagattccaggctgggcgcagtggctcgtgcctgtaatcccagtactttgggaggccaaggtgggcggatcacttg

SEQ ID NO: 7120 - DNA, 456 bp, Homo sapiens
aggctcccttctgatgaaaattgagctgtccatgcatccatggaacccgggttacagcagtgagggggccacggctcaagaaacttacacatgtccaaaaatgattgagatgcagcaggcggaggcccagcttgctgagggggagctgctagccaatatgttccctggtgagaatgagctcatagtgaatgaccagctggctgtagcagaactgaaagattgtattgaaaagaagacaatggaggggcgatcttcaaaagtctactttactatcaatatgaacctggatgtatctgacgaaaaaatggcgatgttttctctggcctgtattcttccctttaaatacccggcagttctgcctgaaattactgtcagatcagtattattgagtagatcccagcagactcagctgaacacagatctgactgcattcctgcaaaacattgacatggagat

SEQ ID NO: 7121 - DNA, 585 bp, Homo sapiens
ctacagagggggacgtgatccgcttctgctccggcttggattgtagccttgacgaggtctgagcgaccatggaccggccggggttcgtggcagcgctggtgctgctgcattttttatcacctatgaatatgtgaagtggtttttgcatgctgattcatcttcatatttgacacctatgaaacatatgttggctgcctctgctggagaagtggttgcctgcctgattcgagttccatctgaagtggttaagcagagggcacaggtatctgcttctacaagaacatttcagattttctctaacatcttatatgaagagggtatccaagggttgtatcgaggctataaaagcacagttttaagagagattcctttttctttggtccagtttcccttatgggagtccttaaaagccctctggtcctggaggcaggatcatgtggtggattcttggcagtcagcagtctgtggagcttttgcaggtggatttgccgctgcagtcaccacccctctagacgtggcgaagacaagattatgctggcaaaggctggctccagcactgctgatgggaatgtgctctctgtcctg

SEQ ID NO: 7122 - DNA, 607 bp, Homo sapiens
gacagaggggagtctgaggaggaagaaatgattactgtagtccttgaagaagccaaagagaagtgggattgtgaatctatttgtagtacatactcaaatttatataaccatccacagcttatcaagtatcaaccaaagcccaaacaaattcgaatatcttctaaaacaggaatacctgtcaatgtcttaccaaagaaagggctcacagcaaagcaaactgaaagaatacagatgattaatggcagtgatcttcctaaagtatcaactcagccacgttctaaaaatgaaagcaaagaagataaaagagcaagaaagcaagctataaaagaagagcgcaaggaacgaagagtggagaagaaagctaacaaattagcatttaaactggagaaaagaaggcaagaaaaagagctgctgaacttgaagaagaatgttgagggtctaaagctatagacagtggagcatacagggcaaggcactttattaggggctcctcatctttggttattgactagaaacttcagaaagacaaaactgtttgccatttttactggcagataagaggaaaatacaatatttgtattatttttatactagtaagtgtcccctg

SEQ ID NO: 7123 - DNA, 129 bp, Homo sapiens; identical to SEQ ID NO: 2138

SEQ ID NO: 7124 - DNA, 235 bp, Homo sapiens
aggagaaggccatatccagaataatacaggttttgtgacttgagtagtgctcagttgagattgtgaagtgagcacagtccttttaatcttaacgcaaatcagcttcagggacttggaattaacagaagatgagtcttcccagtgaagtgagaaatactagaactgttctgactgagcatgaaggtggaacatggttgggcatggtggctcacgcctgtaatcccagcactttggg

SEQ ID NO: 7125 - DNA, 554 bp, Homo sapiens
gacagaagggtgttgaggaaccactgaagtattgatttttaagccaaaaatgacatgacagggttttctttatggaaagatcactccaaattgcatgtagataagcctatgaaaagcaaagagataattgtctaggcaggaagtagtgaggacttcttgctttcctcaagatacactgaaggcagttgaaaagctcatttttaaaagtctggtgaaaaccactttgttcacttttgttttgtgggagatgtgacacctagtaataaagagttaacaaaccctttccccttttatgaaaatttgacttttcgttaactccctagtttcccagaaaacaatgaaaaattgtgtttgttgcttatggtaaaaataacccaattggtaaattgcatctggagagggagaattgtaaatacttgaaaggaagccatagctttggacttccctgattgtagtgactcttataactgtcccttgtggaaattctagaagttctgcctatggagttactactagagatactggctcctgtggtacatggggccttctgccct

SEQ ID NO: 7126 - DNA, 537 bp, Homo sapiens
acagaagggaattctttttcctgagattccagcaaggttgtgacattgtcacttttttgttctagactcttttaaattttctgcatttgcctgaaaagcacccctgtaagaatagatttctcatggctctaaaaattattcccaagaataccttacttggttcaaaagcagactgtttctcttcatttcatctcaaatcagacttctgggcaagatgttctttagagtaagcaaacctacaacctaaaaatctcttcaagaggcatctctggtcttgtgacaagacctcttcaaaaacccacagtaaaactcccctccctccagttggccaccagtctgccaccaaacatgaacaaattctgctgctaatcggtttcccttgtgatctggttcctgaggtcttcggatctgtgcaatgaattatttattgttttattaaaccgacagtggtgtcccagagaggaaccataaataaaatggaaatctggtgctgtgataaagtaataactagcattaatgagacctggttttcctttc

SEQ ID NO: 7127 - DNA, 271 bp, Homo sapiens
gtggaatcaacatacaattttgggaaaatgtaatcatactctgcacttgaattattctctctacactctgccttagaatatttatatggatataatgaaaatcccatagaaagtgcagttttcatactcttacactctgaaagctgccacagtgttggtgaatatataccatattatatttttacatgcttgtgtgctaaataactatggcatgcatctttatttacatgaagtgaaaatacaaatatagaaagtgtatgggctgggtgtg

SEQ ID NO: 7128 - DNA, 537 bp, Homo sapiens
gattaatgtcctgttgctatgacaggaaccgcatgagacacacacgaaagacggccctgccttccagggctcgctagatccttggttcctgtcgtggaagagaggggcagagtcttgctctgtcacccaggatggagtgcagcggcgtgatctcagctcattgcaacctccacctcctgggtgcaagcgattctcctgcctcagcttcccaagtagctgggattacaggcgtgcaccactacatccagagactgggactacaggcatggattttcaggtttataacatggcagagtgaattctggcaacacactgagttatgcttgtcaatggccactatcaggaatttaaaacaagatttggaattatgacatctggacaaacacatatgcaaaacctaccttttggtccattctccagggcttcttctgcagcttctggttccagttctttctcggagctgtcagtgtgtgttttggcctgtccattaactgacatcatattacttggtacagttgcattcacttttgatgatgt

SEQ ID NO: 7129 - DNA, 302 bp, Homo sapiens
gtattttgagtagagatggcttttcaccatcttggccatggtggtcttgaactgctgaccttgtgatccacctgccttggcctccctaaggactaggattacaggtgtgaaccaccatgcctggcctttttttttttttttaaaaaaaattccattttttttttaagcttaaaggcttgggggaaatttttgtttaaaaaaaccctccttttaaaagggtaaagggatttttgggccctaaccccccaaaaaagtgggaataaagggccaaacccaccacccggggtaattttttttttttt

SEQ ID NO: 7130 - DNA, 519 bp, Homo sapiens
gaaaataagttcaggagggacctgaagaagctccaggtgaaatgttactgtggtcgtagagacggggaggggacctgagctgacgaagtggacgggtggtagacagaggagctggaggctcttcagttgtagggaggggcaaaaaacagatgcccagagaagccaacaggcccccagtggactctcatggtagaagaaagtggggaggatcaccaccattgaggcaggtccttagggctgtggctccaggaactccattttgtcagggtacccagagccaaacaaattctgcgggatggactatctgttgactgaagatctataagccaggtgcagtgtattcatttgcagaaaggactatgtccttcccacaactggaatgcttgtgtttgccttccagggctcccttgtttctttcctccgattatctcccaccctctccttaagggtcctgacctttcctgtggcttcaatggccacctgtatgcagactccacagtctttatttccagtccccac

SEQ ID NO: 7131 - DNA, 602 bp, Homo sapiens
ggggcctggcgcttgcggcaccggccgaggtgcgggtcgcctccagagatttctccgcagatcctgtgccttcaaaccctacgagtccatactttaaaacaaaatgaagaaagtaaggcttaaggaactagagagtcgcctgcaacaagtggatggatttgaaaagcccaagctacttctggaacagtatcctaccaggccgcacattgcagcatgtatgctctatacaatccataacacttatgatgacattgaaaataaagtcgttgcagatctaggatgtggttgtggagtacttagcatcggaactgcaatgttaggagcaggggtgtgtgttggatttgacatagatgaagacgcattggaaatatttaataggaatgcagaagagtttgagttaacaaatattgacatagttcaatgtgatgtgtgcttattatctaacagaatgtccaagtcattcgatacagtaattatgaatcctccctttgggaccaaaaataataaagggacagatatggcttttctaaagactgctttggaaatggcaagaacagcagtatattccttacacaaatcctcaactagagaacatgttcaaa

SEQ ID NO: 7132 - DNA, 490 bp, Homo sapiens
gtgtcattgcttgattggcgtttgacaaaggcttgtattgtttgcttgctgacagtccagggtactggccaggggtcacttttacttagggaatggaccttgctgctccctagccttattcaaaatggcacctaaaatatgtgtggtgtctccaattggctgtaggtgtgtgattcgttgaccatccctgtttattctgttacagttcctttattgaagattcagcatttacaaagcatgatacgaatcaagagtattgtttgatctcaaggtggattcttgatggtctagaatcttgaatcgaattcttaatgattgcccaacccctttctaaagccataacaacagtagaatggctcttgaaatattctaatacttaaacacaccagtagattcacacacataaaacaaaacccctctgtttcctcaaaatgccagcgctgaccagagtttcttttttaaaatttgagctttatcttaaatatttaat

SEQ ID NO: 7133 - DNA, 404 bp, Homo sapiens
  misc_feature 201: n = A,T,C or G
acagaaggggttaaagccgctttaccagtttcacgttttatggatcatgcttttgatgatgtgccaaaagcatgatccataaaatgtgaaactggtaaattggtacatgggtacaaggattttctcctatgttttctttctttctttctttctttttttttttaaagggagtctcgctttgtcgcccaggctgaagtgcangggtgtaatctaagttcgttgaaagctttgcctcccggtttaacccctttttcctgcctaagcctcccgagtagctggaactaggcacccgtcaccatgcccagctaattttttgttttttttaataaaaacgtggtttcacggggtttgccaaaagggtctcgatttcctgacctcgggatccacccacctaagcctcccaa

SEQ ID NO: 7134 - DNA, 542 bp, Homo sapiens
gacagaagggggaattggctagagcgccagagccgagtcagccattaaagctacgcgctaggctcttggccctgacgtgaggcgcgcagagatggcgtaacgggaatagttttcaacgtctatttcattccctgcttcagaggacctctttaatctttgattttggtccctgtttctaagaaaagcaactgaaaaggtcgtaataccgcccctgagaaaaaaggagcagcgctaaataatcgagaaaatgcctcctcttgaaacggatatagagatggaaacaagatataagaaggattgagaatcatataatacaggagcttaaacacctatgcgcgatgataaagagggtactattagagcgcttggaaaataccaggaagttgagagagttaacagaagggcgcacgctggattggccacaaaatcgaattactgaaggccactactgattaggacacttatggagaacgtgggtagcactgaagcagcattctagtttccagtgccatcaacctcatacgtatctacctggtctctga

SEQ ID NO: 7135 - DNA, 516 bp, Homo sapiens
ggctgcagcagattctgtgcagcagagacgccaatacagacgacaaaaccagcagtcttcatctggtatggatggtgatgaaagttttttttctacctgtatttcctattaaaaaatacttggtacataaacatctgtgtgtgcagcatgagtacttacttgcctacatagaaatctgtctgaggaggcaggattgtttctttttttggttttaagtccttttgcaaaatttaattttctgttacattgttataaaagtaataggtccctaggatacaatagtgaaacagaaaacagaagtataaaattggaaacgtatcattctttttccaacctcctaaagcttttattcagaaattttctgtgcatatagaaaaaggaaaagaaaaaaccccacagaagctcaactgtagatatgttgcctcactttttaacttaacagtatatttagaacatctttccctattaaaaatctagactgggcgcagtggctcacacctgtagtcccagcacttt

SEQ ID NO: 7136 - DNA, 561 bp, Homo sapiens
ggaggcaatgttcactgcaatgtgcgaatgccaggccttgcatccagatcctgaggatgaggattcagatgactacgatggagaagaatatgatgtggaagcacatgaacaaggacagggggacatccctacattttacacctatgaagaaggattatcccatctaacagcagaaggccaagccacactggagagattagaaggaatgctttctcagtctgtgagcagccagtataatatggctggggtcaggacagaagattcaataagagattatgaagatgggatggaggtggataccacaccaacagttgctggacagtttgaggatgcagatgttgatcactgaaaatgatttatgcaagtttaagattctgctcctaagtgtaggagagaacttggtgcctcttccactctggagtgaagttaatgaaagtctttttccttttccaaaacccaacctggaccagttctttcttgagacagactatactgagacaacaagttgtcaccagcagaagatagataatatgacctttattaacttgatgaattaactta

SEQ ID NO: 7137 - DNA, 83 bp, Homo sapiens
caatgctgccaccctcttgtctttcaaagttgttagtttactccattctttgtgacacgagtcaagtggctcacaacctcctc

SEQ ID NO: 7138 - DNA, 548 bp, Homo sapiens
gtagtattggtgctgtgtccaaattagaagctagctgaggtagcttgcagcatcttttctagttgaaatggtgaactgataggaaaacaaatgagtagaaagagttcatgaagaggccctcctctgcctttcaaaaggctggtcacctacacatgtttaaggcgtctctgcacatgtctcaagcccatcacaagaaagcaagtacagtgtggatttcaaatggtgtgtaacttcagctccagctggtttttgacagctgttgctgtggtaatatttttgacatgtgatggtgatagtctctggttctccccatccccacaaaggctgttgaaccacagcaccaggaagcctgagaatgaatcctgagggctctagcccaggctttgtcccaggctttctggtgtgtgccctcctggtaacagtgaaattgaagctacttactcatagtgggttgtttctctggtcttgagtgactgtgtccacagttcatttttttccggtaggaataactccttttctacatccacgctccatagagtctctccttt

SEQ ID NO: 7139 - DNA, 529 bp, Homo sapiens
gacagaaggggatgtttttttacttacactaggaagtacatggcttagtgatcactaaagactcattttgtgcttttgcagctgtgatgaaagcaataatatgcaaataattactcttatggcaacattaaatgtagatatatacaggtttttcagaaaagccattaattttaaccttattggacatcagagctaagtaaacttttaaaaagctgttctaagtaatgtgttcagaatctagttgcagtcttaatcttcacaaagtgtaaatccagttaagatacttaagtaagtacctccagttagttactcttagtgagtgttttcttgtattaccactacagagaaaaatatcacttaaactggttattttgctgggggcgggggttgtgccacgcatggtggctcatgcctgtaatctcagcactttgggaggccaaggcaggcagatgtagcgaagccctgcctctacaaaaattataaaaattagccgagcgtggtgacatgtgctaatagtcccagctactca

SEQ ID NO: 7140 - DNA, 432 bp, Homo sapiens
acagaagggattgctcagaataaatttattccatagccatttaggattgcatgttctggaccaaccttgtccagtatgttttctgtttgagctttttcattcttttgttaagccaacaagttgagaatttggccctgctgggatccatgtagtgggcactagctgctctttggccaaggccttcataaatgattcagtctctcattatctgtcctctagccccacaccctgatttagaccgtggcaaaggaagaacttgaggtcaagaccaaccaaatctgtgaattaaagctgttatttttttctctgcaagggcgctttgcttcaggtctgggctatgtgcagaacctaagcaggctgtgagagttagaagaggcagtattacatgttaggcccagaacaccatgggaaaaggtttatgtagtgtatctt

SEQ ID NO: 7141 - DNA, 443 bp, Homo sapiens
ggtggaaatgcttaaaatagacctaactgaatacagtctcatcttgccgcgcctggcttacctatctgtggaaagctaggcttcccaggctgggctctgcctgtctggtgcctggaggtgtgggagggaagatgagttatttaactggtaagcgatttgaaacactatttttatattaaagtaaatggcatggagtatagtgcaaattcatttttaagatagaacacaaaacttgaaagaagttttatgcgtgtgacagtgtatggggctgcagttggtctccctggaggggacttccacacctcctgcctttaggccatgggtggaaagtgctcagtgaagtacacctgtgtggcccagttctgaaagctttatacagttgaattttaagtggggttgataacaccttggactgttagtgttaaaaatctagtgggttgacc

SEQ ID NO: 7142 - DNA, 515 bp, Homo sapiens
ggcacacagtgcttcctaagcaattgaaaagtgtgaacagtattaaaaggcaaacctttagtctgctaaaaccaatccttttcaaatattatgtctatgtagcatcagccatttaaataattgagactaataaacacttattagtcttttcaggtttgtagtggtctctcagagagttcttcacgataagagtgctattcatacatacttgagagtaattaaacgatccctctggctgggcacagtggctcacacctctaatcccagcactttgggaggctgaggcgggcggatcacctgaggtcaggagtttgagaccagcctggccaacatggtgaaaccctgtctctactaaaaatacaaaaatttgctggtcgtggtggcgggtgcctgtaatcccagctactcaggaggctgaggcaggagaattgtctgaacccggaaggcggaggttgcagtgagcccagatcgcaccactgcactccagcctggccaacagagcaagactctgtctc

SEQ ID NO: 7143 - DNA, 130 bp, Homo sapiens
aattctcagtataagccctttgtcgtttctatgcctatttaaagtctcctaaaggtgtaattgactaggaaggatgtagttctacactgccatttacctatttaaattcatccttgtgaatatctttgtt

SEQ ID NO: 7144 - DNA, 130 bp, Homo sapiens; identical to SEQ ID NO: 2155

SEQ ID NO: 7145 - DNA, 588 bp, Homo sapiens
cagaaggggatatttaaaggttggccttttgcttctcgtgagtacaagccagagagagcagtggttacatgggggtagaatggtgactcgtttttacctgactgtggatcagctgggtggttcctgaatctcactgggctcattgtggctctttgcttgtcctgtatttactgtctgtggtagtgagatagaagaaccaccatgttcttctggttctagactcaaactacagggagaaggaagagatgtgtctggcatcatttccgtgttggagtaactttgtggtagattgctgtggcctttctttgtggcctgccacttgtcttacattcttcagagcgtttatgcacaggagcataaatatatgattttcatcttgccattgaaagtagactttccggccgggcgtggtggctcatgcctgtaatcctagcactttgggaggccaaggtgagcagataacttgaggtcaggagtttgagaccagcccggctaacatggtgaaaccccatctctactgaaaatcaaaaaagttagccgggtgtggtggtatgcacctgcaatcccagctactcagtaagctgaggc

SEQ ID NO: 7146 - DNA, 466 bp, Homo sapiens; identical to SEQ ID NO: 2157

SEQ ID NO: 7147 - DNA, 503 bp, Homo sapiens
ggccttcagtgtcttcagacgccctgggaacgcggctgcagggtccggtcttcggtttgcactctagaggccgcgcagcagcaaaggatgagcggaaccttggaaaaggtgctgtgcctgaggaacaataccatttttaagcaagccttttctctcttaaggtttagaacttcaggagagaagcccatctattctgtaggtggaattctactaagtatcagtcggccctacaagacaaagcccacccacggcattggaaagtacaagcacttaattaaagcagaagagcccaagaagaagaagggaaaagtggaagtgagagccattaatttggggacagattatgaatatggggttttaaatattcatctgactgcatatgatatgaccctggcagagagttatgcccagtatgttcacaacctctgcaactctctctccattaaagtcgaggaaagttatgcaatgccaaccaaaaccatagaagtgttgcagttgcagga

SEQ ID NO: 7148 - DNA, 580 bp, Homo sapiens
acagaagggatccagaattacgttgaccccactccggaccccaacactgcctacgcctcctacccaggtgcatctgtggacaactaccaacagccacccttcacccagaacgcggagaccaccgagggctaccagccgccccctgtgtactgagcggcggttagcgtgggaagggggacagagagggccctcccctctgccctggactttcccatgagcctcctggaactgccagcccctctctttcacctgttccatcctgtgcagctgacacacagctaaggagcctcatagcctggcgggggctggcagagccacaccccaagtgcctgtgcccagagggcttcagtcagccgctcactcctccagggcacttttaggaaagggtttttagctagtgtttttcctcgcttttaatgacctcagccccgcctgcagtggctagaagccagcaggtgcccatgtgctactgacaagtgcctcagcttccccccggcccgggtcaggccgtgggagccgctattatctgcgttctctgccaaagactcgtgggggccatcacacctgccctgtgcagcgg

SEQ ID NO: 7149 - DNA, 533 bp, Homo sapiens
gcgttgttcggcatcaaggcaaaagcccacctttgctttttatggaaagcattactttatttaaagagacagacaatgacgcattttaatctacctttgtcttaatttacagcaggttttgtatgaatttttaaccttttaacaaactcccaaatctggttgatgcctttgacagtgatgaaaacgatttcaccacatctgaatccagagaaaccggctttttttcttattgcgagcatgttaaaacgttgggaacatgtggggaattgtatattgcgctgaattaacttctcccgcctcttgtaatgctctggtgggttcttgtttgggaatgcgatattttgtggctggtttagctagagagtgaactctcaaaggtatcaaaactgtgcttccattattagtgcaagaaacagacaggctttaaggggtagatgacgtgaaattttgcaagtcttaattacaactgcagatgcatgggattctggatttttttgttgctttttagtttaatgggactttaaaagtaattg

SEQ ID NO: 7150 - DNA, 540 bp, Homo sapiens
agaagggatattagaatcaaagcaccaagacttcaaaagtccagactactcttcccaaagagaaatgtgcaatcacaatagcatgacatgggtacaaatatggaagtatgttattaaagtattgagaattagctttcctaacctccccacctgcaatcttttactcctaatctccaaaaaatgaacaaatcattggctcaaaatggtcacaaattgtatgtggtgttaaaaatctattatttttattgtatataaaatgttgccaggtgtggtggctcatgcctgtaatcccagcactttgggaggccaaggcaggtggatcactaggtcaggagttcaagacctgcctggccaacatggtgaaaccccatctctactaaaaatacaaagattagctgggtgtggtggcgtgtgcctgtaatcccagcttctcgggaggctgaggcatgagaatcacttgaacctgggaggcagaggctacagcgagccaagatggtgccattgcactccagcctagatgacagagcaagactcagtctc

SEQ ID NO: 7151 - DNA, 543 bp, Homo sapiens
aacctactttcaacttactaagaaggggatcatggacattgaagcatatcttggaaagaattggctataagaagtctaggaacaaattggacttggaaacattaactgacattcttcaacaccagatccgagctgttccctttgagaaccttaacatccattgtggggatgccatggacttaggcttagaggccatttttgatcaagttgtgagaagaaatcggggtggatggtgtctccaggtcaatcatcttctgtactgggctctgaccactattggttttgagaccacgatgttgggagggtatgtttacagcactccagccaaaaaaatacagcactggcatgattcaccttctcctgcaggtgaccattgatggcaggaactacattgtcgatgctgggtttggacgctcataccagatgtggcagcctctggagttaatttctgggaaggatcagcctcaggtgccttgtgtcttccgtttgacggaagagaatggattctggtatctagaccaaatcagaagggaacagtacatt

SEQ ID NO: 7152 - DNA, 536 bp, Homo sapiens
gataccatatgcgtgtctccaaagtggatgtggttgcctcaaggcaggtggcaggcaggggtgacctgctggccctcagatcaatggtcgtggcaggtctgagagctgtcccactggccagacttctccccagcagcaaagccagcctggggcttgcatgttgatcctgagcaagcttaacggggtgaagctgggctttctcccccctgtgactggagtgcatgttgacaccagcactttttctgcacatgtatcttcaatccaacaaggccgtttttttaatgctgagtaacaggccaccaagcggctactgcgttatatcttctcagcaactggccgcagtctcttctgcaccattttctacaccagacctgcttggcaccacagggagctcttttcctgccctgcacaatgacattccaaccaccaccagccagacattacagccaaccttgctgattgtcacaagcaggaccttggggccactggcactgtcagatagtaagccatttcttgggtagaggaggaaactcctc

SEQ ID NO: 7153 - DNA, 324 bp, Homo sapiens
gaggccgagggaggagaatcgcttgaacctgggaggcagaggttgcagtgagctgagattgtgccactgcactccagtctgggcaacagagcgagactccgtctcccccaaccaaaaaaaataaaataaaataaaagtggtatgcatatatatgtatgcagaaaaaacaggaaagaggaacagtttttttttcttttttgcttatttgtcttctaaattttctatattctaagtgttctataatccttttataattaaagaaaaaaattttaagttttatttcaggacaccattggaattaatactgaataaattaactaaaat

SEQ ID NO: 7154 - DNA, 518 bp, Homo sapiens
agaagggactccagcttacacgctgacaaaatgacataccgatattttaagccgccaccttgttcctgggtgcttgagaaatttttccagttagtgtaataagagttctgaattatctacagtgtataattatatcactcatagttgctattaccagcttgatgatgaaacttaactttaaaaaatattgaagcttgggctggatgcggtagctcacgcctgtaatcccagcactttgggaggccaaggcgggtggatcacctgaggtcaggagtttgagaccagcctgaccaatatggtgaaaccctgtctgtactaaaaatacaaaaattagccaggtgtggtggtgtgtgcctgtagtcccagctactcaggaggctgagacaggggaattgtttgaacctgggaggcggaggttgcagtgaggctgagacaggggaattgtttgaacctgggaggcggaggttgcagtgagccgagatcaccccagtgcactccagcctgggcaacagcctgtc

SEQ ID NO: 7155 - DNA, 507 bp, Homo sapiens
agaagggatggacagcaaagcctcaggactgtaatagatacaatgcaacatgcagtctacgtctatgacatttgtcatgtgatcatcgacaacctgcagttcatgatgggtcacgagcagctgtccacagacaggatcgcagcccaagactacatcatcggggtctttcggaagtttgcaacagacaataactgccatgtgacactggtcattcacccccggaaagaggatgatgacaaggaactgcagacagcgtccatttttggctcagccaaagcaagccaggaagcagacaatgttctgatcctgcaggacaggaagctggtaaccgggccagggaagcggtatctgcaggtgtccaagaaccgctttgatggagatgtaggtgtcttcccgcttgagttcaacaagaactccctcaccttctccattccaccaaagaacaaggcccggctcaagaagatcaaggatgacactggaccagtggccaaaaagccctcttctggc

SEQ ID NO: 7156 - DNA, 544 bp, Homo sapiens
acagaagggcataactaagtttattgtaagccattatcaagatgcattctcatgttgtgtacctggctccaaggaccacagttgattattatcttgggggacgtttattattccctctctgtctttgtaaataaaaatgacaagtcaaagtttggtagtagttgagaaaattgttgacgtgtaattacaggaatttgcttctttggttcagtttgttactttgaatctttacactgtctgcgtagctattgtggatttattattttctgtagctgcacagaaaataatgttttaatggtttttcataataaataatattattttccattttatgtggcatgaaaactctttcacattcatcactttgatctccctgactccactaccccgtatgaggctggtagaatatggtgggacaagtgtcacaacccattgaactgatgatcaaagatgcaaagaggccacatgttttgcccaaagtcgtgcacttagcaagccagaattcaaaccctgacctgatatcaagagtttactgcctgtcaag

SEQ ID NO: 7157 - DNA, 326 bp, Homo sapiens
ggggaatggagatagaggtttgatcatctatttatctctatacatggcaactaaaactatggagtgattcatcaacactcaggaaaaatgtgatgagagctgggctaaaaagctggccaaggtagatcagctgtgatgtgcagaaaggaaggaaacatcagtcagaattaaaagaaaacaaggagtgcttggtgtcttaaaagccaagagaaagaggccaggtgtggtggctcacacctgtaatcccagcacttaaggaggctgagatgggtggatcacctgaggtcaggagttcgagatcagcctggccaacatggtgaaacccc

SEQ ID NO: 7158 - DNA, 559 bp, Homo sapiens
gacagaggggtggaaggaccaaattttctggaaaaaattggaacaatcttttatgtgcgtttgctgtcaggagctagtttaccagcctgtgacaactgagtgcttccacaatgtctgtaaagattgcctacagcgctcctttaaggcacaggttttctcctgccctgcttgccggcatgatcttggccagaattacatcatgattcccaatgagattctgcagactctacttgaccttttcttccctggctacagcaaaggacgatgatctgcctgctttcactgtgttgttcatggtggctttttggacaataaagaatctaaaatgggtggggagggtggaagaaatggtggactgtatctctcacgttctgaagcagctaatcctctttcccacatagccatcatcttgtgtgtgtagtaagaggcccatttctcaactgtcttttaaatatctaaaggtagttcctgtaacaactagttttaatgagtaaaaagtcaaagcctcagctctagttgatatccaagttatgatttattttgcaactacctcaggaca

SEQ ID NO: 7159 - DNA, 61 bp, Homo sapiens
gggaactgaactcctcacacccaattggaccaatctatcaccctatagaagaactaatgtc

SEQ ID NO: 7160 - DNA, 462 bp, Homo sapiens; identical to SEQ ID NO: 2160

SEQ ID NO: 7161 - DNA, 498 bp, Homo sapiens
  misc_feature 391: n = A,T,C or G
acagaagggattgtccctccgggaggagctgtgtaaaaagctgaacatccctgctgaccaggttgagctgagcatgggcatgtccgcggatttccagcatgcggttgaagtaggatctacaaatgtccgaataggaagcacgatttttggagagcgggattactcaaagaaacccaccccggacaagtgcgcagcagacgtgaaggccccgctggaggtggcacaggagcactgagccagggaatactgagagcactaactatgcactaacctagattttcatttcgatattccctgtgtcccagcgcagtcctgctctcctgtgacctgtggagagcactaatgatcacgtgtgttgatggaaaccatctgtgcttagtctctgacatangaagcttgcttcaggcaatggctttggattgagcttgagaaattcaaacatttctgcagaacagataccaaatcaatagctaggaatcatgttcaatattgaattct

SEQ ID NO: 7162 - DNA, 567 bp, Homo sapiens
acagaaggggatacagctctagaatttcgtgaagttgcatgcaaagttgcatgcagcccgtgggtatgactgtctcaggcccccagctcatttgccaagaggaaaccttaacccccctgagagggtctgcgtttcttctagagctcctacctcagtggtgtgcacagagttggagacacctgagggctggtccacgtctcacctttgccatacgggtcatttcttgatcaaatatatgactggggtcctggtttactccgcccaccgtttcttttaaagtattcttaacatgaaatccacaaaagcggaaacaatgaaccattcttgcactttacagaatcattgtccttagctttagaggttgttaatttcttgtttttaacatgaacagaatgtgtggttctgaaggtgtgtgggggtctcaagaaattgtcctttggggccgggcgcagtggctcacgcctgtactcccagcactctgggaggccaagggggacggatcacctgaggtcaagagtttgagaccaccctgaccaacatggtgaaaccccgtctctactaaaatac

SEQ ID NO: 7163 - DNA, 534 bp, Homo sapiens
gatgaaactacttactgatttaagatcttttgaattttagaaaaaacatatgaatcagatggaacaatctgaatgtgatatgctccatgatgctgtgtgttttggtagtaagaaaaaaaaattgggaggcttttcaaaggtggctttgttaggtagtaaaactgctggattcttcttcctcaaatatttggggctaacacttcacagagggtcacagtccatgatctgaccaactaagcttttaaaaatcaactattaccacccagaaaacagtcctacgtgatcatgtggccagggcatgcccgagtcctgcaagggtggcgggtggctgaggtcacaccaccactggagtggatgggcagtgccccacatggacagccattccccaggctatgaagtgacataggcctcccccacggtgcctgtgtacggagcctgacgacttcactgggagccttctggaatcctgcagagggtcaaggagcagggatgttggatgcccacctgtcaagagttcagatcaaagttgcgctg

SEQ ID NO: 7164 - DNA, 567 bp, Homo sapiens
ggtggtaaagcctttagatcttctagttcctttcgactacatgaaaggactcacactggacagaaaccctatcattgcaaggaatgtgggaaagcctattcttgccgtgccagctttcagagacacatgttaacacatgctgaagatggaccaccttataaatgcatgtgggaaagcctttaatgctctgggttcatgtcagatacattaaaatactcactgaagagaagccctatgaatgtaagtaacgtgggaaagcatgaaattctgtcagtgccttttttaatacatgaaagaattctagagagaagccatatacatgtaagtaacatgggaaagctttcaatcattttagttcctttcaaatacatgaaagaactcatcgtggagaaaaccaaacaaatgctttttggaaaggaacccatatttgagagaaaccctgggtaaagggtgtaggaaaggttttgtcatcacacaaccctgtcacacatgaatgtgtagtggagagaaccttggtaaatgtaaagagtgtgggagagcctttagtcattttagttccacttgaag

SEQ ID NO: 7165 - DNA, 365 bp, Homo sapiens
tgatactgacctgtaaatcatcctttaggtaagaagttttaaaaagccggtttgggtaaaatacttttactctgcctacagaacttcagaaagacttggttggtagggtgggagtggtttaggctatttgtaaatctgccacaaaaacaggtatatactttgaaaggagatgtcttggaacattggaatgtccagatttctggttgttatgtgatcatgtgtggaagttattaactttaatgttttttgccacagcttttgcaacttaatactcaaatgagtaacatttgctgttttaaacattaatagcagcctttctctctttatacagctgtattgtctgaacttgcattgtgattggcctg

SEQ ID NO: 7166 - DNA, 487 bp, Homo sapiens
gagaaatcacactgacacaccaccacactatcacagggacacagacacacggagacgtcaccacatggacacactgtcacactaccacagggaggggagacatcacactgtcacatggacacaccatcacacacatgaacacactgacacactgccatatggacactgccacacacactgccacactgtcacatggacacacctccacaccatcacaccaccacacacactgccatgtggacacaaggacacacagacactgtcacacagatacacaaaacactgtcacacggagacatcaccatgcagatacaccaccacatggacatagcaccagacactctgccacacagatacaccaccacacagaaatgcggacacactgccacacagacaccaccacatcgttgccacactttcatgtgtcagctggcggtgtgggccccacgactctgggctctaatcgagaaattacttggacatatag

SEQ ID NO: 7167 - DNA, 527 bp, Homo sapiens
gagtcgcgagcgaacgaccaagagggtgttcgactgctagagccgagcgaagcgatgcctaaatcaaaggaacttgtttcttcaagctcttctggcagtgattctgacagtgaggttgacaaaaagttaaagaggaaaaagcaagttgctccagaaaaacctgtaaagaaacaaaagacaggtgagacttcgagagccctgtcatcttctaaacagagcagcagcagcagagatgataacatgtttcagattgggaaaatgaggtacgttagtgttcgcgattttaaaggcaaagtgctaattgatattagagaatattggatggatcctgaaggtgaaatgaaaccaggaagaaaaggtatttctttaaatccagaacaatggagccagctgaaggaacagatttctgacattgatgatgcagtaagaaaactgtaaaattcgagccatataaataaaacctgtactgttctagttgttttaatctgtcttttacattggcttttgctttctaaatgttctccaag

SEQ ID NO: 7168 - DNA, 58 bp, Homo sapiens
cagatcatgtctctgctactcgaatcttgtgtggagcccttgtctttcctactattgc

SEQ ID NO: 7169 - DNA, 77 bp, Homo sapiens
tataagaaggagaacaaagaagttattcttaaacttctggtcatatttgagaacataaatgataatttcaaatggga

SEQ ID NO: 7170 - DNA, 457 bp, Homo sapiens
agtcgactgttgcgcgtgcgcgcgctgtgacgttccctacgcggtcgggcgttgggtttcgcggcgctcgccgcactggttgttcagcaccttcggtccggttgaggttgtcaagtcgggccaaacaggttgtttctctgcagtttccaacatggcagggaggtttaatagacatggataagaagtccactcacagaaatcctgaagatgccagggctggcaaatatgaaggtaaacacaaacgaaagaaaagaagaaagcaaaaccaaaaccagcaccgatcccgacatagatcagtgacgtctttttcttcagatgatcctatgtttccttcttcctcatcatcgtcttcaggaagccagacagattcaagtattgaagatgctgccaagggaaaaattaagaagaagagaagagagaaaacaaataaatgggaaaaaagaaaggacaaaatatg

SEQ ID NO: 7171 - DNA, 114 bp, Homo sapiens
taaaaatgtaattaggctcagtactcatactgaataactgttaatgattccaaattaccctatttgctgagggtattctacttatgttctcccttgggctttataaaattaacc

SEQ ID NO: 7172 - DNA, 157 bp, Homo sapiens; identical to SEQ ID NO: 2166

SEQ ID NO: 7173 - DNA, 489 bp, Homo sapiens
tggaattaccttttagagcaatatgaactgtcaatgtcaagtgctgaacaaaacaaaattctgtatgctttgtcaacgagcaagcatcaggaaaagttactgaagttaattgaactaggaatggaaggaaaggttatcaagacacagaacttggcagctctccttcatgcgattgccagacgtccaaaggggcagcaactagcatgggattttgtaagagaaaattggacccatcttctgaaaaaatttgacttgggctcatatgacataaggatgatcatctctggcacaacagctcacttttcttccaaggataagttgcaagaggtgaaactattttttgaatctcttgaggctcaaggatcacatctggatatttttcaaactgttctggaaacgataaccaaaaatataaaatggctggagaagaatcttccgactctgaggacttggctaatggttaatacttaaatggtcaatagaaaaagt

SEQ ID NO: 7174 - DNA, 125 bp, Homo sapiens
agacgagacgagacgagactggaactgcaaagattgcagctgtgataaaggatctcaagacaaagtcatcccggatcatccagctgtgcatgatggctcacgcctgtaatcccagcactttggaa

SEQ ID NO: 7175 - DNA, 103 bp, Homo sapiens
gcaattattatgatcaagtgagattatttttgtgaagccatgtaaactataaagtgctttccaagcatgaggaattactgtggatgatcttgagtttcacatg

SEQ ID NO: 7176 - DNA, 64 bp, Homo sapiens
gagtaaataccttacacagctgtcctctgggtttggttttctattttcttctccaaaagttaag

SEQ ID NO: 7177 - DNA, 263 bp, Homo sapiens
catgttacatataattctgtgttatttaatataggaatatgccccgtgataactatggaattttttttttttttttaaaacaaagggttcccttttttccaaaggggaagggcatgggccaatttggggttaaaaaaacccaacccttctgggtttaaaaaatttttcttgcttaaccctccaaataagtgggaataaagggcccttgcccccaccccgggttaattttttttttttaaaaaaaaacgggtttcccctttgtg

SEQ ID NO: 7178 - DNA, 64 bp, Homo sapiens; identical to SEQ ID NO: 7176

SEQ ID NO: 7179 - DNA, 477 bp, Homo sapiens
aaaaagcattattgttactggcatagggagggccccagttaaaatagcagtccaattcagagaccttcgtatttgtcgttaagatcaaaaggactcttggaataatggactatgctacaggattattttaagttcagatagataaattagcttcttcccaaattctcattctgcttttcctgtggtactgtatagtatcatgaagttatatctttaaactcttagtttgtactatgtggtgtcttatgaaaaccttgatttgtttatacttagtgaatgaaacacttgggtttaaagttctttaactgatgtcacttcttaggctagaaagctgttgaaagaacttagtgttccacccttagaccaaggttcatgtcaccatatttaacagcagctttgtattacggtcaagattgtttgaagaattcagcatacaaacttaatttacagatgcaagcctgcagatggacctcccca

SEQ ID NO: 7180 - DNA, 372 bp, Homo sapiens
agacgacagaagggtacggctgcgagaagacgacagaagggtacggctgcgagaagacgacagaagggtacggctgcgagaagacgacagaagggtacggctgcgagaagacgacagaagggtacggctgcgagaagacgacagaagggtacggctgcgagaagacgacagaagggtacggctgcgagaagacgacagaagggtacggctgcgagaagacgacagaagggtacggctgcgagaagacgacagaagggtacggctgcgagaagacgacagaagggtacggctgcgagaagacgacagaaggggaaacattttatttaaaaaaaaaaacgtcaattgggcgtggtggctcacgcctgtaatcct

SEQ ID NO: 7181 - DNA, 102 bp, Homo sapiens
gtttcattaagcattttcatttgttcgtttaaaacaaagaacaacaacaacaaaacaaaggccatgtttggtgactgacacctgtaaaactagcactttgag

SEQ ID NO: 7182 - DNA, 557 bp, Homo sapiens
aacaaatcaacaatcaactggaattacaaccaaatctatgtacttctgttgtgagatctttttacttgcaatcctttgcaaaacgtgctgtgcacaatgtagtaagtatgcttgtaataaacaattaaaggagcttttcacgtgtagaagtgcacgcttaatttttgttaaatcatctcaataaatacttataagtgaagccaacatgattttcttaagttttttgaaaatgtgtgtacctataactgctgtgctatttgcaagaggcagtatacacacaaatttgatgatttcattctttaccaaatactatatttagcacattaaatactaagaaatagcactaaaatgggccgggcctggtggctcatgcctgtaatcccagcactttgggaggccgtggcagacggatcacttgaggtccagagtttgagaccaacctggccaacatggtgaaaccccgtctctactaaaaatacaaaaattgctgggcctggtggtggatgcctgtaatcccagctactcgagaagcttgggcaggagaatcacttgaactc

SEQ ID NO: 7183 - DNA, 574 bp, Homo sapiens
acagaaggggcccgccccttcctctggcgtccaaggtgatatcgcgcgaggttcgcagccaataaggaggcggatgtgacggcccgtttgcagccgccggcagctactgcaaggcaaaagccggagtggacgtgtcttttgaaactgctgctctttcacttctcaggcgtcaccgagagctcagcacccaggctgaactctgtaccatttggaagaatggaagctgatgcatctgttgacatgttttccaaagtcctggagcatcagctgcttcagactaccaaactggtggaagaacatttggattctgaaattcaaaaactggatcagatggatgaggatgaattggaacgccttaaagaaaagagactccaggcactaaggaaagctcaacagcagaaacaagaatggctttctaaaggacatggggaatacagagaaatccctagtgaaagagacttttttcaagaagtcaaggagagtgaaaatgtggtttgccatttctacagagactccacattcaggtgtaaaatactagacagacatctggcaatattgtccaagaagcacctcg

SEQ ID NO: 7184 - DNA, 511 bp, Homo sapiens
ccactcaaaagcaacttcctaacttgaggaataactcctttgtagtttactttctggtactggttggtgccttgtattgggatacagctatattcttagctcaaatgtcctctttttgagagcaaagtagttatccaatggtgagacgagaccctgacgctcatagaggccattccttcctgggtgtcggaccagggctctgtgtcagggaaaaccttctgggtggactttgtaagaatccagtttccaaggttagattcacatccttaatcttgcagagactagaatttcacagctcgctttggaacatattccaattcaaccagttaaaatcagaggaccaagtcgtgggggaggggggcggtgttgaggagaggtatttttaaagatctggcaacttttcaggattatttgtggagaactctaaggttaagatcaggaaataaaagactgtgtgtgtgtgtgtgtgtgcgtgtgtgtgttcaagtgcctaaatcttgtttacctatca

SEQ ID NO: 7185 - DNA, 74 bp, Homo sapiens
gcattacttgaagctggtgccaaagtggttgcgctcgaaagtgacaaaacttttattccacatttggagtcctt

SEQ ID NO: 7186 - DNA, 530 bp, Homo sapiens
gggatggtctcaacaaatatgacttctaccaccttaaagtctacacccaaaacaacaagtgtttcacagaacacatctcagatatcaacatccacaatgaccgtaacccacaatagttcagtgacatctgctgcttcatcagtaacaatcacaacaactatgcattctgaagcaaagaaaggatcaaaatttgatactgggagctttgttggtggtattgtattaacgctgggagttttatctattctttacattggatgcaaaatgtattactcaagaagaggcattcggtatcgaaccatagatgaacatgatgccatcatttaaggaaatccatggaccaaggatggaatacagattgatgctgccctatcaattaattttggtttattaatagtttaaaacaatattctctttttgaaaatagtataaacaggccatgcatataatgtacagtgtattacgtaaatatgtaaagattcttcaaggtaacaagggtttgggttttgaaataaacatctggatcttat

SEQ ID NO: 7187 - DNA, 523 bp, Homo sapiens
ggagcagagtccctcacccccaccagctgtagctgaacgtctggatggtggagaagagcagggttccgagtctgaggaagacataaccttgtgcctgcctgcccacctctctctctggtcctgttcatctctcaggctctgagacactgaccttcactgctcagttaaaggttccagggattccactttgtctggacccatccagctgagtgaacccagggtggtggtgtatctggggagagtgaggagtgggttgtccaaacaccagggaaagagccctttggggcctcagacagaggagtgaagctggaaccatcagggaacatgagtgaattttggcacaaactgggctgctgtgtggtagagaaaccccagccgaagaagaagagaagacggattgaccggaccatgattggggaaccaatgaattttgttcacctgactcacattggctcaggggagatgggggccggagatggacttgccatgacaggtgcagttcaggagcagatgagatccaagg

SEQ ID NO: 7188 - DNA, 596 bp, Homo sapiens
gataacaaaggaagcacagagagtggaatcaaatggctaataaattttctggaatttcttagaaattccatttaaccatatgatatgcttagcagaaattgaataaagattgttaccttcatgttatttttttttctggctcttaaaatgtgcttgggagacagaacaataacttaaaattacagcttagttgaacataaggaatttttagtttttgccttttaatttatggcaaaaatgatagacgcctaattcacactgttaaattttagatggtctgtcttctgctgatcccaactctgattggaatgcaccagcagaagagtggggcaattgggtagacgaagaaagagcttcacttctaaagtcccaggaaccaattcctgatgatcaaaaggtctcagatgatgataaagaaaagggagagggagctcttccaactgggaaatccaaaaagaaaaaaaagaaaaagaagaagcaaggtgaagataactctactgcacaggacacagaagaattagaaaaagagattagagaagaccttccagtgaatacctctaaaacccgtccaaaacaggaaaaagctttttccttga

SEQ ID NO: 7189 - DNA, 565 bp, Homo sapiens
ataaaataagtattgagccgggcatggtggctcacccctgtaatctcagcactttgggaggctgaggcggggggatcacggggtcaggaaatcgagaccattgtggctaacacggtgaaaacccatctctgctaatttttgtgtatttagtagagctgggttttgccctgttggccaggctggtcttgaatacctgacctcaagtgatctgcccccccgacttcccaaaatgctgggactactggcatgagccagtgctcctgtcctcattccattcttcaccgtggtactgaccatccatttattcagcaccaattgtgtgccagaccttgtgtcagcattatggaggacttcccttgggaggcttgttagctgtacttgcaatctgatttgggttcccaaatcagcatataacaccaggtatttctctaatagagtatgtgccacactttctgctaactgcctgtttatcagtgtccccacatcccaatatctggttccttcaagggcagggagcacagggtatggcgtcagagtggtcctcagtgatgtttactggtgggta

SEQ ID NO: 7190 - DNA, 553 bp, Homo sapiens
acagaagggataaaataagtattgagccgggcatggtggctcacccctgtaatctcagcactttgggaggctgaggcggggggatcacggggtcaggaaatcgagaccattgtggctaacacggtgaaaacccatctctgctaatttttgtgtatttagtagagctgggttttgccctgttggccaggctggtcttgaatacctgacctcaagtgatctgcccccccgacttcccaaaatgctgggactactggcatgagccagtgctcctgtcctcattccattcttcaccgtggtactgaccatccatttattcagcaccaattgtgtgccagaccttgtgtcaccattatggaggacttcccttgggaggcttgttagctgtacttgcaatctgatttgggttcccaaatcagcatataacaccaggtatttctctaatagagtatgtgccacactttctgctaactgcctgtttatcagtgtccccacatcccaatatctggttccttcaagggcagggagcacagggtatggcgtcagagtggtactc

SEQ ID NO: 7191 - DNA, 216 bp, Homo sapiens
aatagccaagtttattttaactttagtcattactggatcccagagattttctttctcttttttggcatatagattatttatgtcacttcagtatgcccagtccacagatgagatcttctgagggactgcttctggagccggccctcttgtgtgattgaattagtcagtgatggttctcaggactagattagattgttactcttaaaataattactt

SEQ ID NO: 7192 - DNA, 588 bp, Homo sapiens
ccctttctctggcataactgagctgctggtagtgccctactcactcatccttctgttgtaggcaaatactttcattctttcaggcctcgctcccgctcttgctgctaccgggcatgctgtcaccctttcctgccctctaccccttttaatctggccagcctcaatatttaagtctctgcttgggcatgtgttctagaaaagccatccctgagatgctttattttcattctttttagaccctaatgcctagcatgtatgtagcaggactcaatacaaattttctgagtaaaacaaagactgtttttacaaagatgatgtgcaagactctcccctgcagttttggagcagaggggacagacatatggagaaataatgtacagcttagggggtaaagatgccgtagaaaaatcagtaaaatactaaggcagcctcaaggaaggagatacctgtttatttggggaaagacatgcagaatcaaggaagacttcacatagaattgtttcaaaagatgaaaataaggctgggtgtggtggctcatgcctgtaatcccagcactttggaggctgaggtgggcggataatgaggtca

SEQ ID NO: 7193 - DNA, 554 bp, Homo sapiens
gacagagggggagctccttcctgttcccctggcggcccctcgcttcttccttctggatgggggccagggggcccaggagagtataaaggcgatgtggagggtgcccggcacaaccagacgcccagtcacaggcgagagccctgggatgcaccggccagaggccatgctgctgctgctcacgcttgccctcctggggggccccacctgggcagggaagatgtatggccctggaggaggcaagtatttcagcaccactgaagactacgaccatgaaatcacagggctgcgggtgtctgtaggtcttctcctggtgaaaagtgtccaggtgaaacttggagactcctgggacgtgaaactgggagccttaggtgggaatacccaggaagtcaccctgcagccaggcgaatacaccacaaaagtctttgtcgccttccaagctttcctccggggtatggtcatgtacaccagcaaggaccgctatttctattttgggaagcttgatggccagatctcctctgcctaccccagccaagaggggcaggtgctggtgggca

SEQ ID NO: 7194 - DNA, 533 bp, Homo sapiens
gacagagggggtttcctttgtaaaccaggattcttatttgtgctgttatagaatatcagctctgaacgtgtggtaaagatttttgtgtttgaatataggagaaatcagtttgctgaaaagttagtcttaattatctattggccacgatgaaacagatttcaactgataaagagctggagaactccatgtactttggaatctcctccaagatagccagagtttaatacatcttcattctcaacactctccaaagaacttgacctaccttatgggttccatatttttcttcttaaatgtgcatcaatcatgccttgcccccaacctttaaatatattcttagacctggtaaatgcactcagacttgcgtctttaggaatttttaactttctttcactacattggcacttaaattttttctttataaagctttttgaaggtcataaacaaagaccataattgatgatagacctaatacatttcctctgtgtgtgtgtgtaacattccaaatactttttttttcttttccactgttt

SEQ ID NO: 7195 - DNA, 366 bp, Homo sapiens
acagaagggaacaaagtggttttgggggcttacagcagagtaaacataactcctgcctgacttgtggcaaatgcgtcttttggagttatgagtgcaaggttacctttagtcttcaatcattgtgtattagcctagttttcacctgtagggagcattctcctcctcctctgtgcacggttgcggtggaactctgtgggcatccctctgagcctttgctggtgctctgcacacgctattaattacatgaaaaatattattacagcatttttaaaaacctatcaagcagctaatattttccgcccacccacatttaccacaagcaattttgcttccacttacctgcctgccactcatttcattagttta

SEQ ID NO: 7196 - DNA, 581 bp, Homo sapiens
acagaagggcggttggcaaaattgtcatggaagctgctgccaagcatctgacccctgtgactcttgaactgggagggaaaagtccatgttatattgataaagattgtgacctggacattgtttgcagacgcataacctggggaaaatacatgaattgtggccaaacctgcattgcacccgactatattctctgtgaagcatccctccaaaatcaaattgtatggaagattaaggaaacagtgaaggaattttatggagaaaatataaaagagtctcctgattatgaaaggatcatcaatcttcgtcattttaagaggatactaagtttgcttgaaggacaaaagatagcttttggtggggagactgatgaggccacacgctacatagccccaacagtacttaccgatgttgatcctaaaaccaaggtgatgcaagaagaaatttttggaccaattcttccaatagtgcctgtgaaaaatgtagatgaggccataaatttcataaatgaacgtgaaaagcctctggctctttatgtattttcgcataaccataagctcatcaaacggatgattgatgagaca

SEQ ID NO: 7197 - DNA, 336 bp, Homo sapiens
agcaggacagtgttgggatgggctgattgtgagtatggagttctttctggaggagctccagcaggagctgggcaaatactgggagctttgactaaggggcatgcattgcagatgaggtttgaccagaggttttccaggatccctgaagaactctgcacttctaagcctgtaaggccacaacaggtgagatgaagggggagttgaacttccagctccttgtgtgtccccttaggttccccttttgggtccacacaaaggctcttgagcccaatctgaaggtctaaggctatggatatctcctccatttctaagttgggacaaggttgtccagcaaaa

SEQ ID NO: 7198 - DNA, 575 bp, Homo sapiens
acagaaggggaacaactccagcctgataggtttaggatacactcagactctaaagccaggtattaaactgacactgtcagctcttctggatggcaagaacgtcaatgctggtggccacaagcttggtctaggactggaatttcaagcataaatgaatactgtacaattgtttaattttaaactattttgcagcatagctaccttcagaatttagtgtatcttttaatgttgtatgtctgggatgcaagtattgctaaatatgttagccctccaggttaaagttgattcagctttaagatgttacccttccagaggtacagaagaaacctatttccaaaaaaggtcctttcagtggtagactcggggagaacttggtggcccctttgagatgccaggtttcttttttatctagaaatggctgcaagtggaagcggataatatgtaggcactttgtaaattcatattgagtaaatgaatgaaattgtgatttcctgagaatcgaaccttggttccctaaccctaattgatgagaggctcgctgcttgatggtgtgtacaaactcacctgaatgggac

SEQ ID NO: 7199 - DNA, 489 bp, Homo sapiens
gtgcatgagattttcagcactgtagaatttcacacaggcacaagcataacaccagtactttagcagccgccaacagttgcatctattaaacgttttgagaaatgacattgacttatgcacatttaagcaatcaacaatgttttagaagtccaggtaacatataaaatatattcagacctagttttactttccatattgttgctccaaagtaaggtaaataggagttttagttgtactggcctgtaagattttttaaattacacagtgcatgacaacaactaaagccaactcagtccttctcttggcattgtgagttgaggacctttagccaactgttagctcatctgactatctgtctagaccaagggtcggcaaagttttcagtaaagacccacagagtacatattttggagtttgtgttgtctgtaccaacagacagacatggtgtctgtcccaactacccaactctgccattgtagcactaaagca

SEQ ID NO: 7200 - DNA, 77 bp, Homo sapiens
aagcttgcggccgcggtttttttttttttttttttttcccgggcccccaaaatttttatttttttaaaaaaaaaaaa

SEQ ID NO: 7201 - DNA, 61 bp, Homo sapiens
agcttgcggccgcggttttttttttttttttttttaacccccccccttggggggggggggg

SEQ ID NO: 7202 - DNA, 442 bp, Homo sapiens
cctcagttcaccttctcacaatgaggctccctgctcagctcctggggctgctaatgctctgggtctctggatccagtggggatattgtgatgactcagtctccactctccctgcccgtcatccctggagagccggcctccatctcctgcaagtctagtcagagcctcctgcttagtaatggatataattatttggattggtatctgcagaagccagggcagtctccacagctcctgatctatttgggttctaatcgggcctccggggtccctgacaggttcagtggcagtggatcaggcacagattttacactgaaaatcagcagagtggaggctgaggatgttggggtttatcactgcatgcaggctctacaatctcctcacacttttggccaggggaccaagctggagatcaaacgaactgtggctgcaccatctgtctt

SEQ ID NO: 7203 - DNA, 602 bp, Homo sapiens
attcggcacgaggcaagaatgtcatattctcaaggaaaaaggtatatcacatgtctcattctcctcaaatattccatttgcagacagaccgtcatattctaatagctcatgaaatttgggcagcagggaggaaagtccccagaaattaaaaaatttaaaactcttatgtcaagatgttgatttgaagctgttataagaattaggattccagattgtaaaaagatccccaaatgattctggacactagatttttttgtttggggaggttggcttgaacataaatgaaaatatcctgttattttcttagggatacttggttagtaaattataatagtaaaaataatacatgaatcccattcacaggttctcagcccaagcaacaaggtaattgcgtgccattcagcactgcaccagagcagacaacctatttgaggaaaaacagtgaaatccaccttcctcttcacactgagccctctctgattcctccgtgttgtgatgtgatgctggccacgtttccaaacggcagctccactgggtcccctttggttgtaggacaggaaatgaaacattaggagctctgcttggaaaacagttcactactt

SEQ ID NO: 7204 - DNA, 483 bp, Homo sapiens
  misc_feature 377: n = A,T,C or G
cgtcttcactgctctgtgtcctctgctcctagaggcccagcctctggtcctgtgacctgcaggtattgggaatccacagctaagacgccgggacaccctggaagcctagaaatggacaacctgaggtatggagtgtatcctgtcaagggggcaagtggataccctggggctgagaggaatcttctggagtactcttattttgaaaagacggagtttcgctcttgttgcccaggctggagtgcaatggcgcgatctcagctcacctcaacctccgcctcccgggttcaagcgattctcctgcctcagcctcccgagtagctgggattacaggcatgcaccaccaccctggctaattttgtatttttagtagagacggngtttctccatgttggtcaggctggtcttgaactcccgacctcaggtgacctacctacctcgacctcccaaaatgctgggattacaggcatgagccaccgtgccagg

SEQ ID NO: 7205 - DNA, 598 bp, Homo sapiens
  misc_feature 592: n = A,T,C or G
cgtatttatttattttattatttttttgaaacatttttacatgtttatttatcaaaagtgaaaaagcatacaattcaacacaatttcaatagcatttgacaccacccctgtggatcctgtacatggctgacgtcaccgtccagtgcaaaatcaaaaaagaaagaaagaaaaaccccaaagaaagaggatttttcagtggagaacatggtgggctgattaggcttctattagattacattcatttcacatctgtgtgcaattctcccataaattggtctttaaaatatatatatatatttaaagatattagaaatatatatttaagtatatttaaaatatatatatttttaaagagacgggggtctggtatgttgcccaggctggtcttgaactcctgggctcaagcaatcctcccgccttggcctcccaaagtgcttacatcctcttgtgccctaccctctggctggtaggtttcagaaatattatctaaggtagttgaatccgagctgccgtctctctcaccaccccccctcacgtgtccactgctcacacacagcagccggaattgacacttgagtgagtaccatgcggngtgagt

SEQ ID NO: 7206 - DNA, 483 bp, Homo sapiens
aagcttgcggccgcggttttttttttttttttttaaaggactccctactatgtttttttttttaaaaaaagcagattttaaaaatttgtttactggggaaaatttaggggatccaaaaaaaaaaaaaaggttagtataatcttaacggcctaaaaaaccctttataaacatagggggggtttcttttaaaaaaatttagtaacccaatttggggtctaagggtattttatccttaaaaccaaatttttaaaaaggctgcaacattgggaaaattttttttgtcatttttgaaggacaaaaaccccaaaaccatttttgataaaaccaaaattggccaaagggtttttaattccccttaaaaccttttgcccggcaaaaaaaaaaccaaaaaaaaacttgccaccaaataaaccaaaccccccccaaaggggaaaaaatttttgcaaacttcccctttgaaaaagggcttatttcccccctttt

SEQ ID NO: 7207 - DNA, 405 bp, Homo sapiens
cactgtgagcacaggttcttctaccttggggccacacccagttacctgtatctcactgcacagcagtggctgttggggaccaggcccacccctccatgtcccacctcctgcaactgcagcctgagccttcccatcagcctggggtggtgcagacccatgtgccattgtggatccttcaagttacctgtgtggcagaaaggacgtgtgagtgccgtccaaacccaaacactgagagggtccttcccattgcccccacggaagtaaggtgccccagtgctaattccacttatacttgctggtggcaaggacacttctcctccttattaaagtgggggattggctgggtgaggtggctcacgcctgttatcccagcactttaagaagccaaggcaggtggaccacctg

SEQ ID NO: 7208 - DNA, 267 bp, Homo sapiens
gcagtaatgcttgcttgtccactgttcatctcctcccgtacagctaagttcctaacaggtaccagtgtctgaagcctggggactggcggctgctggtcaaggccacattagtttattgttaagtgcaaggtttctggtaacagaaataaagaattcaattgattcatcatcaagaccaaatatatttactaaagatctaccttaaattcattttttagcaggtagtatggcattgtggttaagaatttacatttgtgaacatttacc

SEQ ID NO: 7209 - DNA, 381 bp, Homo sapiens
gacttttgtttttctcttcataatagtttgtttcctcaactaaaacgctatctcactgtaagttatcattagttttgtcttccctatttgattaaaagtctcttgtgccatctgtctcagactgctttgcacacagcaggtactgaatagagttgttggttaatcactcaatgtagtcacacaatagtgaatcattatacaaattcctgaaagacttcaactcctccccttgctaatggtttttatggaggttaactttttaatatcaccaaaccaatcgtggggaaaatttacagagttctttcttttttgctttattaaagaatagtgttagccaggcgtgttagtgcacacctggagtcccagctacttgggaggctg

SEQ ID NO: 7210 - DNA, 572 bp, Homo sapiens
caagatagtaaaagcacctagtgtgatagattatcggttaggtcatttgtgggttgattcttcagaaacagcagttgatacctagcagcgttattgatgggcattaatctatgttagttggcaccttaagatactagtgcagctagatttcatttagggaaatcaccagtaacttgactgaccaattgattttagagagaaagtaaccaaaccaaatatttatctgggcaaagtcataaattctccacttgaatgcgctcatgaaaaataaggccaaaacaagagttctgggccacagctcagcccaaagggttcctggggatgggaggcctctctctccccaccccctgactctagagaactgggttttctcccagtactccagcaattcatttctgaaagcagttgagccactttattccaaagtacactgcagatgttcaaactctccatttctctttccccttccacctgccagttttgctgactctcaacttgtcatgagtgtaagcattaaggacattatgcttcttcgattctgaagacaggtccctgctcatggatgactctgg

SEQ ID NO: 7211 - DNA, 342 bp, Homo sapiens
tggccaaggactgtgcaaagaagattgtagcaagttcagcaatgggattggttaataaggacattggaaagaaactaatgagttgtcctttggcaggtctgatcagtaaagatgccataaaccttaaagccgaagcactactccccactcaggaaccgcttaaggcttcttgtagtacaaacatcaataatcaggaaagtcaggaactttctgaatccctgaaagatagtgccaccagcaaaacttttgaaaagaatgttgtacggcagaataaagaaagcatattggaaaagttctcagtacgaaaagaaatcattaatttggagaaagaaatgtttaatg

SEQ ID NO: 7212 - DNA, 76 bp, Homo sapiens
ggtaccccaatctgaagtcagtaaatgaactaatctacaagcgtggttatggcaaaatcaataagaagcgaattgc

SEQ ID NO: 7213 - DNA, 232 bp, Homo sapiens
gaagacgacagaagggtacggctgcgagaagacgacggaagggtacggctgcgagaagacgacggaagggtacggctgcgagaagacgacagaagggtacggctgcgagaagacgacagaagggtacggctgcgagaagacgacagaagggtacggctgcgagaagacgacagaagggtacggctgcgagaagacgacagaagggtacggctgcgagaagacgacagaaggg

SEQ ID NO: 7214 - DNA, 272 bp, Homo sapiens
ggttatgcatgggaattagtttctcaagtcagtaagataaaaattctgtagaatcagaataccatcaggctgggcacactggctcacgcctataatcccagcactttgggaggccaaggtgggtggatcatgaagtcaggagtttgagaccagccttgccaacattgtgaaaacctgttctctactgaaaatacaaaaattagctgagtgtggtggctcacgcctgtaatcccagcactttgggaggccgaagtgggaggatcacaaggtca

SEQ ID NO: 7215 - DNA, 589 bp, Homo sapiens
atatttgttgaataagaagaaaaatgaacaagtgcatgaatgcgtgaatgatgtagaagacaatccagtaataccaaagaatctattggaatcaaaattattaaaaagaaaatgcagatgaatggagaatttatgttaaaagccaaaagaggggggagctttgacttttaggcatcatcaaatttaataaagagatatcagtaacatactaaagcaaaagccagatggttttgaacttaagaataaatatgatgtaaggaaatgaacacagcccataaagccaacctttcaaaaagagtaacaataaagggagaatggtagtgctagagaggaatgatgggatgaaggagtctgagatttgtttgtctctttttaactttgtggcagagagaattggacatgctcaccaatttttctactactttgtcctgctttcctgatataccacagggaaagttctataaacatttcctactacaaagtgaaaagaaacctattttaaaagactggtttatgggattttatgtaatatttttcaatttttgagtaaggaaaactttctaagttttcagtctacctgaaaataagc

SEQ ID NO: 7216 - DNA, 495 bp, Homo sapiens
acgagtcctccgtattctgcaccagtattgtggctcaagactccagaggccacatttaccatggtcggaatttggattatccttttgggaatatcttacgcaagctgacagtggatgtgcaattcttaaagaatgggcagattgcattcacaggaactacttttattggctatgtaggattatggactggccagagcccacacaagtttacagtttctggtgatgaacgagataaaggctggtggtgggagaatgctatcgctgccctgtttcggagacacattcccgtcagctggctgatccgcgctaccctgagtgagtcggaaaacttcgaagcagctgttggcaagttggccaagactccccttattgctgatgtttattacattgttggtggcacgtccccccgggagggggtggtcatcacgaggaacagagatggcccagcagacatttggcctctaaatcctttgaatggagcgtggttccgagttg

SEQ ID NO: 7217 - DNA, 496 bp, Homo sapiens
ggaggagacaccgccgcagttgccggtacatcggggatttctggctctttcctcttcgccttaaattcgggtgtcttttatgaataatcaaaagcagcaaaagccaacgctatcaggccagcgttttaaaactagaaaaagagatgaaaaagagaggtttgaccctactcagtttcaagactgtattattcaaggcttaactgaaaccggtactgatttggaagcagtagctaagtttcttgatgcttctggagcaaaacttgattaccgtcgatatgcagaaacactctttgacattctggtggctggtggaatgctggccccaggtggtcactggcagatgacatgatgcgtacagatgtctgcgtgtttgcagcccaagaagatctagagaccatgcaagcatttgctcaggtttttaacaagttaatcaggcgctacaaatacctggagaaaggttttgaagatgaagtaaaaaagctgctgctgttcttga

SEQ ID NO: 7218 - DNA, 487 bp, Homo sapiens
atggctaaaaaagaaaaaacaggtatgctagcagtttaagaaacaggggtctacaacttcgattaaattttccaaaacgaggtggctgacacacgcaatcccagctctttttgaaagaaaatggtttgagcccacgagttcaagatcagcctgagcaaatatggcgagactcagtcttttgagatagtgcgatcctggcttactcactgcatctttggactcctgggttcgaacatccacatcagcctctcagcagacacgtgccataacaacgggctagtgtgtatttttttgttttcatatgtatatatggtttttgtttttgtttggtagagaggggtgtttcccccgcgttacccagactagtctcaaactcctgggatttgggctttgggatcaagcgatcctcacccccaaccccaaagtgctgggattacaggtatgagccactgcacctggcactctaccaaaaaaaaaaatgttttta

SEQ ID NO: 7219 - DNA, 452 bp, Homo sapiens
atctttaagctccctgggaagcaggatataagcccagggctggcaggctctttctagctacctgctcttgcacatagagtttgcctcatggttgcaagaaggctgccatagctccagatggcacatagacattccaggcagcaggaaaaaggaaggagcacttaaccgaaggaggtcagggagttggttagtctccacctgaagaagagagccatgaaccagcttcagttgactaacgggctcctgtgagtgcatctttggacttttctggaggttgaaatctagatgtggtatgtgtcttaaagcagccaccaactcctcccattaccttccaagtgagcccaactacacgatggagcctcttccctgcccttggatctgggctgagcctctgacttgcgttgaccaacagaatgcagtgaaagtgatgccgatactaccctccctgccct

SEQ ID NO: 7220 - DNA, 495 bp, Homo sapiens
acccaacacacatgcatttcctccttgccttctcagtattgccatcgtgaaccagaattgtcacctccaatttaaacagtgaaggcctttgttaggaagaggggcagggtgcagagggggatggttgctttttctaaatcacagctctgatcaaatccctcctaagcagaagccttccaggctcccctccataaggctccaggtgtttacttaccttgcctgtcaggggcttctgcagcttgcttcctacctgctatctccactcctctccaaaccaccatatcctgaggcttctagaaagcaaactctggcggcatggggttaatgggtctgtgtacccaagacactgtacctgggtgctgtcatctgcctgactgaccttcctgtgtcctggtccgatggtgtctttgatcctatagctaagatcaagacactgaaaatctctaaactcaagtctgtgcttttgctgggataaagtttgtgttgagtacatct

SEQ ID NO: 7221 - DNA, 518 bp, Homo sapiens
atttataatgaggttatagccaagttataggaacaaatgagcaaacagttttaaacaaggcagtctactgttaaataatatgcttaccttatttttataggcttttgatgaattaccacattatgctttgttaaaagaactcttaattcagatctttagtacaccacggtatcatcccaaaagccaaccatttgtggaccacgtgtttactttcaccattttggataataggatatggtttcggaactttcagatcatagaagaagatgctgctcttgtagaaataggacctcgttttgtcttaaatctcataaagattttccagggaagttttggaggaccaactttatatgaaaatcctcactaccagtcaccaaacatgcatcggcgtgtcataagatccatcacagctgcaaaatacagagagaaacagcaagtgaaagatgtgcaaaaactgagaaagaaagagccgaagactcttcttccacatgatcccactgcagatgtttttgtaacac

SEQ ID NO: 7222 - DNA, 514 bp, Homo sapiens
aactgttgcacctgctacctgaaggatgaccaaaccaaagcttctctgtgtacagactgctgactttaagagtttattctctaaagtgatctacagtttcctgtcatttgactctgttccctgtatttattgctttcttccttttctctgaaatgctattcctttaccttctcttacctttttaaaccctaaaagcaacaaataactttacttataggaagaaagagctagaggaacgaagtgatgtttggagggtaaataaatggaattttgggcagctttaacgttccaggctttgagctatgcattgagcgttaactcttacaataacctggggagaatagacagtcatttctttttgtagataagaacagagaatcagaggacagtgtcattatttcgtacaaaacaaaaagtgcattaagactagtaatgttttaaaaaatcattcgctgtcttttaaactcacagcatataacggcacttcccaaactccaatgtgcatgggaattgc

SEQ ID NO: 7223 - DNA, 425 bp, Homo sapiens
gagacagttttgaagttttcaaagactggctctgctgttaagaagttgtacttaaagcggaggagctaagccacctgccaaaatgtgcaaaggacttgcagctttgccccactcatgcctggaaagggccaaggagattaagatcaagttgggaattctcctccagaagccagactcagttggtgaccttgtcattccgtacaatgagaagccagagaaaccagccaagacccagaaaacctcgctggacgaggccctgcagtggcgtgattccctggacaaactcctgcagaacaactatggacttgccagtttcaaaagtttcctgaagtctgaattcagtgaggaaaaccttgagttctggattgcctgtgaggattacaagaagatcaagtcccctgccaagatggctgagaaggcaaagc

SEQ ID NO: 7224 - DNA, 232 bp, Homo sapiens
ctctgaagtgttttatttgtggtataggctcttgagatctcatggaaataaaccaagaactatttgaagttatttggaagttattttacctttatttagaatatcgtcctttaagttgggaatgttcagttctcccctgggagcacttgtaagcacatatttgttaagcatgtagtgtgtttcagccactgcttgtgttattggagaaacacaggtgatatacaccgctgct

SEQ ID NO: 7225 - DNA, 351 bp, Homo sapiens
atcattcaagtgaaacagaagggctttcctggccagacacagtggccactcctgcaatcccaacactttggttggctaaggtgggaggatttcttgcggccaggggttcaaggctgcagtgagctgtgatccaccactgcattccaggctgggcatcagagtgaggcctctctctaaaaaaaaaaccactccccaaaaaaagggatttgcaaataccagcctttcagcatgaggatcacatggaggaacattaagatacagttgctgggacccagccctattgattgtaattcaaaaactgaggtggggcctgatttagctccatcattggaatccattccaatttgaaac

SEQ ID NO: 7226 - DNA, 411 bp, Homo sapiens
aaatataaatgataaaaattttcccttctggctttggattgaaagcatcctagaactcattaaaaaacacctgctccctctctggaatgatgggtgcatcatgggcttcatcagcaaggagcgagagcgtgccctgttgaaggaccagcagccggggaccttcctgctgcggttcagtgagagctcccgggaaggggccatcacattcacatgggtggagcggtcccagaacggaggcgaacctgacttccatgcggttgaaccctacacgaagaaagaactttctgctgttactttccctgacatcattcgcaattacaaagtcatggctgctgagaatattcctgagaatcccctgaagtatctgtatccaaatattgacaaagaccatgcctttggaaagtattactc

SEQ ID NO: 7227 - DNA, 124 bp, Homo sapiens
tggcttttaaggataccggaaaaacacccgtggagccgggtggcaattcaccgaattcgaatcaccctaacaagccgcaacgtaaaatccttggaaaaggtgtgtgctgacttgataagaggcg

SEQ ID NO: 7228 - DNA, 403 bp, Homo sapiens
acagaaggggatgggacctgcatatgtatattgctaacatgctcccaggtaatgctgatgcttcaagtcttggaaccacacttcgagaatcactgttataatgtacagcacaactgcatgatcaggtaagtgtgctgagctgttgatcctcctcattcctgagctgagtgtgcacagacaagagcaggagactaggggctgatgatcttttagtcacatccatttaccccagagtgctctatacaaatagcatttttatgtattccccggcatgaaaaagctggaaagcaccaagagaaggttggcgttaaacaacatgaagttttggaatctcaaaaagtctgaatgactgaatttttttgagctttagcatacttatcattttataatgaggataattcct

SEQ ID NO: 7229 - DNA, 485 bp, Homo sapiens
ggtctgctcataggggagcttctagaaaggaaggacttattgtcttagttacttgatccacttccttacctcctgttcatgcaactttgcttgttttgcttctactaaaatggttctaggtgctgtgtggacaggtgatacaaaagcctcactcacacggttgacattcattcattccattttcatttctctttgagtgatcctgacaagcagagggtctcaggtggatattactgtgtctttgagacctctctaatccttatctatctctcattttaatacagagagtttcatacgcagaccttaagtagacatagtatccagctaaaagggtctcactctgtcacccacgctggagtgcagtggcgcagtcatggctccctgtaacctcaacctctcagactccagcaatcctcctgcgacagagacagagtctcactttgttgctcaggctggagtgcattggcacaatcttggctccctgc

SEQ ID NO: 7230 - DNA, 552 bp, Homo sapiens
gacttccggtcgcgccagccgcccgttgccagttctgcgcgtattggagctggagtgagccttccaggaattttggctgccaaatgtggtgcagaagtaatactgtcagacagctcagaactgcctcactgtctggaagtctgtcggcaaagctgccaaatgaataacctgccacatctgcaggtggtaggactaacatggggtcatatatcttgggatcttctggctctaccaccacaagatattatccttgcatctgatgtgttctttgaaccagaagattttgaagacattttggctacaatatattttttgatgcacaagaatcccaaggtccaattgtggtctacttatcaagttaggaggcaagtatggatgacccttactttttatatgtaacttaagccttactctaccctacccatgcgatacataatttaagaatagaatacatctgaagcaaaacagaaaaggcatgactttaaaagaacaacttttttttttaagtgctgactggtcacttgaagctttactctacaaatgggatatgaa

SEQ ID NO: 7231 - DNA, 604 bp, Homo sapiens
gggtgggtgttggtgctagcgcggcttcccggcgctcgtggaatcttctggagcccttttctccactcagcgagcctgagagtgcggaagtctccggctggtggggcatggcccaggagcactagtgatgatgcgggtgtgctggttggtgagacaggacagccggcaccagcgaatcagacttccacatttggaagcagttgtgattgggcgtggcccagagaccaagatcactgataagaaatgttctcgacagcaagagtttgaggaagaggcaaagaaccctggcctggaaacacacaggaagagaaagagatcaggcaacagtgattctatagaaagggatgctgctcaggaagctgaggctgggacagggctggaacctgggagcaactctggccaatgctctgtgcccctaaagaagggaaaagatgcacctatcaaaaaggaatccctgggccactggagtcaaggcttgaagatttctatgcaggaccccaaaatgcaggtttacaaagatgagcaggtggtggtgataaaggataaatacccaaaggcccgttaccattggctggtcttaccgtggacctccatttccagtctg

SEQ ID NO: 7232 - DNA, 513 bp, Homo sapiens
ataatctttaaagccaaaggtttttttagacttgaaagaaagagccacttaaattcttgtttaaaaataccaatttgcctcctccttcctcacttcgttaggttatggtagtgctcagacatctgcagtgttgagaaggccagtcactgttggaagtcatccaagaagcccattttgagccttactcttaagttctctatgaagaactacattgatttgttggctttcagaatcttttaggaaataaatcctctccaggacaaaaatgaacatgaatggagtggcattttgttccaagtcagaggtgggcacctataataaatgactagggttcactttctgggactgatgtttaattgtaacacagatacaacagggtggccttgttgtatataatacggtattatacctgcatgtgctctagcaaggataccaaggcaagcatacatgtagctggcttgagtttgtaccaaaacagtccttcaactttgcactgtgccttaagtaattact

SEQ ID NO: 7233 - DNA, 343 bp, Homo sapiens
ccttgtaaaaaactatttccatctatgtccctgaatttccaagccactgaagaaaaacaatacagaggttgaaaaaacctaattgttgcctacttacttggaaatgattgttgctggaaaaaaaaaaaacgttggccgtaaggttagtaatagttggggtggttgaattataaattctcatttctcatcacatttagtcttttttctccccagccattcttgttattattataaaattcaaattttgtcctcctttttaaaagattagttgctatttttaaaaaaagcatcctatttttgttattatataattcctgacaattacaaagggcctactttgatt

SEQ ID NO: 7234 - DNA, 399 bp, Homo sapiens
gacagaagggcttgaaatgggctgagtccctcttgctcacccttgacttggaaaaaccagtttctcttttattgtctgttactaatctctattctaaaaattcagctcaattctcaaccatactccaaactctctcttttccagctacctttactccctctccttcaattccactttcctctgcttacttttttttttttttctgacagggtctcactttgtcccccaggcaggagtgcaggggctaaatcttgggctcactgcagcctaaacctcccaggttaaagcaattctcctgcctcaccccctcaagtagctgggactacaagcccacaccaccacccctgactaattttttgtattttttggaaaaggcggggtttcaccatgttgcccaaa

SEQ ID NO: 7235 - DNA, 480 bp, Homo sapiens
gacagaaggggagtggcctcagccccagattgtacctcctgccctgtaggaggggagggggcaaagccttctgacttcacctttgtttgacctatgtatggaacttacttttactttttgccttaaatttttaatgaaatgcaaattttctgtgatggggttctctctctctttttttcggggggtggagtcactaataaatttgcaaatgaagttaaagacaaggcaaccatctggcttatgctatataatacttcatttaaagaagaaaggaaaagcaaatgcacttgcagcttttgaggtctcagcaaaaatgggcatgtgtcttttttgaagtttagaaatatcctaatctatttttatttatctaaaagtaagtgttttccggctgataaggctaaccctacccaggaaaggattgataactaaataaatttcctctgttttcccatgcattgaaattatgttggctgagcatgg

SEQ ID NO: 7236 - DNA, 470 bp, Homo sapiens
gggtccatgaatttcaggatgtccttgacatccaccagaagcctacaaaaattttgtgtactcatgcatttccttgaaaggctatgctttcatttagttctcctaggtagaaagactatggtttcatcagattctcaaagtggttaacaggtgagacagagaccacagtatctacccattcagaaaatgtaggatggacctggattctaatgccagctactctgctttcagctcaccttggacaccttgtaaaatgaggggtggtaaaataatagctatgtcacagggtatagagagaattacataattagatgtatatgaaagcatcattaaaaaaaaatcaggcacaggcattgttagcgccctctgcttgtctgcttgtcatctacaaataactgaatttaacagggaaggctcctctttgcagtttttgcagggagaatgtttcaaggtcattagccctcaatgac

SEQ ID NO: 7237 - DNA, 521 bp, Homo sapiens
aggtcaaggctgcagtgagccgagattgtgccactgcactgcagctggggtgacagtgcaagaccctgtctcaaaccaaaccaaaccacacacacacaaacacacatacacacacacacacgaggtccaaatggtagcagggatccaaagggaacacagtatgtaggtcaaactggcagtaacagtgtacagcctttgacaaactagaaatattagagtaggccaaacacacctccaaactgtaaggctgtgcacaaacataaaaaatggcagccttccatctcctgcactggctgagtccatttacttgtgtacttgttctagtgagtggtgggactgtacatttttgaatagacctcaaaaatacttcattctgctgctgttcagttggctttgtaaacctgtctgcagtaggacactgaaaacagcaagaacttcggggtgaacacccgctgatcctttaacaaggatttctggcaggaaactcacaaaaaggagaactgaaaatttagacatacagt

SEQ ID NO: 7238 - DNA, 62 bp, Homo sapiens
gctgtgttcacactgaatttggggtcaatctatttcccccaccctctctcctccccaaccct

SEQ ID NO: 7239 - DNA, 546 bp, Homo sapiens
gtcacctccatgggaccaggaccgtaggatgatgtttcctccgccaggacaatcatatcctgattcagcccttcctccacaaaggcaagacagattttgttctaattctggtagactgtctggaccagcagaactcagaagttttaatatgccttctttggataaaatggatgggtcaatgccttcagaaatggaatccattagaaatgataccaaagatgatcttggtaatttaaatgtgcctgattcatctctccctgctgaaaatgaagccactggccctggctttgttcctccacctcttgctccaatcagaggtccattgtttccagtggatgcaagaggcccattcttgagaagaggacctcctttccccccacctcctccaggagccatgtttggagcttctcgagattattttccaccaagggatttcccaggtccaccacctgctccatttgcaatgagaaatgtctatccaccgagggggttttcctccttaccttcccccaagacctggatttttccccccacccccacattctg

SEQ ID NO: 7240 - DNA, 597 bp, Homo sapiens
gacaataatcgcattgctagagcctgtggggcccggatagtcagccgaccagaggaactgagagaagatgatgttggaacaggagcaggcctgttggaaatcaagaaaattggagatgaatactttactttcatcactgactgcaaagaccccaaggcctgcaccattctcctccggggggctagcaaagagattctctcggaagtagaacgcaacctccaggatgccatgcaagtgtgtcgcaatgttctcctggaccctcagctggtgccagggggtggggcctccgagatggctgtggcccatgccttgacagaaaaatccaaggccatgactggtgtggaacaatggccatacagggctgttgcccaggccctagaggtcattcctcgtaccctgatccagaactgtggggccagcaccatccgtctacttacctcccttcgggccaagcacacccaggagaactgtgagacctggggtgtaatggtgagacgggtactttggtggacatgaaggaactgggcatatgggagccattggctgtgaagctgcagacttataagacagcagtggagacggcagttctgctactgc

SEQ ID NO: 7241 - DNA, 82 bp, Homo sapiens
tatagtttagggcagtggaaggaaggctggcatcaaaatattttgatcaaaaaagatgacaatgtaaaggctcagttgtggc

SEQ ID NO: 7242 - DNA, 456 bp, Homo sapiens
cagaatttgtgtcctgccctatccatgtcttaaagatgagaagttggatccactgagttagtttcattggggcgggggaaagaactgtaattaaacttgtttaatccttattttgtattgtagctattttttgtaaaagcaacttaaaatcttttaaaaattttatagtgacattagagacaatggtcatacaaattatcacataaacatggacttgaaaaattaggcttttcataaaacacatcacatgtcattgactgctttttagaaatacacttccaaggcagtacatctgtattgctactgaaaagtgccatttcacagaacacagacttctttttgctctttgacatcttgaaaacatctgtttttcttttttaatacaaaactttgtgctcaagacaaatcttacatgaaaccctcataaaccatgaaaatgtagctggccttcgggcc

SEQ ID NO: 7243 - DNA, 326 bp, Homo sapiens
agcactggcctggccttgaaagtacggaagtctttcccattcacttctctacaatgctgccaagacagaggcagaaagaaatggatgataattctgtcaagcacacgtctattctttattaagaaaaacaattatgtttggaattcatacatctttggttggaacgcattggcttttttttcttgttgtgatagaaatggaattaagtaaaattatagttcgccttttctgttgtcttcaaattttataatgtcttttattcttaatttaatcccattcaattatttaattgctatacattgacattaagtgctgtattttatgac

SEQ ID NO: 7244 - DNA, 474 bp, Homo sapiens; identical to SEQ ID NO: 2194

SEQ ID NO: 7245 - DNA, 540 bp, Homo sapiens
actgggagaacagaagacctcacaatttaatgcctcagtttttaaaaaaggatccttacacttcatgtctcctagccatcagaagaggaatgagacagcaaaagttcaaatggcctgtttcaagtttctgatataaaacgatgacattttcaggaaaatcctgcatttccagagagagactggctggttaaatttctgaaagaggacaccagctaaaagaaggtattgcatctcacccgagcagactgtgtctgtggaaagtgtaagccccttgccagaagagcagcttcccagcaaaggcagagggtgaaaacagcaaaggtcttaagacactggggacctagagtcaaaagggacctcctccagggaaaacgctgtgtgagaaatggcctcattcggtgactgtgagtgacacagcagaaagttgggtcattccggctgcttttttgagaagtccctgaagagatcaataacagcaagagggaacctggcaaggaagctattcctataatccaggaaagagatgaggaaggcttggac

SEQ ID NO: 7246 - DNA, 466 bp, Homo sapiens
ggcgaccgtatccgctagcgcggcctgggatgcgcttgggctccctgttcgttcccacatgcagggcagcacaaggagaatgggcgtcatgactgatgtccaccggcgcttcctccagttgctgatgacccatggcgtgctagaggaatgggacgtgaagcgcttgcagacgcactgctacaaggtccatgaccgcaatgccaccgtagataagttggaggacttcatcaacaacattaacagtgtcttggagtccttgtatattgagataaagagaggagtcacggaagatgatgggagacccatttatgcgttggtgaatcttgctacaacttcaatttccaaaatggctacggattttgcagagaatgaactggatttgtttagaaaggctctggaactgattattgactcagaaaccggctttgcgtcttccacaaacatattgaacctggttgatcaactt

SEQ ID NO: 7247 - DNA, 477 bp, Homo sapiens
ggttataaaaataagaaattaagggttaacatcaatgtgccaatgaaaaccgaacagaagcaggaacaagaaaccacacacaaaaacatcgaggaagaccgcaaactactgattcaggcggccatcgtgagaatcatgaagatgaggaaggttctgaaacaccagcagttacttggcgaggtcctcactcagctgtcctccaggttcaaacctcgagtccctgtgatcaagaaatgcattgacattctaattgagaaagaatatttggagcgagtggatggtgaaaaggacacctacagttacttggcttaacccttctggaagggtctgactgtgtgacccgcagcaaatagttcatgttggaaagaatgaaaacaactcaagttcatagcagccagcctgccgccattggacctcccttttaaaaactgagaccaagactcccatcagctggtctcggatttacatcggaactgc

SEQ ID NO: 7248 - DNA, 437 bp, Homo sapiens
ggctgcttgtgtgctcgtttggtgcggacctggtacctcttttgtgaagcggcagctgaggagactccggcgctcgccatggccgacgaaaagcccaaggaaggagtcaagactgagaacaacgatcatattaatttgaaggtggcggggcaggatggttctgtggtgcagtttaagattaagaggcatacaccacttagtaaactaatgaaagcctattgtgaacgacagggattgtcaatgaggcagatcagattccgatttgacgggcaaccaatcaatgaaacagacacacctgcacagttggaaatggaggatgaagatacaattgatgtgttccaacagcagacgggaggtgtctactgaaaagggaacctgcttctttactccagaactctgttctttaaagaccaagattacattctcaattagaaaac

SEQ ID NO: 7249 - DNA, 586 bp, Homo sapiens
ggattctatgtgtgcctgatgcagtctgagttaatcttttatcgtcatacctattctttttagctttagtacttctgatgttttcttacctgcaaatttttatttcaagccactgttgaaacctcagtgtggcatcccatgagagccttttctcacagatggacacttcacagttaagtgtcattagtatgttaaagctaggaacctacccaaaagtacaaactcagtttactacatgattcccaaggatttttaataaattgtgttaaattccttgctgaatttaaggtataatgtatatctatctattcacccatccaaccaaaccaaccacagattcttcactcaagaaaatcaggtaagcttggcatgatttgccgttttgcctttatgtttcttgctagtgcttttttataatatttattattttgttttagactgaggttttatgtcaaatctgtagttatcagcatatgacctttaccttttagacaacttgagaaatcttcacccccatcccccacatttttatttcccagctttccattttcattgtttcacaaagattattaagaatacctgaatg

SEQ ID NO: 7250 - DNA, 313 bp, Homo sapiens
ataacaccagtactttagcagccgccaacagttgcatctattaaacgttttgagaaatgacattgacttatgcacatttaagcaatcaacaatgttttagaagtccaggtaacatataaaatatattcagacctagttttactttccatattgttgctccaaagtaaggtaaataggagttttagttgtactggcctgtaagattttttaaattacacagtgcatgacaacaactaaagccaactcagtccttctcttggcattgtgagttgaggacctttagtcaactgttagctcatctgactatctgtct

SEQ ID NO: 7251 - DNA, 622 bp, Homo sapiens
gtatctgtctttctggcttgttagatcttctcatttggcgtcctttctccgaagagttaaccaagacgtttggcatggtttccttgctttcctcctatcttttgctgctagagctgctttcgaaaagaagtcttttcttgcagtggtatcttttctttgggttacagtgttgttcatcctttctttgccgaaagaatgaatcccagtgcttcacaaggttaaaggaaagatctgctggtagtgtttagtctttgttctgagctgatatgtgttagtagctttttgtttttaaattttattagtaaaatttcaccagtgaaccagaagctctttttttctgttgtgaaatgctagctttaagatttctgagaactttgtgtcaaagaaatctttgaaaagttactgaagtatacagagaggttcacaattttaaatgtgcaggtggtccgggcgcggtagatcacacctgtaatcccagcactttgggacgccaaggtgggcggatcacttgagcccaggatttccagaccagcctgggcaacgtgccaaaaccctatctctactaaaattacaaaagttagctgtgtgtggtggtgtgtgcctgtagtcccagctacctggt

SEQ ID NO: 7252 - DNA, 118 bp, Homo sapiens
gacatcgagtccctcctcctcttctcccatgccttcttccctgccatggcaaatctgagtggcttctctaagcatctgctggtacaagtcaatgtggcaccatgagcttcatggtggc

SEQ ID NO: 7253 - DNA, 566 bp, Homo sapiens
acagaagggattctattgggtcttttgctgaacaaaactactacagtgaaagcccttttcagtgaaagatgtcagaaacctcaaaacctttggcctgactcagaactaccatgtgaaaatcagtactctcttaatgtttgaaataaaaactgaaaaaaaaaacaaaaaaacaaaaaaccttttttgaagcaccttaacgtggccatccatttgagaagtgggtgccactttttttctttgagcaccttattgatgtgtttgctatctgctgtctttctgttacctgttggctgaatggctagctgttaacatatacatgtgcacagaagagatatctgggcatgtatgttctcaatgaagtttactgtggtgactgctgaaaggtgaacccatttcctgatttttcccgccgcagtgttgtgataagattcgaagaaacctttttccctgcacagaaatgtttcttatcacattgtatcttagtatggaaaggaatatggtcccttttttgcaattgctactgtgtacacacacacacacacacacacacacacacacactctgtg

SEQ ID NO: 7254 - DNA, 548 bp, Homo sapiens
gaggaaactgagttttatttcctagctctaaggcagccttactatatgtcagtaaagtgctgaaaactgtatatttagcagtagcacccaaaaccaagcctttaaccccaacaatgtgtgtatcttttgcacagcaaaaactgcgaggccagaactagtttatctgaacacctcagctgctgtaagcttctcctctctcaccccgtaaactgacaagcatgatgaaaaaagaagcagatccaagtttctgcctcttttaaatgtacttgactttgcaaggcaagtagttttacagccatttctgttcacacttttcaccccacaacttggggatctagctgagacatttctacctcgaacaagtcacatgtaccacaggttcctgaataattcctgcagggctggtgacagacataacagctctggttttataatatcttgggtatctctgaggccaataaggataacattatctacccagagagtttagaagaaaagtaggagtccgaaggaagagtaaacaagaatggagctgtgttcacactgaa

SEQ ID NO: 7255 - DNA, 86 bp, Homo sapiens
atactcaattgatccaataacttgaccaacggaacaagttaccctagggataacagcgcaatcctattctagagtccatatcaaca

SEQ ID NO: 7256 - DNA, 399 bp, Homo sapiens
tgtaacctcttcatggaaaattgggctttcttttttgatattttgtaacttgctttctataggagatggaggagatcctgggttccccgataacactcctctcaggttggggcaggcaaagaaagctcgtctatgtactgcaacaaggcacagttgttacttggctgggtataggccatgaggtctggggccaatgtttctctaaagattgtgggagagaacggggcatggtggtttgcgcctctcatcccaacactttgggcggccacatggctggatcatgaggtcaggagtccaagaccagactggccaagatggtgaaaccctgtctttaccaaaaatacaaaaattaggcagccatggtggcaggcgcctgtaatccagctacccaggaggcaa

SEQ ID NO: 7257 - DNA, 123 bp, Homo sapiens
ggtacggctgcgagcagacgacagaatgggggaggctgatgtgggtggatcaccctgagtcaggagttccacaccagcttggccaacatggcgaaaccccatctctactaaaaatagaatata

SEQ ID NO: 7258 - DNA, 531 bp, Homo sapiens
gaatttgaatcctgtgggccgttgaatgtggctgctcgcggtcggcgtgccccgacgtacagcgggccgggaaaagtggcactgaggctctggaacttctgcccagctctccttgtaaaatgaatgaaagtaaacctggtgactcacagaaccttgcttgtgttttctgtcgaaaacatgatgactgtcctaataaatacggagaaaagaaaactaaggagaaatggaatctcactacattactactgtttgttgatgtcaagtggaatttggcagagaggcaaagaagaagaaggagtttatggttttctaatagaagatatcaggaaggaagtgaatagagcttctaaactgaaatgctgtgtttgcaagaaaaatggtgcttcaattggatgtgttgcaccccgatgtaaacgaagttatcatttcccatgtggacttcagagagaatgtattttccagtttactggcaattttgcgtcattttgttgggaccatcgacctgttcaaataattacatctaataattat

SEQ ID NO: 7259 - DNA, 487 bp, Homo sapiens; identical to SEQ ID NO: 2199

SEQ ID NO: 7260 - DNA, 440 bp, Homo sapiens
gagagaggtgatagaaattgaagatgcttcacccaccaagtgtccaataacaaccaagttggttttagatgaagatgaagaaaccaaagaacctttagtgcaggttcatagaaatatggttatcaaattgaaaccccatcaagtagatggtgttcagtttatgtgggattgctgctgtgagtctgtgaaaaaaacaaagaaatctccaggttcaggatgcattcttgcccactgtatgggccttggtaagactttacaggtggtaagttttcttcatacagttcttttgtgtgacaaactggatttcagcacggcgttagtggtttgtcctcttaatactgctttgaattggatgaatgaatttgagaagtggcaagagggattaaaagatgatgagaagcttgaggtttctgaattagcaactgtgaaacgtcctcagg

SEQ ID NO: 7261 - DNA, 452 bp, Homo sapiens
attttaggtgctttgtggtaagtcttttttcttagattgcgctaaaatttcttagattttcagcgctcagaacaaaagtttgaaaaatgcattgttcatatgaatgtcatctcttttcagtttccagtatcctttttaaaaaatggcaaaagcctagatttacaatttgatgaacactaaatatttcttattaatataatctatttttgtattttacttaatgagctttaagtgcctgtcgttctgaaaattgtgtatttataattcagcttatctcataattggacctaatagcatttctttgtgcagttaggtgatgagcactgctttgaggcccaagcactagtagagatgcgcgatacaggtctagtttcggtaactgttccagacatcaagcaataaaaaaatgaataccacaaaagatgtttgattttacagtggagccttactga

SEQ ID NO: 7262 - DNA, 405 bp, Homo sapiens
acagaaggggtaatataaatacaaaaagttcgatgactgataaggaatgtttagacagtggtaagcctttgaaggtcaattggtattttctagtaataagttcatattcctaaaaaaattttgacttgaaaatacgaaaaaatgaaattagttactgcaaaattgaaaactacttgaggaattctagcttggatcttggttctcagtaataggctgtcactactgtatcagtagctctaaacatgagcataatctttgacccaggatttctactcaggaatttatcctaaggaatatgtggggtttttttgtttgtttgtttgttttttttgcttgcttgctcgctcgctctctctctgtgtgtgtgtgtgtgtgtgtgtgtatgtgtgtgtgtgtgtgtgtgtg

SEQ ID NO: 7263 - DNA, 567 bp, Homo sapiens
ggccctgcttcggctcgcgcacggtgcgcgcacccactggcctgcgcccactgtctggcactccctagtgagatgaacccggtacctcagatggaaatgcagaaatcacccctcttctgcgtcgctcacgctgggagctgtagaccagagctgttcctattcggccatcttggctcctccagaataaacctattttttgaggaaatataacttttgaaacaatgatggaaattcttcgagataaaccaagtggcattaatatggagggagaattcctgaccactgcaagcatggtttctattttacctcaagactccagccttccttgcattcacttctttacagggactcctgatcctgagagatctgtttttaagcctttcatatttgtgccacatatttcacaactattggataccagttcaccaacatttgaacttgaagatctagttaaaaagaaatcacattttaagcccgacagaagacacccactctaccaaaaacatcaacaggcattggaagtagtaaaataatgaggaaaaagccaaaataatgttggacaacatg

SEQ ID NO: 7264 - DNA, 558 bp, Homo sapiens
acagaaggggacctgtcgccatcttgccccttcagaggcaccgcaaacaaacccaattcctggtgtcccctagtcttggcggaggagccttttagatgagccccgaaaggccgggcagggaggacaagctctttggggctaccaaacagaagcagcaatgcctgttgtgtggccaacccttctggatctcagcagggatgaatgcaaaagaattcttcgaaaattggaattggaggcatatgctggagttatcagtgcacttcgggcacagggggatctcaccaaggaaaagaaagatcttcttggagaactatcaaaagttcttagcatctcaacagaacgccaccgtgctgaagttcggagagcagtaaacgatgaacggttaacaacaattgcacataagtaagccattagtcgtaccatccctgattttttatgacatagtataacacagttttgaaacagtcttcctattgtgtagcagattcctgagtcttttaagtaacaatatctctatactcagggatcctgatcatagcagtaaaagtgatattaact

SEQ ID NO: 7265 - DNA, 495 bp, Homo sapiens
gctatggagcttaccgtgtctccaatgacaaacgagatgtaaaagtgtcactgtttacagctttcttcctggctaccataatgggtgtgagatttaagaggtccaagaaaataatgcctgctggtttggttgcaggtttaagcctcatgatgatcctgagacttgtcttgttgctgctctgagcatctggaggaacagaaaactaagttcatgtcatcctgctgtaatgggcagagcatattttttttgtatttaaaagataaacttcaatatggaatgctagaaacacaaatagcactgtcacctctaatatgaacattagtttgaggtagtttttttctaaagcaaaaattttaactgttttctaattgtcaagcactattttcattaaaagtgtctaatgaatcatgatatactcttccatttgttgggtctattttttatatatgttggtattttttgaaaattccaaatactcatgtctcaagtaagctt

SEQ ID NO: 7266 - DNA, 263 bp, Homo sapiens
aggctctggaatgggcactctccttatcagcaagatccgagaagaataccctgatcgcatcatgaataccttcagtgtggtgccttcacccaaagtgtctgacaccgtggtcgagccctacaatgccaccctctccgtccatcagttggtagagaatactgatgagacctattgcattgacaacgaggccctctatgatatctgcttccgcactctgaagctgaccacaccaacctacggggatctgaaccaccttgtctcag

SEQ ID NO: 7267 - DNA, 527 bp, Homo sapiens
aaggcaaatctcaactacattggcctcgatggaaatataggctgcctagtaaatggtgctggtttggctatggccacaatggatataataaaacttcatggagggactccagccaacttccttgatgttggtggtggtgctacagtccatcaagtaacagaagcatttaagcttatcacttcagataaaaaggtactggctattctggtcaacatttttggaggaatcatgcgctgtgatgttattgcacagggtatagtcatggcagtaaaagacttggaaattaaaatacctgttgtggtacggttacaaggtacacgagtcgatgatgctaaggcactgatagcggacagtggacttaaaatacttgcttgtgatgacttggatgaagctgctagaatggttgtaaagctctctgaaatagtgaccttagcgaagcaagcacatgtggatgtgaaatttcagttgccaatatgatctgaaaacccagtggatggctgaaggtgttaaatgtgctataatcatta

SEQ ID NO: 7268 - DNA, 346 bp, Homo sapiens
tacggctgcgagaagacgacagaagggtacggctgcgagaagacgacagaagggcatctgaaaaaaaaaaaaaaaggaaggaaaaaaaattttggggatccgggggccctgttcctgggtctaaggggggggccagggcaaaggctcaaggaaacatgtccgggttccacacttttttccggggccagaccttttaacttccctgggggccttactgccccaaataaaaaggggctttttttcgggcccttaaatccttttaaaagccataaaccctttgttttatggatagtctttgaacctttgtttaccctttaaaacatttaaatttttttttttttttttt

SEQ ID NO: 7269 - DNA, 260 bp, Homo sapiens
tgttggttgggggccgtcccgctcctaaggcaggaagatggtggccgcaaagaatacgataaagtcgctggagtcgatcaactctaggctccaactcgttatgaaaagtgggaagtacgtcctgaggtacaagcagactctgaagatgatcagacaaggcaaagcgaaattggtcattctcgctaacaactgcccagctgtgaggaaatctgaaatagagtactatgctatgttggctaaaactggtgtccatcactaca

SEQ ID NO: 7270 - DNA, 516 bp, Homo sapiens
tcccagtactttgggagaccaagagttcgagaccagcctggccatcatggcgaaacctcatctctactaaaaatacaaaagttaaccaggtgtgtggtgcacgtttgtaatcccagttactcaggaggctgaggcacaagaattgagtatcactttaactcaggaggcagaggttgcagtgagccgagattgcaccactgcactccagcttgggtgataaaataaaataaaatagtcgtgaatcttgttcaaaatgcagattcctcagattcaataatgagagctcagactgggaacagggcccaggaatctgtgtggtacaaacctgcatggtgtttatgcacacagagatttgagaaccattgttctgaatgctgcttccatttgacaaagtgccgtgataatttttgaaaagagaagcaaacaatggtgtctcttttatgttcagcttataatgaaatctgtttgttgacttattaggactttgaattatttctttattaaccctctgagttt

SEQ ID NO: 7271 - DNA, 519 bp, Homo sapiens
gacagagggggccctcttgggtgggttccgggaagctcatgcgcagtcaatcggcatgaatcgcctcacagaatccatcaaccgggacagcgaagagcccttctcttcagttgagatccaggctgctctgagcaagatgcaggatgacaatcaggtcatggtgtctgagggcatcatctgggtgatctgaggaggcctcgtctctgaacttgggttgtgccgagagagtttgttctgtgtttcccaccctctccctgacccaagtctttgcctctactcccttaacagtgttgaattcaactgaaggcgaggaatgttggtgatgaagctgagttcaggactcggtggaccctttgggaatgggtcatgaaagctgccatggggtgaggaaagaggagacagtgggagaggacaatgactattgcatcttcattgcaaaagcactggctcatccgccctacttcccatcccacacaaacccaattgtaaataacatatgacttctgagtacttttgggg

SEQ ID NO: 7272 - DNA, 568 bp, Homo sapiens
acagaagggacctacaaaatgcatgtcaaatcagaagccagtctccatcctgttctcatgtcagaggcaccgtggaatactagagcaaagagagagaaactgacagagttaatgtttgaacactacaacatccctgccttcttcctttgcaaaactgcagttttgacagcatttgctaatggtcgttctactgggctgattttggacagtggagccactcataccactgcaattccagtccacgatggctatgtccttcaacaaggcattgtgaaatcccctcttgctggagactttattactatgcagtgcagagaactcttccaagaaatgaatattgaattggttcctccatatatgattgcatcaaaagaagctgttcgtgaaggatctccagcaaactggaaaagaaaagagaagttgcctcaggttacgaggtcttggcacaattatatgtgtaattgtgttatccaggattttcaagcttcggtacttcaagtgtcagattcaacttatgatgaacaagtggctgcacagatgccaactgttcattatgaattccccaatg

SEQ ID NO: 7273 - DNA, 86 bp, Homo sapiens
ctttcgctcatgcccgtggcgccgacaggatgggcaagtgtcgtggacttcgtactgctacgaagctccgtagtcaccgacgagac

SEQ ID NO: 7274 - DNA, 561 bp, Homo sapiens; identical to SEQ ID NO: 2203

SEQ ID NO: 7275 - DNA, 421 bp, Homo sapiens
atttgataactcttgtaaataggtggaatatgaatgcttggaaaattaaactttaatttattgacattgtacatagctctgtgtaaatagaattgcaactgtcaggttttgtgttcttgttttcctttagttgggtttatttccaggtcacagaattgctgttaacactagaaaacacacttcctgcaccaacaccaataccctttcaaaagagttgtctgcaacatttttgttttcttttttaatgtccaaaagtgggggaaagtgctatttcctattttcaccaaaattggggaaggagtgccactttccagctccacttcaaattccttaaaatataactgagattgctgtggggagggaggagggcagaggctgcggtttgactttttaatttttcttttgttatttgtatttgcta

SEQ ID NO: 7276 - DNA, 548 bp, Homo sapiens
acaatacacagaggtagcaaaatttgtaaaagagcagactatatagtccatactgtagtaactactcaacattgccattatacgtgaaatcggctataaccaattcataaacaaatgaatttggccgtgttctagtaaaacttatttacaaaaacatgtgttaggccagatttggaccacaggctgtagatttctgacctctggcttacagcagaagtttattatgatcctggggaaggtggatatacatggaaggcagaagcgagaagatgtattccatcccatgtcatttttctgaaccctcaacgtaggaagttaaactaaaacatggggcagaatctgctttaagcctttgaattcttggctcttaaagccaggttgagggttatgtgtttttattcttttatatctccttttcacttaggcttggcaactagttcattgaaacagagccaacaagaatgagtgagtcactcagtgatatgaagcaagctgtggtcatttatctactaccttccatacctacttcctaggtttgataagtagtg

SEQ ID NO: 7277 - DNA, 355 bp, Homo sapiens
acagaagggtacggctgcgagaagacgacagaagggtacggctgcgagaagacgacagaagggtacggctgcgagaagacgacagaagggtacggctgcgagaagacgacagaagggtacggctgcgagaagacgacagaagggtacggctgcgagaagacgacagaagggtacggctgcgagaagacgacagaagggtacggctgcgagaagacgacagaagggtacggctgcgagaagacgacagaagggtacggctgcgagaagacgacagaagggtacggctgcgagaagacgacagaagggtacggctgcgagaagacgacagaagggtacggctgcgagaagacgacag

SEQ ID NO: 7278 - DNA, 475 bp, Homo sapiens
gctcccctcccgcgccgccgctgtgcccatcacttccggtcgcgccagccgcccgttgccagttctgcgcgtattggagctggagtgagccttccaggaattttggctgccaaatgtggtgcagaagtaatactgtcatacagctcagaactgcctcactgtctggaagtctgtcggcaaagctgccaaatgaataacctgccacatctgcaggtggtaggactaacatggggtcatatatcttgggatcttctggctctaccaccacaagatattatccttgcatctgatgtgttctttgaaccagaagattttgaagacattttggctacaatatattttttgatgcacaagaatcccaaggtccaattgtggtctacttatcaagttaggagtgctgactggtcacttgaagctttactctacaaatgggatatgaaatgtgtccacattcctcttgagtcttttgatgcag

SEQ ID NO: 7279 - DNA, 507 bp, Homo sapiens
gacaaaccccttttagtactgttttgagttttgtcattaaaacagccacctttgtattttataatttatgacagaatgaagtcattttgaatctacatgaatgaacactttggattttgttgtagtttgattctagggtagaaccagtccatgctgtttttattttttatctccgtaattgtagaatcatgtttactcaacgtttttccccagctgcctcagtaactgggcactcggaggccttggcacgggttctggaggacagacagcaattctatgagtgctcactgagatacttgctggagacctcagaaaacacaagtgccttctccacggtgcaattcagacttcagtgatctccagtggtcaaaagacatttacccttaatatcagacaacatttatattttagtgaagaaacaagttctcgggtggggaatctatgtttcactcagatttatatgtttggaggaaaaaagcctttttttgtaaaatatttaaatttata

SEQ ID NO: 7280 - DNA, 551 bp, Homo sapiens
gctgcatgctatttattgaaaaatataggtaacacatgtacataacaacatggatgagaaaaaatacacattcatgactttgggagaaaagggaataaaattggagacagacctaaaagggagctcagtttcatcatctatttttttcatttaaaggattcagaagcaagtatggaaaacattagtgtttgttcatgctggtggtggatattgagcgactgttatacagcaaatggactccctgccccacacacatagaaactaatactatggcaccagcttttgagaaaagaaaggctttgttacaaggctggccagcgaggagacaggagaaggactcaaatcagtctccctcacttggggcctggggcaagtattaaggggttggatgacaagagaaaggattcacaaatgttggcttggcaaggtccagttggaggtcttcaaatttgaccatttacagtaaggcatgttgacgcagattttagtcccagatcttcctggccaacagaccccttgctttgaaagagtgccggcggtcatattgcagc

SEQ ID NO: 7281 - DNA, 475 bp, Homo sapiens
ttcggcacgaggcgctggattatttcccgtccaatgcctgcatgctgcttgaattgctccacccacacctccatgaccaagggcgccagagtgctgcaactggggcgtgggccgctctctgcttttcctgtctgactctgacaagtcctccctcactgaatgtagaatcgttgccaagtttctgagaagtgtcgattccctgttaacatggatatcagttctgcctcacatttcccacttgaggttgaggcgtactggagacaacacctcagaccatctgaaccccatcagtggacgaaaatggggctgttaatatactctaaaagccatactaaaaatgctctgagggaactggctaagaatagtgggcctggtgattgtctatcacgcaaggctttgttttgtactgttcagaaatctgtcacctttctgcctgcccttgtttcctgaatgaaatgcttctggggttatttat

SEQ ID NO: 7282 - DNA, 334 bp, Homo sapiens
accttcttggctaaccatgatgacagtcggaccctgtatgccatcccaggcttggactatgtcagccatgaagacattctcccctacacctccactgatcaggttgccatccaacatgaactctttgaaagatttcttctgtatgaccatacaaaagcacctccttttgtggctcgggagacgctaagggcctggcaagagaagaatcacccctggctggagctctcccatgttcatcgggaaacaactgataacatacgtgttactgtcatccccttctacatgggcatgagggaagcccagaattcccacgtgtactggtggcgctactgta

SEQ ID NO: 7283 - DNA, 620 bp, Homo sapiens
atttttctaaatatatgtatatatacagtacatagaaaatagaacttttattttgtgacctaaggacgatggtgaaaagatcacgttttcaaaacaatctggtgatcagaatgttcatataccagctggtttctgaagaggtcagaatgatctttctccatactgacttttaacaatgttgatcattgaggctaaattaatatatatgaaatattcctttttgatgacaccacaaaattgttgaacagtttaagaatttcaaccttaatcttggatccctttacctcatatggaagaacttgagggacattagtatacttttttttaagatggagtcttgctctgtcacccaggttggagtgccatggcatgatcttggctcactgcaacctccacctcctgggtcaagccattctgcttcagccccaagtaggtgggactccaggcatgcaccaccatgcctggctaatttttgcatttttagtagagacagggtttcaccatattggccaggctgggactcgaactcctgaccttgtgatctgcccgcctcagcctcccaaagtactgggattataggcatgagccaccacgcccagcctgttatttttttattatta

SEQ ID NO: 7284 - DNA, 703 bp, Homo sapiens
gcggccgcatcttttttttttttttttttggagtcctgatgctttgaactatggagtgagccgacatcactctgggacgattcctgtttgactgttggtgtgactatggccggatgcggaatgcccgtcgtgtgtagcgtatgatgtggtgggaccatatggggagggaacctggacatggaagcattgacggtcagagctgtggggtaggggtgtctgaatcctcctgtcgtgattgggtacactggttgaccttgctgtggtactaaccatcctagcggatgggggatttgtcctacggtgccaggcgatagtgggtaatacggggatatatctggagggtgcggaggccgtgggattcctgttttggggtctacgtcggctggtaagtgtggaggtgggtttcccggcgtgaagtgttcattgctgtacgtgataagaggcgtgagggggtggacatggtgagggtgctgcaccactggcactttgttagagacaatgtgtgccggtgatggggaccgggcatccttgagggcttgtctactctggaggctccctgcctggacatcaagccctcgtgccgaattcttggcctcgagggccaaattccctatagtgagtcgtattaaattcgtaatcatgtcatagctgtttcctgtgtgaaattgttatccgctcacaattccacacaacatacgagccg

SEQ ID NO: 7285 - DNA, 448 bp, Homo sapiens
ttcggcacgaggtatctaatacaatcaagtacaatacttcctttaggtgcttctgtggacctggcatgaaagatccctagattgaaaggaataatacctccatgtctcctgtatgttgagtctagaattgctgtgttgttcttagaagcagtctttgggcaacaacttgaaaggggaaaaaaaaactacaaaagcttaactttggtataggccaagtcagggagaaagtagagaaagctgtcatgccacagacttctttagtggagatcatttcctttttaactttgttcaggttgcccttcaccatggatacagtccggtacccttaaacatttaagggctgttttttttttctttacttgaggttcagctgggtattaaccaaacttaaattttttttccaaacgttttaaaatttacttaaagcaaaatgaagtcttttcccttg

SEQ ID NO: 7286 - DNA, 529 bp, Homo sapiens
  misc_feature 526: n = A,T,C or G
caaagaaattttaaaaactagttttattaatattacttgaaagagaagacagaattacactttgcgaagaggccatgaaaatagccactttttatggaagagttcagagtgcctcagaattggaatgctttcagttcatggaggggggtggatatgccacagaggagggagacacagacactgtactcacatcgttagtttggagaagcaacatatgagactgtgagcaatcagtgcaaggcagcaaaaaattgattacatgatgccatgtggaatccaagagaaaaggaacacagatgaaacaaaacaataaaaatgctcctttttctttcccaactattgtaaaactgaagaacatattttgttttcccctcaaagcaccaaacactgaaaaataaggagtgttgagagtgaacagagggattagtttaaaaaaaaaaagtaatagggaaaattggagtagttgagaaagattttataaggtgtgggttaagagaagatgagggttcattcatttattcagcanatg

SEQ ID NO: 7287 - DNA, 431 bp, Homo sapiens
tggttagggaccttgggggttgattctggggcaagttttttgacagggatctttgtaagcgggtttccttgaccctttggctcacaaaatctttgtctttggtagaaggcaatgccagggttcctgaaaaggccctaaaaaaactggacggggttcttcacatgcgggggaaaaaggaaacaaacccctccccctttttgaattttcggccgaaagggggtcattttttccccctgaccctgaattaagggatcatgtttcctagggggggaaaaaaaagtaaaatgtaaaagggaatgtagggaaaaataggttataaaagtttcaaaggaaaaatcttttaaaacccctgtaaggaacccccaagtgaaaccctttttttcctttttttttttttttttgggggcaaaaattttccaaggggaaaaggg

SEQ ID NO: 7288 - DNA, 523 bp, Homo sapiens
ccaaaagactctcgctgtccctgtgctgctggtatttcattctctgtaacttcagttctggtgttttccttgagtatctacttggcttctcgtggtttttcccaccccagctgccccagcacgcgggacccatagcacaccctcttgagggcttgcctaggttgctgaaaacagggaggcacctggtatctcgagtgcctgcagttgcaagtatgtttacacctggtgtccagttttgtattttaaaatgtaatccatttttacttcagctcatccaaaagcagccagcagaccggttgactgaggccggtctgtggctgtgggccccttggtgacccgctgctcttttggaaatgggtgacctgaagtgacactttttccacaattaacccaagttgtgttaatacttcaggtctgtttcccagacccagaaagctttacagaaaatcattgtaagacaatttattaatttgagaaagtcaccttgacagttctttgcacacaagttttacacctctctgga

SEQ ID NO: 7289 - DNA, 110 bp, Homo sapiens
gatttgtcacgaatgggaagccaagtgccatcttcaaaatttcaggtcttaaatctggagaaggaagccaacatccttttggagccatgaatattgtccgaactccatct

SEQ ID NO: 7290 - DNA, 405 bp, Homo sapiens
cagaagggattccacattggcaagaagatgaggaggcccgcctactaccacactgttagcatacttgaatgtgggaggaaaatttaacaacagcaacaaaaaatccaaacaagcatactttttgatacagtattccattctaatcatttatcttggaaaaatgcttcaacagggatgcaaatacacatgtatgaggctatttattaatttttaaattagttgtataagcaaacaattgaaaacaatagaaatgctcagcagtagaatacaagtgttaaaaaattatgccatatccagataatagcatgccatgctgccattttgaaaacttgaggccagtctgtaggtgctgacacagatccatgtctagaacacattcatcaaaaaaaatacaggctgggagag

SEQ ID NO: 7291 - DNA, 484 bp, Homo sapiens; identical to SEQ ID NO: 2212

SEQ ID NO: 7292 - DNA, 601 bp, Homo sapiens
ggttttatcacatatactgatgaagagccagtaaaaaattgttagaaagcagataccatcaaattggttctgggaagtgtgaaatcaaagttgcacaacccaaagaggtatataggcagcaacagcaacaacaaaaaggtggaagaggtgctgcagctggtggacgaggtggtacgaggggtcgtggccgaggtcagggccaaaactggaaccaaggatttaataactattatgatcaaggatatggaaattacaatagtgcctatggtggtgatcaaaactatagtggctatggcggatatgattatactgggtataactatgggaactatggatatggacagggatatgcagactacagtggccaacagagcacttatggcaaggcatctcgagggggtggcaatcaccaaaacaattaccagccatactaaaggagaacattggagaaaacaggaggagatgttaaagtaacccatcttgcaggacgacattgaagattggtcttctgttgatctaagatgattattttgtaaaagactttctagtgtacaagacaccattgtgtccaactgtatatagctgccaattagttttcttt

SEQ ID NO: 7293 - DNA, 427 bp, Homo sapiens
gaaagaggcaagttcctggtgcaaaggtggctctgcagcataatttaggcattggaggagctgtggttgtaacactctacaagatgggttttccggaagccgccagttcttttacaactcatcaaattgaagctgttccaaccagctctgcaagtgatggatttaaagcaaatcttgtttttaaggagattgagaagaaacttgaataggaaggggaacagtttgtgaagaaaatcggtggtatttttgccttcaaggtgaaagatggccctgggggtaaagacgccacctgggtggtggatgtgaagaatggcaaaggatcagtgcttcctaactcagataagaaagctgactgcacaatcacaatggctgactcagacttcctggctttaatgactggtaaaatgaatactcagtcggccttctt

SEQ ID NO: 7294 - DNA, 507 bp, Homo sapiens
acagaagggatcacttaatttttaccttattttggctctaatttgaataagctgagtaaaaccaccaaagatcagttataggataaaatggcatctctaaccataacacaggagaattggaaggagccctaaattgtcactcagtttaatttcttttaatggttagtttagcctaaagatttatctgcatattctttttcccatgtggctctactcatttgcaactgaatttaatgttataactcatctagtgagaccaacttactaaatttttagtatgcactgaaagtttttatccaacaattatgttcgttttaagcaaaattttaagaaagttttgaaattcataaagcatttggttttaaactattttaagaatatagtactcggtcaggtatgacggctcacgcctgtaatcccagcactttgggaggccgaaacaggcgaatcacttgagcccaggagttcaagaccaacatgggcaatgtggcgaaactccatctctac

SEQ ID NO: 7295 - DNA, 542 bp, Homo sapiens
acagaggggggaattcttcctgttctttgaagtattggatgcattatttctttaactatatcatttagttatttcactaatagaggctgccttccatatctcagagttgtaaggtttatgtgtatttttaggtgatcctttaaagcactttaacagtctcacattaagagcaagctgaagctgggcatggtggcttgtgggtgttatctcagctacttgggaggccaaggaaggaggattgcttgagcccaggagtttgtggccagcctggacaacatagtgacacccctgtatccaaaaaaaagaaaaaaaaaaagacaagctgagtttgcctaggtaatttaaaatgccaacattcctatagaacaagccttctgcttaggagttgataaaccagaactagccatccactgtcctctggaaatttcttcacagctgagactctccaggacctttgtaaaacttcaccttgggcaggcgcggtagctcatgcctgtaatcccggcactttgggaggctgaggcaggcggatcatgaggtca

SEQ ID NO: 7296 - DNA, 512 bp, Homo sapiens
  misc_feature 469: n = A,T,C or G
gaaaatgcccaagttcagcatgcctggcttcaaaggagagggcccagatgtggatgtgaacctgcccaaggctgaccttgacgtctcaggacccaaggtggacattgatgttcctgatgtgaatatcgaaggtccagatgcgaaactaaagggccctaaattcaagatgcctgagatgaacatcaaagcccccaagatctccatgcctgactttgatttgcatctgaaaggtcccaaggtgaagggtgatgtggatgtttcccttcctaaagtggaaggtgacctcaagggcccagaagttgacatcaagggccccaaagtggacatcgatgcccctgatgtagatgttcatggcccagactggcacctgaagatgcccaaggtgaaaatgcccaaattcagcatgccaggattcaaaggagagggcccagatgtggatgttacccttcctaaggctgacattgagatntctggccccaaagtggacattgatgcccctgatgtcagtatcg

SEQ ID NO: 7297 - DNA, 525 bp, Homo sapiens
acagaaggggaattctgaacttttcaggaggtactgtgaggaagagcaggcaccagcagcagaatggggaatggagaggtgggcaggggttccagcttccctttgattttttgctgcagactcatcctttttaaatgagacttgttttcccctctctttgagtcaagtcaaatatgtagattgcctttggcaattcttcttctcaagcactgacactcattaccgtctgtgattgccatttcttcccaaggccagtctgaacctgaggttgctttatcctaaaagttttaacctcaggttccaaattcagtaaattttggaaacagtacagctatttctcatcaattctctatcatgttgaagtcaaatttggattttccaccaaattctgaatttgtagacatacttgtacgctcacttgccccagatgcctcctctgtcctcattcttctctcccacacaagcagtctttttctacagccagtaaggcagctctgtcgtggtagcagatggtcccattattct

SEQ ID NO: 7298 - DNA, 302 bp, Homo sapiens
gccgcgtaaaagtcagcatgctgacaagggactgtagatttaatgatgcgttttcaagattacacaccaaaacaatatgtcagcttccctttggcctgcagtttgtaccaaatccttaatttttcctgaatgagcaagcttctcttataagatgctctctagtcatttggtcttatggaagtaagcctcatgtatactatggagagtcttccaggtgtgacaatcatgatatacaagaacaaacgtagtgttgggatctgtttggagattgtgatgggaacaagttcatttacttaggggtc

SEQ ID NO: 7299 - DNA, 529 bp, Homo sapiens
attccattaattgtgtaaataattgtataaatatattagtaatgagtgggaatcttactatcttaattgtggtaggaaaatgtcagaattattctctaatgtttttactacattaaaggttttcagagccagtcttgcttcttttcttttttttttcgagacggagtttcactctcgttgcgcaggctggagtgcggtggcatgatctcggctcactgcaacctccacctcccgggatcaagcgattctcctgcctcagcctcctgagtagctgggcttacaggcgcccgccaccacacccagctaattttttatatttttagtaaagacagggtttcaccatgttggccaggctggtctcgaactcctgacctcaggcgctccacctgcctcagcctcccagtgttctgggattacaggcatgagccaccacgcccggctccgtctttttttgtccatgcacacacacacccacttttgtcctttcagtattattttgaaagaaattctagatgtaatattatttttg

SEQ ID NO: 7300 - DNA, 351 bp, Homo sapiens
ggcaaggtgccattatcccttaaacatgtcccattaggagtaaaaggctgagaatggtgtctgtgagttgagcttggtaaacccaggagggccccaaagatatgattttctcaaacattgtctctcaaacatctctggagtgctcctctcagaaattttcctggaattatctgcatgagtttggatctctatcttgttgaggcctcattggtggatcctgaggtgctcttcacctccttcttgttcagaaaatgcatgtaggttcctctctcccaccagcttttcatcgtagtccttgattaaaagggcctcacctatggtcttactttttttttttttcctggggggtgg

SEQ ID NO: 7301 - DNA, 573 bp, Homo sapiens
acagaagggacacggcattttgttttcatcagtctttattcctgagtaccaccagcaaggcaaagcattgctcataaataatactgactgagacagaaagaaaaaatgtaagattgaaaaagcctgggccggacgcggtggctcacgcctgtaatcccaacactttgggaggccgaggtgggtggatcacaaggtcaggagttcgagaccagtctggccaacatggtgaagccctgtctctactaaaaatataaaaattagccaagcgtggtggtgggtgcctgtaatcccagctactcgggaggctgaggcaggaaaatcacttgaacctgggaggcagaggttgcagtgagccgagatcacaccactgcactccagcctgggcaacagagcgagactccgtctcaaaaataaaaaaaagaaaaagcctgtctgggcatggtacctcatgactgtaatctcagcttttggggaggccaagtaaggaagatctcttgaggccagaagtttaagaccagtctgggcaacccgttttgtagagtgacaccacatctcgacaaaaaaaattttttt

SEQ ID NO: 7302 - DNA, 529 bp, Homo sapiens
gggaatatctgtggaaaattaattaaagcagttatgaggatgctgcatttttacatgagctaagcctcatcttccaggtctacggggcccttttgcgttgcttctactcatacttaatctgtagaataggaattaaatgcctttgatgaattttgctctgaaagcttcttttttctgacagatcaaagtcaacctgattttctcccttcatgttacttgccatttatctttttgtgtgcctcacatagaagtgagcaaccatttcctttatttgttgtattagaaagataagaaaatgcaatgcttttagaggtgatgttatataagttgtcaaaattcagagaacaggaggatgagtgacttgaatcagattatttgggggcacttatttaatgttgaaggcatttattttatttactggactatatatatataacacacacagtaaaaagcagaggtcaggctgggcatggtggctcatgcctgtaatcccagcactttgggaggccgaggcaggcggatgccctga

SEQ ID NO: 7303 - DNA, 518 bp, Homo sapiens
ggaagttctgcgctggtcggcggagtagcaagtggccatggggagcctcagcggtctgcgcctggcagcagcttcacaatagccttgaaaaccaacagcctcacaaatcacagttactttgaaaaccagcggccttgcaggcactgaagaaggcagaatgggtttaagagttctccaaaacttccagctgcagagaattgttactatttgacttgtctgacagttcgctggaaaccccactcacagggcttatcttttttcacctgacttggagtttattcactgcaaacagtgttttccctggtgcatttgttgaaaataatcagcagcacttgtttgacataacatcgagtgggtaacagctgggtcaaacaagaagctggggaatgagatgtccatcctgacatctggaaagctctgacatatttctagaatgtaatatgtgtaaggttggacacattttccaggaaaaacctgagaggtctctaagctctcacctcacatttagtctctgtccg

SEQ ID NO: 7304 - DNA, 66 bp, Homo sapiens
cacggcgttagtggtttgtcctcttaatactgctttgaattggatgaatgaatttgagaagtggca

SEQ ID NO: 7305 - DNA, 69 bp, Homo sapiens
gacgacagaagggtacggctgcgagaagacgacagaagggtacggctgcgagaagacgacagaagggta

SEQ ID NO: 7306 - DNA, 617 bp, Homo sapiens
gggacaatgcacaagttattctggtggggaacaagtgtgacatggaggaagagagggttgttcccactgagaagggccagctccttgcagagcagcttgggtttgatttctttgaagccagtgcaaaggagaacatcagtgtaaggcaggcctttgagcgcctggtggatgccatttgtgacaagatgtctgattcgctggacacagacccgtcgatgctgggctcctccaagaacacgcgtctctcggacaccccaccgctgctgcagcagaactgctcatgctaggcaaggcccaccttcctgacctcccctcattgtggccccacacccagtctgcttctccctgttacacactgtccgctctcagcccactctccctgttacacactgcccacactcagagcaagatgagttgctgctattctttgcctgcccctggggttctctgcagatggtcccagtaatagatactcagcactagactaacataacaggtcactacacgggtgcagaatcactttacaaaagaagactctgttttacgaaggggattcactacagggacttagagaacagtctcttttctgcctttaaatgagagttcctccatttacc

SEQ ID NO: 7307 - DNA, 543 bp, Homo sapiens
gggcagccgccggggcgcaatgcgagcggctggcgtaggcttggtggactgtcactgccacctctccgccccggactttgaccgcgatttggatgatgtgttggagaaagccaagaaggccaatgttgtggcccttgtggcagttgccgaacattcaggagaatttgaaaagattatgcaactttcagaaaggtataatgggtttgtcctgccatgcttgggtgttcatccagttcaaggacttccaccagaagaccaaagaagtgtcacactaaaggatttggatgtagctttgcccattattgagaattataaggatcggttgttggcaattggagaggttggactagatttctcccccagatttgctggcactggtgaacagaaggaagagcaaagacaagtcctaatcagacagatccagttagccaaaagactaaatttgcctgtaaatgtgcactcacgctctgctggaagacctaccatcaaccttttacaagagcaaggtgctgagaaggtactgctgcatgcatttgatggtcg

SEQ ID NO: 7308 - DNA, 524 bp, Homo sapiens
gagaggcattcttgccgctggcccagtcactatgtagtggaggggcagacaccctcccgcaaattctggaaggttcttagtctcgactagggcagtagccccaggactcctagtcgccggcttcaggtcactgccggctgaacggagctgccgtcgccatgtttggctgcttggtggcggggaggctggtgcaaacagctgcacagcaagtggcagaggataaatttgtttttgacttacctgattatgaaagtatcaaccatgttgtggtttttatgctgggaacaatcccatttcctgagggaatgggaggatctgtctacttttcttatcctgattcaaatggaatgccagtatggcaactcctaagatttgtcacgaatgggaagccaagtgccatcttcaaaatttcaggtcttaaatctggagaaggaagccaacatccttttggagccatgaatattgtccgaactccatctgttgctcagattggaatttcagtggaattattagacagtatggct

SEQ ID NO: 7309 - DNA, 81 bp, Homo sapiens
tacataaatataccttgtatgcaaacgatgataaactagtcaggatgagcagagctgcctgacctcttgatttctgctgca

SEQ ID NO: 7310 - DNA, 527 bp, Homo sapiens
ggagaagccacttcccctctctggatctctgtttcactacctatgaggagattaaactagactgtctataagagtccttctctgagttgttctctgatcttggattctaaaggctggcacttgtatgaaaccagctgtcctgctttctggaaagagtccagcgccattgttaagcaggaaaatttctcctgtgtggttctgccaaaacaaaagctcagactattattcagatctggctgggcaagagagatttgtcaactacatgtttattgaatgatgaaacagctgcacacattcctgcacagaaaacacacattgtctaggtgacaaagagtaatgtggacacatcagggccatcttctgacctttgctagtttttttgttagtttgttttgtttttgtttctttgtattttttgtttgtttttgtgtctgtttttgagacagggtctcattctgtcctccaggctggagtgcagcagcatgatcacggctcactgtagccttgacctcccaggctcaagcgat

SEQ ID NO: 7311 - DNA, 588 bp, Homo sapiens
taacttgtgagattaaggttctgcacatggagccttggtcatcatttgatatatacacccggaaagggccgctggaaaacccaaagcgtagggaattattagaccaattacaacaaaagctgtatcttattcaaatgattcctcgtcaaaatttatttaccaagaacttaacacctatgaactataatatattttttcacttgttaaagcactgttttgggaggcgcagcgccactgtaatagaccacttacgttcattgactccacttgatgcgagagatatattgatgcaaataggaaaacaggaggatgagaaagtagttaacatgcaccctcaagacttcaaaacactttttgaaactatagagcgttccaaagattgtgcttataaatggctgtatgatgaaaccctggaagataggtagcaactagactgtcgtttttggtggagcggttcatttatttggaaactatgacatgaaaaccaaatttgaaaactcacatcctttcagcagaaggtaactgttcttgtcttgcacaagccaggcagatcatttctcctaagctgatatcattggcttattggat

SEQ ID NO: 7312 - DNA, 436 bp, Homo sapiens
aacatgcccaaagttacacagctgataattggttaggctcaggatttgaaaccagccaaactgagtagtaattatgtgtttacctgttatgctcttatttccgaggaatagatgacagttctcactagagatagccaaatttgtgtgtttgtgtatgtgtgtgtatgtgtgtgtatgtgtgtgtgtgtctgtttcttttttttttcccctttgtttttgaaacagggtcttgctctgtggcatgggctggagtgcagtggcactgtcacagctcactacatccttgaccttctgggttcaagtgatcctcctacctttacctaagcctcccaagcagttgggactgcaggtgcatgccaccatgcctggctaattctttaattttctgtaaaaacagggtctcattatgttgcccaggctgatctgtaactcctga

SEQ ID NO: 7313 - DNA, 584 bp, Homo sapiens
acagaaggggtacctttcctatagattctgtagcatttgagtgtggcaatattttaattgtgtatagattactaagaaccaacactactcagtctcctgctagtctgactcctgaagcatcagcccttgtcatactgtattgactgtgtacgtgcctttcaccttgagcatgcttcaggatttttttttaaaccacagaacttgaatacatgagggaaccagagttcaaagtcctatgcaaccttaggagggggttagagagtctgttttgattgatgttttctgaggccctagaggagtttgtatcaatttgtgagtattaatgtcagtactaccagcactttgccaaaactgtcagagggacccgtttctagagtgagtcccagttacatcaaacagtgacttccagttattccccagtaagtctgagtggttccttcaagctgggtgtctttccagcctttgccagtctagccccagcagggcaccgtgtatgaatgcagtttggtgctgttttagagtatgcctgctccccagccccctgcctggaaccctctgagcaacttgctctgacctataatgtc

SEQ ID NO: 7314 - DNA, 492 bp, Homo sapiens
taactccctacattttagttctcacatctgaaaaaatattgagcatgcatatgccatagaattattgtaatgattaaattacacatgtaaattgtataatacacatagtgtctggcacaggatcattcacaataaaatttttattcaatgagtgagtattatcgctttctgtaacattctctagtagccctttctaagctctgcttcactttacatcattacttttgtctagtccttgacattccacctgttccggctttgacttgcttccccagatagtgtacatctgtgtctgcttcaaagcctcattctgttatgttctttaagagttatacctagaattgggccaggcacggtggctcacacctgtaatcccagcactttgagaggccgaggtgggcggatcacctgtagtcaggagttcgagaccagcctgtccaacatggtgaaaccccgtctctgctaaaaaatacaaaaattggccggtgtggt

SEQ ID NO: 7315 - DNA, 524 bp, Homo sapiens
attacgtttttgttttggggtttttttgtacaaatttagctaatagctacaggctgagagaattgtaacatagcatgacaaattttgtgttgacttgaaaggaatcacaccattattccttagaagtaattacatgtgttctaacacatttgagacagggttggactcccatttctcatccgagaaattacttaacccttcctggcgctgtacagtcatcttttattctatttcctctttgctgtttgtagtagagacattttgaatgaaacttggcactgcttgattcaaaactgtggaaaccagatctgtttagtctcctgtttgtatgcgtttgctaatggtagctaaataaccagtttttgttgtaaatgcaccaattctgaaggcactttatgtactacatggaggtcatatctggttttgtttttatttttttatcatgaacattaaatgtgatgatgatttcttttccctgcacacatctttccggtgcaatatctatcaattgtgaatctggctgc

SEQ ID NO: 7316 - DNA, 541 bp, Homo sapiens
gataagagatgttgactctaaagttgatttaaggccaggcatggtggtttacgcctataatcccagcattttgggagtccgaggtgggcagatcacttgagctcaggaggtcaagatcagcctgggcaacatggtgaaaccttgtctctacataaaatacaaaaacttagatgggcatggtggtgtgtgcctatagtcccactacttgtggggctaaggcaggaggatcacttgagccccggaggtcgaggctacagtgagccaagagtgcactactgtaccccagccagggcaagagagcgagaccctgtctcaataaataaataaataaataaataaataaataaataaataaataaataaaaacaaagttgattaagaaaggaagtataggctaggcacagtggctcacacctgtaatccttgcattttggaaggctgaggcaagaggatcactttaggcctggtgtgttcaagaccagcctggtcaacatagtgagacactgtctctaccaaaaaaaggaaggaagggacacatatc

SEQ ID NO: 7317 - DNA, 241 bp, Homo sapiens
atgggaagagtgtcttaagcctaatattaaatcagttttgttaaggggaaaactcaatagttctgttacttaggctgttagatccaagttgatttttgtgtctacagctaaattttgtttacaattaggctattttttaatataggatttagaaaccaagggtatgtgttttaaaattacactttttcttaacctgtctagctgtcggaaaaggtaacagaagatggaactcgaaatccca

SEQ ID NO: 7318 - DNA, 254 bp, Homo sapiens
gcatggagtactttgccaataattttgactggctggagaactgtcttggccatgtagaggacgactatatcctttttgattgtccaggtcagattgagttgtacactcacctgcctgtgatgaaacagctggtccagcagctcgagcagtgggagttccgagtctgtggagtttttcttgttgattctcagttcatggtggagtcattcaagtttatttctggcatcttggcagccctgagtgccatgatctct

SEQ ID NO: 7319 - DNA, 473 bp, Homo sapiens
gggaaatccagtaatttcttgagcagaagaaagggaagtggaattactgtagaaattatgcatagttttatattatctgtgtagtagcctgtttaaagtgatcattgctagtgcatggtatagaattacaaacttgtaaatacttctcaagattgccactttaaaaaaaaaagcaaaaagagctctgtagccctatttttttttttatttccaacaggaaatttgttcttgtttcaaaatgggggaacacccattattctctgttggccacatgaatgtcatccatttgtttattgcagcaaaaaaaaagtgaaaaatggttgatacaggggcaagctgttccttttaggttactttaaaaagtcatggaatttcggatatccaaagaaagcttaaggaatactctaaccagtatatatgtttacagtatccagtttaaaaatgaaaatgtaatgtagttattaaaacattat

SEQ ID NO: 7320 - DNA, 463 bp, Homo sapiens
tacggctgcgagaagacgacagaagggtacggctgcgaggagacgacagaagggtacggctgcgagaagacgacagaagggtacggctgcgagaagacgacagaagggtacggctgcgagaagacgacagaagggtacgactgcgagaagacgacagaagggtacggctgcgagaagacgacagaagggtacgggtgcgagaagacgacagaagggtactggttgcttagaagacgacagaagggtacggctgcgagaagacgacagaagggtacggctgcgagaagacgacagaagggaagaccagcctgggctacatagggagatccaatctctacaaaaaataaaaaattggccgggcatggtggctcacgcctgtaatcccagcactttgggaggccaaggcgggcggatcatgaggtcaggaaatcgagaccatcctggctaacacggtgaaacctcg

SEQ ID NO: 7321 - DNA, 487 bp, Homo sapiens
acagaaggggactaggcgccggcgcctccgaggcagtgtgtttccgcccagagctggagtctcccagctgccagccgaccccgaacccgcactcccgccaaccgcgctttttgtgggcggtcggaaaccacagcctccgttggatatgttcggtgcatgttataaacaaccacttagaccctccggatctgagcctcccgcagaggaatgcagaatgacgccacggcacgcaggatgtgatgtcaccgagatgcagaggatactcagtcaaccaacatttactgagcatctacttcgtgccgtatgtacgaagctagcaaatatgtacagcaccagtactgattgcagggagcactgtagaagaggaatgaaggccaaacaattaaaagcggaggcggggaggtcttgtcaacggaaaggggtccctatccagaccccaagagagcattcttggatctcttgcaagaaagaatttgaggcgaatcca

SEQ ID NO: 7322 - DNA, 533 bp, Homo sapiens
cgagggggaaggactggaaggtggcggtggtgaaggtgcaggccgttggggcggctcagaggcaggtgactatgaaaggcttatatttccaacagagttccacagatgaagaaataacatttgtatttcaagaaaaggaagatcttcctgttacagaggataactttgtgaaacttcaagttaaagcttgtgctctgagccagataaatacaaagcttctggcagaaatgaagatgaaaaaggatttatttcctgttgggagagaaattgctggaattgtattagatgttggaagcaaggtatcattctttcaaccagatgatgaagtagttggaattttgcccctggactctgaagaccctggactttgtgaagttgttagagtacatgagcattacttgggctggagtgcaatggcgtgatctcggctcactgcaacctccgcctcccaggttcaagcaattctcctgcctcagcctcccgagtagctgggattacaggtgccagccgccacacctggctactttttgtat

SEQ ID NO: 7323 - DNA, 91 bp, Homo sapiens
tccagagtgctcgatactgttaattacatctccattagggctgaaaagaatgacctacgtttctgtatacagctgtgttgcttttgatgtt

SEQ ID NO: 7324 - DNA, 339 bp, Homo sapiens
ggaaactttggtggaagaggaggctatggtggtggaggtggtggcagcagaggtagttatggaggaggtgatggtggatataatggatttggaggtgatggtggcaactatggcggtggtcctggttatagtagtagagggggctatggtggtggtggaccaggatatggaaaccaaggtggtggatatggtggaggtggaggatatgatggttacaatgaaggaggaaattttggcggtggtaactatggtggtggtgggaactataatgattttggaaattatagtggacaacagcaatcaaattatggacccatgaaagggggcagttttggtgga

SEQ ID NO: 7325 - DNA, 548 bp, Homo sapiens
gtctgcttcattcattttggctctatgtggtggcagaagggcttctggcatctccggacctttatgcctcccaggtccaaacccagccagaaaggagagtgagagtgctgagtgcaaaactctcctatagctcctatacaagtccaggatttgctattagactccttgaattatgtgcccagctctgagccaatggctgtgcttaggaggctcctgtctcatgcacccaccccagtactgggcatcagaaacaaccagtgatccctataatgaaccacgggttcacagacttaagtgtaatcctgcagcagggcctcaggaagacttgaaacccaaaatcagaaagccatggtttcttgtcttcctggtgtctgttttgtcccttccctctgtagaggagtcctgctatcactgcaggcaacggggctgccctgcagctcctgctgtttacatttcactcggtgtagccataggcagagacctcagggagaacctgattcggcttggattgagtcaggttccaccccagtccagtcagttgtggactg

SEQ ID NO: 7326 - DNA, 72 bp, Homo sapiens
gacagaaggggctttctggtctcggccgcagaagcgagatgacgaagggaacgtcatcgtttggaaagcgtc

SEQ ID NO: 7327 - DNA, 54 bp, Homo sapiens
gctgcgagaagacgacagaagggtacggctgcgagaagacgacagaaggggctc

SEQ ID NO: 7328 - DNA, 595 bp, Homo sapiens
acagcaggggttagacaagccagtgtgggtgcaggaattccctactctgttccagcatggagctgccagatgatctgtgggtcaggcctaaaagctgtgtgccttgcagtccagtcaatagggataggagactccagcattgtggttgcaggaggcatggaaaatatgagcaaggctcctcacttggcttacttgagaacaggagtaaagataggtgagatgccactgactgacagtatactctgtgatggtcttacagatgcatttcacaactgtcatatgggtattacagctgaaaatgtagccaaaaaatggcaagtgagtagagaagatcaggacaaggttgcagttctgtcccagaacaggacagagaatgcacagaaagctggccattttgacaaagagattgtaccagttttggtgtcaactagaaaaggtcttattgaagttaaaacagatgagtttcctcgccatgggagcaacatagaagccatgtccaagctaaagccttactttcttactgatggaacgggaacagtcaccccagccaatgcttcaggaataaatgatggtgctgcagctgttgttcttatga

SEQ ID NO: 7329 - DNA, 78 bp, Homo sapiens
gagactcgaggtgtgcttaaggttttcttagagaacgttattcgagacgccgtcacctatacggagcacgccaagcgc

SEQ ID NO: 7330 - DNA, 70 bp, Homo sapiens
aagccctctggtcctggaggcaggatcatgtggtggattcttggcagtcagcagtctgtggagcttttgc

SEQ ID NO: 7331 - DNA, 458 bp, Homo sapiens
gcgccactgcactccagcctgggcaacagagcaagactctgtctaaaaaaaaataaataaataaaataaaataaaataaaactgccttgattaagtaccttcaaatcagtgattaactagcaactctagccctgaattctgaatcttttatttttccttcaaaaggtaactcttaaaccatcccttctacttaatctgcatattgtactgaggttatttatcttccaacgtttgccagttcccttaggaatacccttagcaaccgcctttccatacaaattgcctgggaaagtttaaggggatcaaatcccttgtaactaaacaaaatagggcttttgaatagaaatttaatagcaaattagattggcatcattacaggaggatgaatgaaacttttgttttctttacatttacagtagaaaagtcaactaactctccaatatacaatgagctggaag

SEQ ID NO: 7332 - DNA, 466 bp, Homo sapiens; identical to SEQ ID NO: 2233

SEQ ID NO: 7333 - DNA, 518 bp, Homo sapiens
gacagagggagcctggaattgggccgagcagagtggctcacgcctgtaatcccagcacttcgggaggccggggcgggcagatcacctgaggtcaggagtttgagaccagcctgaccagcgtggagaaaccctgtctctactaaaaccaaaaccaaaaaattagccatgccttagtggcacacacctgaagtcccagctacttgggaggctgaggtaggcgaatcgcctgggctggggaagttgaggctgcagtgagccatgatggtgccactgtgtactccagcctgggcagtgggactgagaccctgtctcaaaaaaataaaataaaaaaatcaaagttttttgttttaaagttgaactattataagcctaaatttccccacccatagttactttggaacctgtacaaatcataattgagcttgagcctctgcttggtgatatgacacttttggtagccaattctcatgaaatagaagtggcaggcacatagaaaatggggaaggcgccaggcgcag

SEQ ID NO: 7334 - DNA, 512 bp, Homo sapiens
ggacgacagagggggaatttcctttcatgttcagcatttctactccttccaagaagagcagcaaagctgaagtagcagcaacagcaccagcagcaacagcaaaaaacaaacatgagtgtgaagggcatggctatagccttggctgtgatattgtgtgctacagttgttcaaggcttccccatgttcaaaagaggacgctgtctttgcataggccctggggtaaaagcagtgaaagtggcagatattgagaaagcctccataatgtacccaagtaacaactgtgacaaaatagaagtgattattaccctgaaagaaaataaaggacaacgatgcctaaatcccaaatcgaagcaagcaaggcttataatcaaaaaagttgaaagaaagaatttttaaaaaatatcaaaacattatgaagtcctggaaaagggcatctgaaaaacctagaacaagtttaactgcgactactgaaatgacaagaattctacagtaggaaactgagacttttctat

SEQ ID NO: 7335 - DNA, 255 bp, Homo sapiens
aagacgacagaagggtacggctgcgagaagacgacagaagggtacggctgcgagaagacgacagaagggtacggctgcgagaagacgacagaagggtacggctgcgagaagacgacagaagggtacggctgcgagaagacgacagaagggtacggctgcgagaaggcgacagaagggtacggctgcgagaagacgacagaagggacagagggagaccccaactctttgaaaaaaaaaaaaaccccaggcccaggg

SEQ ID NO: 7336 - DNA, 528 bp, Homo sapiens
gggtctttctctgtctcggctgaggcagccatctttctcttgccgcgtgctggtgttggaggaccctccctgcttcagatttaccaacagcatgaatcaagaaaagttagccaaacttcaggctcaggtccggatagggggcaagggtacggctcgcagaaagaagaaggtggtacatagaacagccacagctgatgacaaaaagcttcagagttctctaaaaaaactggctgtgaataatatagctggtattgaagaggtgaacatgattaaagatgatgggacagttattcatttcaacaatcccaaagtccaagcttccctttctgctaatacctttgcaattactggtcatgcagaagccaaaccaatcacagaaatgcttcctggaatattaagtcagcttggtgctgacagtttaacaagccttaggaagttagctgaacagttcccacggcaagtcttggacagtaaagcaccaaaaccagaagacattgatgaggaagatgatgatgttccagatcttgt

SEQ ID NO: 7337 - DNA, 559 bp, Homo sapiens
gacagaaggggctcataggggagcttctagaaaggaaggacttattgtcttagttacttgatccacttccttacctcctgttcatgcaactttgcttgttttgcttctactaaaatggttctaggtgctgtgtggacaggtgatacaaaagcctgactcacacggttgacattctttcattccattttcatttctctttgagtgatcctgacaagcagagggtctcaggtggatattactgtgtctttgagacctctctaatccttatctatctctcattttaatacagagagtttcatacgcagaccttaagtagacatagtatccagctaaaagggtctcactctgtcacccaggctggagtgcagtggcgcagtcatggctccctgtaacctcaacctctcagactccagcaatcctcctgcgacagagacagagtctcactttgttgctcaggctggagtgcattggcacaatcttggctccctgcaacctccgcctcccaggtttgagcgattcttttgcctcagcctcctgagtatctgggatgacaggtgcc

SEQ ID NO: 7338 - DNA, 546 bp, Homo sapiens; identical to SEQ ID NO: 2234
  misc_feature 441: n = A,T,C or G

SEQ ID NO: 7339 - DNA, 56 bp, Homo sapiens
gacagaagggataatcatagatgatggaagcccagatggaacaagggatgttgctg

SEQ ID NO: 7340 - DNA, 171 bp, Homo sapiens
aatttggtttccttgtggcttcccaggaattggtctcactctgctcactctgtctcccaagctggagtgcagtggtacagtcacggctcactgcagcctccacttcctggactcaagtgatcttctcacttcagccttctgagtagctgggactacagccccctctgcagc

SEQ ID NO: 7341 - DNA, 416 bp, Homo sapiens
cgtggagtgacggtgccaccgcggcgcgattgacttctaaagactcttggtacgtgaggaagaaacccggaagaggaagaggagagcaaaggagtcagggatggctttttctcagggtctattgacattcagggatgtggccatagaattctctcaggaggagtggaaatgcctggaccctgctcagaggactctatacagggacgtgatgctggagaattataggaacctggtctccctggacagggtcttgctgtgttgttgaaattcatcttgatctcctgagctcaagaaatcctcctcagtctcccaagtagctgagattacaggtgccaaccaccatacctaattattggcttttatttttaagatttttgcatatgtgtggccgggcttggtggctcacgcctgtaatc

SEQ ID NO: 7342 - DNA, 547 bp, Homo sapiens
gacagaaggaggataaagcctgtgtttctttcctttatttcccagggtttaacaaataaatgcatatattctctccaggtggggaagaaaatcagcctaaacaaattaaagtggcagttgcttatagttaaggttgagtcagtttttccattgcatacaatgttttcaagaggcttagttcccagagaatttatggctcccctataaatatttactttgcattgacagcaaagtacttatatttttgcagcagagtgccaacataagccttttgcctactggtatcttagtctttaaaaagctaaattttgagaattacaggtttgagcgaaatctagaaaattcatttagaaataattaaaatgtgagggataggagaaacataaggaatcatttggtctctcagttcttcacattctgcatgctctcttttctccccccttcagatggtcttgctgcattcagggcttttttaaagtcggaattctgtgaagaaaatattgaattctggctggcctgtgaagacttcaaaaaaaccaaatcaccc

SEQ ID NO: 7343 - DNA, 113 bp, Homo sapiens
gacagaagggaactggcttctgcttgtcatccacacaacaccatgacttaagacaaatgggactgatgtcatcttgagctcttcatttattttgactgtgatttatttggagt

SEQ ID NO: 7344 - DNA, 563 bp, Homo sapiens
gagctgtggagtggcgtacagaggtaagtcctggtctgcgtggaggtcgacgactccgtcgcagactacggacctgtgtgggtctcagccgccaaagaccccgtgcggaagtactagccggacatcatgagtggctgtcgggtattcatcgggagactaaatccagcggccagggagaaggacgtggaaagattcttcaagggatatggacggataagagatattgatctgaaaagaggctttggttttgtggaatttgaggatccaagggatgcagatgatgctgtgtatgagcttgatggaaaagaactctgtagtgaaagggttactattgaacatgctagggctcggtcacgaggtggaagaggtagaggacgatactctgaccgttttagtagtcgcagacctcgaaatgatagacgaaatgctccacctgtaagaacagaaaatcgtcttatagttgagaatttatcctcaagagtcagctggcaggatctcaaagatttcatgagacaagctggggaagtaacgtttgcggatgcacaccgacctaaattaaatga

SEQ ID NO: 7345 - DNA, 596 bp, Homo sapiens
aacgtgctggtggaggacggctcctgtcgatacgcagcccaagaaaacttggaatataacgtggagcctcaagaaatctcacaccctgacgtgggacgctatttctcagagtttactggcactcactacatcccaaacgcagagctggagatccggtatccagaagatctggagtttgtctatgaaacggtgcagaatatttacagtgcaaagaaagagaacatagatgagtaaagtctagagaggacattgcacctttgctgctgctgctatcttccaagagaacgggactccggaagaagacgtctccacggagccctcgggacctgctgcaccaggaaagccactccaccagtagtgctggttgcctcctactaagtttaaataccgtgtgctcttccccagctgcaaagacaatgttgctctccgcctacactagtgaattaatctgaaaggcactgtgtcagtggcatggcttgtatgcttgtcctgtggtgacagtttgtgacattctgtcttcatgaggtctcacagtcgacgctcctgtaatcattctttgtattcactccattcccctgtctgtctgcatttgtctc

SEQ ID NO: 7346 - DNA, 82 bp, Homo sapiens
gaatgttggtgatgaagctgagttcaggactcggtggaccctttgggaatgggtcatgaaagctgccatggggtgaggaaag

SEQ ID NO: 7347 - DNA, 587 bp, Homo sapiens
acagaagggtcacatagtcctcagggctcagtcttttgaggtaagtggaattagagggccttgcttctcttctttccattcttcttgctacaccccttttccatttgctgtggaccaatgcatctctttaaaggcaaatattatccagcaagcagtctaccctgtcctttgcaattgctcttctccacgtctttcctgctacaagtgttttagatgttactaccttattttccccgaattctatttttgtccttgcagacagaatataaaaactcctgggcttaaggcctaaggaagccagtcaccttctgggcaagggctcctatctttcctccctatccatggcactaaaccacttctctgctgcctctgtggaagagattcctattactgcagtacatacgtctgccaggggtaacctggccactgtccctgtccttctacagaacctgagggcaaagatggtggctgtgtctctccccggtaatgtcactgtttttattccttccatctagcagctggcctaatcactctgagtcacaggtgtgggatggagagtggggagaggcacttaatctgtaaccccc

SEQ ID NO: 7348 - DNA, 581 bp, Homo sapiens
gcctttccgcgtgtagaatgtggggcgcctgtaaagttaaggttcacgattccttggccaccatttccatcactctgagacggtacctgagattgggggcgaccatggcaaaaagcaagttcgagtacgtgagggacttcgaggctgacgacacctgcctggcacactgctgggtggtagcgcggctggacggccggaatttccatcggtttgctgagaagcacaactttgcaaaacccaatgacagccgtgctctccagctgatgaccaaatgtgcgcagactgtgatggaagaactagaggatattgtgatcgcgtatggacagagtgatgagtacagctttgtgttcaagcggaaaaccaattggtttaaaagaagagccagtaagttcatgactcacgtggcctcccagtttgcctccagctatgtgttttattggcgggattactttgaggaccagccccttctgtatcccccaggctttgacggaagagtcgtggtgtatcccagcaaccagactttaaaggactacctcagctggcgacaagcagattgtcacatcaataatctttataataca

SEQ ID NO: 7349 - DNA, 76 bp, Homo sapiens
gaaatgtgaagaattcacctggaactaagtagaaaactccatgctctgccatcttaatcagttataggtaaacatt

SEQ ID NO: 7350 - DNA, 71 bp, Homo sapiens
gatgcagcccatgagactgttcccattatgctggtaggaaacaaggctgacattcgtgacactgctgctac

SEQ ID NO: 7351 - DNA, 348 bp, Homo sapiens
atgacagggagatgaaaattacgttcctcccaaaggtgataagaaggggaagaaaaaggaccccaatgctcctaaaaggccaccatctgccttcttcctgttttgctctgaacatcgcccaaagatcaaaagtgaacaccctggcctatccattggggatactgcaaagaaattgggtgaaatgtggtctgagcagtcagccaaagataaacaaccatatgaacagaaagcagctaagctaaaggagaaatatgaaaaggatattgctgcatatcgtgccaagggcaaaagtgaagcaggaaagaagggccctggcaggccaacaggctcaaagaagaagaacgaacc

SEQ ID NO: 7352 - DNA, 108 bp, Homo sapiens
gtacgggaaggcgaagaaaagaatagagaagatagggaaattagaagataaaaacatacttttagaagaaaaaagataaatttaaacctgaaaagtaggaagcagaag

SEQ ID NO: 7353 - DNA, 602 bp, Homo sapiens
acagaaggggacttagggttagtctttctgagctcttcacatctctgactaattatcatcattaccatggagcccaacagtcccaaaaagatacagtttgccgtgcctgtattccagagtcagattgcacctgaagcagcagagcagatcaggaaaagaagacctacaccagcatcacttgtgattctcaatgagcataaccccccagaaatagatgacaagagggggcccaacacacaaggggaattacagaatgcatcccctaagcaaaggaagcagagtgtgtacacaccacccaccataaaaggggttaagcatctgaaaggccagaatgaatcagcattccctgaagaagaagaaggcaccaatgaaagagaggagcagcgggaccattaattactggtctgcagcaagaaggcttcttggaaataactgaactattaacttttctgagtataccatggaattccactgcttgacttccagaagcatcctccatctctgcaccccacactcatacagtagctatgcacatcctggaagtctccttgactgaactttagaactaagtacacattgttccacatcacttataattaaag

SEQ ID NO: 7354 - DNA, 148 bp, Homo sapiens
tttctctgttacaaagtggcaataataataatagcactcacttccaaaagattgttgtaggattaaatgattggataggttcaaaatgttaggaacagtagtattcaataaacatagttattatttgctatctttcccactactccat

SEQ ID NO: 7355 - DNA, 484 bp, Homo sapiens
gtatactggtttatggaactttatttacactcctctatcatgcaaaaaattttgactttttagtactaagcttaatttttaaaaacaaaatctgtagtgttgacaaataaatagttgctcttctacactaggggtttcacctgcaggtttgacacgcagttgctcgcttttcctgccctgtcaagcttctctgttctggcgtgagttgtgaaagagttgaagacagcttcccatgccggtacacagccagtagcctaaatctccagtacttgagctgaccattgaactagggcaagtcttaaatgtgtacatgtagttgaatttcagtccttacgggtaaacagattgagcatggctctctattccctcagcctaagaaacactcatgggaatgcatttggcaacccaaggaaccatttgcttaaacctggaacatctcacccttttaaatcctaaaaaacactggcagttatattttaaatta

SEQ ID NO: 7356 - DNA, 582 bp, Homo sapiens
gtatatattttccatatgtagagccctgattaacttcaaggacaaacactggctggagaaagccagactgatgggaatgagactttggccaaaaatcccaaaacatcattttcaatcagtagagaagtgcttagggttgaaaattgatttcatttgctactgaatttggtaaatcctgggtaacttttatcaagatgaagacattttaccctacctactctagaaatatacaacaatgttatattttacactccttggaaacatttgaggaaaaaaatgcaatttgcacttcactttgttggaatatcccatagcactcaataaactcagctgctagagtgccgatgtcaggagggctgcgtcgggtaatgcgtgtggctgaatgggcataaccactgtggcttcttgtgctgtagaagctcgttgacaagactgaggaggatttcaagagcaaccaagtaaagtcatgcattttctaattttgtgtatatggaatatatttttaaatagagatttttctactttagataatgtgttaatattgctattacctaggttaagcactattgtctgtgctagtaa

SEQ ID NO: 7357 - DNA, 573 bp, Homo sapiens
gtccactaccagccggccagccccccgcgggacgcctgcgtctacagcagctgctactgatacctatctggaaacaacaggcgagacctggagatggacctgtgatctggtggaggacagaacttcatttatgatctcgatactgtcttgccatttccctgcctctttgacacttatgtagaagatgcctttaagtctgatgatgacattcacccacagtttaggaggaaatttagagtgatccgtgcagattcatatttgaagaactttgcttctgaccgatctcacatgaaagactccagtgggaattggagagagcctccgccgccatatccctgcattgagactggagattccaaaatgaacctgaacgatttcatcagtatggatcccaaggtaggatggggcgccgtctacacactatccgaatttacacatcggtttggcagtaaaaactgctgaacttggtctcaagatgtggaactgtggagaaattctaggacatgaacaagctatcctttcatcgaggacagcaaacattatggtacagttggcttggaattatgtctttct

SEQ ID NO: 7358 - DNA, 204 bp, Homo sapiens; identical to SEQ ID NO: 2243

SEQ ID NO: 7359 - DNA, 99 bp, Homo sapiens
ggagagtccttctccacaggcttgataaattcaatcaccaactgtgctgtcgtccctgactctgctactcccgttcttcctgctttcctgctccgtatc

SEQ ID NO: 7360 - DNA, 605 bp, Homo sapiens
acagaagggatggacaaggctgtgtgatacagacctaaataccatgttcaaaggagatgtaagcagtggaggctaaactgatgaggaaaggctggagtgagacttgaacaaataggattagataatacatggaataaaggattcagatagtttgagtgaaggatggaagtaggaatgaattaaggctggctgtggtggctcatgcctgttatcccagcactttgggaggccgaggcaggaggattgcttgaagttaggagtgtgagaccagtctgggcaatatagcgagactctgtctctataaaaaatttaaaacattagcaggctgtggtggcatgccagctacttgggaaactgaggtgggaggatcacttgaggttagtgatcaaggctgcagtgagccgtgattgagtactacactccaagcctgggcaacagagtgagaaccatctcttaaaaaacataacggggctgggcacagtggctcacgcctgtaatctcagcacttgaatgctgaggtgggcgggtcgcctgaagtcaggagtttgagaccagcctggccaacccggtgaaaccttgtctctactaaaaaatacaaaattagc

SEQ ID NO: 7361 - DNA, 566 bp, Homo sapiens
acagaagggaaccacttctgtattgtgtggtcttaactgcctaaggcggcaatgggcagtgggcccctttcccttaggatgggtatcaattcaacaatatttataaggcatttactgtgtgctaagcatttggaagacccaggctacaaaataagacatagttcctgccctccaggccagcggagggaggcacaaatacccaggaatctctgatgggtgtgaagtgcggtcgtgggccacagaaaatgaccgtcatggagaccctgctaaaggtcggaccctgagcccaaaggggtattcagaagtggagatgattttggccccactcatagatgggtggcaaatctaagatttgtataaagcatataaaatagggtgatcacccccgaggcagaggggccagcatttgcaaaggcacagagctaagaggagctgggcaaagaaaggaaatccagggaaggtggtgggagatgagtcaaagctaagtagtggaagctgggcacagtggctcatgcctgcaatcccagcactttgggaggccaaggctggaggatcacttgagccca

SEQ ID NO: 7362 - DNA, 651 bp, Homo sapiens
atttttagaaaaatcattcttactcaaaaagtgtcctacttagaataagtccagtgtgaaagctaggtgagtgtaattttttatagtcttgtaaatttggtttgtaatttaaaatgccttctagacataattttaaatgtgaattagtatctttcctttcaaataatcctttgggcatgaagccaaagaaggacaggaaacatttttcacttccttctcccacattgcagtcgggaacagattgcataaaggaggactgaagagtagtctgattttctgtgcaagttgtacaaattaaaagcaaccaggccttcacaggctagctcctgatggaaataagatgtgttttcggcatgagctgtttttcttgaactttgtttacgtctagtttgtcaaaaagataacagacttttctctttataaatgtcttggaagaaactgatgcatgaaattcgaccagaatttcttcagagaaatgttttagtgacagttgtgcaagtagcagaatggttatagaaacctggccattgctccatgttcagcatgtcctggtcagtttacacttttatgtctgtaacccttgagtgcacaagtatgcaaaaatagataaattatccgccttcatggagcttgcataggtaaaccatatac

SEQ ID NO: 7363 - DNA, 334 bp, Homo sapiens
gacctgggaggggtgcccggatctgcttgctggggatgttttttttttcttcttcttcagttaaagcttactgttgggaattacgaaaaacgtaggcgaagtggtaatagagggaaaagctcttttactgagtaaagttaagttaagtttctcatgaaacctcctggtaaatgactttctaggtgaacttacattaggtgagagattatttttagtatcgcttttatattttatcagttgatgaatctcaaagtcttgccgtcttaaaaaagggctttttcatcgagtgcttgaaatgtaggtttgtgagttgatcaaaggcctcaaagcttca

SEQ ID NO: 7364 - DNA, 577 bp, Homo sapiens
ggtcattggtccagaggggagataggttcctgtgatttttccttcttctctatagaataaatgaaatcttgttactagaacaagaaatgtcagatggccaaaaacaagatgaccagatttgatctcagcctgatgaccctacaggtcgtgctatgatatggagtcctcatgggtgaagcaggaagagagtgggaaagagaaccaccccactctgtcttcatatttgcatttcatgtttaacctccggctggaaatagaaagcattcccttagagatgaggataaaagaaagtttcagattcaacagggggaagaaaatggagatttaatcctaaaactgtgacttggggaggtcagtcatttacagttagtcctgtgtctttcgacttctgtgattattaaccccactcactaccctgtttcagatgcatttggaataccaaagattaaagccttgacataagatctcatttgcagaaagcagattaaagaccatcagaaggaaattatttaggttgtaatgcacaggcaactgtgagaaactgttgtgccaaaaatagaattccttctagtttttc

SEQ ID NO: 7365 - DNA, 474 bp, Homo sapiens
tagattgtcccaaaggtggcgcatgaaatcaaagcaggagaacagtttcctacgaggtgtagcctgggaaagttgggggtgactgatggaaaggaggagtgaagctccgccctttccgctgctaggctgcgcccgaggctatttaaacccaccctggctggcctgtactcagatcttcgcggagcggatcagcggccggagcgtttggcggactctgcgtggacttggagctcacagcgtcttgcgacttggaagcggattcagaggacaggacagaacacttgggcaagtgaatctctgtctgtctgtctgtctgtctgtctgtctcattggttggttgatttccattttcttaaggggcacatacctcacaccgcacacacacaaacacacacacgcacacacacacacacacgcacacacacgcacacacactccttccttctgcgagttaaaacattagtaggggcccct

SEQ ID NO: 7366 - DNA, 327 bp, Homo sapiens
gacagaaggtctgttgttattttcctctgttaaaaaatatatatctttagatttagattatgtgtttttcatcttgtgcatttaaattttaaaaattatttttccttaagccttttgtaaaggacctttaatcctaaaattgaaccgtaacagcaggaaatatattggtatggggtagatctatgttgtaattatttgtatattggatagttgctaaagactttacttggttttcagttttcttttgaaagccattttaaatagattggtaaaaggttagttggaaaagacattttgagaaatattttgtaaatttttttttttttt

SEQ ID NO: 7367 - DNA, 469 bp, Homo sapiens
atcttcccccaaacataactcattacctccagtttatcccatgtacacttctttttcaccccagttttcttttattttcagcgatccattccagatccaatatctttttttttgagatggagtcttgctctgtcgcccaggctgcagtgcagtggctcgatctcggctggctgcaagctacgcctcccgggttcacgccattctcctgcctcagccttccgagtagctgggactacaggcgcccgccctcatccggctaattttttgtattttttgtagagacggagtttcaccgtatgagccaggatcctctcgatctcctgaccacatgatctgcccacctcggcctccccaagtgctgggattacaggtgtaagccacctgcacccagccctccagatccaatatctttttcctccatcctttgccaaaccaggacttcagcttctggttactggtgcccacttca

SEQ ID NO: 7368 - DNA, 710 bp, Homo sapiens
ttcggcacgagggataagggctcagagttgcactgagtgtggctgaagcagcgaggcgggagtggaggtgcgcggagtcaggcagacagacagacacagccagccagccaggtcggcagtatagtccgaactgcaaatcttattttcttttcaccttctctctaactgcccagagctagcgcctgtggctcccgggctggtgtttcgggagtgtccagagagcctggtctccagccgcccccgggaggagagccctgctgcccaggcgctgttgacagcggcggaaagcagcggtacccacgcgcccgccgggggaagtcggcgagcggctgcagcagcaaagaactttcccggctgggaggaccggagacaagtggcagagtcccggagcgaacttttgcaagcctttcctgcgtcttaggcttctccacggcggtaaagaccagaaggcggcggagagccacgcaagagaagaaggacgtgcgctcagcttcgctcgcaccggttgttgaacttgggcgagcgcgagccgcggctgccgggcgccccctccccctagcagcggaggaggggacaagtcgtcggagtccgggcggccaagacccgccgccggccggccactgcagggtccgcactgatccgctccgcggggagagccgctgctctgggaagtgagttcgcctgcggactccgaggaaccgctgcgcccg

SEQ ID NO: 7369 - DNA, 425 bp, Homo sapiens
tgggcatgttttctttcttccttattaataaacggggccattcccaaaaaggatttaaagggacttcattcaatccccaatttttttgaaaatataaattaaatttccgggtaaaaaaaaaccaggaggaaaacagggcccaggaataaggctggggcaaaactgcttctttgggattttctacccttacaaaaaatagcccatttatgggctggcaggataaactcctaacaaaaaaggaccctcaaaacatgccatggaggaaaatacattcccatggaaatgcccctataaaactccataaatttccttttcctgaaacatgtttgatttctttttaaacattcccaagttctcattttaaaaatggccagggttctgggcagtgtattctactgaaaaactcaggctactaagttcctgag

SEQ ID NO: 7370 - DNA, 338 bp, Homo sapiens
agcttgcggccgcggttttttttttttttttttttttacccaaaaaaaaaaagggggttccccagaaaattggggggcaaaaaatttaaaaaattggggccccttttaggggggaaaccaccctgtttttggggttaaccccccttatttttttttcgggccaaataaaccccccctaaattaccctttttaagcctcaaggggttcaaccccttaaacctgaaacttaacccttttttaacccgaaataagccttttttggcaaaagaattggccccatttacacaaaacggggggggggccctttgaatggttcccctcggcccaaatttttggcc

SEQ ID NO: 7371 - DNA, 264 bp, Homo sapiens
tcggaacgaggtcaatcttagtttgcctccagttaatcttttatgcttagggattaaatgtgtggttttttttttgtttttttttttggaaaacggagtttccttttgtcccccaggctgaagggcaggggcccaatctgggttaactgaacccttggcctccggggttaaaacaattttcctgcctaaccctcccaagaagcgggaattataggcccccccccccagcccgggttaatttttaattttaagaaaaaagggggt

SEQ ID NO: 7372 - DNA, 440 bp, Homo sapiens
gaatggttaaaaattcatttttaatagtattgctttaacatagacatgctaattttctcagacaatttagaacagaattgggacagtagtagcttcccttcttctccttactctcctagcctctctctttgaaagacctaagagccttgttcttcatagcaggtgctgatgcccaaagggcgattataagaatcctatagcctccccccctccccgccacacacatgagataataaagtaaatacagagaaaatggatggaagggagggaaagcactcccagcctttgattcttggtagttatgttcaagtggggcacttctctttgaaaagtgaaaatgtttctcacggtacagaatttatgggcagacaaggagcagacttaactgatcccagcaaacagttccttccttttcctaatccctggctgcttattttagc

SEQ ID NO: 7373 - DNA, 205 bp, Homo sapiens
cccccccccccggggggggttttttttttttaaaaacccccccctaaccctttttttcccaattttttttgggggaaaaaatcccctggaaattttccccttttaaaaaaaaaggccccccccccccattttaataacccccggggtaaaaacccttaaaattttcccgggaaaaaccaaaaggggaaagggttttttttttttt

SEQ ID NO: 7374 - DNA, 352 bp, Homo sapiens
gattcctgaagctgacagcattcgggccgagatgtctcgctccgtggccttagctgtgctcgcgctactctctctttctggcctggaggctatccagcgtactccaaagattcaggtttactcacgtcatccagcagagaatggaaagtcaaatttcctgaattgctatgtgtctgggtttcatccatccgacattgaagttgacttactgaagaatggagagagaattgaaaaagtggagcattcagacttgtctttcaacaaggactggactttctatctcttgtactacactgaattcacccccactgaaaaagatgagtatgcctgccgtgtgaaccatgtgactttg

SEQ ID NO: 7375 - DNA, 121 bp, Homo sapiens
ggttcatctcttcctagtaattggcaagacatctccctggaagatagtcgtctaaagttcaatcttctggctcatttagctgatgacttgggtcatgtagtccctaactccagactccacc

SEQ ID NO: 7376 - DNA, 531 bp, Homo sapiens
actgaaaaccaagatatcttacttctctacctacaaccttctttgcataaaatgatctaatgcaatccatgtaaaatgatatcaactatagaataagccagccaattttggaataaggagaggtattaaaatagattgctttgatttaagtctcctgaacggtaggttacattgaggctctcgtcggagcactggccagccggctttccccttcattccacgtgttgtaatgtgttaatatgcccagctgacgtttttgcctgtttcttaatttgacatcaacaacaagatcgagttctgacgctctgcaggggcgatacgcagctcctgaattggaggtaagttcatttccttttcctgtcctgcttcatctcagaagatccatttctcaagagggccttttgtgtttgtgtctttatcagtctgcattccgtgatcctgtttttctgctgaggaaagatttttgtatagaaaaataaatgctggccgggtgtggtggctcacgcctgtaatcccagcactttgggagtc

SEQ ID NO: 7377 - DNA, 145 bp, Homo sapiens
ggaaaaaccttgtagagagagtaaaaaatttaacacccatagtaggcctaaaagcagcctggccaacatagcgaaaccccgtctctactaaaaatacaaaaaattagctgggcatggtggcacatgcctgtaatcccagctactc

SEQ ID NO: 7378 - DNA, 116 bp, Homo sapiens
gcctgtggtcgatgacctctcggtagtttcaaagggggctggagggggatatttgacttgttttttcgaaatgtagccttctaaccctcaagtctttaaaagctgggtggactctt

SEQ ID NO: 7379 - DNA, 343 bp, Homo sapiens
gacagaagggagctactcgggaggctgaggcgggagagttgcttgaccctgggaggcggaggttgcagtgagccgagatcgtgccactgcactccagcctggccgatagaatgagactctgtctcaaaaaaaaaaaaaaaaaaaaattaaaaaaaaaaacttaaaaaattgtttgtaaaatttgaaccaggtttttttttggggaaatcttaaaattggggggggaattaattttttttcaaagcccttggggcttttaaaaatttttttaaaattttttccctttttggggaaaataaaaaagcctttccctttcccctttttttttttaaagggaaaattt

SEQ ID NO: 7380 - DNA, 517 bp, Homo sapiens
atgtgcacattctttgggagggtgttaggactctttcggttgcaagtgtcagaaactcaactcaaaggagcttaaacaagcaccagaagttaccgggtcacacatctgagatgcccaagggagctcccaatcaagctggatcagcgagtcaaaccgtgtgctcaggaccctttcttgctaggtcatctccctgtggggagaccaactgtcccagtttgcccaggtctgaggggcagtcctgggcatgggaccttgatgggtacaaccaggtcgagatggtccccctatctctctgcatctctgtgctggcttccatcaggcaaattctccccagaaagccagaagtagctccaagtgtacttgcttttcacagtggttactcctgggggacaagaaatactttttcctgagagttccagcggcagcttaagggagacctcagattggccctgcttggtccaaattcccatccctggttgggcacggtggctcacaccggtagtcccagcactttttg

SEQ ID NO: 7381 - DNA, 531 bp, Homo sapiens
gggacacagagttgacccagccagggggaaagcccagctctctttaaaccagctaagccattccagtctcctgtgaagccaaaagggaccaggaaccgtgcaaaggaaactggaaacttttccccgctgggtagagcatgttgctgatactcttctgttttcaagggaaacaatcacattgtttgattccaaatggtaaatgaacactcactattcttcaggcttcagtaaatcttttttttcttccttcatatatatatacacaacacacacacacatatgtatatctatacacacatgtgtgttgtgtatatgcatgtgtgtgtgtgcgtgtgtgtatagttttagctccaagccaagcaagtttgtgtttggatagaggggaacttaactattaactacaagttgtatgtctgtggtatcttgattttcccatttctaaagatgaatttcacaaagccataaagcgtgaaattagagctggacttaagactcattggccgaccatcctgtgtcctggcctggccctgc

SEQ ID NO: 7382 - DNA, 473 bp, Homo sapiens
gtggagtaacagacagtcctcgtgcttggaattgagtctagtcttggcaattcttgtgggtccatgaacccgcaggctgttggcataattatgcctcatttttaaaacggccttcccttcttaaagttttctgactgcagaaaaatggttagtgaaaaatgtggaataatgccaaaagggagacgatggactagagatgggcaaagctgccattttcagacagtaatctccagctctcagcttatgtataaagggttctttgctgtctggcttgacatctggaaaggagtagcctttctcgttctcagagcagtcgttcttggataatttacccatctgcattgggctgagaatgagacccttggggtttccctggagagcgatttttacttaattcagtagtatttatttaaaatggctaactgttgaagtttgcttaaggcaatagtagccttttggtattgccactctta

SEQ ID NO: 7383 - DNA, 247 bp, Homo sapiens
gagccaaaggcagcgcatatggtttgtcgggcgccgattcctacaaagatgctgtccggaaagccatgtttgcccggttcactgagatggagtgagagagagagagagagagatatgacaaggagcacaagaagtggtccatctcccgaattcgctgttaccgcctgtctctttaagggcatgccttgtgctgttaatagatcttagggtgaaccacttcattctgcagggttctccctcccacctt

SEQ ID NO: 7384 - DNA, 450 bp, Homo sapiens
gaatcttctgtagtgttttattcttggtgtttttctttgggacctgcatgctttctggcctttgctcctgctgagtaggcagacatatctggagaaaaccatggagtaaaggaaaagctttggaatttaaaattgatttatgtggaagctttttctgtggttgaaaaaaagtaaagaaaaaccctcctttctacattaccaattcccggcaacagtaagccaaacctgttgtatttgggagcaggcctgggtgcatggaaactgctcagaacagggaggtcaatgccattatgataatccagtgacttccatgggaagccatcattgagaaagggtacttgtgcagatctaaaatttggaacaaaacaccctgaagatggccaaactgatataacgttatgtaccttggtggagtgtcttggtctgtttgtgttgctttaaaggaatact

SEQ ID NO: 7385 - DNA, 535 bp, Homo sapiens
acagaagggggcaggctggggatcctggggcaaatctctgctgtcgtcagcatctgccacagtaggtcatggattgacggcagtcaaggaaaaagcaggagccactctacggattcattgtaaattctggatcttctgaaggagcccaaccaaatactgaaaacggagtccctgaaataacagatgcagccacagatcagggccctgcagaaagcccacccacttccccttcatcagcctctcggggtacgctgtctgccatcaccaatgtggttcaaaacacaggtaaaagtgtcttaactggaggccttgatgcgttggaattcatcggcaagaaaaccatgaatgtccttgcagaaagtgacccgggctttaagcggaccaagacgctcatggagagaactgtttccttgtctcagatgttaagggaagctaaggagaaggagaagcagagactggcacagcagctcacgatggagagaaccgcgcactacgggatgctgtttgatgaatatcaaggcttgtcacacctgga

SEQ ID NO: 7386 - DNA, 550 bp, Homo sapiens
gtaagaatagatttctcatggctctaaaaattattcccaagaataccttacttggttcaaaagcagactgtttctctccatttcatctcaaatcagacttctgggcaagatgttctttagagtaagcaaacctacaacctaaaaatctcttcaagaggcatctctggtcttgtgacaagacctcttcaaaaacccacagtaaaactcccctccctccagttggccaccagtctgccaccaaacatgaacaaattctgctgctaatcggtttcccttgtgatctggttcctgaggtcttcggatctgtgcaatgaattatttattgttttattaaaccgacagtggtgtcccagagaggaaccataaataaaatggaaatctggtgctgtgataaagtaataactagcattaatgagacctggttttcctttcagaaagtccagtatacctgtaacaaaggttaaagcaatttatatttaatttgcattctgatgttaacatttaaacagcaattctaacaaaaatgcatcgagtctaattcttacctcta

SEQ ID NO: 7387 - DNA, 521 bp, Homo sapiens
gtcttgtaggtgctacatatttattaaaatttttggttgtaattttaagctcactgcaggcagaaaggaatcattaacatttatattcttttttagtctgtatctaaatgatggtatattttaattccagatatttactttatactgcagtaatgctcgtcatattttgcaaaatttatgttgttcttttatttggaaatataaggcttttttagctcttgaaatctatattatagtcatataattttattatgttttgtggtaagaagtgcagcaacatattgagaacataataaaactatcctgtatttttaatgattatttattaaattcctctcattagagcctgtatttttaatgattgtaatgtattttctgtataattttactgcaatttattaaattctaatgacttaaattgtctgcttttcatgagtgcacacagttgaatgctgtagatatctaaagaattatttttcggccggttgtggtggctcatgcctgtattcccagcaccttgt

SEQ ID NO: 7388 - DNA, 484 bp, Homo sapiens
acagaagggagaggactggttcgggagtgcttggcagaaacggaacggaatgccggatcctagctgccttgttggttttgaaggatttccatctttttacaagatgagaagttacagttcatctcccctgttcagatgaaacccttgttttcaaaatggttacagtttcgtttttcctcccatggttcacttggctctgaacctacagtctcaaagattgagaaaagattttgcagttaattaggatttgcattttaagtagttaggaactgcccaggttttttttgttttttaagcattgatttaaaagatgcacggaaagttatcttacagcaaactgtagtttgcctccaagacaccattgtctccctttaatcttctcttttgtatacatttgttacccatggtgttctttgttccttttcataagctaataccactgtagggattttgttttgaacgcatattgacagcacgctttact

SEQ ID NO: 7389 - DNA, 562 bp, Homo sapiens
acagaagggaggaagtgtttttattttccagtagtaattccgtggattccatttgacccagtttactatcagttcagttcaggtagatttggttcaacttttggtggtttttggctctaggatattcttgactttaatatcctagaacttactgagtcttcccttcaataaatacacttctcacatacctctaatcctatgcttccttgaaacaataatgctagctgagttgtttactaaggattattataagggcctgaaggtgtgggagtggagattaattaaaacctttatgttctccaatataagggaaaagcaggttggtactacttctgattaggcagaaaacaccaggattccttaattgatccttgaaatggttattgttttctgccttgtcacatttgccactgtgccctttaaaacgatgtggaaacctcaggtttgtggacagcacaggtggaatgacatcttgtgcttcctgaggctcccctctaccaggcacattagcttagtgcttcagatgtcagcccaagtccttgttacctccttttcctgctgc

SEQ ID NO: 7390 - DNA, 413 bp, Homo sapiens
ggctgctggaaacgcagttccggttaggcggctgagtttgtttacgttgctaacagatctagcccctgctttccctagttccagttccaagatggggaaatccttcgccaacttcatgtgcaagaaagactttcatcctgcctccaaatccaatatcaaaaaagtatggatggcagaacagaaaatatcatatgataagaagaaacaagaagaattgatgcagcaatatcttaaagaacaagaatcatatgataatagattgcttatgggagatgaacgtgtaaagaatggccttaatttcatgtatgaagccccaccaggagctaaaaaagaaaacaaagagaaagaagaaacagaaggagagaccgaatacaaatttgaatggcagaaaggagccccacgagaaaaatatg

SEQ ID NO: 7391 - DNA, 124 bp, Homo sapiens
tgtagatcacatgggaggacagcatcttcttccctgccatttcagatataattggagggagaatttcaggtcttagactataaggatagaatccctttgcttttgcccttgatcacatgtatac

SEQ ID NO: 7392 - DNA, 72 bp, Homo sapiens
gctgcgataagacgacagaagggtacggctgcgataagacgacagaagggtacggctgcgagaagacgacag

SEQ ID NO: 7393 - DNA, 376 bp, Homo sapiens
tcctccgtaaatgttcactcttttgtgatcattgtgccttctgtgatttatgaagtgtctcttctgagttaattcttttaaaaaaaaaagtctcctccaacagacacggacccatcagcaggtcactgcctaggatctcaacactagagatcagggagtggcatcagcctctcccttttctaaattggactgggggacggagggttgatgtcatagcaagattgcagccttcactaaattaatgaggccaggttggatcctgtttaaaagaactggagacaggaagcagcgggggaatagatggggaaagaggaaagttccttatgatgcaagatgaatagtgtgtgtgtccagccccagtgctgtgacggggatg

SEQ ID NO: 7394 - DNA, 433 bp, Homo sapiens
ggctctgggaagagagtttgacgaagattcagatgaaaaggaacaagaggaggatacatatgaaaaagttttgatgatgagtctgatgagaaacaggatgaagaatatgcatatgaaaaggggcttgaagctgctgataaaaaggcgagaagaaggtgatgcagatgaaaagctgtttgaagagtcagatgactaggaagatgaagatgcagatggaaaggaagttgaagatgctgacgaaaagttgttcgaagatgatgattccaatgagaagttgtttgatgaggaggaagattccagtgagaagttgtttgacgattctgatgagagggggactttgcgtggttttgggagtgttgaagaagggcccctatccactggcagcagctttattctcagtagcgatgatgatgacgatgatatttaatccctt

SEQ ID NO: 7395 - DNA, 99 bp, Homo sapiens
ggagccattgtggctccggccggttgcgcgggccctcggaccctcaaggtatgcgagggttcgagggcacgagttcgaggccaacctggtccacatggc

SEQ ID NO: 7396 - DNA, 464 bp, Homo sapiens
cgtctcgcaggccgtaggaggaagatggcggtggagtcgcgcgttacccaggaggaaattaagaaggagccagagaaaccgatcgaccgcgagaagacatgcccactgttgctacgggtcttcaccaccaataacggccgccaccaccgaatggacgagttctcccggggaaatgtaccgtccagcgagttgcagatctacacttggatggatgcaaccttgaaagaactgacaagcttagtaaaagaagtctacccagaagctagaaagaagggcactcacttcaattttgcaatcgtttttacagatgttaaaagacctggctatcgagttaaggagattggcagcaccatgtctggcagaaaggggactgatgattccatgaccctgcagtcgcagaagttccagataggagattacttggacatagcaattacccctccaaatcgggcaccacctccttc

SEQ ID NO: 7397 - DNA, 450 bp, Homo sapiens
ggaaatgcaaccaacacatcctatcagactgggtctggcccttaacttctctgtgttctattatgagattctgaactccccagaaaaagcctgctctcttgcaaagacagcttttgatgaagccattgctgaacttgatacattaagtgaagagtcatacaaagacagcacgctaataatgcaattactgagagacaacttgacattgtggacatcggatacccaaggagacgaagctgaagcaggagaaggaggggaaaattaaccggccttccaacttttgtctgcctcattctaaaatttacacagtagaccatttgtcatccatgctgtcccacaaatagttttttgtttacgatttatgacaggtttatgttacttctatttgaatttctatatttcccatgtggtttttatgtttaatattaggggagtagagccagttaacat

SEQ ID NO: 7398 - DNA, 562 bp, Homo sapiens
actagcatttgaaaatgaaggacaaattttgctcccttctctacaccaactttgtatgccatgggtttttaaaatgtgaaccctgcccatatattgtttctctgggcaccggccttcagtcatctaactcccttgcctcaatgaggaagtgaaactccagggctgtggagaccatgcagattccctgaataatcggaagggctcaccagtgatttcctgggtccccttcaagccttggctctgccaagccacagcttaactctgccatagcctctgactacagacagtcacagaggtttcattctccctcacctgtgcatgcacattgtcttgtctgttttctcttgctataaagggatacctgagactgggtgatttagaaagaaaagatgtggcctgggacagtggctcacgcctgtaatcccagcactttggaaggccgaagcaggtggatcacctgaggtcagaagctagcctggccaacatggtgaaaccctgtctctactaaaaatacaaaaattagctgggcatggtggcacatgcctgtaatcccagctactcg

SEQ ID NO: 7399 - DNA, 470 bp, Homo sapiens
gactcacacaggagaaaagccgtttgtttgtgcagccaatggctgtgatcaaaaattcaacacaaaatcaaacttgaagaaacattttgaacgcaaacatgaaaatcaacaaaaacaatatatatgcagttttgaagactgtaagaagacctttaagaaacatcagcagctgaaaatccatcagtgccagcataccaatgaacctctattcaagtgtacccaggaaggatgtgggaaacactttgcatcacccagcaagctgaaacgacatgccaaggcccacgagggctatgtatgtcaaaaaggatgttcctttgtggcaaaaacatggacggaacttctgaaacatgtgagagaaacccataaagaggaaatactatgtgaagtatgccggaaaacatttaaacgcaaagattaccttaagcaacacatgaaaactcatgccccagaaagggatgtatgtcgctgtc

SEQ ID NO: 7400 - DNA, 329 bp, Homo sapiens
gagctagggctaagcagttatttctttcaagtattttttagttcttaaattttatgcttgtatttgatgatagatgtcagtgacatttcatagtttcaaaagtccttgctgctctgagaagtgtagattctagtgaaaattacatagtcataagagaaatgtgtttttgtttttgtttttgtttcatttttttaaagttgtggtattattggttctatgctccctggaatattactgctttgtgaaagtccagactgaacgcagcaccctctgtgtacctagtacagttataaacctgggtctctcactacttgatatttttgcattag

SEQ ID NO: 7401 - DNA, 90 bp, Homo sapiens
tacggctgcgagaagacgacagaagggtgcggctgcgacaagacgacagaagggtacggctgcgagaagacgacagaagggtgcgggtgc

SEQ ID NO: 7402 - DNA, 55 bp, Homo sapiens
taaaaccagaattggaccttggatttttattttggcaattgtaactccatctaat

SEQ ID NO: 7403 - DNA, 579 bp, Homo sapiens; identical to SEQ ID NO: 2253

SEQ ID NO: 7404 - DNA, 549 bp, Homo sapiens
agatggagtttctctcttgttgtccaggctggagtgcaatggtgtgatctcggctcactgcaacctccgccttccgggttcaagtgactctcctgcctcagcctccccagtagctgggattacagatctgcaccaccatgcccagctaattttgtatttttagtagagacggggtttctccatgttggtcaggctggtctcgaactcctgacctcaagtgatctgtccacctcggcctcccagagtgctgggattacaggcgtgagccactgttcccagcaggaatttcttttttatagtattggataaagtttggtgtttttacagaggagaagcaatgggtcttagctctttctctattatgttatcatcctcccttttttgtacaatatgttgtttacctgaaaggaaggtttctattcgttggttgtggacctggacaaagtccaagtctgtggaacttaaaaccttgaaggtctgtcataggactctggacaatctcacaccttagctattcccagggaaccccagggggcaactgacattgct

SEQ ID NO: 7405 - DNA, 613 bp, Homo sapiens
acagaaggggtacctttctagacccatcctcttgcaatcttggaccctaagaaagatgtggagtgggctgctacctcctggcctaaatgaaagtgacgctgagtcaaactcggaagatgaagctacgttggagaactctggacttaacttacaggaagataaagaggatgagagcatcagaaaaacagaaatcatagatttctcaacagatgaaccaaaaactgaaacagagtcaaatgtaaatgcctatgaagagtgtccttctggaattcccatagatatgtggaataaatttcaagaattgcataaaaaacattctgaacagaaaagcacaacctcaagattcagagggaaaagaagaaaacgctccagaaaagataaattgaagaatgaaaaagaattacatagtgaaccgtcctcaaatgaaacccagtggaaagagcttactcagtattttggagtcaatgatagatttgacccgcctgttaaaaggaaaaaagttgaggagtcaggccttgaaaagaggatagaccaggctgtggaggagtggaatattgagaaggctgaggaactcagcaaccagctagctactcgagagcttggtgtaaaaatt

SEQ ID NO: 7406 - DNA, 594 bp, Homo sapiens
gggaccgaattcttataaagctgtcatcaacctgggaaggaattcaggctggaaaggagctcgaggagcagcacggcatccactgcaacatgacgttactcttctccttcgcccaggctgtggcctgtgccgaggcgggtgtgaccctcatctccccatttgttgggcgcatccttgattggcatgtggcaaacaccgacaagaaatcctatgagcccctggaagaccctggggtaaagagtgtcactaaaatctacaactactacaagaagtttagctacaaaaccattgtcatgggcgcctccttccgcaacacgggcgagatcaaagcactggccggctgtgacttcctcaccatctcacccaagctcctgggagagctgctgcaggacaacgccaagctggtgcctgtgctctcagccaaggcggcccaagccagtgacctggaaaaaatccacctggatgagaagtctttccgttggttgcacaacgaggaccagatggctgtggagaagctctctgacgggatccgcaagtttgccgctgatgcagtgaagctggagcggatgctgacagaacgaatgttcaatgcag

SEQ ID NO: 7407 - DNA, 448 bp, Homo sapiens
tccggcccaccctttcaaacaaatttggttgtagtttgctataataatatactaaatctatgtttatttgaaaggagcctttaccttttaaagcaaaatgcactttccttaaatataaaagtaatatggtttactttaacatttaaagttcaccttatctggggaggcagaaggaattttcatagtgcttactgtgttaattattatgagagatgaaccatatgtgataggtaaagtacatgtgtaagaaagacaaaaaaattttcctctttttataatccatgaaattcgaaaacagaaaattattcaaagaataggcaaatgtcatgacagaacttagtgtgagcaagtcattgagaattaaaatctaacttttcaggtcagagagccttgaaatacttacaataaagttataaaggcctaggtatttttctttcttttttttttt

SEQ ID NO: 7408 - DNA, 581 bp, Homo sapiens
gaaggcccagacggctctcagatccgggggctgcggataaatccccgtaggccgcgggcagcgagatgttgcgttccggtgtgggtgtgggtgtgcctccgacggcgtctcggtgccagtgtcgaggttctttctgcttagctacccggagccgactacggaggaggacacctgagtttacgtctcttccatctgctgctcacctcagctgcctgggtccccgacgagagccaggtgacacttaactccgccatctgcgttttgagcactgttctcataatggagtttcctgatttggggaagcattgttcagaaaagacttgcaagcagctagattttcttccagtaaaatgtgatgcatgtaaacaagatttctgtaaagatcattttccatacgctgcacataagtgtccgtttgcattccagaaggatgttcacgtcccagtatgcccactctgtaatacccccatcccagtaaaaaagggccagataccagacgtggtggttggtgatcacattgacagagactgtgactctcaccctgggaagaagaaagagaagatttttacataccgttgctc

SEQ ID NO: 7409 - DNA, 504 bp, Homo sapiens
atgagtacgatttcaatagactgttcagtttttaatattagccatagcactggttagtatatctcagtagtttcatgaaacgtttcctgtattctaatctatttctgaaacattttgttttttttaattgtgtcttacagtcaagtttgtagattttcataagccacaattttaaatgatgcagtaatcttccaacttccaatatttatccattcgttgtggacccacagattgcatctttaaattcataataagtttccttaactatcttatgtttctagtctttcaagcttagtgataaggtggaagcacaagaaaaatttcagtagaatacagtttttattttgtaaacactaatgtattaaacttgctatacattaaagcaaataatatatatttttatttgaattgtatatgtgaattggaagtataattagttgattttttcattttgttagaggtattttcactgaacaaggtcaattggttacctcagtattacag

SEQ ID NO: 7410 - DNA, 118 bp, Homo sapiens
gctttttcgcaacgggtttgccgccagaacacaggtgtcgtgaaaactacccctaaaagccaaaatgggaaaggaaaagactcatatcaacattgtcgtcattggacacgtagattcg

SEQ ID NO: 7411 - DNA, 225 bp, Homo sapiens
gttccccccaacactcccttttcttttgagacagagtctcactctgtcacccaggctggagtgcagtggcacgatctctgcttactgcagcctccacctcccaggcccaagtgatcccctacctcagcctcttgaggcactgggactagaggtgcatgccaccatacctagctgatatttgtattttttttttttttggaaaaaccagggttttccctttttgcc

SEQ ID NO: 7412 - DNA, 422 bp, Homo sapiens
ttactctgtacatattaaccttcactattcagatgaactacaactggaactggatctaggatatagggaaatgaaggaaagggggcgttggaatccagtagacatgggttggaacccaaactccagcaattgacagctgtatgcatggacatatttattgtttctccttaaaaagatttcctttttatttaaaggacttgaaatgccttttagttgtgcctgtaaagactgtgaatcttgcatttgcctgtgatccttagcagtagggtaagcccacatctggcatatgtgctggccaaaattaccctgaataagtgcatgacaactctcaatctgtttcttctttctgtaaaatgggaaagcgggcattgtactggacagttttaaggactctataaaaccatgtaggcaacataaaaaat

SEQ ID NO: 7413 - DNA, 430 bp, Homo sapiens
gatttttctgctagacagataacttttaatttttcaaatttggcagacactttttttttttttggaaaatttttccttccaaatatgggggcccaatgaaaaacccccccgcccttaatggccggggggcccaatgggccggggggggggggggccataagggggggagaaccggaaggggctttagggtggggtaaggggcgggccttttttgggggtgggcccatttttaaaattttcaccctttttttaaaaatttcaagggccgtttaagttttttacccaaaaagggcggcctttaaggggaggaatggggaaaacaaaacagggggagggaaaaccctgcgggttaaaatttccacggggggggcaaattttttttccggggggagggggaaaaaaaaaaaaaaactttttttaaaaaaaaaat

SEQ ID NO: 7414 - DNA, 521 bp, Homo sapiens
acagaagggcaccatcaccacgaagtattgaaaatctgttttctcttttactaagtgtctgcacggtcacttatgtatacccaaagccagaaagatatttttatctcagggaaattccagaaatggaaacatttttgtgtaatattgattcatttctgtctcaccaaagatgtgttttccacgtagcaaagaacatcagccccacgttatagggaacaagcgagtcccaaatcgtaccatctgctgagcactgagaaaggatatggacaagtcagtcagcattcacaattaagagaaaaacatctgtgctttggaaaatgttcttcaaggatagagaattgtgccctatgtccaccaaatttgcatgagatctttataagattagacagccagtggataaggccccttatctttcttcatggatggctgaggaaattctccgccttccctgacatcagctgcataactgtatttctgcctcgtggaaataaagtagatgatcaggcacttgcggtttgttc

SEQ ID NO: 7415 - DNA, 451 bp, Homo sapiens
ggtacacacacaccggcatgtttatacacagggagtgtatggttcctgtaagcactaagttagctgttttcatttaatgacctgtggtttaacccttttgatcactaccaccattatcagcaccagactgagcagctatatccttttattaatcatggtcattcattcattcattcattcacaaaatatttatgatgtatttactctgcaccagtcccatgccaagcactggggacacagttatggcaaagtagacaaagcatttgttcatttggagcttagagtccaggaggaatacattagataatgacacaatcaaatataaattgcaagatgtcacaggtgtgatgaagggagagtaggagagaccatgagtatgtgtaacaggaggacacagcattattctagtgctgtactgttccgtacggcagccactacccacatgtaactt

SEQ ID NO: 7416 - DNA, 121 bp, Homo sapiens
atttcaacagaaacatacataaaacaaggtgtattgttttgttttgttttgtttttgagacggagtctctctctgtcgcccaggctggagtgcagtggctcaatctaggctcactgcaagc

SEQ ID NO: 7417 - DNA, 493 bp, Homo sapiens
gatccgaacctagtgaatggtatgcttgggtgttttccattgagagcggatggacctctttataaagttggttgctgcaaaatccagttcttccaaaagccactttatttagggtttattcacaagtcatatccattttggtacagtgtttgtttcctaatatttattaaccaccttataccaaatgtcttgcaaagaaatgttattaaaaccttgaatttttacaaatgtaaaaaacaaaaagtgtattaatgtatttgttcaggaaaagctacataccgaagggcttttgtatatgaattctgtggtggggagacccatttgtaatctatatggcagttccatctgggttttaagtttagatttcaccgtgtcttagtgcttcattctattggtttattggaacatgtaataaataggagtagtgatgtattaaaacacaagtattcattaatgttttatatcttcactaaaattctatagttatgaaact

SEQ ID NO: 7418 - DNA, 603 bp, Homo sapiens
gacagaagggatcctccctgaccctgctcctagcaccctggagagtgcacatgccccttggtcctggcagggcgccaattctggcaccatgttggcctcttcaggcctgctagtcactggaaattgaggtccatgggggaaatcaaggatgctcagtttaaggtacactgtttccatgttatgtttctacacattgctacctcagtgctcctggaaacttagcttttgatgtctccaagtagtccaccttcatttaactctttgaaactgtatcatctttgccaagtaagagtggtggcctatttcagctgctttgacaaaatgactggctcctgacttaacgttctataaatgaatgtgctgaagcaaagtgcccatggtggcggcgaagaagagaaagatgtgttttgttttggactctctgtggtcccttccaatgctgtgggtttccagccaggggaagggtcccttttgcattgccaagtgccataaccatgagcactactctaccatggttctgcctcctggccaagcaggctggtttgcaagaatgaaatgaatgattctacagctaggacttaaccttgaatggaaagtcttgca

SEQ ID NO: 7419 - DNA, 396 bp, Homo sapiens
ggtggtgtcagcatcctggtgtttggtcattctggtaggcgtataatggtctctcattttctttttctttccttttttttgaggcggagtttcactcttgttgcccaggctggagtgcaatggcgcgatctcggcttgctgcaacctccgcttcctgggttcaagcgattctcctgtctctgcctcctgagttcttgagattacaggcacctgccactacgcctggctaatttttggtatttagagatggggtttcaccatgttggccaggctggtcttgaactcctaacctcaggtgatccacctgtctcggcctcccaaagtgctgggattacaggcatgagccatcgcgcctggctgttttttgtttttgttttgagagtgcaccactgcacc

SEQ ID NO: 7420 - DNA, 503 bp, Homo sapiens
gacagaagggctgataaagacatacccgagactgggcaatttacaagaaaaagaggttttatggacttacagttccacgtggctggggaggcctcacagtcatggcagaaggcaaggacgagcaagtcacatcttacgtggatggtggcccgcaaagagagagcttgtgcagggaaactcccctttttaaaaccatcagatcttagccgggcacggttctcgtgcctcagcctcccaagtagcagagattacaggcatccgccaccacgcccggttaatttttttatttttagtagagatgggatttcaccatgttggccaggctggtctcgaactcctgacctcaagtgatgtgcctgcctcagccttccaaagtgctgggactactggtgtgagccactgcacccaacctctttccagtactcctgccatgagtaagaattttggaggtgtgttggggacctttgtagcgcaaggattcttgtagatctgctgacagattc

SEQ ID NO: 7421 - DNA, 67 bp, Homo sapiens
agacttttttcagataacatcttctgagtcataaccagcctggcagtatgatggcctagatgcagag

SEQ ID NO: 7422 - DNA, 563 bp, Homo sapiens
gctttggggagtggtctatgtggccaaatattgtgtgtatagacagaatttgaaatcaagtcctgcttcatttacaagaattttggtgggcatctaatcctacataatgaaaaagaaaaacagaccatttaaaaactcagacaagattatatttaatatattaattactaaaaaggcacaagattacactgaacatattagctactaaaaaggcactgctaagacattcaagcaaatagctattacacactactgcagattttacaggtttctaattctaacatatgtttgaaaaatccgtgagtattccaaaatatatttaataatggaatatctgcattaatataccatccatgtgtttttaccatttgccttaatattgaatatactgtttacctcacactaaaaagaaaaccagaagccttatttgtgattttgggagtggaagcttccatttttgtgtcaaaaatgaatcctgattcttatggaaatctctgttattaagatatttcaagatgagacaacactgaagatcaaattgtgtttagtatcactatcttctc

SEQ ID NO: 7423 - DNA, 408 bp, Homo sapiens
gggagtgcaaaactctcctatagctcctatacaagtccaggatttgctattagactccttgaattatgtgcccagctctgagccaatggctgtgcttaggaggctcctgtctcatgcacccaccccagtactgggcatcagaaacaaccagtgatccctataatgaaccacgggttcacagacttaagtgtaatcctgcagcagggcctcaggaagacttgaaacccaaaatcagaaagccatggtttcttgtcttcctggtgtctgttttgtcccttccctctgtagaggagtcctgctatcactgcaggcaacggggctgccctgcagctcctgctgtttacatttcactcggtgtagccataggcagagacctcagggagaacctgattcggcttggattgagtc

SEQ ID NO: 7424 - DNA, 289 bp, Homo sapiens
tgcctgtaatcccagctacttgggaagctgaggcaggagaatcacttgaacctgggaggtggaggttgcagtgagccaagatcacgccattgcactccagcctgggcaacaagagtgaaactccgtctcaaaaaaaaaaaaaaaaggttttaatttttttcaaggtaatttttcaaacccttgtccttgggccaaaaggttttttttaaaaggggggttttccaaaaaaatttttgaaaaccggtttttttagggttcttttaagggtttttggggaatggggggggga

SEQ ID NO: 7425 - DNA, 469 bp, Homo sapiens; identical to SEQ ID NO: 2261

SEQ ID NO: 7426 - DNA, 290 bp, Homo sapiens
atcgtagacatgaaaggattcacacgggagagaaggcttatcaatgtaaggaatgtggaaaagcattcacgtgtccccagtacgttcgtatacatgaaaggacccactctaggaaaaaaccctatgaatgtacgcagtgtgggaaagcattatcctctcttacaagttttcaaacacacataagaatgcactctggagaaagaccttatgaatgtaagatatgtgggaaaggcttttgttctgccaattcatttcaaagacatgaaaaaactcacagtggagagaaaccc

SEQ ID NO: 7427 - DNA, 296 bp, Homo sapiens
ggaattgtatggtatttgagtaccgcctaggtgaaaagctgtttttttttttgaaacggattctcgttttgtcccccaggctggcttgcaggggggcaattttggttcattgaaagctccgcctcctcggcccttgccgttttcctgtctcggcctttcaagtacctggaactacaggcccccgccaccacgtcgggttaaattttttgtatttttagaaaaaacagggttccaccgtgttggccaggatggtctcaatctcctgacctcgggatccgcccgtctttgcctcccaa

SEQ ID NO: 7428 - DNA, 221 bp, Homo sapiens
gcagtaccagtggcagtcattggtcatcccctcttacattctacaagaaatatgcaccatgggacttaaacttgactaggatgcgtgccttgatgaactcaatctctggcaaagactcactgggttgaaggaaacatgaagggttgggaaagggaagcacaacaaaacaaaggcagtggaagtaaagtgcaagccagggagaaccaagcccaaatttgtca

SEQ ID NO: 7429 - DNA, 432 bp, Homo sapiens
gagacgagatctcgatcgaaggcgagatggcggacgtgctagatcttcacgaggctgggggcgaagatttcgccatggatgaggatggggacgagagcattcacaaactgaaagaaaaagcgaagaaacggaagggtcgcggctttggctccgaagaggggtcccgagcgcggatgcgtgaggattatgacagcgtggagcaggatggcgatgaacccggaccacaacgctctgttgaaggctggattctctttgtaactggagtccatgaggaagccaccgaagaagacatacacgacaaattcgcagaatatggggaaattaaaaacattcatcccaacctcgacaggcgaacaggatatctgaaggggtatactctagttgaatatgaaacatacaaggaagcccaggctgctatggagggactcaatg

SEQ ID NO: 7430 - DNA, 602 bp, Homo sapiens; identical to SEQ ID NO: 2265

SEQ ID NO: 7431 - DNA, 572 bp, Homo sapiens
attaaacgctattgtcattaaagaaaccaaagattgggatgcttggaaggtgtgtctacgacttcgagataatggacttctggccaagccaacccatggcgacattatcaggtttgcgcctccgctggtgatcaaggaggatgagcttcgagagtccattgaaattattaacaagaccatcttgtctttctgagggtagccagctgttttcagtggtccctgggagccagctggagacaggtggtcctgtaaaagctttattcctaatgtgggcacattccactcccatgagtcttcaaaaactttttttttgaatatatttttttcagttgatacataatagaacaacgtttatgaacctgccgtttgctttgtaacgtaactaaataatgtaatggcatctatattcagttgaagtgttttgatgtgcatgtgtacttcctaaggtgaaatgcatctatatacagacagcctctaaatcaagtccttcagtataattgatatatgtttttataatttcctcactggtataagtgtttcatatttgaaaaaagtatctctgggtattgcat

SEQ ID NO: 7432 - DNA, 206 bp, Homo sapiens
gcccagctcctctgtggcaatgacaccaagatctcggagcagcccgtggttgtgcagagtacatgcacagacggacgtgcattccatttcctggtgttacagtagaacaccacagacctggcctcttaacaagtgtggcaagagtttggtctgggtggaatcatgccagctactctctcagcatttttggtgtctcccagtgataa

SEQ ID NO: 7433 - DNA, 273 bp, Homo sapiens
agtcctcgtcgtagcagtggggatggtgggaattcccagccccatcttctcccaggggtagtgacctgccacttcctctacagcttccgttcgggaattcacagggtctagtctgggactgtctaggcagctggaggaaaaagagggagctaagagtacaggaaaggatgggatgaaaataaccaaaaagaagattcacacttcttttgtttaaatttttatttttatttttatttatttaggttttggagacagggtttcgctctgtcaccc

SEQ ID NO: 7434 - DNA, 487 bp, Homo sapiens
atgagagagaccctggaaaaacattatggaaataagcctataggaatgggaggtactttcataattcagaagggaaaagtgaagtctcacattatgcctgcagaattttcttcctgccccttgaactctgatgaagaagtgaataaatggttgcatttttatgaaatgaaagctcctttggtttgtctaccagtttttgtctccagagacccagggtttgatttgcgactggagcacactcatttttttagtcgtcatggagaaggtggacactaccattatgacactactccagatatagtggaatatcttggatacttcttacctgcagagtttctctatcgcattgatcaaccaaaagagacgcattcaattgggcgagattaaatcagctgatacttatttagaaaaagaaataattaaggttaattaattgattgacttattaattaatactgatataaaaccaatagaaatgatcccacag

SEQ ID NO: 7435 - DNA, 468 bp, Homo sapiens
agtgacctcaaagcagagttgatgacacaggctttggggccctcatgttcttgtctttagaacatatcactactaagtatcagcttatcttcagaacattacaacattcaccgtgttcatatgctttctgagaagtcaccacttgtaatttcagatcacatacacctgaaggcattttatagttcctaaagttaacatgttagatcttttttttccaccccatgagggtctcactctcacccaggctggaatgcagtggtgtgactgtagcacactttggccaccaactcctgggctcaagtgatcctcctgctttggcctcctctgagaagctgggattactggtgcacaccaccacacctggctaattttttattttttttatttttggaaatagggtatggctatgttgccttgggcccgtcatgaactcctggcctcgggtgaccctcccgcctcaggcctccc

SEQ ID NO: 7436 - DNA, 412 bp, Homo sapiens
gggcgtccgccgcctccggaactaaacggggtgaggtcacattcggttatctctaacgttggaaaacgatggagctaacacccattatggagattaaccacttttcatcagttttttaacttaagtcgtgaggaatacaacggtgaacacaagattcattttattttcatcaccatgggacgtatcctgttgttgagttctctgggtcagacctctgaagacttctcagatggatcctagtctctgggcttgccctgaaattactcgctgctcagggagagagttgaaatggttggcatcctcccactctgttgctccggccgtgtcccctcgctctgttgttccagctatgtcccctctgttgctccaactgcagctcattctgttagagttcctcattcagctggtcact

SEQ ID NO: 7437 - DNA, 541 bp, Homo sapiens
catgttatcagccctctgttggatatctactttcctgaaggatctggtgttaagataatttcagaacccggaagctactatgtgtcttctgcatttacactcgcagttaatatcatagcaaagaaagttgttgaaaatgataaatttccctctggagtagaaaaaaccggaagtgatgaaccagccttcatgtattatatgaatgatggtgtttatggttcttttgcaagtaaactgtctgaggacttaaataccattccagaggttcacaagaaatacaaggaagatgagcctctgtttacaagcagcctttggggtccatcctgtgatgagcttgatcaaattgtggaaagctgtcttcttcctgagctgaatgtgggagattggcttttctttgataacatgggagcagattctttccatgaaccatctgcttttaatgattttcagaggccagccatttattacatgatgtcattcagtgattggtatgagatgcaagatgctggaattacttcagactcaatgatgaagaacttct

SEQ ID NO: 7438 - DNA, 411 bp, Homo sapiens
acagaaggggcctccttgcggtttcctttcgccgtttccgaaccgagggattgctactcgcctttggcttggcggtctctgtgctcgggggtccgaaaactgctggaaggcccccggtctctggaggggagcaggcggtagcgagtttagtgacgtggagcaggcgcagaacagtcggagatttgaagagatttcctgggtgtggagtgtgactttccaaaaccagcttttccttgagctgtatttgttgtagcaatgtttaggagattgacttttgcacaactgctttttgccactgtccttggaattgctggaggagtatatatttttcaaccagtatttgaacagtatgccaaagatcagtaggaattaaaagaaaagatgcagttggtacaagaatcagaagagaag

SEQ ID NO: 7439 - DNA, 134 bp, Homo sapiens
gtttcaccatgttggccaggatggtctccatctcctgacctcgtgactcgcctacctcagcctcccaaagtgatgggattatgggcgtgaaccactgtgcctggctacactggtatttctatgtgtgtgctacc

SEQ ID NO: 7440 - DNA, 454 bp, Homo sapiens
tgcagattctgagacaacagattgccaatgaattaaattattcttgtcggtttgattctaaacatctggcagctgctctggagaatctcaataaggctctcctagcagacattgaagcccactatcaggacccttcacttccttaccccaaagaagataacacacttttatatgaaatcacagcctatctggaggcagctggcattcacaacccactgaataagatatacataacaacaaagcgcttaccctattttccaattgtaaactttctatttttgatcgctcagttgccaaaacttcaatacaacaaaaatctgggaatggtctgccgaaaaccgaccgacccggttgattggccaccacttgtcctgggactgctcactctgctgaagcagttccattcccggtacaccgagcagttcctggcgctgattggccagtttatctgctc

SEQ ID NO: 7441 - DNA, 540 bp, Homo sapiens
ggccggagcctccgctgccagcgacatgttcaaggtaattcagaggtccgtggggccagccagcctgagcttgctcaccttcaaagtctatgcagcaccaaaaaaggactcacctcccaaaaattccgtgaaggttgatgagctttcactctactcagttcctgagggtcaatcgaagtatgtggaggaggcaaggagccagcttgaagaaagcatctcacagctccgacactattgcgagccatacacaacctggtgtcaggaaacgtactcccaaactaagcccaagatgcaaagtttggttcaatgggggttagacagctatgactatctccaaaatgcacctcctggattttttccgagacttggtgttattggttttgctggccttattggactccttctggctagaggttcaaaaataaagaagctagtgtatccgcctggtttcatgggattagctgcctccctctattatccacaacaagccatcgtgtttgcccaggtcagtggggagagattatatgactggggtttacg

SEQ ID NO: 7442 - DNA, 291 bp, Homo sapiens
tacggctgcgagaagacgacagaagggtacggctgcgagaagacgacagaagggtacgggtgcgagaagacgacagaagggtacggctgcgagaagacgacagaagggtacggctgcgagaagacgacagaagggtacggctgcgagaagacgacagaagggtacggctgcgagaagacgacagaacggtacggctgcgagaagacgacagaagggtacggctgcgagaagacgacagaagggtacggctgctagaagacgacagaagggtacggctgcgagaagacgaca

SEQ ID NO: 7443 - DNA, 54 bp, Homo sapiens
gattttaaacatgtaaatacaaattttgtataacttttgatgacttcagtgaaa

SEQ ID NO: 7444 - DNA, 569 bp, Homo sapiens
gacagaagggtatcaccagtattattaccaagaaaatattgagtttacctgattaaactttaaaagttaattgtagatttaaattgtgtgaacctaatgatttttgcagtgaaacctttactaattcaaagttgcatgttctatgacatctgtgacttgcgttgcagagtgtacatgaaactgtataattgagtcattcagtaaaggagaacagtatcttggttaattgctactgaaaggttgagaaaggaatggtttgatatttaccacagcgctgtgcctttctacagtagaactggggtaaaggaaatggttttattgcccatagtcatttaggctggaaaaaagttgaaaacttaacgaaatattgccaagagattgttatgtgtttggttccagcctaaaaatgattttgtagtgttgaaatcatagctacttacatagctttttcatatttctttcttagttgttggcactcttaggtcttagtatggatttatgtgtttgtgtgtgtgtagtttatcctctctctcatctttatctagagattgactgatacctcattctgt

SEQ ID NO: 7445 - DNA, 513 bp, Homo sapiens
cttaagttctccattttaatttatcccgtatgtgagatgaacatttctgtatgttatttgtgttgatattataaagttcattattcttatcagtaaagttcaaatgtcatatctggctttataatgccttttctaattcgaatggtagatgccaaatacattttgaaagacttttaaattttttgcttggtaaaataatgctgaggaaaaaatgttttgcacaattattaatctctaatgttaactcccaaaatactcacccaatcaaagaaacatcagacaaactcaaattgagggacattctcaaagtaatctgccccttcaaaaattaaaaatttgcctggagtaatttgttcttgagaaaatattaacaaacgtaataggttaaaggagattaaagagccatgagaacttactgccatacatgatcctgaattggaaacaggaccaaattctattcatacttgtatttcattcattctctcattcatttatgatataaagaacattaat

SEQ ID NO: 7446 - DNA, 275 bp, Homo sapiens
tcagactagcaagccctgcctcagcttttccccaacatggaacgctgttctaaaagcacccatgattcttttttttcttttttttcttttttttttttcaaaagggattttcctttttgtggctaaggcggaagggcaaggggggaatttgggttaattgaaacctccgcctccggggttaaagcaattttccggcctaaccctttgaagtagctgaaattacaggcttaatccgtggttcccacccccccttgttttccggatggaaaaaattg

SEQ ID NO: 7447 - DNA, 439 bp, Homo sapiens
acagaggggttcggcggccttggcctgttgcttcagcctgagctcggttagggcctcacttccctgcttccacacctcagggaggcctcggtgattttgccagagcctcagcctccatcgctctgtaacctgcgggtattggattgattcgtagctaagacttcgcgacacccttgaagctgagaaatggaacccttaacattcagggatgtggccatagaattctctccagaagagtggaaatgcctggaccctgcccagcagaatttgtatagagatgtgatgttggagaactacagaaacctggtctccctagagtctcactctgttgccctggctggagtgcagtggcgtgatctcggctcactacaacctctccctgctgggttcaagcaattctcctgcctcagcctcctgagtagctgggattacaggtgcg

SEQ ID NO: 7448 - DNA, 584 bp, Homo sapiens
attttacattgcctttcctagttcatgctggtgctgccttcgtccatgcttgtgagtggaatccccatgctgtagttgctctgagaaataaccttgagatcaatggagtagcagatcggtgccaaatacactttggagataacagaaaactgaagctctcaaatattgcagatagggtgatcctggggctgattcccagctctgaagaaggctggcccattgcccgccaagtgttaaggcaggatgctggaggcattttgcatatccaccaaaatgtggaatctttcccagggaagaatcttcaggctcttggagtcagcaaagtagagaaagagcattggctgtatcctcagcaaattaccaccaaccaatggaaaaatggagctaccagggattctaggggaaaaatgctgtcaccagccaccaagccagagtggcaaaggtgggcagaatctgcagaaactcgaatcgccactcttcttcagcaggtgcatgggaaaccatggaagacacaaattctgcacatccaaccagtgaaatcctatgctccccatgtggatcacatagtcctggatctggaatgc

SEQ ID NO: 7449 - DNA, 335 bp, Homo sapiens
ctctccttgctggtttcatttgctcttatggcagacagtgtgctctggtggcgctggaagatgttaaggcgtatctcactgaggagaatggtcagattgcggtaagctttatctgctgcttcttctttctggtccccacccttgcagcagcctggctacccagccccaccttgagtctgccctggtggggttctgtttctctgttcctgctcatttaccttgtgtactttcttcacaggtgtttgatgccaccaatacaacccgggagaagagggacatgattttgaactttgctgaacagaattcctttcaggtaggatctgactccatgttgg

SEQ ID NO: 7450 - DNA, 388 bp, Homo sapiens
agactgggtatacagttttctccacatcaattttcagcatagggactctttcattattgccaaaagaataaaacctctaacattaccagcagacggacacactctgacagtaccaaacaatgcctctattttgcataaatatttcctgaaagctgtttgtcatctaagtcactccttgttctgggtaattgctataatcctttgctaagtatttcctgagtcttgtatctgacatcatgtttctacctatgaccaataaaggtgtatgccactcttttcagtaggagcttaattatagtgattactaagttttgctgtttagcaaaacttaacacaaggaacactcattctgctttcccccttttcccaaagccattcaccatgttgc

SEQ ID NO: 7451 - DNA, 562 bp, Homo sapiens
gacagaaggtggcctcagttttcagggacccttggtgttgctccttacctagagcccattaatctaccccatcaactctctgccatgaaagccatcttccaggagccctgttttttggagctgaactgcacagattatagctgctattgtacttaaataagggagaggaaaagaaggttctcaggcacagactttctatttttctcaagccaaaccagtttaaaatgtctagcagaatgaactgtatttccatttcttcatgtctacctgccttccccccacaccctaaagttgtacttgtttctagcaaactagaaggaaaagataggaaagcctggcactactaacctcacctctcatacacctctttgaaggccccagctcttttgttcaggcctctcttctcccctagactcactcagcttggtatccatcatcttgagcattcttcagtagattcatctagggttcagattccagactctcagctgaagacagggagccaatttcccccaggtccctgcaggtaatccagggaccccatagggagaacaggctgact

SEQ ID NO: 7452 - DNA, 50 bp, Homo sapiens
gatgaaactgacttttgtcttttggagaaaaaaaactgtactgcttgttc

SEQ ID NO: 7453 - DNA, 90 bp, Homo sapiens
gactttaaaaatcagtctgataagtctttgataagtctaataataataactgataagtccattgaatttgcttctgattactttttcttt

SEQ ID NO: 7454 - DNA, 348 bp, Homo sapiens
acagaagggatgttttgattacttagggaagattcctcatttttatttgccctttatgcatttaatccacatgataggacattaaaaattaatataaagaaaaatcgtgctcatactgtacatctgtttctgtgcttggaactacttgttaatagtttttatcgaagctgtcagcaataagggacataaaactgctgtattatacattgtggaattgaataaacagcctaatttttttttttctagtatagggtacttaagcatttccacttttggaagaaaagtgtattagtattttatattgcatttcatttaaaaggacagtttttttttttttggaaaaccctt

SEQ ID NO: 7455 - DNA, 551 bp, Homo sapiens
  misc_feature 481: n = A,T,C or G
acagaagggatctctagcatagaatctccccttagaacccctagtagactgagtgatgggctagtgccttcccaggggaacatagagcattccgcagatggacctccagtcgtaactgcagaagacgcttccttagaagacagcaaactggaagactcagtgcctttaacagaaatgcctgaagcagtggatgtagatgagagccagttggagaatgtatgtctgagttggcagaatgagacatcaagtggaaacctagagtcctgcgctcaagctcgaagagtaactggtgggttactagatcgactggatgacagccctgaccagtgtagagattccattacctcatatctcaaaggagaagctggcaaatttgaagcaaatggaagccatacagaaatcactccagaagcaaagacaaaatcttactttccagaatcccaaaatgatgtaggaaaacagagtaccaaggaaactctgnaaccaaaaatacatggatctggtcatgttgaagaaccagcatcaccactagcagcatatcagaaatctct

SEQ ID NO: 7456 - DNA, 591 bp, Homo sapiens
ggccgcgggagtgcgccagcgccgcgcgtggggctgtggtggccgcggctctcaaatatatttttgccatcatggatcagtttggagatatattagaaggtgaagtggaccattctttctttgacagtgactttgaagaaggaaagaaatgtgaaactaactcagtttttgacaagcaaaatgatgacccaaaggaaagaatagataaagatacaaaaaatgtaaattcgaacactggaatgcaaacaacagaaaattatcttactgagaagggaaatgaaagaaacgtgaaatttcccccagaacaccccgtagagaatgatgttacacaaactgtaagttctttctcattgccagcctcttcaagatcaaaaaaattgtgtgatgttacaacaggacttaaaatacacgtgtccattccaaatagaattcccaaaattgtaaaagaaggtgaagatgattactacacagatggagaggaaagcagtgatgatgggaagaaaaccatgtgaagtccaagtccgctaaaccatctactaacgttaaaaaaagcataaggaaaaagtattgcaaagttagctcctcttcctc

SEQ ID NO: 7457 - DNA, 119 bp, Homo sapiens
ttgaggctagtctggaacctttcattagagcaatatttggttattgcacttcatttttatttactaagaaatgcaatttgggaatttttaatctgttatgctttgtttatcaaccttga

SEQ ID NO: 7458 - DNA, 424 bp, Homo sapiens
caaaggaagacacagacggtcaaaaacgaccccatccgctcctagggtttctaattcccgtgacgccagaatgccttgagcacacatggaacttgccacactgagtgtctgggtccaaggaactgctgccctcccttccttctacttaactctgttcccagaaacctgatggtcaatgccagatcgctccccactgccgccagttcttgtgtgttgttggttcatttgcggttttcagcagtcagtgcctctctatccagtagaatagtgtatggacgtagcgaagggatgaaacagagaagttgcataacccagcctctttgatcatgttagaaatcacatcctcaggtctttccagcggagctccttcatggtcaagctctaagacacaacgagctctgttattcaagaaatcaattccagt

SEQ ID NO: 7459 - DNA, 519 bp, Homo sapiens
ttcggcacgaggttttgcattgccatgattttattattagtgtccaaaagggactcccaagtaataaatgatttattccagccacagccaaaaaagactttgcctggctaaaagagtctctctctaagtatgtaatatacaagaaatacaattcaaagagatgttcctataagtacattttttacacggcatatatttaaaaaggaggccccttttaatataaaattccggttatataccaatatggttaattagcatttacactatagtttgaacgtattttaaatagcatgatgtgtatacaatgtctcccgcgcccattggcaaccagggtcgtgggaagcttggtgaggagttaaccaggtcctgtggtttaagcagtggagcacccgggattcctgcccccctttctgctcacacaattgcactccattcttccgccttccttgttttctccaaaaccacctgataggggggatgtcctgatttctgaggtgtgcttctcatcatgactgcttc

SEQ ID NO: 7460 - DNA, 229 bp, Homo sapiens
ttcggcacgagggtgaccttgaccttgaccaagtctgtcctgtttaggactgatttttcctattaggctagggtttggacctgatgttctcaagatgtctagaattgcatggctggccttgtggaatagatggttttgcattccagccaagtgtgctgtaaactgtatatctgtaatatgaatcccagcttttgagtctgacaaaatcagagttaggatcttgtaaagg

SEQ ID NO: 7461 - DNA, 81 bp, Homo sapiens
aacgttttttttttttttttttgggcagggaggattttttggggggggggaattttgtttcccaaaaaaaaggaagggggg

SEQ ID NO: 7462 - DNA, 727 bp, Homo sapiens
gaataagcttgcggccgcaggaattttttttttttttttttgtaggtacaataaatctgattgatttttattacacatcttagtttagaatcacttttacattcctagacaaagagatgatacaaataaatatcaattgtaaaacttagagccccaagtattgattggcgtattctttgtctaaaggtagccaaagagaaggtcaagatcagtaataacttcaaggagccatgaagcccactgcctcctgcctgccccaggatcactcctttcataaataaccccagaagcatttcattcaggaaacaagggcaggcagaaaggtgacagatttctgaacagtacaaaacaaagccttgcgtgatagacaatcaccaggcccactattcttagccagttccctcagagcatttttagtatggcttttagagtatattaacagccccattttcgtccactgatggggttcagatggtctgaggtgttgtctccagtacgcctcaacctcaagtgggaaatgtgaggcagaactgatatccatgttaacagggaatcgacacttctcagaaacttggcaacgattctacattcagtgagggaggacttgtcagagtcagacaggaaaagcagagagcggcccacgccccagttgcagcactctggcgcccttggtcatggaggtgtgggtggagcaattcaagcagcatgcaggcattggacgggaaat

SEQ ID NO: 7463 - DNA, 487 bp, Homo sapiens
atctttttaaaaatatgtatttcagttgcacatgaaatgtactttgaaagaatgagctccaaagttctggggggctgagacaggcgggctgagtgaaatgatgaagaaacagtggctttcagtgcgggccaagagagtagtgagcaatggtcagttattgagctgtggagtgccttcaacaagggtttttagacacatccatctggtgcctcatcccagaacctcacaggcctagggacctgaaatgctccccatgacaaggcaaacttcatatcctcacatgctgagacagactcaactttcagtctggaactgggctgggtgtctgtcagtccacgccacccatatccggagtacatcagagtctgggttcagtggcagccactttcgctgccctctcctgccccacacctagcgctctgcctggcccctttgctgtgggcgtgaaaatctggcacccgggccgacagggagagagctcagtctg

SEQ ID NO: 7464 - DNA, 625 bp, Homo sapiens
agcttgcggccgcgcccgtgcacgagcagtccctggggtctgtagtggcctctggagagcccttctccccaggccaggcgggaaggcccccgctccggcctggttgaagtaggggaacgggtcccaacgcggggccgactcccttgaccctctgacttgctggcttcccttgttttacagtcctcggcctggcggaagttttgcatgttgtgaagacccctagtctttcattctctccttgtcacagccttgtagggcgtgaaggggtcattgccccatttagggatgcgcacctcctgatttcccgtccactgctctgcgccctgaagtggctgaaaagtgctcttaaaaggatgggaatcccgtcgccctcagctggtgcgctctccactgggtcgtggggctcctcatttcatcctaagtgagcccctccatcacctgtgtgttaaggaggcatttctttcccatcagtaaacacatttcgcctcttcggccgaggtaggaatataaaaggcccctggcctacccaagttttggtccagcaggggagccaggccgggaaagggccaagccgccacactcggcttgtggggcggtgtggtgccgtgatgcagctgtgggtttg

SEQ ID NO: 7465 - DNA, 53 bp, Homo sapiens
tttcatatatagcatgttgcctgtatgcagttgaactatataaagttcattgc

SEQ ID NO: 7466 - DNA, 96 bp, Homo sapiens
gtttctaaagttgcacctaaggaatctgtcacattttctgttgaatcatggtttttgtttttgtttttaacagatattccttctgatacggacttg

SEQ ID NO: 7467 - DNA, 488 bp, Homo sapiens
ggctgtctttgttccagcactgttcaggctgcctgtcatcccgggcctgccagctcccctgagtgatgagcacttccaagcacccctctgccctttctctgtccttatgctgtcccggcctcgccagccctctggggcattgtgggagatgcctgccaggaatgagcaagctctgttgctcgggagcctcttgtcaccttcttggacttattccccacctgataccttatagagaaaagtgtgaattcaggtggagagtaggcccaggccccatgaggcaccagtggaagcacagctccaagttcagacaggtgcccttagagaggaaaaccatgacaggcaaatgcatttcctctggagtttgagaccctgacaaacaacaggtggcatctggtgtgctgttcttgagttttcgtttaagattagttgagttccagctgggttttgggagaaaggagatgctaccaagtcttggatgttagggcgag

SEQ ID NO: 7468 - DNA, 557 bp, Homo sapiens; identical to SEQ ID NO: 2280

SEQ ID NO: 7469 - DNA, 611 bp, Homo sapiens
tagaaccaccacactcaatgaacagctcgggcagatccattatatcttctctgataagacggggacactcacacaaaatatcatgacctttaaaaagtgctgtatcaacgggcagatatatggggaccatcgggatgcctctcaacacaaccacaacaaaatagagcaagttgattttagctggaatacatatgctgatgggaagcttgcattttatgaccactatcttattgagcaaatccagtcagggaaagagccagaagtacgacagttcttcttcttgctcgcagtttgccacacagtcatggtggataggactgatggtcagctcaactaccaggcagcctctcccgatgaaggtgccctggtaaacgctgccaggaactttggctttgccttcctcgccaggacccagaacaccatcaccatcagtgaactgggcactgaaaggacttacaatgttcttgccattttggacttcaacagtgaccggaagcgaatgtctatcattgtaagaaccccagaaggcaatatcaagctttactggtaaggtgctgacactggtatttatgaacggttacatcgaatgaatcctactaagcaagaaacac

SEQ ID NO: 7470 - DNA, 417 bp, Homo sapiens
atttcaagccactgttgaaacctcagtgtggcatcccatgagagccttttctcacagatggacacttcacagttaagtgtcattagtatgttaaagctaggaacctacccaaaagtacaaactcagtttactacatgattcccaaggatttttaataaattgtgttaaattccttgctgaatttaaggtataatgtatatctatctattcacccatccaaccaaaccaaccacagattcttcactcaagaaaatcaggtaagcttggcatgatttgccgttttgcctttatttttcttgctagtgcttttttataatatttattattttgttttagactgaggttttatgtcaaatctgtagttatcagcatatgacctttaccttttagacaacttgagaaatcttcacccccatc

SEQ ID NO: 7471 - DNA, 559 bp, Homo sapiens
ggcatttgaaggcaggaagatttttaaagatagattgaggttggtttaaaattattcctgtaaaccaacaataaagcgaagaagaggttcatttttgtaaataacactggtttcaaatagtgatgttagacttaacctaatttataaacaagagattaatatctccatgcatagttttagacaaaaaaagatgtttcaataaaattactgtcttgtaatataaatgttgtccacttcccttttccacaggcctagaacagttaaagggaacataatttgtttaggctcccacataaatgtgaatctggccaacaactttggttcatcctttagtgaattagaggatttggctaccctgagtatatttatattcatttcttctgttctccttctgttattatacttaatcttctaaactaaactaatgtgaacagtagggaagcaagggcccaaatgcataagtttctttgcactgttgcacttacttaatacaaataaatgttttttaaagcttttgtagtatgtttttatgagttaacatcctaatgtggtaggtatt

SEQ ID NO: 7472 - DNA, 475 bp, Homo sapiens
gggttgttcaagaatcacttgtatataccatatttcatttattcatccattgatgaactgtgaagcagcctgcttttggctgttgtgactaactaatgcttccatgaacatggatttacaaatacctgttccagttcctgctttcacttcttctgggtgtctgcaagtttaagaatcaaaattttaaacaaatcaaattggcactagataagttacttgtaaggtttgtatggaaaaataagcaagagtagccacaacttttctgaaaagaacagtaactagaaatcaggcttattagataataaaacagaaattaaaagggttagaatattgtggttgtggtggactggcagacggaaaatcactgacgccgaatagaaaatctaataattggctgggtggggtggcttacacctgtaatctcagcactttgggaggttgtgacgggagaattgcccgagcccgggagtttgag

SEQ ID NO: 7473 - DNA, 124 bp, Homo sapiens
atcatgccattgcactccagcccgggcgacagagtgagactctgtttaaaaagaaaaaaataagtatttgtaaatgtatatatatatatatatacacacacacacacacatatatatataaaat

SEQ ID NO: 7474 - DNA, 230 bp, Homo sapiens
agggtgaaatcccctaactgggcatgactggagaaaaaaggggaggaatatttttcagatgaagaaattaaatcttcatagatattaagtaatgcgcccaggcacagtggctcatgcctgtaatcccagcactatgggaggccgaggcaaataaatcacctgatgtcaggagttcgacacaagcatggccaatataatgaaaccccatgtctgttaaaaatacaaaaatt

SEQ ID NO: 7475 - DNA, 79 bp, Homo sapiens
ggactctgtccccacactcagaaagactcagctcactcaatgagagaatgtgatttactttatagaacgtataatcaac

SEQ ID NO: 7476 - DNA, 567 bp, Homo sapiens
gagtggcgggagccgcagctatggagccgcaggaggagagagaaacgcaggttgctgcgtggttaaaaaaaatatttggagatcatcctattccacagtatgaggtgaacccacggaccacagagattttacatcacctttcagaacgcaacagggtccgggacagggatgtctacctggtaatagaggacttgaagcagaaagcaagtgaatacgagtcagaagccaagtatcttcaagaccttctcatggagagtgtgaatttttcccccgccaatctctctagcactggttccaggtatctgaatgctttggttgacagtgcgtggcccttgaaacaaaggatacctcgctagctagttttatccctgcagtgaatgatttgacctctgatctctttcgtaccaaatccaaaagtgaagaaatcaagattgaactggaaaaacttgaaaaaaatttaactgcaactttagtattagaaacatgtctacaagaagatgtcaagaaagcagagttgcatctgtctacagaaagggccaaagttgataatcgtcgtcagaacatgga

SEQ ID NO: 7477 - DNA, 314 bp, Homo sapiens
gcacacaagttttacacctctctggattcgaagtttgtattgtattcatagttaaagggaatcgggtactttgcttgttgaataatgcactttaaaacaaggaaccgtatcaggccagcatggtggctcatgcctgtaatcccagcattttgggaggctcaggcagacaaatcgctctagctcagaagttgcagagcagcctgggcaacatggtgaaacccgtctctaccaaacagacaaaaagcagccaggcgtggtggcacatctgtggtcccagctacttgagaggctgagccaggaggatcgcttgagcc

SEQ ID NO: 7478 - DNA, 507 bp, Homo sapiens
ggtggttgattgtgttacttttcgactgtattctgtgctcttccctacaggaggattattcattcctgtttacttgaattcaggcaacatcatgtaacttgatttaaggaaccgatacatgagtggaaattctgtgtggcatttctgagcagaagttttatgaggcagcacatgctcactgtgttacctgttccttctgccatgagactggcagatggacattctctatcagccaggatatcagaatgaagaaatgtagaacatagaccaaaacaccaatgagaaataagcgtttgttgttttagggaaagtgtgttaccacagcataatttaacctatcccaagtgaatacatattcatggagttaatatctatacctgaaaattgaaactcaggttgtctacatctaactatgcctctgtcttttccaaaggtataaagtaggagaaacttccccatgatcctactcttccagtgttaactacagttaaaatttagtgtaaaatt

SEQ ID NO: 7479 - DNA, 316 bp, Homo sapiens
gacagaggggacagattcctcttagtcaagtcctgattaaaactccagctaagacattagtaagccttggttagtgaagtggcatcaggaagtgcctacattttcatggcctggtagcgttcagtgaaaatgttcattaacagacacaggccattcagtcccgaatcccaagacactgaagactctgtttgaatcagactcacgggttccttcctagccactctcagggacaggaatgcttctggtgaagaagttttcggtggtggttcatggagcttccctacaccaacttggaaatggcattcattttattggc

SEQ ID NO: 7480 - DNA, 267 bp, Homo sapiens
tacggctgcgagaagacgacagaagggtacggctgcgagaagacgacagaagggtacggctgcgagaagacgacagaagggtacgggtgcgagaagacgacagaagggtacggctgcgagaagacgacagaagggtacggctgcgagaagacgacagaagggtacggctgcgagaagacgacagaagggtacggctgcgagaagacgacagaagggtacggctgcgagaagacgacagaatggtacggctgcgagaagacgacagaa

SEQ ID NO: 7481 - DNA, 624 bp, Homo sapiens
acagaagggaataaatcgagtcttttgttcagaaagcatttcccaaagcgacaggccattagatcatgtagcgcccaggaaatagatacttgcgttacaagctatgttgaagtcctgcacgccccggcttggatgtacaatgaggagtctgtgtgcccggctgcctggccagcccagcccgagcctcctaccttctgaaaatacacttgctggacatagcagagaaagctggtacatctccagcccttcagggcttcttgggacacactgttctggggaaaaccctttcatcaaaaggcatgtggggggctcacaaggaggtgaaggagtgaataggatgtgcctggcctttaatgacccaatcttagggtgaagagtggccctacagagttgtcactctgtaaaatgaatgcattgtgatctccagtcctgaaactgaaccctctggtctcaaaacacttccattccctgagtcctaatgacagtgctcagccagaggcagctctcttcatcttacaaagtagtaaagcacctgtctcaacagacagctataccccaagcctctcatggtcccttagcagtaaggctatggcctcatttttgtcccttctctggtgactcttc

SEQ ID NO: 7482 - DNA, 492 bp, Homo sapiens
gaaaaacccgggagactttgtggggagcatttttgttgataattttactgatctaaagctgagtgattttttaaaagaatttgaatttggcttcctcaccagtaatatgtctccttgcttctttgatgtgatagttttgagatgggtgagaatctaatagatctgtggttgaatttgctgtgttgttatgaagtccaccctgtgggcacaataacataactgttggtaggagttgtttgagctattctggagattatttggtaaagtatactaaaagccttaaaaccatgtatgtgcgctgtttgaaccagtaagccacttctttgacattagaagacattagaagaaataatcagccttgcataaaacttatggatgaaagtattcatcacaatattatttataataaaaaattgcaaatgttataaatgaacaattgggaaatggttaaagaagtgatggtgcattgtgtggtagaatattatgcatatg

SEQ ID NO: 7483 - DNA, 363 bp, Homo sapiens
agatcactcatttaagaggacttagagttgtgtgaagtaatgttgtccctaattaatatgtatataattttacattgagtttctggccaaaggacctaactcctattttttaatgtagagaaaaactcctttagaaaatatttcaatgggcgttagaattttgttttgttttttaagacagaatctcgctctgtcacccaggttggagtgcagtggtgcaatcttggctcactagaacctctgcctcccaggctcaagtgatcctctggcctcggcctcccaaatacctgggattacaggcgcccaccaccatgcctgtctaatttttttgtatttttggtagagacgggagtttcaccatgt

SEQ ID NO: 7484 - DNA, 411 bp, Homo sapiens
gtactagttttatagttcgaggtcttggctttacatctttaaacaactttgattttacttttgtatttggtgatagatactagtctgttttcattcttctgcatatggatatccagttttttcaataccatttcccaccagtgtatgttcttggcacctttgtcaaaaatgagttcactgtaggtacatttgtacgtttgttactgggttctctattctgttccattgatctatgggtctatttttatgccagtaccatactcttttggttgctataattctgtggtataatatgaagtcagaaaatataattcctccagttttatttatttatttatttttgcttaggatagtattatttcttatagtgaaagcattctatgttatttattattagtctaattttgtagt

SEQ ID NO: 7485 - DNA, 666 bp, Homo sapiens
acagaagggatccccaccttggctgtcatcacccgatgaggcaaccagccagaacgcctgaacgcaggcacatacttcctattctacaccctagtaggctcccttcccctactcatcgcactaatttacactcacaacaccctaggctcactaaacattctactactcactctcactgcccaagaactatcaaactcctgagccaacaacttaatatgactagcttacacaatagcttttatagtaaagatacctctttacggactccacttatgactccctaaagcccatgtcgaagcccccatcgctgggtcaatagtacttgccgcagtactcttaaaactaggcggctatggtataatacgcctcacactcattctcaaccccctgacaaaacacatagcctaccccttccttgtactatccctatgaggcataattataacaagctccatctgcctacgacaaacagacctaaaatcgctcattgcatactcttcaatcagccacatagccctcgtagtaacagccattctcatccaaaccccctgaagcttcaccggcgcagtcattctcataatcgcccacgggcttacatcctcattactattctgcctagcaaactcaaactacgaacgcactcacagtcgcatcataatcctctct

SEQ ID NO: 7486 - DNA, 438 bp, Homo sapiens
gggagtttactgaagagtaggaaaggcttcccggagtaggagttactggaactagtgttgaatatatttaggaatgaaccaaaaaaagggtgcttgggtatggtggctcacacttgtaatcccagcatttggggaggctgagttgggaggatcacttgagccccaaagttctaaaccagcctggacaacaaagcgggactcctgtagctgtgtgtggtggctcacatctgtagtcctagctacttgggaggctgagatggaacaataattcgagcctgggtggtagaggctgcagtgagctatgatcgcaccactgcacaccagcctgggtgatggagcgaaaccctgtctcaaaaaaaagagaaggaaacaaagggtgtgggctgggcacagtggctcacacttgtaatcccagcactttgggaggctgtggtgggc

SEQ ID NO: 7487 - DNA, 469 bp, Homo sapiens
gtgattttataattaaaataatatctgctttttaaaatgagtggaatcacattctgtatttttttattctcttaaaattatttttcccttaagtgtttaaaagtcacctgtaaaactggctagatctggcaatttccccatgctaaaattttagattactaatttttttcactagttaataggtctgttacagatttctcatttttcttgaattaattttgatagctaatattttcatatgaatttctacattttatcttttttatttagaggcatacatttcttaatatattcttatctttttaatttgtttctactcatgtttctttatccctttttcataattatatagtttatttatgccttcttttttcctttatcattcctgccagacgtttgtcaattttattaatcttttcaaagaaataacttttgttggctgagcgcagtggctcacgcctgtaatccc

SEQ ID NO: 7488 - DNA, 549 bp, Homo sapiens
gtattttcaactttgaattgtaatcagaaagaaaatatattttaaccattgtttagtgcttctgttatatattgaaaacttcagtcttaattttttagttacattgttgatagggcattatataaatatacttctatagtcattgtaggaaatgtcttttataaggaaatatttcttctacctctgaattacacagttttgtatttacttggactgcatggcaacattcaaaaaacactttgaataacagataaaaatgacattttctaaagctctaggtttgctagatgcatgaagtctcagcaaagtataaatttgtaaatatttcattgtaaaatatcataaattgactccttcaagtgttcagtagtacaataggtaatcaataattggcctcttgggactgactgtaacgttttggtgtttgtatgttttgagacagagcaatagattgcctccatatcttttaaacattcaggtctcttgtataagaaaaataaccattgtggggggttttgtgcatcttatactaatatgaaacaaacaaaa

SEQ ID NO: 7489 - DNA, 424 bp, Homo sapiens
gacagaagggcaaaagcccttgcatgagtctcacaggtcactcaacacctcgtaacctccacatagcaaaagccccaggctctgctcctgctgccttatgttctgaatcccagtcacctgcttttcttggtacatcttcttccacacttacttcaagcccacactctggcacttccaaaagaagaagagtaacagatgaacgtgaactgcgtattccattggaatatggctggcagagagagacaagaataagaaactttggagggcgccttcaaggagaagtagcatattatgctccatgtggaaagaaacttaggcagtaccctgaagtaataaagtatctcagcagaaatggaataatggatatctcaagggacaatttcagcttcagtgcaaaaataagagtgggtgacttctatgaagc

SEQ ID NO: 7490 - DNA, 293 bp, Homo sapiens; identical to SEQ ID NO: 2288

SEQ ID NO: 7491 - DNA, 546 bp, Homo sapiens
gagtaaggaaaaaaaagtgtaacaggtgcgtgcagatgaggagtgaccctcatatttaagttattttatatttgactggacattgttcagaagtgtgctttaagggacacttgttggttgtctgcccagcatctctcaagaatatccctcctgtcctccacatggttgtgcagggccatgtgtgaagacagcatgagtcttaacccctcttttattttatttttgagacagagtctcgctctgttgcccaggctggagtgctgtggcgcgatctctgctcactgcaacctccacctcccgggttcaagtgattctcctgcctcagcctgccgagtagctggaattacaggtgtgcaccaccatgcccagctagtttttttgtatttttagtagagacagggtttcactatgttggccaggctggtcttgaactcctgacctcaggtgatccgcccacctcagcctcccaaagtgctgggattacaggcatgagccactgcacctggccttaacccctctttagattggaaaaaatattacaacttt

SEQ ID NO: 7492 - DNA, 540 bp, Homo sapiens
agccttctaaccctcaagtctttagaagctgggtggactcttagtggtcctgcagcgtatcctaaaagactacctttgaaacaggattcttgtatggccaggatcgtgtctgggaaccagaaaccctacaccctccccctccagggaatgctgagttccagttttgagcagaggtgaggcagaatccactgtagccttccgccctggtatttggggggatgaccagcccaggcgttgggtgttagtctgcatgagtttgtgagaggaaatagctgggtgtcctggcagtgcccttgaagttggttaggaccttcctgtaaactcttgcccctacttctaactactctataaatatatacatatatttatatataaagtgattagttgaactggcatcctgctttagcctgagacttgccataagaaactgctgagtacttggcaaaccctttcatagttttgttctccatctgtttggggtaggtgttgagcgaggcaaatggatctcgatatttcagatgggcttttgatgcactgttg

SEQ ID NO: 7493 - DNA, 499 bp, Homo sapiens; identical to SEQ ID NO: 2290

SEQ ID NO: 7494 - DNA, 596 bp, Homo sapiens; identical to SEQ ID NO: 2291

SEQ ID NO: 7495 - DNA, 427 bp, Homo sapiens
gggcggacctctggtggacatggctgcttcccgcttacccccagcgacgctaacgttaaagcagttcgtaagaaggcaacaagttcttctcctctacagaaggattttgcaaacaattcggcaagttccaaatgattctgatcgcaaatacctggaagattgggcaagagaagaattcagaagaaacaaaagtgccaccgaagaggtgagaacaaaatcatggatacaatccggatgatgattactcaaggcaatatgcagctcaaggagttagaaaaaacacttgctttagcaaaatcttaactatagcattattctgaaggattttcaaagtctccatgtgttttgttgcatttaggattaacaatggacaacacaaagcccagtcttactatttatatgtacagtatttggtgatagagagcaa

SEQ ID NO: 7496 - DNA, 441 bp, Homo sapiens
agaagggtacggctgcgagaagacgacagaagggtacggctgcgagaagacgacagaagggtacggctgcgagaagacgacagaagggtacggctgcgagaagacgacagaagggtacggctgcgagaagacgacagaagggtacggctgcgagaagacgacagaagggtacggctgcgagaagacgacagaagggtacggctgcgagaagacgacagaaggggtggctcatgcctgtaatcccagctacttggaaggctgagataggagaatcgcttgaacctgggaggcagaggttgcaatgagccgaggtcgcgccattgcactgcagcctgggcaacaagagtgaaacactgtctcagaaaaaaaaattagccaggcatggtggcacgtgcctgtggtcgcagctacttgggaggctggggcaggaggatcatttga

SEQ ID NO: 7497 - DNA, 467 bp, Homo sapiens
cctacatgatacagtggtgtcagccttgccttgtatcagtttcacttgaaatttgagaccaattaaatttcaactgtttagggtggagaaagaggtactggaaaacatgcagatgaggatatcttttatgtgcaacagtatcctttgcatgggaggagagttactcttgaaaggcaggcagcttaagtggacaatgttttgtatatagttgagaattttacgacacttttaaaaattgtgtaattgttaaatgtccagttttgctctgttttgcctgaagttttagtatttgttttctaggtggacctctgaaaaccaaaccagtacctggggaggttagatgtgtgtttcaggcttggagtgtatgagtggttttgcttgtattttcctccagagattttgaactttaataattgcgtgtgtgttttttttttttaagtggctttgtttttttttctcaagtaaaa

SEQ ID NO: 7498 - DNA, 248 bp, Homo sapiens
gacagtagaaagtcagaaggtcacaaagcttgcagggtaagtgacacaacttgaaactgcttggccctctttaaaaagaaataataaaatgggagagaatgaagcaagtttacctaacacgtctttgcaaggtaaaaagatggcctatcagaaggtccatgcagatcaaagagctccaggacactcacagtacttagacaatgatgaccttcaagccactgcccttgacttagagtgggacatggaga

SEQ ID NO: 7499 - DNA, 594 bp, Homo sapiens
ctccagaagtttcccccttgggcggtggtggaagtggtaaccgtgatagtagcagctccggcggcagcaacagcgactacgagggatggcggcggctgcagcaggaactgcaacatcccataggtttttccagagcttctcggatgccctaatcgacgaggacccccaggcggcgttagaggagctgactaaggctttggaacagaaaccagatgatgcacagtattattgtcaaagagcttattgtcacattcttcttgggaattactgtgttgctgttgctgatgcaaagaagtctctagaactcaatccaaataattccactgctatgctgagaaaaggaatatgtgaataccatgaaaaaaactatgctgctgccctagaaacttttacagaaggacaaaaattagatagtgcagatgctaatttcagtgtctggattaaaaggtgtcaagaagctcagaatggctcagaatctgaggtgtggactcatcagtcaaaaatcaagtatgactggtatcaaacagaatctcaagtagtcattacacttatgatcaagaatgttcagaagaatgatgtaaatgtggaattttc

SEQ ID NO: 7500 - DNA, 655 bp, Homo sapiens
acagagggggcgtgcgttggggcctcagcctttatctccactctgcggagattcacgcctggaaaacgctcttctgagaggatctgtggaggtcaacccaggagagagaagacaggactgaagcactgaagggtcctgccgttaagggcgcaggattgtatagaatatataatagcagtagcagctctgtttacggagcattaaccttacgtggagttatttcctgcatttcctcctttcgtctttacaaggtagccgtttggcgtcgtgagagattgggtctctccacattgccccggctgctctccaacccctgagttcaagtgattcacctcccttggcctcccaaagtactgggattacaggcgtgagccaccgtgcctggctgagaagatggatttaagacatattttggaggtaacattgtcaggacttcctgaaggattagatgtggaagggaaggataagaaacagaccaaggataactttcaaatgtatgcttaagcaactggatggataatgatgccattgagtgagtgaaaaacttgatggaagtggaagattcagagttcatttctatctaggttaatttgagacataccagagcataagttaagtaagtaattgaatattggagtggagacttatttgtcta

SEQ ID NO: 7501 - DNA, 619 bp, Homo sapiens
atcgctgagggcttggtcaaggccaccacagtgggccagatgggctggttcttcctcatggctgtgatgtacatcactggagctggcctttatgctgctcgaattcctgagcgcttctttcctggaaaatttgacatatggttccaatctcatcagattttccatgtcctgggggtggcagcagcctttgtccacttctatggagtctccaaccttcaggaattccgttacggcctagaaggcggctgtactgatgacacccttctctgagccttcccacctgcggggtggaggaggaacttcccaagtgcttttaaaaataacttctttgctgaagtgagaggaagagtctgagttgtctgtttctagaagaaacctcttagagaattcagtaccaaccaagcttcagcccactttcacacccactggacaataaactttccatttccattctcctagctggggatggggcatggtcaaacttagccatcccctcctcagcaaggcatctaccggcccctcacagagacattactttgaaactcatgttgagattttaccctctcctccaaccattttgggaaaattatggactgggactcttcagaaattctgtctt

SEQ ID NO: 7502 - DNA, 552 bp, Homo sapiens
gagggaggatttcgcaggaaaatggagaaagggttacacacaaaaaaggttaaactactctatgcatgtttctgcaatgtgttatctcaggaactcatttctgtagcccatcagggcaggagctgggctctcacctgttgataatattccataagggaggttcttccccacagtgtttagtctcccgacgctggtacagcctgacatgatgacattctactttcatgtcggtcatgctgcagggaaaattctgagtgttctaataggctggaatcatttgctagggtgaaccccatctttggttctcactttctgttatcttgtaattagctttattctcagcaaatccatgtctattttatttatctgtttatttacttatttttatgtatggaaaaacacttttttttatttacttatttatttagagacaggtctccgtctgttacccaagctggagtactgtggtagagtgctgtgatcatggctcattgcagcttcaaactcttgggctcaaatgattctctcacctcagcctcctgtgccaccatg

SEQ ID NO: 7503 - DNA, 580 bp, Homo sapiens
acagaaggggtgttgctgcccgacgagaggacgatcagtctttgctgctgggactcgaggacagccgagcggagaaacctgctgtcgttggggcacaacaatattgtacgctgcatagtgcactcccccaccaaccccgggttcatgacgtgcagcgatgacttcagagcgcggttttggtaccggagatcgaccactgactgagccaccctctccgtagggttctttctcgaggactctaccctcctcccccacgtcctgtctcagctgcagtcgtaagtccgtgcaccatccttgacgttttgctgccacctctgtccacattcttcttggatttgtataaaagaatctttttttaccttgatgtagaatcatggtggaaaaagttggaaacacagatctgtgcagttctacattcactgattattacagtgtgattttcatcggttttgtaagtacaggacttgccgtttcttttgatctcttgattgaaggaggatagggcattaaagtgcttttgacatgaggaattttcatttggttcttctgtcaactttcttgcttattctgctgaaccctc

SEQ ID NO: 7504 - DNA, 490 bp, Homo sapiens
tacggctgccgagaagacgacagaagggataataacgttaaaacttgtttagaaattaactagtattttttgaggtttaaagaaccttccagttttactatattagaaggcttcttttattgtatgcggtctaatttttattaaaagttcaggccatgaaaggttaagtatgtatcccttcaaaggaaattccattatcagagttagaattgaaagtaaaggctgggcacggtagctcacgcctgtaatcccaacactttgggaggccgagacaggcggatcacgaggtcaagagattgagaccatcctggccaagatggtgaaacctcacctctactaaaaatataaaaattagccaggcatggtggcgtgcacctgtagtcgcagttgccaggtaatttaagtgctgcttggtgaccagcttgtagacagtcactctatttatacccgcagactgaacaggtgcagccttttgccaagtctacccaac

SEQ ID NO: 7505 - DNA, 422 bp, Homo sapiens; identical to SEQ ID NO: 2292

SEQ ID NO: 7506 - DNA, 299 bp, Homo sapiens
gattggttaagcttaagtttccttttattatttacactgagtcaagttttggtttatttaaggaggaattgagtgcacggcagccacctcagcctcatggccacctgtttattggattattttaacagagaagatcctttaaaaaatatctgttaccctggctggagtgcagtgacgtgatcacggctcactgcagccacagccttccagctcaggtgatcctcccacctcagtgctccccaccctgagtagctgggactacaggcatgtgccaccacaccaccatgctaggctaatgg

SEQ ID NO: 7507 - DNA, 344 bp, Homo sapiens
tatatgagcagtagtcagcagcaatgacacggttcttaagtaataaaagagagaatctaggtctgggcatggtggctcatgcctgtaatcccagcactttgggaggccgacgtgggtggatcacctgaggtcaggagttcaagaccagcctggccaacatggcgaagccctgtctctactaaaaaatacaaaaattagctgggtgtggtggcgggtgcctgtaatcccagctagttggaaggctgcgacatgagaatcactggaacctgggaggtggaggttgcagtgagctgagactgtgccactgcactccagcctgggcaacagagcaagaccctgtctcg

SEQ ID NO: 7508 - DNA, 338 bp, Homo sapiens
atagaagggaccttattcgtatatcgaaggtcagcttccccttaccatggttttaccattgtgaatcgactaaatatgcacaatctagttgaaccagtgaataaagatttggaatttcagctccatgaaccatttcttctgtatagaaatgcaagcttgtcgatatatagtatctggttttatgacaagaatgactgtcaccgcatagcaaaactcatggctgatgtggtagaagaggagacacggcgatcccagcaagctgctcgggacaaacagagtcccagccaggccaatggctgcagcgaccacaggcccatcgacatcctggagatgctgag

SEQ ID NO: 7509 - DNA, 534 bp, Homo sapiens
gggtgtgtttggggaactaaaaagggccggtatagtttatttccttcattattttgtcttacatttcctggtctttgggaatataaaaaaaggggaactgtgtaaactgagaaaaggtgcagtaaacaccctgcaaataattctgcattcagcatatatattcttaacagagttgatagctataatgaattataaattttgagaattatagtagaggtatatactgacctagaaatgcctctgttcagggtgataaatatcttaaacatgagagatttgctggtcctcaggaagtaaatgttctctgtagcataggactctagttaagatgagtaaaaaagctgattgtagagctgtgatttcatttaggaaccccttttcttttttatttttttgagtaggttaattgcagcagtttcctcattttatttcttggtactttatcacccatcaaaattttaaaaaacttttccctaattggccaatgttcttatttttttctttcttttttcttaaccttgaaagcatcttgtt

SEQ ID NO: 7510 - DNA, 210 bp, Homo sapiens
cagaagggtacggctgcgagaagacgacagaagggtacggctgcgagaagacgacagaagggtacggctgcgagaagacgacagaagggtactgctgcgagaagacgacagaagggtacggctgctagaagacgacagaagggtacggctgctagaagacgacataagggtacggctgcgagaagacgacagaagggtacggctgcgaga

SEQ ID NO: 7511 - DNA, 291 bp, Homo sapiens
gatccgggctttgaaaaccttaagcacttaaatgacaaaacagtcgcgcacacagagatagatgtaaaggtgatattttacttaacattttttttaacacccaaatttgctagtagagaaaaagagaagagggaagactcccaaatggttatgaagtttgggagaggagctttataggggtaacatgaagatgaggaacctaatatgggattagagcataggaaaagagacacagccttagattctattcaaaatagtcagtgtagaggccaggcacagtggcttatgcct

SEQ ID NO: 7512 - DNA, 511 bp, Homo sapiens
acagaagggatttctgtcactgccagatgtacaagatactgtaaaaggagcattttctctagcaaattagacttgctagctccatggatctagattgactaaaacagcttgttgccccagggatgtagctggatttggcttggtcatttcttttaaatataggacttcagaaacctgatctagagtccttttcttttggagacagtatcttgctctgttgcccaggctggggtctagtggcatgatcatggctcattgcagtctcaacctcccaggctcaagtgatcctcctgcctcactctccctagcagctgggactacagacgtgtatcaccatgactggctaatttttgtattttttatagagatgggctttgccatgttgctcaggctgttctcaaactcctagactcaagtgatccatctggctcagcactttgggaggccgaggagggtggatcacttgaggtcaggagttcaagaccagcctggccaacatggtgaaacgctg

SEQ ID NO: 7513 - DNA, 451 bp, Homo sapiens
gagttctcaaaattatcattagattttcgcagtggtctttgattcagatatgattaaaagaaccgcagctctgtttgagaatcagtgtggaccagtatgagagatactttgcttttatcctgttccttttcatccttccctcctcactctctctctctctttttctctcttcacaaacaagtatataacattactttaaaaaaaaaaagcaatgctttctggagtggggcacggtggctcatgcctgtaatcccagcactttgggaggtcgaggtgggtggatcacctgaggtcaggagtttgagaccaatttggccaacatggtgaaaccccatctctactaaaaataaaaaaattagccaggcgtggtggcaggagctgtaatacgagctacttgggaggctgaggtaggagaatcgcttgaacctggggggcagaggttgcagtgagc

SEQ ID NO: 7514 - DNA, 235 bp, Homo sapiens
ccttgttccgtgctattcctttaacttatgtgaagttactggatttctggttacacttaagcaaactgaatttcaattcctattttctctttagaaaattgatgtaatttaggccgggtgcagcggctcacgcctgtagtcccagcattttaggaggccgaggcaggcagatcacgaggtcagatcaacaccatcctggctaacatggtgaaaccccttctctactaaaaatacg

SEQ ID NO: 7515 - DNA, 89 bp, Homo sapiens
gacagaaggggaacatttattctgattctttatatcagggattcttaaggtactcagccttttaactggtctttctgtgatcactcttg

SEQ ID NO: 7516 - DNA, 278 bp, Homo sapiens
gaccagatggtggtagtgtacttggcctcgctgatccgttccgtggtcgccctgcacaacctcatcaacaacaagattgccaaccgggatgcagagaagaaagaagggcaggagaaagaagagagcaaaaaggataggaaagaggacaaggagaaagataaagataaggaaaagagtgatgtaaagaaagaggagaaaaaggagaaaaagtaaaacatgtattaaatagcttttttaatttgtaaattaaaatcttacaaactaaatcagtgtgctgc

SEQ ID NO: 7517 - DNA, 478 bp, Homo sapiens
ggggaaaaaggggcggcggactcggcttgttgtgttgctgcctgagtgccggagacggtcctgctgctgccgcagtcctgccaactgtccgacaatgtcgtcccacctagtcgagccgccgccgcccctgcacaacaacaacaacaactgcgaggaaaatgagcagtctctggccccgccggccggcctcaacagttcctgggtggagctacccatgaacagcagcaatggcaatgataatggcaatgggaaaaatggggggctggaacacgtaccatcctcatcctccatccacaatggagacatggagaagattcttttggatgcacaacatgaatcaggacagagtagttccagaggcagttctcactgtgacagcccttcgccacaagaagatgggcagatcatgtttgatgtggaaatgcacaccagcagggaccatagctctcagtcagaagaagaagttgtagaaggagag

SEQ ID NO: 7518 - DNA, 293 bp, Homo sapiens
tattacaaatggaattattaagtaaaaggtataagtgtttgtatggcttttactatacattaccaaaaaaatgtctaggctgtttttctgtttgtttgttttttgttttttgagacagcctcgctctgtcaccaggctggagtgcagaggcactatctcggctcactgcaacctctgcctcccaggttcaagagattctcctgcctcaacctcccaagtagctgggattgcgggtgcacaccaccacgcccagctaatttttttttttgtgtttttagtaaaaacggggtctc

SEQ ID NO: 7519 - DNA, 511 bp, Homo sapiens
gacagaaggggagatcagcctgaccaacatggtgaaaccctatctctactaaaatatagaattagccaggcatggtagcgcacgcctgtaatcccatcttcttgggaggctgaggcaggagaatcgctagaacctgggaggtggaggttacagtagccgagatcgcgccactgcattccagcctgggcaacaaaagcgaaactctgtctcaaaaaagaaaaaaaagaaaaaaaagcacgtgaccttatgaggctctcgctgtattgttattttaaggactataaagagtttgatttaaaattatgcagggcccctatgtgggattttttaaaaagcaaactggtgtgtattctcatgtggtttgcacagcccagcctcacagcactattgtaaaccctgctctttctgtctcgctagacagattttttttgtttgttttcttttttctggttgttttttgttgttgttgtttttgttttacagctgaaaccaaccagcaagcccttgatga

SEQ ID NO: 7520 - DNA, 570 bp, Homo sapiens
ataaactctaattgcttcaacagagttttatggtaagaattgtttagtactaccatttcacagatgagaaaattgaggctttgaaagcctgaataatttgtgaaaagatacaaagctcctatgtggtcagactggaattttaatctacttgtacctgacattggatcctagactcttcaataggttacacttccttcgaactgggaaaaggtagcacaaatcatttatttttaaatcaccgatactagttttgttgtttaaggcatttaatctaagttgacttccccaaaggactgtgcagatgttttctcaaattaaagtgatatttcagaacaacaagtactagaaaatttaattcaactaaacagtaaattctagaaactgggggatcttttggcctctcatacaattttattcgtataactatgtgtcccggccagtcatgataacatatacttgttcaattgataaaaactgaactgaattcaagtcatagacttactgtagaggcttgggcacatttgcagaatatacacttggaatatgcaatgaggaatagaggttaagaag

SEQ ID NO: 7521 - DNA, 488 bp, Homo sapiens
gacagaagggaactgaagtgagccaaaggaaaatatgctggggcaaagtttagtgatccaccttctcctagtgttcttccaaagcctcctagtcactggatgggaagcactgttgaaaattccaaccaaaacagggagctgatggcagtacacttaaaaaccctcctcaaagttcaaacttagatttcagatttcagtatgtgtgtaaaacataatttttcccatatccctggactcttgagaaaattggtacagaaatggaaatttgccttgtcgcaacatacaattgcaaaagatgagtttaaaaaattacatacaaacagcttgtattatattttatgttttgtaaatactgtataccatgtattatgtgtatattgttcatacttgagaggtatattatagttttgttatgaaagtatgtattttgccctgcccacattgcaggtgttttgtatatatacaatggataaattttaagtgtgtgc

SEQ ID NO: 7522 - DNA, 488 bp, Homo sapiens
ggggcctcccgttcttccccgcccgctccatccgggtcgctgacggctgtctctggactggacagcagtggcgtccgcttttctctaaggaacccgataagaactccattttctgttgatgtggagacatagggtacctccaactttccggggtttcagaagagaattttttattgaaactggaagaccaaaataattacaagcatgttgtgctggggaaatgcatcctttgggcagctaggtttgggtggaattgatgaagaaattgtactagagcccagaaaaagtgacttctttataaataaaagggtccgagatgtaggatgtggactcagacatactgtgtttgttctggatgatggaacagtgtacacatgtggatgtaatgatctaggacagctaggtcatgaaaaatccagaaagaaaccagacagagtttcgctcttgtttcccaggccggagtgcaatggcgccatctcggctcaccg

SEQ ID NO: 7523 - DNA, 409 bp, Homo sapiens
gtgtctttataatagaatgatttatattcttttgggtgtatacctagtagtaggattgctgggtcaaatggtatttctgtctttaggtctttgaggaattgccacactctcttccacaatggctgaagtaatttacactcccacgaagagtgtaaattaaaaagcattcctttttctccacaaccttctcagcatctgttattttttgactttgtaataatagccattctgactggtgttagatggtatctcattgtggtttttgatttgcatttctctaatgagcagtgatgttgagcttcttttcacatgactgttggtcacatgtatgccttcttttgaaaagtgtctttttctaacttttcatctgctccttaagacctgcttttggagaaaagtgtatcagtgc

SEQ ID NO: 7524 - DNA, 468 bp, Homo sapiens
gaggcggggatgctgcggctccgcagcgggctgaggcaccttcgggcaacacccaatactcggggctccgctcggcttctttgcgccgagatgcctaagaaggctggtgcgacgaccaagggtaaaagccagagcaaggaaccagagagaccacttcctcccttaggtcctgtggcagttgatcctaaaggatgcgtcaccatagccatccatgcaaaacctggctccaaacaaaatgctgtaacagatttgacagcagaggctgtaaatgtagctattgcagcacctccatcagagggagaggctaatgctgagctctgtcggtatctttccaaggtcctagaactcaggaagagtgatgtggttttggataagggtggtaaatctcgtgaaaaggtggtgaagcttttggcttctacaactccagaagagatcttggagaaattaaaaaaggaagccaaaaaaaca

SEQ ID NO: 7525 - DNA, 462 bp, Homo sapiens
gaaagaaatagtttgggacaaagaatcccttcctaatttccctgcagtcccatcataggcatgaccatcgcatctctttatggctgaagcttagcctgactgctggacccagacttttgcccagtgacctctggggtaggttactatcctctttgtcctgccagtacccctagaaatttgacttaattgctgcatctagggacttagggatttttcccaaatgctgtgtagaaagtcactggagttaaatctactccaaccatttttctgctgtttcttgaaaagacaggatgattcatttacatctcttttccttcacagaatcatgagggaagtattgtgattaccagtgttaagcatttgtgaatattttattccaaaaagaaaaaaaatcactttaccagccttttctgcagagataaagactggaggtcaggtgcggtggctcatgcctgtaatccc

SEQ ID NO: 7526 - DNA, 537 bp, Homo sapiens
ggaatcaatgtgcatgcgtgtaaatatatacacatatgtacatgtactatgtaaacatgttttggatttcttttagccaacaaatggaattttcttgagcatgtttctaatcgttttgccattggaatccatggctcatgggctcttccatgaattgggtaactgtttaggaggaacatctgttggatatgctattgtgattcccaccaacttctgcaggtacagtaatctagtatagttagtgataactattcacttcataacattttcttaatatttatatgaataaaatatagctccttttcaaaactgttttcaaaatataacttgtgcatttcttccaaatttttaacaaactttattccaagtgataatatcttcagagttaaattgaaatattttgataaatatgataagcttatattttagctagaaaccagaaaatattcatgaataacttttctaaggaaagatcttaccctaaagggaatattttgttaagaaagtgtcctctggctgggtcgtggtggctcacac

SEQ ID NO: 7527 - DNA, 530 bp, Homo sapiens; identical to SEQ ID NO: 2303
  misc_feature 478: n = A,T,C or G

SEQ ID NO: 7528 - DNA, 562 bp, Homo sapiens
gacagaggggtcctgccagcactttggatgatagagtttttgccaaagaattgaatgcaggaattataaaaacagatcaaaactatgaaaagatgatgtttaaagaagctttgaaaacagggttttttgagtttcaggccgcaaaagataagtaccgtgaattggctgtggaagggatgcacagagaacttgtgttccggtttattgaagttcagacacttctcctcgctccattctgtccacatttgtgtgagcacatctggacactcctgggaaagcctgactcaattatgaatgcttcatggcctgtggcaggtcctgttaatgaagttttaatacactcctcacagtatcttatggaagtaacacatgaccttagactacgactcaagaactatatgatgccagctaaagggaggaagactgacaaacaacccctgcagaagccctcacattgcaccatctatgtggcaaagaactatccaccttggcaacataccaccctgtctgttctacgtaaacactttgaggccaataacggaaaactgcctgacaacaaagt

SEQ ID NO: 7529 - DNA, 586 bp, Homo sapiens
atctcattggggaagaaaaggggagggggaaggcaagaatcactgaaaaatcttaaatctgtgttttctggaataagatatctagacagcctaaatctgattttggtctttataaaaataatatcttgtgttctcatacttttctgtcactgtaagcctgcccagtaggcagtgttttgcagactttggggagtggtctatgtggccaaatattgtgtgtatagacagaatttgaaatcaagtcctgcttcatttacaagaattttggtgggcatctaatcctacataatgaaaaagaaaaacagaccatttaaaaactcagacaagattatatttaatatattaattactaaaaaggcacaagattacactgaacatattagctactaaaaaggcactgctaagacattcaagcaaatagctattacacactactgcagattttacaggtttctaattctaacatatgtttgaaaaatccgtgagtattccaaaatatatttaataatggaatatctgcattaatataccatccatgtgtttttaccatttgccttaatattgaatatactgtttacctcacact

SEQ ID NO: 7530 - DNA, 545 bp, Homo sapiens
acagaaggggtttttgctgaaatgaacaccttaggatgctgaagaatatgacccgtcccatggaaaacattcaaaaatgtgtgtagcgctttcttcccaagggtgtgtgtgcgcatattttaacactaattcactttctacttccgttgctatcctttctgtgagtctttctcagaatctcagaaaagaaactaaattgttcactctagttatcaatgctgtactctatacctggaatttgctaaaagggcagattttaagtattctcaccacagaaaagagaaaagaaaatggtaattatgtgacgtggtggacatgttaactagctttattacggtgagcatttcacagcggatatccagtcatcacgctgtacacattaaacatgtacaattgggtttttttgagacaaggtctccttctgtcacccagtctggagtgcagtggctcagtcgtggctcattgcagcctcgacctcctgggctcaatccatccttccccctcagcctcctgaaaagctggggccacaggcatgtaccatcatg

SEQ ID NO: 7531 - DNA, 564 bp, Homo sapiens
gacagaaggggaaccgtttgcgaaaggccgctctagcctttggtttcctggacctgctgaaaggggtggctgacatgctggaaagggaatgcacactgctgcctgagacagcccaccctgatgctgcattccagctgacccatgctgcccagcagctcaagctggccagtaccggcacctctgagtatgccgcttatgaccagaacatcacacctttgcacacggacttctctgggagcagcactgaaagaatttgaaactgacttttggagctttccttcttttttcatttcaactgaaaatgctttaggtaaaaacctttccagtatgttcacctctagaatagccacccaaagaccttcctgaggctgcctcagaagcaccacttgctgttttgaatgactctactagtatgagaaggatgtgaaggtggttggctggttgggctttaacttcctgggattcataatttttaagcttggaagatagctgctgttcccatgatgggcacatttcctgagaagcttgaatgactgatgagcatagagcacccctgccttcctc

SEQ ID NO: 7532 - DNA, 87 bp, Homo sapiens
gatataattgactatctgcttaatcagcttaagaacgccagcaatgatatcgttagacacggtggcagtctgggccttggtttggca

SEQ ID NO: 7533 - DNA, 595 bp, Homo sapiens
acagaggggagttttgcaatcaattcctgttcaaaggccaccctactcttcctatccgtctttctccagcccagacactcacagccccctgccagaccaggggacctcggagaggcaaggacagaggttcaggatcttcctctccctcgggacccaaggccacaaaggagagctccgtggagagaagaaaatcatttgactcctggggacacagatttgctgccacagaggctgatggacaaccaggcggagagagaaagtgaggctggtgttggtttgcaaagggatgaggatgacgctcctctgtgtgaagacgtggagctacaagacggagatctgtcccccgaagaaaaaatatttttgagagaatttcccagattgaaagaagatctgaaagggaacattgacaagctccgtgccctcgcagacgatattgacaaaacccacaagaaattcaccaaggctaacatggtggccacctctactgctgtcatctctggagtgatgagcctcctgggtttagcccttgccccagcaacaggaggaggaagcctgctgctctccaccgctggtcaaggtttggcaacagcagctg

SEQ ID NO: 7534 - DNA, 500 bp, Homo sapiens
acagaagggcacgtactcccaaatcatcatcatcattatcgtcatcattatcaccatctgataaaattaaggaaacagtaaatcatgagaaaaaaaaatgaaagaggagattcagaaagttgtggagatgaatcaaaagtacaaaatacagaaaccctgggaatcaagattttaaaaatgctataatcagtggccaggcatggtggctcacgcctgtaatcccagcactttgagagacagaggcaggcggatcacctgaggtctcctgacctcagagaccagcctggccaacatggtgaggcccggcctctactaaaaatacaaaaattagttggacgcaatggcacacgcctgtaatcccagctactctggagactgaggctggagaatcacttgaacccgggagagggaggttgcagtggcgcggtctcggctcaccacaggctccgtctcccgggttcacgccattctcctgtctcagcctcccgagtagctgggac

SEQ ID NO: 7535 - DNA, 501 bp, Homo sapiens
ggattttgtgtaagtcagctagcgtgtgtatagtgtcatttcttatgttttgtatattaacgttttacaaacacaatttgtgtgggtttgtagcatttcttatagtttaaagtatgattcagcattctaagttaaaactaatatgtgaagtcagtcattagtctgcataatctctgtctccctctgtgtgtgtctttctataaagcacatgtgtacacacacacacacaaatatactgaaagctagggtaagttctaaactgaatatcaaaaaccaaaatcaagaacaaagaagtgatattttccaaacaaacatggattctctgccgggtgcagtggttcagcctgtaataccagcctccactttgggagtctgaggtgggagtattgcttgagctcaagagttggagaacagcctgggcaacatggtgagacctggtctttacaaaaattttttttggccggacgcagtggctcacacctgtaatcccagcactttggg

SEQ ID NO: 7536 - DNA, 534 bp, Homo sapiens
  misc_feature 42: n = A,T,C or G
ttaaaatttaatagttccgtactcatgtgaatgtatgttagngaaaaatataacaagcacattgtcgatttcgtgagtattattgcttaagatcgggttaagtaataagtaaaccaattgaatattttatttcagttgaaaagaaaaatactgaagaattttaatgcctttaatggggtacttgagtatggcaaaaatcgggaaggctgagagtgtcatttgggagctgtgtcccaagtccctcgtgggcctttaatcagcagttacagatctgcagctcctcctgtaggatggaagcactttgctctttggccttttgaggtcacccagctatttgaaggtcaggggcaactcgattctaatgagatcaaggtcacagggtcatgttgcccccaggaaagtgggagatggagttctgtggtccaggctgtggccctgctgcagggctgggaggtggagaggtgtggacagagaaggacctcccatcctcaccggcagagaaagctcagagatgctcccagctggtgatgaggc

SEQ ID NO: 7537 - DNA, 424 bp, Homo sapiens; identical to SEQ ID NO: 2314

SEQ ID NO: 7538 - DNA, 535 bp, Homo sapiens
acagaaggggatatttgtggtaaatccactcaggcagagtgacagaggcttggttgtcatttagcctttagggtcttagtggagttaatgagaactgcaaatggtcatcaagtcttggtgcttcatggagaagcaacacttttacagtgagtgtgttagcttagtggttatggtattactgcagggacatggatcacttagggagagagcgtttcaggcttgggtcagtcttaaagcagatctcatgtggagggtttctgctaacctgcatctcttacaacacagtactagtcagtatgctgtagtattaatcagtaggtcaagttcagtgaagtaaaggagaattgaattcttgaagttcacatttaggcaaaaatttggcgttttaggaggtgagtataagacatgatctttatagaaaacgctgatgataaaaacagcgctctctgttaggtgcctttatgcttgactccattgtcatcttttcttaagaaactaagctcaggactgggtgcaatggctcatgtctgtaatc

SEQ ID NO: 7539 - DNA, 488 bp, Homo sapiens
gacagaaggggaaatgctttcggtaggcactccacggctgtgaagatggcggctgctgcgtggcttcaggtgttgcctgtcattcttctgcttctgggagctcacccgtcaccactgtcgtttttcagtgcgggaccggcaaccgtagctgctgccgaccggtccaaatggcacattccgataccgtcggggaaaaattattttagttttggaaagatcctcttcagaaataccactatcttcctgaagtttgatggagaaccttgtgacctgtctttgaatataacctggtatctgaaaagcgctgattgttacaatgaaatctataacttcaaggcagaagaagtagagttgtatttggaaaaacttaaggaaaaaagaggcttgtctgggaaatatcaaacatcatcaaaattgttccagaactgcagtgaactctttaaaacacagaccttttctggagattttatgcatcgactgcctctttt

SEQ ID NO: 7540 - DNA, 453 bp, Homo sapiens
acgacagaagggggggtttctccatgttggtcaggctggtcttgaactcccaacctcaggtgatcctcccaccttggcctcccaaagtgctgggattacagtcagtgacccactgtgcccggcctgtatttgtatttttagtagagacagggttttaccatgttggccaggctggtctccaactcctgacctcaggtggtccgcccacctcggcccccagtgtgctaggattgcaggcgtgagctacggtgcctggccagttaatcagttttttaccctcctgtgtttaggccccaacatcctgttcttgatcttttttggcaaaaatttggccaaagattgaaattttgcctcctggaccatatattttgctccagttgcaaagtatgacttttatcctttggtcagcagttcccatggtgtttagggcctgaatttgacattctttttttt

SEQ ID NO: 7541 - DNA, 405 bp, Homo sapiens
  misc_feature 154: n = A,T,C or G
caggcttcctaactgtcatggacaccaggcaggcaggtaggggaatgaagcaagatttggcagcgcagctgctgtgagtttgctctccagtggcttggaaatgggaagtaaaggatactgatcttatgtgagaggcgggggcagactgtcctantctgccctcacatatccctggaatgggcacatacaggctggtcagggctttcttggggcactgaggtgggagaagctggtggcctgggcagggtagtggaactgagagtgagaagccccctacacttggatctcttggggggacacgagactcatttatttattctgcctagctggctcataatactgatggctgaatgggggtatgaaaactggtcctcaagagtatccagtcttattgggggaataatg

SEQ ID NO: 7542 - DNA, 60 bp, Homo sapiens
gggagatgggggccggagatggacttgccatgacaggtgcagttcaggagcagatgagat

SEQ ID NO: 7543 - DNA, 56 bp, Homo sapiens
gaaggatggaataacccaaggaaaacgcacgtatggcctgctacttcctatgggct

SEQ ID NO: 7544 - DNA, 590 bp, Homo sapiens
  misc_feature 371: n = A,T,C or G
gcatatacggtcaatgccatagtaagtaacactgtattatgttatactaaaatattaataaatctaggttggttcagtctttcctgagtccacagattggaagcagattgaggaaggacgctagtggaccacagagctgaaccatgcacacagaagaaatctttttttctttttttctggagacggagttttgctctctagttgcccaggctggagtgcaatggcgcgatctcggctcactgcaacctccacctcccaggttcaagcgattctcctgcctcagcctcccgaggagctgggattacaggcgtgagccaccctgcctggccacttttgtatttttagtaaagacagggtttgaacactgggcncaaggcctggtctcaaattcctgacctcaggtgatccacccacctctgcctcccaaagtgctgggattacaggcatgagccaccgcgcctggccagaagaaatctttatcttggtgtgcagtgtctggtgagggacaaatgtcatctctcttggatctgaatctgaaaggatcaaggcactgaagggatttttttgtttcagacagtatccctctgtcg

SEQ ID NO: 7545 - DNA, 407 bp, Homo sapiens
cacgcataggcttgtattcaggaacaattttacaaactccagaaaaggcagcaggagatccagaatctctgtgtgccttctcttcatcctacccccagaaaaatggccagtccagcccagcacctgctgcagcctcaatattaagggactgcttgtcccatctcttgcccaggggaagtcggagagaaagctcgcccgtgtgcatgtttgatataggctgtgtgtgtaggcagggagtgggctagaggaccctggacaccttggccagcctcctaggcagtgagttagaggaaaggggactaggtcttgcacctctgccatacctcgggatccagacagaccaggcagcgtgttaatattggtgttctgcatggtggacccaagctaaagtgttgcctgcagccaag

SEQ ID NO: 7546 - DNA, 664 bp, Homo sapiens
aaccctcactaaagggaataagcttgcggccgcgggcaccgccaggagagcgtgcagctcgaagagaactgcctgtgccgcttccactggtgctgcgtagtacagtgccaccgctgccgtgtgcgcaaggagctcagcctctgcctgtgacccgccgcccggccgctagactgacttcgcgcagcggtggctcgcacctgtgggacctcagggcaccggcaccgggcgcctctcgccgctcgagcccagcctctccctgccaaagcccaactcccagggctctggaaatggtgaggcgaggggcttgagaggaacgcccacccacgaaggcccagggcgccagacggccccgaaaaggcgctcggggagcgtttaaaggacactgtacaggccctccctccccttggcctctaggaggaaacagttttttagactggaaaaaagccagtctaaaggcctctggatactgggctccccagaactgctggccacaggatggtgggtgaggttagtatcaataaagatatttaaaccacccctcgtgccgaattcttggcctcgagggccaaattccctatagtgagtcgtattaaattcgtaatcatgtcatagctgtttcctgtgtgaaattgttatccgctcacaattccacacaacatacgag

SEQ ID NO: 7547 - DNA, 719 bp, Homo sapiens
  misc_feature 172: n = A,T,C or G
gatgctggtctcgctgaggtgaacgctattcagcccaatagggggttaccattattgagtaaaatacttcagattgacggctcaatcttagtttgcctccagttaatcttttgtgcttagggattaagtgtgtggttttttttttgtttttttttttggagacggatctgcntcgtgtcacccaggctggagtgcagtggcgcgatctcggctcactgcaacctctgcctcctgggttcaaacgattctcctgcctcagcctcccaagtagctgggattataggcgccaccaccatgcctggctgattttttatttttagtagagatggggtttaccgtgttggccaggctggtctcgagctcctgacctcgtgatctaccacctcggcctccccaagtgctgggattacaggcgtgactagcatgcctggccatggattaaaatattcaaacatgttgtgtgtacccagatatgctgttaatttaggaaaacagtacaatttctatgaagtggttgtgactaatttctgtagtcaatacaggttgggatatctgatctagttctctgtctactttggagatgattgcataataaatagaagtgtaccctgttttttaaaaagaaataagaatagattagaaaaaaaaacggcggcagcagcgtattccattaggtagggttagtttaggctgacactgcgttcgtttagcacgtcgta

SEQ ID NO: 7548 - DNA, 410 bp, Homo sapiens
cggcacgaggcctcgtgccgggctctaatctctatttgagtgaggttgaggaggatttgacacaggaagtgaaagctcctatcatgtccccgattaccaggcccctgcctgtctctcctatctcagctctcatagcaatactagatcagattttaaattttgactcatgcccaattatttagacttcccaggtgcatcgtgtaatttctaccttagattatctagtcacatctatgctgagatcactttcccatttcataactaaaaactcttattgaacatttagactgtttctgtgactaacactctctaaagtcttttctgatgttccagggaataactgatgatgctgaatctgtattcatttttaccctgtcttgaattatatcattaacattctgataccctat

SEQ ID NO: 7549 - DNA, 172 bp, Homo sapiens
gaagctaattatgattttatattttagaatcattgggtatctaccccatgcaggcttagttgaagtgatagccttttggcttttctgtgtatgatttgtttttatgtaaattatgtagactagataaatgtttatttatttttaaatgtcagttcatagggagtttctgata

SEQ ID NO: 7550 - DNA, 600 bp, Homo sapiens
tcggcacgaggctgcgacggccatgctggggcaggtgagtgctctgttagctgctcccagtgctgtccccaggctgcagttctggtccctggttgtcaggtaggaagggtgcacttgaagcaggtgctcatctcggttccttaacgtttatagtctgacccctcacttaggctttcctctgccaccccggtccagggaagaggctcgctcccgcccatggtcatcactggtctgtctgctctgttgtctgttctttccctgactccctcccaccgaaggcctgatggctactcacccctctgggatggctatgggagaggaggagtgatggggaccgccaccttttctgcaggaaatgtgcccagcagctcttggtcaaagcactgttgctataagctatctctgggatgcctctaggcccccttccctctacacacctctgggaaaagattacactgtattaactctcgaggagtttcctcaccaataaacagacaacctcaactgccagtgccctgcagcctcgggccacagcggcagccttgtttgccttcccacctgcctctgccacacctggtggctgaacatctctggtcgccc

SEQ ID NO: 7551 - DNA, 677 bp, Homo sapiens
tcggcacgaggcgtcttcactgctctgtgtcctctgctcctagaggcccagcctctggtcctgtgacctgcaggtattgggaatccacagctaagacgccgggacaccctggaagcctagaaatggacaacctgaggtatggagtgtatcctgtcaagggggcaagtggataccctggggctgagaggaatcttctggagtactcttattttgaaaagacggagtttcgctcttgttgcccaggctggagtgcaatggcgcgatctcagctcacctcaacctccgcctcccgggttcaagcgattctcctgcctcagcctcccgagtagctgggattacaggcatgcaccaccaccctggctaattttgtatttttagtagagacggggtttctccatgttggtcaggctggtcttgaactcccgacctcaggtgacctacctacctcgacctcccaaaatgctgggattacaggcatgagccaccgtgccaggctgggatttaagtttttcttaggtaaacttaggaaaaacagaactggaaatactccagtgacatagaaaacaaattctacctaggttcttttccctgccccagttctgatcagattcaccatttttggaggccttatttaggtctggcctcactctggagtgttcccttacaaactgatttat

SEQ ID NO: 7552 - DNA, 483 bp, Homo sapiens
ggggaacggcgccgagtcagtgtacacgtcggttgcctaacaaccggcagcggactcctttggctatggcctccaactttaagaaggcaaacatggcatcaagttctcagcgaaaaagaatgagccctaagcctgagcttactgaagagcaaaagcaggagatccgggaagcttttgatcttttcgatgcggatggaactggcaccatagatgttaaagaactgaaggtggcaatgagggccctgggctttgaacccaagaaagaagaaattaagaaaatgataagtgaaattgataaggaagggacaggaaaaatgaactttggtgactttttaactgtgatgacccagaaaatgtctgagaaagatactaaagaagaaatcctgaaagctttcaagctctttgatgatgatgaaactgggaagatttcgttcaaaaatctgaaacgcgtggccaaggagttgggtgagaacctgactgatg

SEQ ID NO: 7553 - DNA, 582 bp, Homo sapiens
gctctttttccggctggaaccatggagggtgtagaagagaagaagaaggaggttcctgctgtgccagaaacccttaagaaaaagcgaaggaatttcgcagagctgaagatcaagcgcctgagaaagaagtttgcccaaaagatgcttcgaaaggcaaggaggaagcttatctatgaaaaagcaaagcactatcacaaggaatataggcagatgtacagaactgaaattcgaatggcgaggatggcaagaaaagctggcaacttctatgtacctgcagaacccaaattggcgtttgtcatcagaatcagaggtatcaatggagtgagcccaaaggttcgaaaggtgttgcagcttcttcgccttcgtcaaatcttcaatggaacctttgtgaagctcaacaaggcttcgattaacatgctgaggattgtagagccatatattgcatgggggtaccccaatctgaagtcagtaaatgaactaatctacaagcgtggttatggcaaaatcaataagaagcgaattgctttgacagataacgctttgattgctcgatctcttggtaaatacggcatcatctgcatg

SEQ ID NO: 7554 - DNA, 183 bp, Homo sapiens
gatttatcttcactctgatgagggctcagacttgataacacccgtggtgccccatccctataggagctggtgagattgcagcctgctgcctcccctccatcagccacagctattggatttcccacccagaatctttaggtaaatgaggtaagtcctgatttttaaaacttcttttgaatctgg

SEQ ID NO: 7555 - DNA, 140 bp, Homo sapiens
aattcaagaaataacccagagactcttcttcttgcaagttaaagaagccatcttaaatgatgagatatattgcccgccagaaactgcagttcttttggcttcctatgctgtccaagccaagtatggagattacaataaag

SEQ ID NO: 7556 - DNA, 549 bp, Homo sapiens
gatatgctagatctgtgccgttaataggcatcgtctctcagcctgagggaggctggattctgggttcctgtagtcacagggaggaaaagctttcttaaaaatggacatgtatgtgcgtgtgagtgtgtgtgtagatttatagtttttggtagtggcaggaataaaaaaaatccatcctacatcttccctaagcactgcctctctctcaccccccaaaacaagttgacgaaagggttttatgtagctgtctatgaggaattggccgtgtctgggggttatgggatgtgggcatccctgggttcttggaagcagctcttatgctactcatagagatgggattgactttatttttttatagtgcttaattcaccattatgagaaatgctcccagtcacaaaaatgcagcccagctcactctgaggaagaagcaggacttggtacggttttacacaactccttaccattaaactgaatcagaaatccattttctggctgaataaaaagtttggcttgcctgtgtaatgcccactcccttccccctggctccct

SEQ ID NO: 7557 - DNA, 71 bp, Homo sapiens
gacagaaggggaaacaatttggagaagatagaagtttgaagtggaaaactggaagacagaagtacgggaag

SEQ ID NO: 7558 - DNA, 517 bp, Homo sapiens
gaatttcgagaaaattaagcgccaccctgggagttgatttccaaatgaaaaccctcattgtggatggagaacgaacagttctgcagctctgggatacagctggtcaggagagattcagaagtattgccaagtcttacttcagaaaggcagatggtgttttgctgctgtatgatgttacatgtgagaaaagctttcttaacatacgagaatgggtagatatgattgaggatgcagcccatgagactgttcccattatgctggtaggaaacaaggctgacattcgtgacactgctgctacagagggacaaaaatgtgtcccagggcactttggagagaaactggccatgacgtatggggcattattctgtgaaacaagtgccaaagatggttctaacatagtggaggctgttctgcaccttgctcgagaagtgaaaaagagaactgacaaggatgacagcagatccattaccaatctaaccgggaccaattccaaaaagtcaccacagatgaagaattg

SEQ ID NO: 7559 - DNA, 566 bp, Homo sapiens
gactttctggtcctcttcttgttctacctggcttcggtgctgatgggtcttgttcttatctgcgtctgctcgaaaacccatagcttgaaaggcctggccaggggaggagcacagatattttcctgtataattccagaatgtcttcagagagccgtgcatggattgcttcgttaccttttccatacgagaaaccacaccttcattgtcctgcacctggtcttgcaagggatggtttatactgagtacacctgggaagtatttggctactgtcaggagctggagttgtccttgcattaccttcttctgccctatctgctgctaggtgtaaacctgttttttttcaccctgacttgtggaaccaatcctggcattataacaaaagcaaatgaattattatttcttcatgtttatgaatttgatgaagtgatgtttccaaagaacgtgaggtgctctacttgtgatttaaggaaaccagctcgatccaagcactgcagtgtgtgtaactggtgtgtgcaccgtttcgaccatcactgtgtttgggtgaacaactgcatcggggcctggaa

SEQ ID NO: 7560 - DNA, 567 bp, Homo sapiens
tttggccgagcggcctaggctgcgagagacacagaggctccttaaaagggctgactgcacttgaggcacccttttctattcctgcatgataacaagctctaacagccatgaccgtagtgtagccttgaaatcacaggctgtggataacaaagcagaaagagagcagcagtctgggtctctcatcttcatggacttgtctcatcatccctaagctgcttaatcagatttcctataattgacaggataaattttgggtatttaaggcattgtgttttagatctcttgttactcatttcgaactcaatccctcattaaaacttaactgctcgtattttattttatctgaggcgttcttcagtatatagctggtatgattgctctgtggaaatgtagtgaatctgtgccgttctacttttacagggtattttacaacactactactttatgtaaaaagttctctaataggcactcatttcattaattctcacaggcattatgatatctattttagagatgaacaaacttattctgcataggattaatgacagtattatgttcagtaacagc

SEQ ID NO: 7561 - DNA, 433 bp, Homo sapiens
  misc_feature 288: n = A,T,C or G
cgtgggttacatcaatgatgcctttacagtgctactccgaagcttttaagctggatccccacaaccacgtgctgtacagcaaccgttctgctgcctatgccaagaaaggagacgaccagaaggcttatgaggatggctgcaagactgtcgacctaaagcctgactggggcaagggctattcacgaaaagcagcagctctagagttcttaaaccgctttgaagaagccaagcgaacctatgaggagggcttaaaacacgaggcaaataaccctcaactgaaagagggtntacagaatatggaggccaggttggcagagagaaaattcatgaaccctttcaacatgcctaatctgtatcagaagttggagagtgatcccaggacaaggacactactcagtgatcctacctaccgggagctgatagagcagctacg

SEQ ID NO: 7562 - DNA, 257 bp, Homo sapiens
gagattcgcgcagaccaggaagcggatagcgtggagtgacggtgccaccgcggcgcatggagtttcgctcttgttgctcaggctggagtgcaatggtgtgatctcggctcactgcaacctccgcctcccgggttcaagcgattctcctgcctcagcctctcgagtagctgagattacaggcatgatccgttgctcccagccacccatgtattcctgattgaaaaaatttgcttatgtcttagttctacagctgaccc

SEQ ID NO: 7563 - DNA, 458 bp, Homo sapiens
acagaagggagtagacaaggcaggaaggagtagtgatgttcctgagttcttgctgaattctgacagcgtgccaacactttgatttctctgtcaaaatgggtgggatttgatatctaaaaaagtataccattacatatctaaaagtatattgttacatggaatatggaagccactgatttaattctggaatgtccgtcaacatgacagccacctaaactcctctgaggcattgtaaacggttaggaaaattgacctttctacacactaaatctggcttcagtggctctcctgagctctaagggagttgggcaggggcagcctgagctccggctgtgagcatagctcaactgatgtgtagttagaatgttcatggaaggcccaggcttgctacttcccattcctttattttaaatgatgtagtgagccaggcgtggtggctcatgcctgtaatccccgca

SEQ ID NO: 7564 - DNA, 581 bp, Homo sapiens
acagaagggctttatcaataatctaaccgacaaagatcatatccatgtgtatgtggttagacatttttatttcattgactaacccaggacagtttcagtgatgcaaattgtgtgccctctggttcagctgaaacagtcctggactttcaaaaaccttgaataagtctcccacagttgtataaattggacaatttaggaattttaaactttagatgatcatttggttccatttttatttcatttttatttttgttaatgcaaacaggacttaaatgaactttgatctctgttttaaagattattaaaaaacattgtgtatctatacatatggctcttgaggacttagctttcactacactacaggatatgatctccatgtagtccatataaacctgcagagtgattttccagagtgctcgatactgttaattacatctccattagggctgaaaagaatgacctacgtttctgtatacagctgtgttgcttttgatgttgtgttactgtacacagaagtgtgtgcactgaggctctgcgtgtggtccgtatggaaagcctggtagccctgcgagttaagtact

SEQ ID NO: 7565 - DNA, 180 bp, Homo sapiens
gtttcccagacccagaaagctttacagaaaatcattgtaagacaatttattaatttgagaaagtcaccttgacagttctttgcacacaagttttacacctctctggattcgaagtttgtattgtattcatagttaaagggaatcgggtactttgcttgttgaataatgcactttaaaaca

SEQ ID NO: 7566 - DNA, 353 bp, Homo sapiens
attgaaatattttgctatttcttctgcataagtgacagtgaaccaattcatcatgagtaagctcccttctgtcattttcattgatttaatttgtgtgtcatcaataaaattgtatgttaatgctggaaagaaaaaaagaagaaagaaagaaaccatccctgtccttcagtttataatctagttggagagataagaaacgtacaaaccaaaagataacagaatatctgaagcatgtactcattgtcagatgttccctctgagagcacagaggaggcaaaagcttctgtgggatgtgctagtcggctaaagcttcacagaggaggtggcaattgaaaatgagtcctgaatggggt

SEQ ID NO: 7567 - DNA, 554 bp, Homo sapiens
ggccattttgtgaagagacgaagactgagcggttgtggccgcgttgccgacctccagcagcagtcggcttctctacgcagaacccgggagtaggagactcagaatcgaatctcttctccctccccttcttgtgagatttttttgatcttcagctacattttcggctttgtgagaaaccttaccatcaaacacgatggccagcaacgttaccaacaagacagatcctcgctccaaactcccgtgtattcattgggaatctcaacactcttgtggtcaagaaatctgatgtggaggcaatcttttcgaagtatggcaaaattgtggtctgctctgttcataagggctttgccttcgttcagtatgttaatgagagaaatgcccgggctgctgtagcaggagaggatggcagaatgattgctggccaggttttaaatattaacctggctgcagagccaaaagtgaaccgaggaaaagcaggtgtgaaacgatctgcagcggagatgtacggctcctcttttgacttggactatgactttcaacgggactattatgat

SEQ ID NO: 7568 - DNA, 571 bp, Homo sapiens
ctgagacaggaggttattttcaattttattttggaattaaatacttttttccctttattactgttgtagtccctcacttggatatacctctgttttcacgatagaaataagggaggtctagagcttctattccttggccattgtcaacggagagctggccaagtcttcacaaacccttgcaacattgcctgaagtttatggaataagatgtattctcactcccttgatctcaagggcgtaactctggaagcacagcttgactacatgtcatttttaccaatgattttcaggtgacctgggctaagtcatttaaactgggtctttataaaagtaaaaggccaacatttaattattttgcaaagcaacctaagagctaaagatgtaatttttcttgcaattgtaaatcttttgtgtctcctgaagacttcccttaaaattagctctgagtgaaaaatcaaaagagacaaaaggcatcttcgaatccatatttcaagcctggtagaattggcttttctagcagaacctttccaaaagttttatattgagattcataacaacaccaagaattgat

SEQ ID NO: 7569 - DNA, 263 bp, Homo sapiens
ctttctaggtttgatgaattttaaagtatctattttatgacagtaaagaagtacattaactaggtctctgtgctctagaattcaccaatgtgtaaagcattggttttcaggaaaggtaaatcaaagtacatgacaataacaaacatttgtatttttttttttttttaaagggagtttcacttttggtgcccaggctaaagggcaggggggccattttggctcactgaaacctccgcctcttgggttaaagggattctcctgcc

SEQ ID NO: 7570 - DNA, 529 bp, Homo sapiens
gcactgctgtcctcttcagctcaagatggtggcctgccgggcgattggcatcctcagccgcttttctgccttcaggatcctccgctcccgaggttatatatgccgcaattttacagggtcttctgctttgctgaccagaacccatattaactatggagtcaaaggggatgtggcagttgttcgaattaactctcccaattcaaaggtaaatacactgagtaaagagctacattcagagttctcagaagttatgaatgaaatctgggctagtgatcaaatcagaagtgccgtccttatctcatcaaagccaggctgctttattgcaggtgctgatatcaacatgttagccgcttgcaagacccttcaagaagtaacacagctatcacaagaagcacagagaatagttgagaaacttgaaaagtccacaaagcctatcgtggctgccatcaatggatcctgcctgggaggaggacttgaggttgccatttcatgccaatacagaatagcaacaaaagacagaaaaacagta

SEQ ID NO: 7571 - DNA, 62 bp, Homo sapiens
gctgcgagaatacgacagaagggtacggctgcgagaatacgacagaagggtacggctgcgag

SEQ ID NO: 7572 - DNA, 309 bp, Homo sapiens
gctggcccagcatgctgtttcagacagctttttctccatttccactctcacttcacagtgcagtttagattgctacccagtacttcccaaagcaagtgtgtttttcttttcttataccttttggccattattctacatcctgaagcattgtctttctttattattttatttatttatttttgccagacaagatcttgctctttggcagaaaaaaaatgataacaaataaattaggggtttaaattagtataataacatctgctgaggaataaatgaataaaaataataattaaaacaagacagtgcttc

SEQ ID NO: 7573 - DNA, 484 bp, Homo sapiens
gttttgcagacgccaccgccgaggaaaaccgtgtgctattagccatggtcaaccccaccgtgttcttcgacattgccgtcgacggcgagcccttgggccgcgtctcctttgagctgtttgcagacaaggtcccaaagacagcagaaaattttcgtgctctgagcactggagagaaaggatttggttataagggttcctgctttcacagaattattccagggtttatgtgtcagggtggtgacttcacacgccataatggcactggtggcaagtccatctatggggagaaatttgaagatgagaacttcatcctaaagcatacgggtcctggcatcttgtccatggcaaatgctggacccaacacaaatggttcccagtttttcatctgcactgccaagactgagtggttggatggcaagcatgtggtgtttggcaaagtgaaagaaggcatgaatattgtggaggccatggagcgctttgggtc

SEQ ID NO: 7574 - DNA, 175 bp, Homo sapiens
aagggtacggctgctagaagacgacagaagggtacggctgcgagaagacgacagaagggtacggctgcgagaagacgacagaagggtacggctgcgagaagacgacagaagggtacggctgcgagaagacgacagaagggtacggctgctagaagacgacagaagggtacggctg

SEQ ID NO: 7575 - DNA, 481 bp, Homo sapiens
agtgtgacaaaataactacatcctaatgaaaatcaagtttgatatgtttgttttgaaagtagcgttggaagagttgttgggggttttttgcatccatagcactggttactttgaacaaataaataaaagctttctgtagttgcttcctttatcagaaaagaacatttgataccatggtatatcatttcctcttcattaaagaacagcttttctaaatgttgggggaaatgtccatagtcattactcagtcaaaacttgtgttctcatgagcctaaggaccattctagatttattacgtgttttttgtgtgtgtgtgtgtgtgtgtgtgtgtgtgtatccataaaatgcatatgtaaatttttttttgtttttaagcattcacccaaacaaaaaaatcacaggtaaacccatgtttctgagatgccattattccaagcaaaataagagataatcccttcaagttaaattgaaaattttcctg

SEQ ID NO: 7576 - DNA, 209 bp, Homo sapiens
acagaaggtatcttgttgcaagtccaaatcaggggagactttgttaatatgtatcttttgctcaaatttagtagggtttttttttttttggaataaaggcctttcaaatttggaatttttaaaaacccattaaaaaaaatcccttcctaaaaaccaaattgaacacagtggccccccttgttaccaaccccaaattcccaattcccccc

SEQ ID NO: 7577 - DNA, 389 bp, Homo sapiens
atgaacctcaaccccatgatcctgaccaacatcctgtcgtcgccttacttcaaagtacagctctacgagctcaagacctaccacgaggtggtggacgagatctactttaaggtcacgcacgtagaaccatgggagaaaggaagcatgaaaacagcgggccagacagggatgtgcggaggggttcgaggtgttggaacaggaggaattgtttctacagcattatgcctgttatacaaattatttaccctgaagttaactcgaaagcaagtgatgggtcttataacacacacagactctccatatattatagcgcttggatttatgtatataagatatacacagccccctacagatctgtgggactggattgaatccttccttgatgatga

SEQ ID NO: 7578 - DNA, 559 bp, Homo sapiens
gatcgtcttaggggctaccttccgtgaccatgtccaagtctctgaagaagttggtggaggagagccgggagaagaaccagcccgaggtggacatgagtgaccggggcatctccaacatgctggatgtcaacggcctctttaccttatcccatatcacacaactggtcctcagccataacaagctaacaatggtgccaccgaacatcgcagaactgaagaatttggaggtgctcaacttttttaataaccaaatcgaggagctgcccacacagatcagtagccttcagaaactcaaacacctgaaccttggcatgaacaggctgaacactttgccacgaggcttcggctccctgccagctcttgaggttctggacttgacgtacaacaacttgagcgaaaatttctcttcctggaaacttcttctacctgaccaccctgcgtgcactctatctaagtgacaacgattttgaaatcctgccgccagatattgggaagctcacaaagttgcagatactcagccttagggataacgacctgatctcgctgcctaaggaaatcg

SEQ ID NO: 7579 - DNA, 441 bp, Homo sapiens
gctgtgatactaatgtgttgttttaacttattccataaaatgacagttgtgtcctagccacatcagacagctatctaagctctggactacccctttgtgcagctgaatcactgcagggttgaccatgcctggtgccacagccatggtttccatttctagatgaaaggatggcctaggacataggtctcaaagactcttggatcagaatcaggagattagggaaaacaggatggatacctgagcactaacagcagtagacgtagacctctgtcctttaccatctgaggtcttctggattctttgtggggttaattttgatttgatgtcatctgtttgcccttcatcttgcttgcaagtgtgcatggttcaatccctcacatccaggaaatgaattttgcaattgggccatatgctaatttgcacgttgattcaccttctttg

SEQ ID NO: 7580 - DNA, 684 bp, Homo sapiens
gacagaaggggccgagcccaggccggttccggcgaagttaaaccctcggagctggcctcggactgctggggcgttaccccttcggccacccccgctgaccatggcagtgtttcatgacgaggtggaaatcgaggacttccaatatgacgaggactcggagacgtatttctatccctgcccatgtggagataacttctccatcaccaaggaagatttggagaatggggaagacgtggcaacgtgtcctagctgctctctcattataaaagtgatttatgacaaagatcagtttgtgtgtggagaaacagtcccagccccttcagccaacaaagaattagttaaatgctgaagaggccttcaggaatccaaatcctgaacatttggaatgagcccagatagaaatatcgaatgcaaagctactggcttcacagagacaaccatttatgatttgctgttctgtaagagtgtggattctttctatcaactgctgatatcatcttcaggaagcaagtccataacatgacatatctggattttgtgcttagaaccttaaattggaagcattcttaattatgcatctaaatttaaaagaagataatttcaaaacagtgctttctttcccttggtttcatcattttcatatcttaaaccaaattacttcggtatctgacacagcatcatcta

SEQ ID NO: 7581 - DNA, 536 bp, Homo sapiens
acagaagggatctttaaacaactttgattttacttttgtatttggtgatagatactagtctgttttcattcttctgcatatggatatccagttttttcaataccatttcccaccagtgtatgttcttggcacctttgtcaaaaatgagttcactgtaggtacatttgtacatttgttactgggttctctattctgttccattgatctatgggtctatttttatgccagtaccatactcttttggttgctataattctgtggtataatatgaagtcagaaaatataattcctccagttttatttatttatttatttttgcttaggatagtattatttcttatagtgaaagcattctatgttatttattattagtctaattttgtagttttacaatgctatcctcttttacaaagctatgatcaactcagtgtgtccagatcaggatcatttgtagctatttgcaaaagtagcaatattctggctgggcatggtggctcatgcttatattcccagcactttgggaggccaagacaggc

SEQ ID NO: 7582 - DNA, 568 bp, Homo sapiens
agtggcgaaaccggaacagagaatttatcacttctgggactcacagtcgtgatgtctttcaagagggaaggagacgattggagtcaactcaatgtgctcaaaaaaagaagagtcggggacctcctagccagttacattccagaggatgaggcgctgatgcttcgggatggacgctttgcttgtgccatctgcccccatcgaccggtactggacaccctggccatgctgactgcccaccgtgcaggcaagaaacatctgtccagcttgcagcttttctatggcaagaagcagccgggaaaggaaagaaagcagaatccaaaacatcagaatgaattgagaagggaagaaaccaaagctgaggctcctctgctaactcagacacgacttatcacccagagtgctctgcacagagctccccactataacagttgctgccgccggaagtacaggtatgggacgggaaagccagaggtaggaaggctcagaaggagacagatggctctaaaagagttttccagtgtgtattctgaggaatactagtgttctggagatgttacttagtgtttca

SEQ ID NO: 7583 - DNA, 508 bp, Homo sapiens
tttaatttgtcactagtttaaagggccaaaagatctgttttcttcagatattagagacacaaaccaagcatctcccactttcttggaattccttctcaaaaatgactaaagtctgagactgttttcttatttaatgtctattgaattctgttttacagaatttcaaaagagcaggttcttagcttacttttcaatggaacattttagccaggtagtataagtacaggtgcgggtaacctcagataaatcaaggtgttatgcagctgtctctatattaaaaatatttgctgacatcagtgtagacttcatcttgtagttcttcagtgttttctttccttatcttttgctcataagatggctttgtgtttggtttgatattatactgagaaagcatattagaatcaaagcaccaagatttcaaaagtccagactactcttccaaagagaaatgtgcaatcacaatagcatgacatgggtacaaatatagaaagtatgtattaaagtattg

SEQ ID NO: 7584 - DNA, 443 bp, Homo sapiens
acagaggggctccttgaaagggctgagtccctcttgctcacccttgacttggaaaaaccagtttctcttttattgtctgttactaatctctattctaaaaattcagctcagttctcaaccatactccaaactctctcttttccagctacctttactccctctccttcaattccactttcctctgcttacttttttttttttctgacagggtctcactttgtcgcccaggcaggagggcaggggctcaatcttgggctcactgcagcctcaacctcccaggttcaagcgattctcctgcctcagcccctcaagtagctgggactacaagcgcacaccaccacgcctgactaatttttgggatttttttgaaaaggcggggtttcaccatgttgcccagactggtcttgaactcctgagcttaaccaatccacctgcctcggcct

SEQ ID NO: 7585 - DNA, 620 bp, Homo sapiens
agctaagacatactgtcagtctcacttctgctgtcccagtcctagaaatcctgggtagaagtggtggacctgtgcaaaggaggttttagaactctgcagtatttgttggggcatggcacaaataagctcatccctcccgtccgaggctagtttcctctggaaccacatttttatctagatgaaaatttggaatgaaatgaaggaatagaaatccaataaaagagttgaagggaaagaaaatttaaggttcttcttgctcaggattacagatatggaccaacacctccttcaagaaaaggtggtaggacacaaagttcttcagtcctgagccctacatgtggggctggaggagaactataacggaaaaacctctgagtttcaccttaggtatagataaaagaaagatggtccccttttatctgattctgagacaggtaaattctgtttgttactacgtttaattagaaggtggaggagtcatttcatgattaagaacattcaacatgtattgttcattaagctagcttcctagttccgattagactaaggagactaagcctagagagtcaatgtcagaacagtgaaaagaattctgtgtgtgtgtgtgtgtgtgtgtgtgt

SEQ ID NO: 7586 - DNA, 480 bp, Homo sapiens
acagaagggaggtttctgcaatgttttttgtaaatggccatttcattaggcatgaatggaagggctttattctgactgaactattattttaatgtcttattagaactagattatatactttgattttctaatatattttaagctttttaaaaattgtgatctctacaacaagaaatacattttacaccataagtcagtatacacatgaagattcatgcatgtggatttgtatatatgtaaaagtatagaaaatacattattgaaacaaaagtttcacaaaataatatttgcacttactttgcacaacaccctctaatattttctcttctagtttagtttttaaaatgctggttgagggcagggtacggtggcctctgcctgtaatcccagccctttggaaggctgaggtaggagaattgcttgagcccaggagttcaagaccaacctgggcaacatagcaagaccccatctcctaaaatt

SEQ ID NO: 7587 - DNA, 395 bp, Homo sapiens
tacggctgcgagaagacgacagaagggtacggctgcgagaagacgacagaagggtacggctgcgagaagacgacagaagggtacggctgcgagaaaacgacagaagggtacggctgcgagaagacgacagaagggtacggctgcgagaagacgacagaagggtacggctgcgagaagacgacagaagggtacggctgcgagaagaaacagaagggtacggctgcgagaagacgacagaaggggaacgtggtggtggtgggcacttgtggttcccagctacctgggaggctgaggttggaggatcgcttaagcccaggaggtcaaggctgcagtgagctatgatcgcaccactgcactccagcctggacaacagagcaagaccctgtctgaaaaaa

SEQ ID NO: 7588 - DNA, 154 bp, Homo sapiens
ggttgcaatctgtggatcaactacgagactgagagaaaggaatgaaaggatggaagaattacaagatcaggcactgatgtctgtctgttccactgatgtaaccacagcacacgcgtggctcacggtactagtgtgataaatgcttgttacatga

SEQ ID NO: 7589 - DNA, 587 bp, Homo sapiens
gccaccacgcctggcttatgatgaatatttctgagtgggatgtttggccacatttatggtcatgtatgtaggctgttacctcaagtgagtcactcagggaacaatgagcacttgaagatttttttatacaaaaggccacagtgaggccaccttgagtcaagccgactaaggcccctcaaccctgtcacttagcagcacgtgacactggcaggaccttcatctccagcatcccacccctgggtgtgggactttggggcagccgtgtgtgcaggtgtcggcacaggctagctcctcctggtttggtgtggtgtttgccattgcagagcaagctgccacgaagacccctgggcatgattttgcttgtatttccggaagtggggttgctgggtcatagggcaggtgtaattttttttacttgaaatgttccacttcttgttctgggaggtggttccaagggtgtctgcttttggccaggcgcagtggctcacgcttgtaatcccagcactttgggaggccgaggcaggcggatcacaaggtcaggagttcgagaccagcctggccaacaaggcaaaaccccgtctctacta

SEQ ID NO: 7590 - DNA, 211 bp, Homo sapiens
gtataagatatagtcttttgattatctactctgaaaaaatgggtttgggctgggcgcagtggctcaggcctgtaatcccagcactttgggaggcaaaggcaggcagattgcctgaggtcaggagttcaagactagcttggccaacatggtgaaaccccatctctactaaaaattcaaaaattagccgggcgtggtgacaggtgcctgtggc

SEQ ID NO: 7591 - DNA, 460 bp, Homo sapiens; identical to SEQ ID NO: 2338

SEQ ID NO: 7592 - DNA, 543 bp, Homo sapiens
gacagaggggcctggatttactgattgctctatcaataatgtgaccagtggaatcattcatcatcatagtgatcctctccatcatttttgaagagtatttttcctcagtttgtgcatgatttatttaacccttttcaaaatgtttttgttagccaggcatggtggcatgtgcctgtaatcccaggtacttgggattctgaggcaggagaatcatttgaacctgggaggtggaggctgcagtggaggctgcaccaatggaggctgcactgctgcactcccgcctgggcaacagagcgagactccatctcaaaaaaaaaataaaaataaaaaaataaagtttttgagatgaggtaggtttcattgttttaggattacaaagaatgctgcagccacctttcttgtacacatatctggtcattgtggaaatgtctacaccgcagatatttctatagtgtagggaagttgatgcactattgctacattataggctttacatgatgcttctaatttgagtacattctgcaaatgtatctttcacgggag

SEQ ID NO: 7593 - DNA, 331 bp, Homo sapiens
gggtacggctgcgagaagacgacagaagggtacggctgcgagaagacgacagaagggtacggctgcgagaagacgacagaagggtacggctgcgagaagacgacagaagggtacggctgcgagaagacgacagaagggtacggctgcgagaagacgacagaagggtacggctgcgagaagacgacagaagggtacggctgcgagaagacgacagaagggtacggctgcgagaagacgacagaaggggagattgtgccattgcactccagcctgggtgacaagagcgagacttcatctccaaaaaaaaaaaaaccacccaggcttgggggct

SEQ ID NO: 7594 - DNA, 173 bp, Homo sapiens
tactgatttgtaaaattgtataaaaaatattaactttcaggctgggcgcagtggctcatgcctgtaatcccagcactttgggaggccaaggtgggtggatcatgaggtcaggagtttgagaccagcctggccagcatggtgaaaccccgtctctactaaaaatacaaaaaatt

SEQ ID NO: 7595 - DNA, 400 bp, Homo sapiens
aggttaagccaaaataatgtggagtaattataacagatttccctcacagcttattaaataatactaaatatgtattgctggcactgcctctcccacatcatatggagacatttgtaggaacataatagcaggttacacagtaatctgttcttgagctgctgtagtagatattcagtgtgtatgaggaggaaaggtgctagtgagagggcagaatgggaaaaacaatttattttttttgagacagagtcttgctctgtcgcccaggctggagtgcagtatgcagtctcggctcactgcaagctctgccttctgggttcacgccattctcctgcctcagcctccgcagtagctgggactatgggcacctgccaccatgcctggataatttttgtatttttag

SEQ ID NO: 7596 - DNA, 583 bp, Homo sapiens
gatttgcttaactgatgtacttgatgatactataaaacctatattatgagaaagcattgctccttcaaaggaatcaagtgatagcaaacactcggtcctgtttccaggttttcctcactgttcattttgcctttgttcttgcaggcggagaataaaaggggcgagagctaaagtgtgttgtcaatgcaagtcaatcattaaccaacaataatttacaaaagaactttatatttgctgtaatcattaaatttagttactaatcccaggaaaagggttagtccttcctcctagtttgtagatttgcaaatggagatgaataattgaatcctattttaatcttttatctgcagtaatctgggcttcttattaccggatatatttgcattttacctccaggccatgttagttcttagaagattattttcctcatgaaccctgttttgttttgcttcctttctgcttcaattctaatgtcacattgcatacctggatgtaaacagcagtcagtttctcagatcaaatagagccctgtagcaacttggaagacacagaagacacacggacataaaactgtatttattat

SEQ ID NO: 7597 - DNA, 255 bp, Homo sapiens
gccagcagatgggtgaagaggtccagaatgatatgcaaaaactactttttagagaaacaaaacaactttgtagcaacaaattaaatatagtattagattgttacttacgtagattttatttttactatgccttaccaagtacatccttaaacaaagtagtatgtacatgaaattgcacttaaccaaaactattgtgtaaaacaaattttaattcctcagggttttaatttaaactagtatttttttagattattt

SEQ ID NO: 7598 - DNA, 628 bp, Homo sapiens
acagaaggggtaagtggagctgttaaaaacagcagtgctgtattgtagttatgtatattcgtgtacagtatgtttagatcccaggtaaacatattcttttctgagaggataaatacctgcatcagatattccaggtaaatataattgagtcagggagtagtaaatctgatggagaattcactttggggaggggaaaaagaatagtatgcaagacccttattggcttttaattatacctgaaaccaaaatggatatttttagtctctctgcatgtgagatttggtgtaacaagatagaactataatatatacagtatatggaaggatagatatagtgctttgttcattttaattgcaaagctgccaaaatagttgaagcttaattacttgacttgccttgatttataggactggggcttggagaaaatgagcagatgttcctctaagacatcgattacagaagccttatatacatggatttgattttgtatttgtagctgaaagtcactgttgtctaaaactaacttttctaagttatcaaaacaacctaatttcttttccaacaaggagaacttaatggcatgaaggattgtgtgacacattggaaaagccagcttactgccactctc

SEQ ID NO: 7599 - DNA, 94 bp, Homo sapiens
gaagctcgagaagatggatagaagtgggaaatggagctagcgtacgggagaaggaaatggctggaatattcgtcaatctgtggtgctttactgg

SEQ ID NO: 7600 - DNA, 93 bp, Homo sapiens; identical to SEQ ID NO: 2342

SEQ ID NO: 7601 - DNA, 682 bp, Homo sapiens
gacagagggggtagaaaagtgggccaggtgatcagagttatttgcatcctcagccaccccatcaagaacaccaatgatgccaactcctgccagatcattattccacagaaccaagtcaatcgaaagtcagatatctacgtctgcatgatctcctttgcgcacaatgtagcagcacaagggaagtacattgctatagttagtacaactgtggaaaccaaggagcctgagaaggaaatcagaccagctttggagctcttggaaccaattgaacagaaatttgttagcatcagtgacctcctggtaccaaaagacttgggaacagaaagccagatctttatttcccgcacatatgatgccaccactcattttgagacaacgtgtgatgacattaaaaacatctataagaggatgacgggatcagagtttgactttgaggaaatgaagcgcaagaagaatgacatctatggggaagactaacagcagtacatgttattatgtaattaggacacatttaaaatttggcaaataatgcatataatgaaatcaatattgtaaggcctgcttttgtaatgaaaatggagagaatgaagagcgctgtgccagtaaatactccccttcacctttctaattattaacttgttttcatggagtggctattcagcattggcagttaccacattct

SEQ ID NO: 7602 - DNA, 480 bp, Homo sapiens
atataaacaaaaggctggagtcctgaaaatgctttatgtgtttgcaggggatatagtttatgaaggaggggattaggcttaaaaagagctagacagtgaaaggtgaaagtagggaacagtggaaggtgatatggcctttaaactttgctgcttacaggtctttcaggttacagtttgaacttgatcctggaagcagcagagaaatcaatcactggctactcttaaaacagctgagtgacacaatcaaatgtgtacttcagaaattttccatgtggcaatgtggaggatgggctggattgccttgttattgggagacaaattagaaggctactgcaatagtcctagcaagagatgatgacaggctgggcacggtggctgacacctgtaatcccagcactttgggaagctaaggtgggtagattgcttgaggccaggagttcgagaccagcctggccaacatggtgaaaccctgtctctacc

SEQ ID NO: 7603 - DNA, 425 bp, Homo sapiens
gttttttatcctgtagggcaggagtggttgtagatgccctctcatgtgctgacatactgattgatggtggcttttaaggtctctcctgagtctagtaggaggcaggcttcctaactgtcatggacaccaggcaggcaggtaggggaatgaagcaagatttggcagcgcagctgctgtgagtttgctctccagtggcttggaaatgggaagtaaaggattctgatcttatgtgagaccattttcagactgtcctagtctgccctcacatatccctggaatggacacatacaggctggtcagggctttcttggggcactgaggtgggagaagctggaggcctgggcagggtagtggaactgagagtgagaagccccctacacttggatctcttgcgtatcacacgagactcatttattgatgactgc

SEQ ID NO: 7604 - DNA, 135 bp, Homo sapiens
gtcaggcacagcccatgtatccaggtgcatcaaactggggatgctaagttcaaaagtgcgtctgttttgaagatttcatctgaaaataatgtgtacactttcattactaccagtttgcattcaaaatagtttttg

SEQ ID NO: 7605 - DNA, 508 bp, Homo sapiens
acagaagggattgatctgttaggactgcttaagagctaacttgtcacctgtgaaatggttggcttgatattttgatatttaaaggtttgccttttgcttctcgtgggtacaagccagagagagcagtggttacatgggggtagaatggtgactcgtttttacctgactgtggatcagctgggtggttcctgaatctcactgggctcattgtggctctttgcttgtcctgtatttactgtctgtggtagtgagatagaagaaccaccatgttcttctggttctagactcaaactacagggagaaggaagagatgtgtctggcatcatttccgtgttggagtaactttgtggtagattgctgtggcctttctttgtggcctgccacttgtcttacattcttcagagcatttatgcacaggagcataaatatatgattttcatcttgccattgaaagtagactttccggccgggcgtggtggctcatgcctgtaatcctagcactttggga

SEQ ID NO: 7606 - DNA, 438 bp, Homo sapiens
gagaaaagaaagggaagaactgccttcttatactacagaacatgcattagtgtgggctatatagctgtggctcatgctacccaattccagatttctttgtcctctaagagttgattgctgtatattaaaattgaacatcagaggatgggaagagggctctgtaagccagaaccttactaaagtagagggcacaatcagtgtgaataaattcacttcagaatctcaagtcaaggccaggcacggcggctcacgcctgtaatcccagcactttgggaggccgagacaggcggatcacctgaggtcgggagttcgagaccagccttaccaacatggagaaaccccatctctactaaaaatacaaaattacctgggcgtggtggtgcatgcctgtaatcccatcatctactcaggaggctgaggcaggagaattgcttgaac

SEQ ID NO: 7607 - DNA, 505 bp, Homo sapiens
acagaagggaacataattgaaggcagtaaaagtgaaattaaataggaagatcatcagtcaaggaagacccactggagaggacagaaaatgaagcagtgttttatcatgtgtatttcagcaggtcttcttgaaatttaactaaaaatatgactgctctctcttcagagaactgctcttttcagtaccagttacgtcaaacaaaccagcccctagatgttaactatctgctattcttgatcatacttgggaaaatattattaaatatccttacactaggaatgagaagaaaaaacacctgtcaaaattttatggaatatttttgcatttcactagcattcgttgatcttttacttttggtaaacatttccattatattgtatttcagggattttgtacttttaagcattaggttcactaaataccacatctgcctatttactcaaattatttcctttacttatggctttttgcattatccagttttcctgacagcttgtatagatta

SEQ ID NO: 7608 - DNA, 592 bp, Homo sapiens
gaatgggaatgtggcaacacaacaaaattctttggaacaactggaacctgactattttaaggacatgacaccaactattaggaaaactcagaaaattgttattaagaagagagaaccattgaattttggcatcccagatgggagcacaggtttctgtagtagattagcagctacacaagatctgccttttattcatcagtcttctgaattaggtgacttagatacctggcaggaaaataccaatgcatgggaagaagaagaagatgcagcctggcaagcagaagaagttctgagacagcagaaactagcagacagagaaaagagagcagccgaacaacaaaggaagaaaatggaaaaggaagcacaacggctaatgaagaaggaacaaaacaaaattggtgtgaaactttcataacacatgttcaaattttatcatgccagtaggagaaatctcagctccacaacccaagcaacatttgtatggatttaagagtattttaagaagacatactgcttgattttaatacattgatcaggccatccaggacacctattctcccaaagtaccttgaactcttagtgattgagactc

SEQ ID NO: 7609 - DNA, 90 bp, Homo sapiens; identical to SEQ ID NO: 6926

SEQ ID NO: 7610 - DNA, 124 bp, Homo sapiens
tacggctgcgagaagacgacagaagggtacggctgcgagaagacgacagaagggtacggctgcgagaagacgacagaagggtacggctgcgagaagacgacagaagggtaccgctgcgagaaga

SEQ ID NO: 7611 - DNA, 96 bp, Homo sapiens
tctcaaactcctggcctcatgtctgcctgccttggcctcccaaagtgctgaaattacaggtgtgagccactgtgcccggccaacatttcttaacct

SEQ ID NO: 7612 - DNA, 493 bp, Homo sapiens
acagaagggatctgtaggcacagtgttgtacagcagatctctagaacttaattcatcttgcataactaaaattatatgcatttaaaatagttaaactcataaaaacaaatattagaatggtggtttccaaggacttagggaagaggaactggggagttgctaatcaacgagtagtcagttggggtctacggtgaataaaagttgtcaattactatgcccaagtatagatttttggattagggatattcaactggtaagtttaattcaaatattccaaaatcccccaaattcaaaattcaaaacacatttggtcctaagcattttggataagggatactcaacctatatatggttgtacttgaagtagcgaaggaagggagagtaaatttggtgatttagtcctaccatgaaatagcagttacctttctggttctgaggtttctctgccaatacctacaccactgcctccaccaccaaaatggaaaaaaaaaag

SEQ ID NO: 7613 - DNA, 678 bp, Homo sapiens; identical to SEQ ID NO: 2354

SEQ ID NO: 7614 - DNA, 485 bp, Homo sapiens
gagatttttgcggctattttcgttggtgtgttggtcatgtctggtcgcggcaaaggcggaaagggactgggtaaaggaggtgctaagcgtcaccgtaaggtcctgcgagataacatccagggcattaccaagcctgccatccggcgccttgctcgtcgcgggggtgtcaagcgcatttctggtctcatctacgaggagactcgcggggttctgaaggtgtttctggaaaacgtgattcgtgatgctgtgacttacacggagcacgccaaacgcaagacagtgacagcgatggatgtggtctacgcgctgaagagacagggacgcactctttacggcttcggcggctaatgctaccgcttaaacgactcagcatctcgacttcccaaatcaaaggcccttttcagggccgcccacagttttccgcaaaagagctcatgacttgttagacgattggttggtctctttataagttaattgttcctgtc

SEQ ID NO: 7615 - DNA, 569 bp, Homo sapiens
gacagagggggtttgtctcttcctgagaaacgagcaaacctgaaagctactctctcagcttcagaagggaaaaaatggttgtagatttctggacttgggagcagacatttcaagaactaatccaagaggcaaaaccccgggccacatggacgctgaagttggatggcaaccttcagctagactgcctggctcaagggtggaagcaataccaacagagagcatttggctggttccggtgttcctcctgccagcgaagttgggcttctgcccaagtgcagattctgtgccacacgtactgggagcactggacatcccagggtcaggtgcgtatgaggctctttggccaaaggtgccagaagtgctcctggtcccaatatgagatgcctgagttctcctcggatagcaccatgaggattctgagcaacctggtgcagcatatactgaagaaatactatggaaatggcacgaggaagtctccagaaatgccagtaatcctggaagtgtccctggaaggatcccatgacacagccaattgtgaggcatgcactttgggcatctgtggacagggc

SEQ ID NO: 7616 - DNA, 568 bp, Homo sapiens
gaggttccttctattctgatggagtactttgcaaatgattatcgagtagttaaccaatttgccagacattatcagactggacagccactgccaaaaaatatggtgtctcgtctttgtgaatctaaaaaggtttgtgctgcagctgatatgcaacttcaggtcttttatgccactctggatcaaatctaccatgggaagcatcccctgaggaattcaaccacagacattctcaaggaaacacaagagaaattctatggcctaccatatgttccaaatactgcctggcagctgcgattcagccacctcgtggggtatggtgctagatattactcttacctcatgtccagagcggtcgcctccatggtttggaaggagtgttttctacaggatcctttcaacagggctgccggggagcgctatcgcagggagatgctggcccacggtggaggcagggagcccatgctcatggttgaaggtatgcttcagaagtgtccttctgttgatgacttcgtaagtgccctcgtttccgacttggatctggacttcgaaacttcctcatggattctga

SEQ ID NO: 7617 - DNA, 550 bp, Homo sapiens
ctttttttccaaggctgtacagacatggcggcggcttttcggaaggcggctaagtcccggcagcgggaacacagagagcgaagccagcctggctttcgaaaacatctgggcctgctggagaaaaagaaagattacaaacttcgtgcagatgactaccgtaaaaaacaagaatacctcaaagctcttcggaagaaggctcttgaaaaaaatccagatgaattctactacaaaatgactcgggttaaactccaggatggagtacatattattaaggagactaaggaagaagtaaccccagaacaactaaagctgatgagaactcaggacgtcaaatatatagaaatgaagagggttgcagaagctaagaaaatcgaaagactaaaatcagagctccatccgctggatttccaggggaagcaacagaacaagcatgtgttcttttttgacaccaaaaaggaagttgaacagtttgatgtcgcaactcacctgcaaacagccccggagctagtcgacagagtctttataggcccaggatagagaccttgcagaa

SEQ ID NO: 7618 - DNA, 551 bp, Homo sapiens
gaagaaggggcccatccttttagcaccgcgagaggcgccggtgtttcgagccgtggcaccggcatcggctgacactgctgcctccagctagttatttcgtcctcttccgttcttcacccctacaccttggaggtgaacttctcacctgagggctgtaaagactcgtttgaaaatggagagccaagaaccaacggaatcttctcagaatggcaaacagtatatcatttcagaggagttaatttcagaaggaaaatgggtcaagcttgaaaaaacaacgtacatggatcctactggtaaaactagaacttgggaatcagtgaaacgtacaaccaggaaagagcagactgcggatggtgtcgcggtcatccccgtgctgcagagaacacttcactatgagtgtatcgttctggtgaaacagttccgaccaccaatggggggctactgcatagagttccctgcagcggtctgtatggacccaggcttgtcaaactgtactatacacatcgtgacagtcaccattaacggagatgatgccgaaaacgcaaggccga

SEQ ID NO: 7619 - DNA, 362 bp, Homo sapiens
gaagggtacggctgcgagaagacgacagaagggtacggctgcgagaagacgacagaagggtacggctgcgagaagacgacagaagggtacggctgcgagaagacgacagaagggtacggctgcgagaagacgacagaagggtacggctgcgagaagacgacagaagggtacggctgcgagaagacgacagaagggtacggctgcgagaagacgacagaagggtacggctgcgagaagacgacagaagggaaccatacacaacactaaaggacgaacctgatctcttatactagtatccttagtcatttttattgccacaactaacctcctcggactcctgcctcactcatttacaccaaaaa

SEQ ID NO: 7620 - DNA, 86 bp, Homo sapiens
aagaacggctttctgctgcaatggagagaaatcataacagacggtggcacaaggaggccatcttttcctcatcggttattgtccct

SEQ ID NO: 7621 - DNA, 582 bp, Homo sapiens
gcagtcaccgcggagcagacgcggaggctggtggcccctgggcgagatgccgtacgccaaccagcctaccgtgcggatcacggagctcactgacgagaatgtcaagttcatcatcgagaacaccgacctggcggtggccaattcgattcggagggtcttcatcgctgaggttcccataatagccattgactgggttcagattgatgccaattcctcagtccttcatgatgaattcattgctcacaggcttggattaattcccctcattagtgatgacattgtggacaagctgcagtactctcgggactgcacatgtgaggagttctgccccgagtgctcggtggagttcaccctcgatgtgcggtgcaatgaagaccagacgcgacatgtcacgtctcgagacctcatctccaacagcccccgggtcattccggtgacatcccggaaccgagataatgaccccaatgactacgtggagcaggatgacatcctcatcgtcaagttgagaaagggccaggagctagacttcgagcctatgccaaaaaaggctttggcaaggagcatgccaagtggaaccctact

SEQ ID NO: 7622 - DNA, 557 bp, Homo sapiens
ggccttcagcttgtacgccaacatcgacatcctcagaccctactttgatgtggagcctgctcaggtgcgaagcaggctcctggagtccatgatccctatcaagatggtcaacttcccccagaaaattgcaggtgaactctatggacctctcatgctggtcttcactctggttgctatcctactccatgggatgaagacgtctgacactattatccgggagggcaccctgatgggcacagccattggcacctgcttcggctactggctgggagtctcatccttcatttacttccttgcctacctgtgcaacgcccagatcaccatgctgcagatgttggcactgctgggctatggcctctttgggcattgcattgtcctgttcatcacctataatatccacctccacgccctcttctacctcttctggctgttggtgggtggactgtccacactgcgcatggtagcagtgttggtgtctcggaccgtgggccccacacagcggctgctcctctgtggcaccctggctgccctaacatgctcttcctgctctatctgca

SEQ ID NO: 7623 - DNA, 463 bp, Homo sapiens; identical to SEQ ID NO: 2359

SEQ ID NO: 7624 - DNA, 651 bp, Homo sapiens
tcgtcgacccacgcgtccggtccaagaacaattgtctctggacggcagctatgcgactcaccgtgctgtgtgctgtgtgcctgctgcctggcagcctggccctgccgctgcctcaggaggcgggaggcatgagtgagctacagtgggaacaggctcaggactatctcaagagattttatctctatgactcagaaacaaaaaatgccaacagtttagaagccaaactcaaggagatgcaaaaattctttggcctacctataactggaatgttaaactcccgcgtcatagaaataatgcagaagcccagatgtggagtgccagatgttgcagaatactcactatttccaaatagcccaaaatggacttccaaagtggtcacctacaggatcgtatcatatactcgagacttaccgcatattacagtggatcgattagtgtcaaaggctttaaacatgtggggcaaagagatccccctgcatttcaggaaagttgtatggggaactgctgacatcatgattggctttgcgcgaggagctcatggggactcctacccatttgatgggccaggaaacacgctggctcatgcctttgcgcctgggacaggtctcggaggagatgctcacttcgatgaggatgaacgctggacggatg

SEQ ID NO: 7625 - DNA, 595 bp, Homo sapiens
tcggcacgaggggcactttttaaaaagtttatatgaggaaacaaagaagacttgctgtgatccagcgacatgcccagtgagtggaagagaagaaactggaattaagctattctgtgtgccacttaggtcaggccctccactacatggtcctgcttctcttgcatgagttagctactcatatcatgagagcatccctttcttatttttctgcgctagtggagcagagccatgtatgtgctatggcccatatgttgaaacttgtttatctacagctagccagatggtctgtaacagcacacaaagaagccatttggaaactttcagagggtcagcacgttttgaaaacaactcagagtaatgcatattgtgatgtcattgcttactttaagcttacagtgaggaatatcttgttaggtactgaatgtgaaacatgcagactttgagaaccaactcagaggtcctagcccccagagacagaaatttatttaattggatcaccctttagacttgttttgtctacatgttctctgaaaaaggaatataatgtcttaatttaaaatactttgttttttaagttgctgctgggttaaataca

SEQ ID NO: 7626 - DNA, 612 bp, Homo sapiens
gaataagcttgcggccgcaccaactacctccctacccaggtgtcagacatgatgcatcaggacagggcttttgccactgcacgcttgaacttctccggacagaggaacatctgtaccctctcaacgatccagaagttgccacggctgctagttgcgtcatccagtggacacctttatatgtacaatttggatcctcaggatggaggagagtgtgtcttaatcaaaacccacagcttgcttggctcaggaacaacagaagagaataaagaaaatgacctcagaccttccttacctcagtcttatgcagcgaccgtagccagaccaagtgcatcttcagcctccacggtgccaggttattctgaggacggcggggcgctgcgaggagaagttattcctgaacatgagtttgcgacgggaccagtgtgtcttgatgatgagaatgagtttcctcctataatcttgtgccgtggaaatcagaagggcaaaacgaagcagtcatgatgagaagcacacctcagaaatcaggacatcccccctatcaggtggttttggagaaaacaaggaaggcggaagaatggagtgcaattgtgtgagcagaaaggggggcaggaa

SEQ ID NO: 7627 - DNA, 534 bp, Homo sapiens
gcggccgcggcgggtgcctcgctctacggtgcctctggccccttccagcgcgccgcgctgcctgtggcgcccgtgggactctacacggcccatgtgggctacagcatgtaccacctgacatagagggtcccaggtcgcccacctgtgggccagccgattcctccagccctggtgctgtacccccgacgtgctcccctgctcggcaccgccagccgccttccctttaaccctcacactgctccagtttcacctctttgctccctgagttcactctccgaagtctgatccctgccaaaaagtggctggaagagtcccttagtactcttctagcatttagatctacactctcgagttaaagatggggaaactgagggcagagaggttaacagatttatctaaggtccccagcagaattgacagttgaacagagctagaggccatgtctcctgcatagcttttccctgtcctgacaccaggcaagaaaagcgcagagaaatcggtgtctgacgattttggaaatgagaacaatctcat

SEQ ID NO: 7628 - DNA, 660 bp, Homo sapiens
cgcccttgctgtcactgctgcttctgatgcctgtccatccccagagttgccccggatgcaggaggattcccccttgggaggaggctcttctggggaagatgacccactgggcgaggaggatctgcccagtgaagaggattcacccagagaggaggatccacccggagaggaggatctacctggagaggaggatctacctggagaggaggatctacctgaagttaagcctaaatcagaagaagagggctccctgaagttagaggatctacctactgttgaggctcctggagatcctcaagaaccccagaataatgcccacagggacaaagaaggggatgaccagagtcattggcgctatggaggcgacccgccctggccccgggtgtccccagcctgcgcgggccgcttccagtccccggtggatatccgcccccagctcgccgccttctgcccggccctgcgccccctggaactcctgggcttccagctcccgccgctcccagaactgcgcctgcgcaacaatggccacagtgtgcaactgaccctgcctcctgggctagagatggctctgggtcccgggcgggagtaccgggctctgcagctgcatctgcactggggggctgcaggtcgtccgggctcggagcacactgtggaaggcca

SEQ ID NO: 7629 - DNA, 345 bp, Homo sapiens
aagtgctgctgctgggtctgcatacgcgatggataacgtgcagccgatataaatctcgccccttctgctttagtgtgaaaggccacgtgaagatgctgcggctggatattatcaactcactggtaacaacagtattcatggctcatcgctatctgttgttggacactgataccatgaaaccacaacattgacaggtggtggaggggtgtttgcacttgtgacagcagtatgctgtcttgccgacggggcccttatttaccggaagcttctgttcaatcccagcggtccttaccaaaaaaagcctgtgcatgaaaaaaaagaagctttgtaatgttatattacttt

SEQ ID NO: 7630 - DNA, 305 bp, Homo sapiens
cccatttaaaccccccccttcaaaccaaaggggggggattacaaacttgacccaccgagcccggccggatttttgtttttaaaaaaaccccaccctcctcctaatttttttttataaaatccctgcttaaaaaaaaaaccacaagggactccacttgttttaaggctttgaaaaggaaaaccaaaaatttttccgggccttttggcaataataaggggttgacccccccccacccaaacccagttggaaaaatccaaacttttcaccccaacccccctaatataggggaggcttttactcacggg

SEQ ID NO: 7631 - DNA, 485 bp, Homo sapiens
aagcttgcggccgtaaacctttttttttttttttttttaaaccatttaactttttttttaaaaaaaaagggggtttttttgtggcccaaatgggtttaaaactccggacctaaagggattttcctgactccttaagggtgggaataacaagcttgaccccccccccccagttgaatttaatttttaaatcaaagttcaaaacaataaaatttttccccttggggggccctgccaaacaaattgaacaaacagaacctgttttaatatttaaaagggggaaaaaatcccctcaggttgggggcaaggaatggcttaaaggaggggccttttttgacctgattttgaaaaaccacccaaatttccggaaaccaaaagggttcccaaaaagggggggtaaaccaaactgaagggaggcagctttttcctctttggcccctggaacctcctgggaagaaaaatttgattttcccccttttttgaacccc

SEQ ID NO: 7632 - DNA, 551 bp, Homo sapiens
tcatcgagacctcatcgatcaagagccatggcgtgcccaccagcaggagggcctgaccttcctgaggccatgtgcggtttctgaggctgacatgtcagtaactgactggggtgcactgagaacaggcaagactttaaattcccataaaatgtctgacttcactgaaacttgcatgttgcctggattgatttcttctttccctctatccaaaggagcttggtaagtgccttactgcagcgtgtctcctggcacgctgggccctccgggaggagagctgcagatttcgagtatgtcgcttgtcattcaaggtctctgtgaatcctctagctgggttcccttttttacagaaactcacaaatggagattgcaaagtcttggggaactgcacgtgttagttggcatcccagtttcttaaacaaatagtatcacctgcttcccatagccatatctcactgtaaaaaaaaaaattaataaactgttacttatatttaagaaagtgaggatttttttttttttaaaaataaaaccatggtcaaaggctgcaaggattt

SEQ ID NO: 7633 - DNA, 431 bp, Homo sapiens; identical to SEQ ID NO: 2360

SEQ ID NO: 7634 - DNA, 454 bp, Homo sapiens
gtaaggaagcccatgtctagtctggtacctttaaaccaggccatctccaacttttcaaaatgactcaaaagttgagctagccttattttaaaaactaaaagttcaaaatcagtggtgacatgaggacttatttatttaaagtgcttaagccttggttttagaggttctaagagacctagtggaatttgctattatgaaaagcatgaaaagattaagaaacctggctaaaggtcaggtgcccagcttcgaggaaaagttgggcttttagggaccgggaagcattaaaggcacagaaactttacattttgggggtcattttgttgagtaggtgaagtgagggatttgggcttgatatttggctgccccatctctatgtgggaactcaaagttaaaaacccactgtaggtaaattagaagggcagctcttgaatctgggccagtctatatcccttct

SEQ ID NO: 7635 - DNA, 519 bp, Homo sapiens
ggagagattagaaggaatgctttctcagtctgtgagcagccagtataatatggctggggtcaggacagaagattcaataagagattatgaagatgggatggaggtggataccacaccaacagttgctggacagtttgaggatgcagatgttgatcactgaaaatgatttatgcaagtttaagattctgctcctaagtgtaggagagaacttggtgcctcttccactctggagtgaagttaatgaaagtctttttccttttccaaaacccaacctgaaccagttctttcttgagacagactatactgagacaacaagttgtcaccagcagaagatagataatatgacctttattaacttgatgaattaacttaaccaagagggtatttgtagtttactatttaccctaaaactttctgtgtctgggtaccctctgagtaggcctataattcctaccttgactgtgtgcatcatttgtaagctagcagatctatgtggtgaaaatgcacaggagcttggta

SEQ ID NO: 7636 - DNA, 424 bp, Homo sapiens
gacatcaaagttgtttccagttgtgctgagacagagcaatgggtttccttcttttacatccttgtgcattgctctattgttatggatgataaatttctaaaagtaaaatcactgggacaaaggatacacacacacacacacacacacacacacactcttttttgtgacaggatctcactctgtcacccaggctggagtgcagtggcgcaatcacagtttactgcatccttggcctcccatgttcaagcgatcctcccacctcacactcccaagtagctgggaccacagcgcacaccaccatgcctggataattatttttctcagtttttgtagacacacggtctccctatgttgcccacgctggtctcaaattcctgggctcaagcaattctcctgccccaccctcccaaagtgctgggactat

SEQ ID NO: 7637 - DNA, 423 bp, Homo sapiens
aaaatacaaatattagccgggcatggtaagtgtccccctgtagtcccagctactcaggaggctaaggtatgagaatcccttgtgccctggaggcggaggttgcagtgagccaagatcgtgccactgcactgcagcctgggtgacagagcgagattctgtctccagaaaaaacaaaaaatataagtgatgttaacagagggacataaggtattttcagttcttgagaaaaagtcgtaactggattcatttcagaatcttgggagtaggagatggattggtggagggtataaaagaaaccatgtcggctgggcgcggtggctcatgcctgtaatcccagcactttgggaggccaaggcaagtggattgcctgagcttaggagtttgcgaccagcctgggcaacatggtcaaacccagtctctact

SEQ ID NO: 7638 - DNA, 379 bp, Homo sapiens
gacgcaagagtgcgtctcggacagcgaatgcgccgacaacctcaagtgctgcagcgcgggctgtgccaccttctgctctctgcccaatgataaggagggttcctgcccccaggtgaacattaactttccccagctcggcctctgtcgggaccagtgccaggtggacagccagtgtcctggccagatgaaatgctgccgcaatggctgtgggaaggtgtcctgtgtcactcccaatttctgagctccagccaccaccaggctgagcagtgaggagagaaagtttctgcctggccctgcatctggttccagcccacctgccctcccctttttcgggactctgtattccctcttgggctgaccacagcttctccctttccca

SEQ ID NO: 7639 - DNA, 488 bp, Homo sapiens
gaagggtacggctgcgagaagacgacagaagggtacggctgcgagaagacgacagaagggtacggctgcgagaagacgacagaagggtacggctgcgagaagacgacagaagggtacggctgcgagaagacgacagaagggattggaagagatgaagacaaaccactgtaggagagttgttcgcaacatcaagtagtaccagttttaaggttttaattcatttgaatcacttatgaattgatgatatacagcaattacttttcaaaattaattttttattaattcatgatgataaatacatagtattcctcagtatctattccaagatactgaggtcataatcagaagctaagctgggtgcagtggctcatgccagtttatcccagcactttgggaggccgaggtgggcagatcatgaggtcaggagattgagaccttcctggctaacatggtgaaaccccatctctactaaaaatataaaaaattag

SEQ ID NO: 7640 - DNA, 547 bp, Homo sapiens
acagaagggttattttctttttttaaatgacggcttaatggccttcagtcacctacagggaggctctgccattcctgtttgtggggctccatgtctgatagcatcatgtggtcacacagcacaaaatcatgatttactaggaccttaacaatgcatggtaaggcctttgaaaacatttttttacatgtccactgggacctgttgtgtcagttcataggatttttacaaaacacatacaaagaacaaataaaatgaccccagtcccaaaatgctctacaagtgcttattgtttgatatggaatgaagacaaaatcaagcacattccgttgttccagaatatgaaactgctccacagagtttcacattcattgggtttctgttgctattttgatttttctaaaagtgtgacatcctgtatcttagtggtgtgaaactgaaacaaaccaatacaagaggttccaattgtaagaatatacaattttgaattagtcacacagatgacagaagtgtaaaaatgttttttggcccaacgttacaaaatatttgt

SEQ ID NO: 7641 - DNA, 467 bp, Homo sapiens
gggctggccaggctggtcttgaactcctgacctcaggtgatccgcctgcctcggcctcccagagtgctgggattacaggcgtgagccactgcacctagcccttcttttttttttaagaactttttttttgaaatggggtttcactgtgttgtccaggctggtcttgaactttttcctagggtcaagcacccttcctgccttggcctcctaaagtgctgggattacaggcataagccaccatgcccagcccctttttgttttcttaaaatgaaaaagttctagttatgggacttgtaaaaaacattatttgcaggtccaaagcacacatttgccgatggtcagtccaggacttagctgtgacaccatgctattgtcaggatacagtttactagatacgggatcctagaataggaaaaaaataaacctggtttaggggatcaaaatggctatttttagccatccaactc

SEQ ID NO: 7642 - DNA, 340 bp, Homo sapiens
tacggctgcgagaagacgacagaagggtacggctgcgagaagacgacagaagggtacggcggcgagaagacgacagaagggtacggctgcgagaagacgacagaagggtacggctgcgagaagacgacagaagggtacggctgcgataagacgacagaagggtacggctgcgataagacgacagaagggtacggctgcgagaagacgacagaagggtacggctgcgagaagacgacagaagggtacggctgcgataagactacataagggggactgtgactgcgcctggattctgccattgcgacacatttttgtgcctttcagcccctggtgtctgcag

SEQ ID NO: 7643 - DNA, 145 bp, Homo sapiens
aacaggttttctatttattcattctccccacccccccgagatggagtcttgctctgtcacccaggctggagtgcggtggcatgatctcaactcactgcagccttcgcctcctgggttcaagcggttctgctgtctcaccctccct

SEQ ID NO: 7644 - DNA, 207 bp, Homo sapiens
gacaaaaattagctgggcatggtggtgtgtgcctgtagtctcacctactcgggaggctgaggcaagcttaacccgggaggcggagattgcagtgagctgagattgggccactgcactccagctggggcaagagagcgagactgtctcaaaaaaaaaaaaaaggtttgtaatttaaagggggccaacgggggggaaaataatttgggg

SEQ ID NO: 7645 - DNA, 616 bp, Homo sapiens
aaaccatcaacctggacagagatgcagaggatgttgatttgaatcactatcgcatagggaagattgaaggatttgaggtactgaagaaagtgaagactctctgcctccgccaaaatttaattaaatgcattgagaatctggaggagctacagagtcttcgagagctggatctttacgacaaccagatcaagaagattgagaatctggaggcgctaacagagctggagattctagatatttcttttaatctgctgagaaacatcgaaggggttgacaagttgacacgactgaaaaaactcttcttggtcaacaataaaatcagtaaaattgagaacttaagcaacttacatcaactacagatgctagagctgggatctaaccgcatccgggcaatcgaaaatatcgacaccttaaccaacctggagagtttgtttttggggaaaaacaaaattactaaacttcagaacctggatgcgctcaccaacctgacagtcctcagtatgcagagcaaccggctgaccaagatcgggggtctgcagaacctggtgaacctgcgggagctgtaccttagccacaatggcatcgaggtcatcgagggcctggagaacaatgtgca

SEQ ID NO: 7646 - DNA, 478 bp, Homo sapiens
acaaactgatgatgcttgaattcctgtttactctgaagttcttttcacatgctggtgagttctgagcaccatgcttacatgcacctctcctttgcagcaaacataagttttgaggtccctgtgagtcctaatggcaccgaggtgctgtctcaggggaccttctcctaatcctgaaaaagtctccatgattggccctggaggagttctcctggttgtctggaatgagttcatactaatagtcagggctctgggcattgtgagaccctggctactttctttctttcccacaatgtatactttctcactatttatttatttatttttttgagacagagtctcgctctgctgcccaggctggagtgcagtggtgtgatcttggctcactgcaacctccacctcccaggttcaagcaattctcctgcttcagcctcccgagtagctgggaccacaggcgcccgcaaccacgcccggctaattt

SEQ ID NO: 7647 - DNA, 534 bp, Homo sapiens
ggctgtcgccgcgcagagccggagcaggagccacggccgagagaagtgggataactggatcagagggtgattaccctgtgtataagagtatgtgtctcactgcaccttcaatggcattgagtagatcgtcagtatttaaacagatcacatcatgcgtgagtacaagctagtggtccttggttcaggaggcgttgggaagtctgctctgacagttcagtttgttcagggaatttttgttgaaaaatatgacccaacgatagaagattcctacagaaagcaagttgaagtcgattgccaacagtgtatgctcgaaatcctggatactgcagggacagagcaatttacagcaatgagggatttgtatatgaagaacggccaaggttttgcactagtatattctattacagctcagtccacgtttaacgacttacaggacctgagggaacagattttacgggttaaggacacggaagatgttccaatgattttggttggcaataaatgtgacctggaagatgagcgagtagttggcaa

SEQ ID NO: 7648 - DNA, 509 bp, Homo sapiens
acagaaggggaaacaggcagcgcgcgacaatggcggtcgctcgtgcagctttggggccattggtgacgggtctgtacgacgtgcaggctttcaagtttggggacttcgtgctgaagagcgggctttcctcccccatctacatcgatctgcggggcatcgtgtctcgaccgcgtcttctgagtcaggttgcagatattttattccaaactgcccaaaatgcaggcatcagttttgacaccgtgtgtggagtgccttatacagctttgccattggctacagttatctgttcaaccaatcaaattccaatgcttattagaaggaaagaaacaaaggattatggaactaagcgtcttgtagaaggaactattaatccaggagaaacctgtttaatcattgaagatgttgtcaccagtggatctagtgttttggaaactgttgaggttcttcagaaggagggcttgaaggtcactgatgccatagtgctgttggacagagagcagggaggcaag

SEQ ID NO: 7649 - DNA, 58 bp, Homo sapiens
tctttctctttggtttattgatttggtttaatttccattatgctattttgcataatca

SEQ ID NO: 7650 - DNA, 562 bp, Homo sapiens
gacagagggggcttggcccaagatggcggcctccgtgtgcagcgggttgctggggccacgggtgctgtcctggagccgagagctgccttgcgcttggcgcgccctgcacacctccccggtctgcgccaagaaccgggcggcccgagtacgcgtaagcaagggggacaagccggtgacctacgaggaggcacacgcgccgcactacatcgcccaccgtaaaggctggctgtcgctgcacacaggtaacctggatggagaggaccatgccgcagagcgaacggtggaggatgttttccttcgcaagttcatgtggggtaccttcccaggctgcctggctgaccagctggttttaaagcgccggggtaaccagttggagatctgtgccgtggtcctgaggcagttgtctccacacaagtactacttcctcgtgggctacagtgaaactttgctgtcctacttttacaaatgtcctgtgcgactccacctccaaactgtgccctcaaaggttgtgtataagtacctctagaacaatcccctttttttccatcaagctgtagcctgc

SEQ ID NO: 7651 - DNA, 91 bp, Homo sapiens
ctcatctcatggctctggggctgggtccatggctggcagtggaaatccctgatctgattcagaagggcgtcatccaacacaaagagaaatg

SEQ ID NO: 7652 - DNA, 313 bp, Homo sapiens
agcaccattgcgctccagcctgagtgacaaagagcaactctgtctccaaaaaaaaaattagaaatgtataataggtaaacatgttacatatataaagtatcaattatcatgtactttgatttttaaaagatgagagagtatatgtcattatgatattctaaccaagaagggaacctttttctgtctccatttttactgattcagaacatatattttaattgtagtgaggttttatgcctcaacttgttaactctggtatttacagaatttttgttctttgtatattagcatataatgtcatagttggcatttg

SEQ ID NO: 7653 - DNA, 432 bp, Homo sapiens
tgtaaccagcggcgtatattttttaggcgccttttcgaaaacctagtagttaatattcatttgtttaaatcttattttatttttaagctcaaactgcttaagaataccttaattccttaaagtgaaataattttttgcaaaggggtttcctcgatttggagctttttttttcttccaccgtcatttctaactcttaaaaccaactcagttccatcatggtgatgttcaagaagatcaagtcttttgaggtggtctttaacgaccctgaaaaggtgtacggcagtggcgaaaaggtggctggccgggtgatagtggaggtgtgtgaagttactcgtgtcaaagccgttaggatcctggcttgcggagtggctaaagtgctttggatgcagggatcccagcagtgcaaacagacttcggagtacctgcgctatg

SEQ ID NO: 7654 - DNA, 593 bp, Homo sapiens
acagaaggggaggtctggttttttgggctgcagtatgtagacagcaaaggttattctacatggcttaaactaaataaaaaggtaacacggcaggatgttaaaaaagagaatcctttacagttcaagtttagagctaaattctttcctgaagatgtttctgaggaattaattcaagaaataacccagagactcttcttcttgcaagttaaagaagccatcttaaatgatgagatatattgcccgccagaaactgcagttcttttggcttcctatgctgtccaagccaagtatggagattacaataaagagattcataagccaggctacctggctaatgatagactcctaccccagcgtgtattggaacaacacaaactaacaaaagaacagtgggaagaaagaatacagaactggcatgaagaacatagaggaatgttaagggaggattctatgatggaatacctgaagattgcacaagatctagaaatgtatggagtcaactattttgaaataaaaaaaaaaaaggaactgaattgtggctaggtgttgatgctttgggtctgaatatttatgagcatgacgacaagttaaca

SEQ ID NO: 7655 - DNA, 344 bp, Homo sapiens
acagaagggcctgggcaacaagagtgaaactccgtctcaaaaaaaaaaaaaaaaaggttttttttttttttaaggttttctacccaccccttgttcttgggcaagaaatttttttttaataggggggttttccaaaaaaatttttgaaacccattttttttaggctttttttaaggtttttgggggtgggggggggggaattttttatgaattccccatttttttatttttaaaaaggaccctggaaattctttcccttaaaaaaaaggccgccccctctaaataatttgtgccccaaatttcacccacctcttttaaaaacacaaacctttttttaaaaaaag

SEQ ID NO: 7656 - DNA, 496 bp, Homo sapiens
acagaagggataaaaagaaaaacctggctctctgcttaaggccaagaaacctggcattaatggaatcaggaaaagaaaagcagttgccacaaatcaaatcctttcatagggtatatctgtctgttattcctttgacatctgaaaattgccacatattgggaaagagaaatcattgcctttcttcatgtccctccagcacagttgtttctgagctgcgctgtctctaactgccagctcatgtacgctccttccagagagtcattctgtctgcacttagaggaaagaaaacatggactccttgacaccacgtctctgaggactcatcttgtgtcttccatcctggcacaagaaccaagtgtaccagacagcctttgaggctgaaaagagatcgaggaacagcaggggaaaggcaaatagcacaatatttgtttccacaactgatgtcactacaatgaatatgaaactcagaattttctgttaagtcaagcactagctg

SEQ ID NO: 7657 - DNA, 560 bp, Homo sapiens
gagaaatgcccaaaagaggtcctggccatcaaacataattctctcacaaagtccactttactcaaattggtgaacagtgtataggaagaagccagcaggagctctgactaaggttgacataatagtccacctcccattactttgatatctgatcaaatgtatagacttggctttgttttttgtgctattaggaaattctgatgagcattactattcactgatgcagaaagacgttcttttgcataaaagactttttttaacactttggacttctctgaaatatttagaagtgctaatttctggcccacccccaacaggaattctatagtaaggaggaggagaaggggggctccttccctctcctcgaatgacgttatgggcacatgccttttaaaagttctttaagcaacacagagctgagtcctctttgtcatacctttggatttagtgtttcatcagctgtttttagttataaacattttgttaaaatagatattggtttaaatgatacagtattttaggtatgatttaagactatgatttacctatacattatatat

SEQ ID NO: 7658 - DNA, 85 bp, Homo sapiens
gaaggtaacttcattttgtctatttgctgttgattgtaccaagggatggaagaagtaaatatagctcaggtagcactttatactc

SEQ ID NO: 7659 - DNA, 494 bp, Homo sapiens
ggtggccaacggcctgcagagcaacatgcccaagttttattgtgactactgcgatacatacctcacccatgactctccatctgtgagaaagacacactgcagtggaaggaaacacaaagagaatgtgaaagactattatcagaaatggatggaagagcaggctcagagcctgattgacaaaacaacggctgcatttcaacaaggaaagatacctcctactccattctctgctcctcctcctgcaggggcgatgataccacctccccccagccttccgggtcctcctcgccctggtatgatgccagcaccccatatggggggccctcccatgatgccaatgatgggccctcctcctcctgggatgatgccagtgggacctgctcctggaatgaggccgcccatgggaggccatatgccaatgatgcctgggcccccaatgatgagacctcctgcccgtcccatgatggtgcccactcggcccggaatgactcgac

SEQ ID NO: 7660 - DNA, 193 bp, Homo sapiens
gtagcagaccctgtctctttaaaaaaaggaaaaatgactgggcgtggtggctcatgcctgtaatcccagcactttgggaggccgaggcaggcggatcacctgaggttgggaattcgagaccagcctgaccaatatggagaaacccccgtctctactaaaaatacaaaattagccgggtagggtggcacatgcc

SEQ ID NO: 7661 - DNA, 589 bp, Homo sapiens
acagaagggatgagtgcctaatccacttgtgaaaattaaagaaaggggatcttttttatgaaaaacacctaatatggaaagacataaattgtaataaaaagtgttagcaccttgcacctcctgctaattgcattcctagtcaagaggaagcaaaattgtataacaaatgtcagaggtacatcatgaacaaagtgcaaagaattgtctgttcctttcaatagtgaattgaaaaagagtagcaaacctgtttaagctatgtatagtagctttaattttggctcctaacctttctgggactcatctatttcatttgtctaatgaggataatagtaacccattcaacttactgtacacagactgtactgtacacagactgtttcttcattatattcattaaagatggatttaacattaattcattcattcacccatgtattttttagtttaagaaatatttttgggccagacgcagtggctcacacctataatcccagcagtttgaaaggccaaggcaggaggatcccttgagcccaggagtttgagaccagtctgggtaacatagcaagatctcatctctactaaaatttta

SEQ ID NO: 7662 - DNA, 385 bp, Homo sapiens
ggttcttaaattcagtcatttgatattctgtgagacttcatatttctcatccctttattgctttttagcaaacataagaaaccatgagtcattttgtcatttagagtattctgataaaatctcttgaaaatactgaaatcaaaaggttaatgattttttgttcattctgatttgtcattttattatctgttatcggtctaaagtgctaatttacccatttgatttttctgctagacagataacttttaatttttcaaatttggcagacactttttttttttttgaaaatctttccttccaaatctgttgcccactgaacagccacccgtccctcactgtcctggtgtccaattgggctggatggtgttggggcatgatgtgtgga

SEQ ID NO: 7663 - DNA, 535 bp, Homo sapiens
gtaggacacccatcttaccggccaatgtccaaaattacggtttgaacataattggagaacctttccttcaagcagaaacaagcaactgagggaaaaagaaacacaacaatagtttaagaaattttttttttaaataaaaaaaaggaaaagaggaagactggacaaaacaacacaaaggcagaaaggaaagaaactgaagaaagaagataatagaccagcaattgcagcacttacaatcactaattcccttaaggttgaaactgtaatgacataaaaagggtcgatgatatttcactgatggtagatcgcagcccctgcaacgtagcctttgttacatgaagtccgctgggaaatagatgttctgtctctatgacaatatattttaactgactttctagatgccttaatatttgcatgataagctagttttattggtttagtattcttgttgtttacgcatggaatcactattcctggttatctcaccaacgaaggctaggaggcggcgtcagaggtgctgggtgacagagccatg

SEQ ID NO: 7664 - DNA, 419 bp, Homo sapiens
gagtaagaagccagcagggctggtgctggggcttcttctcctgaaggggctgcaagagggaaggcttagccatgtcgtccttgatcagaagggtgatcagcaccgcgaaagccccaggggccattggaccctacagtcaagctgtattagtcgacaggaccatttacatttcaggacagataggcatggacccttcaagtggacagcttgtgtcaggaggggtagcagaagaagctaaacaagctcttaaaaacatgggtgaaattctgaaagctgcaggctgtgacttcactaacgtggtgaaaacaactgttcttctggctgacataaatgacttcaatactgtcaatgaaatctacaaacagtatttcaagagtaattttcctgctagagctgcttaccaagttgctgctttaccc

SEQ ID NO: 7665 - DNA, 503 bp, Homo sapiens
atacatcccaaagagaaagattatttctccacgatctataaaagatgtgcttcctcctgttgaagaggctgttgacaggtgtctctacctactggaccgttttgcacagcctgtgacaaaggataagtttgctttggaatctgagaatatttcagaaccatactttacgaacagaaggactatttctcaacaatctgcagaaaatttagatgctgcatgtggcattgacaaaacagaaaatggaaacatgtttgaagaccaaaatgttgataaggaaggaaaagcactaccagcaactggacaaaaagcaaatgtgtctcctgagcaaccgcctttattcacgaatcttctgagcgacctcctttatccacgcttactctgaaagaggcagatcccagttcaaaagcagccatgagaaggaaggattcaccacctccaggaaaagtgtcttctcagaaacaaccagctgagaaggctacaagtgacgacaaagattctgtttc

SEQ ID NO: 7666 - DNA, 637 bp, Homo sapiens
  misc_feature 328: n = A,T,C or G
acagaagggcatttgacacagtgggagcagagcagatcggaggttgagtaactctttcaaagacacccagtgagcccagggtggggccagagcacaatgctggggcgcctcgactcccgacccctggccctttccaccggaccccactgccgctccttaaaaggcaccgtttgccacgcactttctaaacacattacctcatcgaattccactcttgtgagctatactgctttccttttgggacaaggttttcaccattttgagccccagttgcaccatctccaagttggggctcatgacagtccctgcaaatgaggtcacggctcancaggtggaagcacgctggcaccgattggaagttccagaagtgttatctgtgtggctttctcctttcccctacccccagccacatcttaaacaggaaacaccgggcttcccaagccacttctgagcgcactctcacgcttacctctgtggcagccgacggagcgtctcctgggagcaagaacactcctgctagacagctgttaactaccaactggaggacaagccagttctccaccttcagccagcttgctgggtgagcttaggagttcacagcaaacacatggacacatctaaagtctaaatgctacag

SEQ ID NO: 7667 - DNA, 333 bp, Homo sapiens
cgagtagctggggttacaagcacccgccaccacgcccagctaatttttgtgtatttagtagagctgggttttgccctgttggccaggctggtcttgaatgcctgacctcaagtgatctgcccccccgacttcccaaaatgctgggactactggcatgagccagtgctcctgtcctcattccattcttcaccgtggtactgaccatccatttattcagcaccaattgtgtgccagaccttgtgtcagcattatggaggacttcccttgggaggcttgttagctgtacttgcaatctgatttgggttcccaaatcagcatataacaccaggtatt

SEQ ID NO: 7668 - DNA, 457 bp, Homo sapiens
tcttgaatcacacctaccaggtcaacttcttgtgtctgtgacttgtgcggtaggattggtctgggaatgaatctaacaggcccttttggctttgtgaagacttgttactacccaggttgtctagcattctgagctgtatggggagcgcagtcatattttggctgtatttcactggcagtagaaatcttgacattccaatttcccttgaggggtagtaattgtttaggggttgaaactggagaggaatccaacatctggacatggcaggtacagtagcattggagtctggcagacttgagcccagatgactgttccgcaactaactaaacaatatccttgggcaagtcattttcttcatctggggctctggagggccgtctttttcctctgcctagatattctggcttgtgtgatagctcaacctttaggaattgttctggattactgctttttatct

SEQ ID NO: 7669 - DNA, 195 bp, Homo sapiens
acccacagaataaaacccaatgttcttaatatgtagtcttaatatagactctataaatagcccctttgttaatctatcttgaattactcacttttaggattcagctccctactgagaccccaactggctttaccttctgttccctcctggttctgcttatcttccattgcccctgtggacctgctttctgtcatt

SEQ ID NO: 7670 - DNA, 299 bp, Homo sapiens
atcattttatttattaagtccagaaactgattttaggggtagagggatgagttgtgctatttaatcttactctggcggataaataaacatatggattcaaaggtgttgagtgagagaagactcttgatatgttagaagaccactgctctaggatatgtgtagaaacaaaactgacacataggaagtacttaatgaatgtttgttgaatgaataaattttcaagcctgcctgaaatatctatgtgacatgtgtcgacacatacagcccctctggtactcagtatcatattctgaaaaatg

SEQ ID NO: 7671 - DNA, 594 bp, Homo sapiens
ggggataggagcctctctgcctactgctgctacacaagaccctgagactgacctgcaggacgaaaccatgaagagcctgatccttcttgccatcctggccgccttagcggtagtaactttgtgttatgaatcacatgaaagcatggaatcttatgaacttaatcccttcattaagaggagaaatgcaaataccttcatatcccctcagcagagatggagagctaaagtccaagagaggatccgagaacgctctaagcctgtccacgagctcaatagggaagcctgtgatgactacagactttgcgaacgctacgccatggtttatggatacaatgctgcctataatcgctacttcaggaagcgccgaggggccaaatgagactgagggaagaaaaaaaatctctttttttctggaggctggcacctgattttgtatccccctgtagcagcattactgaaatacataggcttatatacaatgcttctttcctgtatattctcttgtctggctgcacccctttttcccgcccccagattgataagtaatgaaagtgcactgcagtgagggtcaaaggagagtcaacatatgtgatt

SEQ ID NO: 7672 - DNA, 523 bp, Homo sapiens
gtctctgatcttcctggccaaatttctcaagaaggcagacacaagagacagcagacaagcctgcctggctgccagccttgccctggctctgaatggcgtctttaccaacacaataaaactgatcgtagggaggccacgcccagatttcttctaccgctgcttccctgatgggctagcccattctgacttgatgtgtacaggggataaggacgtggtgaatgagggccgaaagagcttccccagtggacattcttcctttgcatttgctggtctggcctttgcgtccttctacctggcagggaagttacactgcttcacaccacaaggccgtgggaaatcttggaggttctgtgcctttctgtcacctctactttttgcagctgtgattgcactgtcccgcacatgtgactacaagcatcactggcaagatgtactagttggatccatgattggaatgacatttgcctatgtctgctatcggcagtattatcctcctctgactgatgcagaatgccataaacca

SEQ ID NO: 7673 - DNA, 509 bp, Homo sapiens
acagaagggatgagtatttgggacgagaacaaagcatattgaaaccgcaaatgatgtgagattgtgtcaggctttgtgttgggcaccaagcaccttaagatagtcagatataatgatggttagtgaatgtttgaaataaatcaagtggtaatgttttaggttgcaaataaggctcatgaaaataattatttggaggcttgagaaaaatgacttttaaaatggagtcactatttttaaaacacaatactcttttattagaaaaagtttgataactctgatataaatattccaacgatgcttgtgtacaatacttaaagcttttagtgaaaatagtttttatttaaatatttcccctggccaagtgtggtggctcacacctgtagtcccagcactttgggaggccgaggcgggtgggtcacctgaggtcaggagttagagaacagcctgggcaacatggtaaaaccctgtctttactaaaaaaacaaaaattagctgggtgcagtgacgca

SEQ ID NO: 7674 - DNA, 576 bp, Homo sapiens
acagaagggattcggtaggtctgggatggtgatggggatgggacctcagaatgtatattgctaacatgctcccaggtaatgctgatgcttcaagtcttggaaccacacttcgagaatcactgttataatgtacagcagaactgcatgatcaggtaagtgtgctgagctgttgatcctcctcattcctgagctgggtgtgtagagacaagagcaggagactaggggctgatgatcttttagtcacatccatttaccccagagtgctctatacaaatagcatttttatgtattccccggcatgaaaaagctggaaagcaccaagagaggttggtgttaaacaacatgaagttttggaatctcagaaagtctgaatgagttaatttttttgagctttagcatacttatcattttataatgaggataattccttaaagcaattctgtccaatagaactttgagatgatagaaatgttctgtatctgagctgtccaatggtgtagccactagtcacatgtggcttttcagcatttaaaaaatggctagtaaggttggggcacagtggcttatgcctgtata

SEQ ID NO: 7675 - DNA, 349 bp, Homo sapiens
ctcttagctagtgggtaaaaaatcagatgtcatttaaattcaacatattttaatattctaaattcaggaacctatgtattttcttttctttttttttttgggggctaaaacaggaaatttttccttatttcattaagttagccggaggttttttatttttatttttgaaacaaagtttcactctcatcactgaggctggagtgcaggggcatggtcttggctcactgaaacctccgcctcccgggttcaagggattctcctgcctcaccctcccaagtagctgggattacatgcacacaccaccacccctggctaatttttgtatttttgggggcaatggggttttacc

SEQ ID NO: 7676 - DNA, 517 bp, Homo sapiens
gaaggggagtgcctgacctcaagcgatctgcccccccgacttcccaaaatgctgggactactggcatgagccagtgctcctgtcctcattccattcttcaccgtggtactgaccatccatttattcagcaccaattgtgtgccagaccttgtgtcagcattatggaggacttcccttgggaggcttgttagctgtacttgcaatctgatttgggttcccaaatcagcatataacaccaggtatttctctaatagagtatgtgccacactttctgctaactgcctgtttatcagtgtccccacatcccaatatctggttccttcaagggcagggagcacagggtatggcgtcagagtggtactcagtgatgtttactggtgggtagaaggaagggttagtccctgtttttgaagactttatgttctagcaggcagaaatgaagcacaaatagttcaagaaataaacaatttaagaataaagtcatttggtttgcttcgcagaaatgtcttattgctga

SEQ ID NO: 7677 - DNA, 223 bp, Homo sapiens
agatgcgagatgttattttgagattctagtatttggcatagcatttctcaatgtatgttttacagaactttatttccctgagatgctaataagcatttcacaaaaattaaaaaggattacattgtcagatgagtttgagaaagagttgatttcacttcactgtagaactcagagcctttggtatgctaatatgggcacaattaatatagtatgcgtgtttttc

SEQ ID NO: 7678 - DNA, 518 bp, Homo sapiens
tgctaatttttattactttctttactcttttagaaactagattttagcattggaactagaaactattttcggaaattaaatcttagctttgaaattaaatacccgcttttttctggagaataaagaattatgaataaatgaattattctgattaaaattattctgattaaaatgaattattctgaataaaaaatcctgatgtacattgaaaaggtttattagattgtatacaatttctaggcagggcatggtggctcacacctgtaatcccagcactttgggaggccgaggtggggagatcacttgagcccaggagtttgagaccagcctgggcaacatggcaagaccctgcctctactaaaaatacaaaaattagccgggtgtggtggtgggtgcctgtaatcccagctgctggggaggctgaagcaggagaattgcttgaacccgggaggtagagattgcagtgagccgagatcgtgccactgcattccagcctgggcaacaagcgaaactcagtc

SEQ ID NO: 7679 - DNA, 574 bp, Homo sapiens
ttaaaagtgaatagatccctctcaatatcaaaggctctgttctgttttgtattgtgttatctgatggttttaaggttttggggcatcagaaattactttgcattatgagagaactttggtgtgtaataactaggtagaaaatatactttaagtgttggctaatagtaactatgaagggatacttaactctttgcacatttgaattgaagaagcatggttttggccacctgaaaaatatggaaacatccccaccacctattaagagatgagacttccatgacagatgggctaattacaaaattgattgattggctttgggttgccttgcaatgaaatgaatggtagaagcaatgcactgtcttctcccttgctatctccctccttttgggaacccaagatccaatataaaatagcacacttaattttggcgatctgcctttgcttcactgtgcctgcttattaagccctaaagatgcatgctttcctggccctgttcctccaaaggctccaccctgaagccagtaatccaattaagaaactagaaataaaaaatcttacaaacactaaatcttca

SEQ ID NO: 7680 - DNA, 601 bp, Homo sapiens
gacagaagggagtgaataaaagcgtattgtaatttcatgtctgcttcagatcatggggacagtaccacccaggaactgctgctgaggcctgggaagctcccttgccttcgggtttggagcagtggcatcatcccaccaacctgagccatgaaagggctgagcagaaagttaaatggtagtttcctgactggaagccacacgtaggtcacttgagtagtcaggaagcacagtgggtgtggagccatcatctgtcttgggctggttcctcccaatctttgtccagtggtataaatggactgtctgctgatggccatacgcagcactggctgttaagatggggaaggggtacatcaggattccactcatagccctggttcgttattgttactcatggctctgacgtccccaagccctcttgaatgttgcaagcaatgttaaatatcacacctcggtctccttttgagcagcccaggtacctaaagcaaggtcaccaaacttgggtttaaacttcagttgccatcacagcagggttcaggttatgcagtttttgcagtgtggagttgaacgctgggtaaagaagggagagctgactctccattgc

SEQ ID NO: 7681 - DNA, 536 bp, Homo sapiens
ggggatcttgacgttcatagaacagtttgttgttgataaaatgcagttgtgctataaggaagctacatttatattgttttgatactcttaaagtgtccaatctctaggtgtatttgattgggaaaatagtaccattgtggttgaaatgctctgatggaagactcccattataccagcatcagcagtgtggaggggccggccagtaaagtgatctctctctggttggaatatgtagagaaaaggagacaacaccgtcgcccagaagtggaggttgccatattacttgcacaaacctcatgccgttaggtcttcagccacagccgatatttgcagagatgtatctccagcgatctatctccagagatggaacctggagaaatgaccaaacttgacacagccttcaatggttggataaatagctcattaacccaattagtagagaaagctgtgcaatccaagcactagcactgtttgtaggagttattaatggagaacacaatgtattattaaggggcaggggtttttgtttttctttt

SEQ ID NO: 7682 - DNA, 104 bp, Homo sapiens
cagaaggggatcaccaaacataacgatgatgagcagtacgcttgggagtcctcagcagggggatcattcacagtgaggacagacacaggtgaacctatgggtcg

SEQ ID NO: 7683 - DNA, 203 bp, Homo sapiens
agaaaagtcatgtctatacatttgcatatattattaaagatatatagtatgtaaatatattttttagacaatagcttgtaaatgcaatttaattttttttcctcttcttgctgaatttttttttttttttaaaaatcggaatttggcccaaacccgggggttcacccctaaaatcccacccttttaaaaggttaaggcaggcg

SEQ ID NO: 7684 - DNA, 611 bp, Homo sapiens
gaggctataacttggtctaccgatcaacaaggcatctcaagagacttgcgttgatgatacagtcctctggcaacacagtgcttctcctcatactgtgcatgcagcactccttcccagagcctggcagattgtatcttgacctcattctggccatcttggcactggaactcatctgttccctgatatgtctcctcatttacacagtgaaaatccggagatttaataaagctaaaccagagcctgatatacttgaagaagaaaaaatctatgcttaccccagcaatattacctcggagactggattcagaactatttcaagcctagaagaaattgttgaaaagcaaggagacaccattgaatacctgaagcgacacaatgcgctgctgagtaagcgattgttggctctcacttcctcagacctgggctgtcagccaagtagaacgtgagagtctcacggtcatgacagcaattgcagaggaacccagagtaattgagactgactgaccacctgacaagctgccacggggaactgcagcttttgctgaatagcattttacagtgtttgttggaaacctgaatttggttctgacttctgtggctgtttaaaatat

SEQ ID NO: 7685 - DNA, 376 bp, Homo sapiens; identical to SEQ ID NO: 2394

SEQ ID NO: 7686 - DNA, 532 bp, Homo sapiens
agcacgatctcggctctcaccgcaacctccgtctcctgggttcaagcgattctcctgcctcagcctcctaagtatctgggattacaggcatgtgccaccacacctgggtgatttttgtatttttagtagagacggggtttcaccatgttggtcaggctggtctcaaactcctgacctagtgatccaccctcctcggcctcccaaagtgctgggattacaggcatgagccaccacagctggcccccttctgttttatgtttggtttttgagaaggaatgaagtgggaaccaaattaggtaattttgggtaatctgtctctaaaatattagctgaaaacaaagctctatgtaaagtaataaagtataattgccatataaatttcaaaattcaactggcttttatgcaaagaaacaggttaggacatctaggttccaattcattcacattcttggttccagataaaatcaactgtttatatcaatttctaatggatttgcttttctttttatatggattcctttaaaacttattc

SEQ ID NO: 7687 - DNA, 603 bp, Homo sapiens
acatgcccactgtggagctcctgaaaagtatcacctgatgcagtttgcggaagtaaccagagctgtgagcgagggcaacctgctgctgctgcacgaggcgctggcgaagcacgaggccttcttcattcgctgcggaatcttcctcatcctggagaagctgaagatcatcacctacaggaacctctttaagaaagtgtatttgttactgaaaacacaccagctgtctctggatgcttttctggttgccttgaagttcatgcaggtggaggacgtggacattgacgaagttcagtgtattctggctaacttgatatacatgggacacgtcaaaggctacatatcgcatcagcatcagaagctggtggtcagcaagcagaacccatttcctcccctgtccacggtgtgttgaaagtacacggagccccgaggacgggtgagcagttgtttctttccctttggttgtgctgatgagaccggtccggtactgcaacaaggctccctgaagccggaactcttggaggcgcttttcccagggatgctgaggctgagattttcagcacacccgagttaatctccttcatttgtaactaatttcagcctgat

SEQ ID NO: 7688 - DNA, 493 bp, Homo sapiens
  misc_feature 189: n = A,T,C or G
acagaagggtttattcttaacactaaaattaacatgccacacgaagactgcattacagctctctgtttctgtaatgcagaaaaatctgaacagcccaccttgggtacagctagcaaagatggttacttcaaagtatggatattaacagatgactctgacatatacaaaaaagctgttggctggacctgntgactttgttggtagttatcacaagtatcaagcaactaactgttgtttctccgaagatggttctttactagcagttagttttgaggaaatagtcacaatatgggattctgtaacatgggaacttaaatgtacattttgccaacgagctgggaaaataaggcacctttgctttgggagattgacgtgttcaaagtatctacttggtgctactgaaaatggcattctttgctgttggaatctgctgagctgtgcattggagtggaatgcaaaattaaatgttagagttatggaacccgatcctaat

SEQ ID NO: 7689 - DNA, 89 bp, Homo sapiens
gttgtttatgggaacaagtttgcagagaaaaaaatggttgaatagaaatagaaggggtcggccgggtgcagtggctcacgcctgtaatc

SEQ ID NO: 7690 - DNA, 229 bp, Homo sapiens
gggagtgagcatttgcagaagccctgaggctggatcaagcctgacaagtttaaggacccacacgcagagcagtggtggccagagagctgggagtgacgtgtagagagtggtgagggatgaggacaggatctgtcaagtctctcagccctggtaaaagatttgggttttactctgcatgtgctgagtcctttggagggtgacaaaatatttgcaaatcatatatttgatg

SEQ ID NO: 7691 - DNA, 586 bp, Homo sapiens
aggcaggagagggaaaggcagcagcggcggcagctggaggatgaagaaggagcatgtgcttcactgccagttctccgcgtggtacccgttcttccgaggcgttaccatcaagagtgtcattcttccacttcctcagaatgtgaaggattatttactcgatgatggaactctggtggtttcaggaagggatgatccaccaacacattctcagccagacagtgatgatgaagcagaagaaatacagtggtctgatgatgagaacacagccacgcttacggcaccagaatttcctgagtttgccactaaagtccaggaagctatcaattccctcgggggcagtgtctttcctaagcttaattggagtgccccaagggatgcgtattggatagcaatgaatagttctctgaaatgtaaaaccctcagcgacatctttctgcttttcaagagttccgatttcatcactcgtgacttcactcagccgtttattcattgtactgatgattctccagatccatgtatagaatatgagctcgttctccgaaaatggtgtgaattgattcctggggctgagtttcgatgttttgtc

SEQ ID NO: 7692 - DNA, 84 bp, Homo sapiens
gattccactcatagccctggttcgttattgttactcatggctctgacgtccccaagccctcttgaatgttgcaagcaatgttaa

SEQ ID NO: 7693 - DNA, 510 bp, Homo sapiens; identical to SEQ ID NO: 2397

SEQ ID NO: 7694 - DNA, 484 bp, Homo sapiens
aaatatagctgaagtgatcaccacagccataaaattgtttaagaaagatttatataatgtttacaaatctggaatcaaggattttagctgaaatcctttaagagatattagagcaagtatttaattcaggtattttcaagttttaaaacttaacctgtttacctactaaaaataaaatagctagtttttttctgcatataaaagttcattgaaatgatatgcccttatttgcaatacttttcccataaagttttaagtgtgaaagaattgtaatttactagatatgtttggtatgggatattttgttaggcaagttttcttttttcttcttaaattgcaataggcttccaaaaagagtataattgtttcagaacaaattaactcttggcattatacgtctccctttttctttacagtattagtaaaatgaaaaattgtacactttctgattttaacttcactaatgtaattactctctcaagaa

SEQ ID NO: 7695 - DNA, 146 bp, Homo sapiens
ctctgtcgctcgggctggaatgcagtggtgtgatcatatagctcactacagcctcgaattcctggactcaagcaatcctcttgcctcagcctcccatgtacctgggactacagatttggaattatgacatctggacaaacacatat

SEQ ID NO: 7696 - DNA, 569 bp, Homo sapiens
aagaatatgctgaaattattaggaaacaagtttcagccactaaggccgaagcagaaaaggatggagtgaaggtccccacaaccctggcggaatactgcatcaaaactaaagtgccttccaatgacaacagctcagatttgctttacgacgacttgtatgatgacgacattgatgatgaagatgaggaggaggaagatgccgactgttatgatgatgatgattctgggaatgaggagtcgtgacgtgctccttcagtgcccctgtactgccctgccatctcaggccaaagggaggggagcaagtggggacctggccatggcccctcagcaaaaacctattcacagcgggtggggaaacacacacagctcctgctgactccccttatggatctcagtttgctcctttttatggacctttaatggagagagagtaaccctccacagaatgtctgaattcttgcattctttacccttccatcactatattgattctttttttaaaaaacatgaacccaaactcccgcctcacttcgtctctacagaatgttcacagcaaaacacgtttggtct

SEQ ID NO: 7697 - DNA, 157 bp, Homo sapiens
gcgacagagtggcaccctgtgtcaaaaaattaaaaaataaataattttgttgtgtccttgttagtgtccaaaattcactggagagattctttcagaattgtaaagtttaattaaaagtgttaggtttgccgggtgtggtggctcacacctgtaatcc

SEQ ID NO: 7698 - DNA, 77 bp, Homo sapiens
ggaagtctatgagaaagtagcatttaattaaagtttaaaaaaaaaaaggttgggcgttgtggctcatgcctgtaatc

SEQ ID NO: 7699 - DNA, 307 bp, Homo sapiens
tattgctttttctagctgatgattaaggttgagaggcagaagtacattgtgtcagggaggacctttcccttttatgcatgcacctggcatttatcacctttaacaaagtgtgtgtgtcatgctgtgctgcttgcttaaggggctgtatgcctccagtctgagtcacatggtaactgcatcagcagtcttagcctgtagcattttattatttcttttcaaagtttacacttggcctaatacttagacattttataattctttacagtaaatgaaactatacatgagaagatgggcatacctttggatt

SEQ ID NO: 7700 - DNA, 64 bp, Homo sapiens
ggcctggtatacagtaagcgcttaaaaaatacatgtcaaatggctgggtgcagtggctcacacc

SEQ ID NO: 7701 - DNA, 574 bp, Homo sapiens
gagatccactgattgcaatgcaatgggacaatatctggaagcaattttatccagaaaaatcaatagctttaaaacaattcacaaccttggacctaatacctctacttctaggaagctagcctatgaaggtttctgctgaaggatgtttatcacagtattatttataatgtgaaaaagccaaagaggagacctaaaatgtttcaaagatgaaaatggtttgataaaattattttttttttgagacaaggtctcactcttgcccaggctggggtgcagtggtgcaatctcggcttaccacaacctccaccttccagattcaagcacttctcctgcccagcctcccaagtagctgggaatacaccccaccatgcctggctatttttttgtattttagtagagatggggtttcaccgtgttggctaggctggtgtcaaactcctgagctcaggcaatccaccttcctcagattcccaaaatgctgggattacaggtgtgagccaccgtgcctggcgataaacaacatatttaaactctaaaatgttatgcaagcattccaggcatgctttggaaaaac

SEQ ID NO: 7702 - DNA, 475 bp, Homo sapiens
gagagctgcaggccacaagtcccagggcctctggaagctgtcactgcctctgaaatccttgcagaaggctttcagccttacaaggcctgtgggtgagaccttgccccagaccatgggctccttcagcctcactctgcctggtatctctgggctgggcacagaggaacatcagggtgaacgaatgaatgaacagacaatgcacacatcactgggtgatcttggagaaggtgcctctgctccctcacatgatctgtgacacccagatttggcaaggcccagagcagtgagtgttgtataagttttgccatcctggtcctgaagcagggcccagcttggtgctgtgagaaacagcccacctttttgttacctcctgtgtctctatgaaggaggactggaagaaaccctactgacagggcctatcatcttaaaggaatattttgggctgggcgcggtggctcatgcctataatcccagc

SEQ ID NO: 7703 - DNA, 541 bp, Homo sapiens
  misc_feature 423: n = A,T,C or G
tgtatggcagtgtaccaaacatatgtaaattccatgaatgacaaaatccgcaaacagatcaacatcaataatccctttgttttcaaacacattagtaacctcaagagcatggatcattttgatgacattggtcccagtgttgtaatggcctccccgaggcgtgatgcaaagtggcttatccagagaattatttgaaagctggtgtactgataagaggaatggtgtcattatagcgggatactgtgtagaagggacacttgccaagcacatcatgtctgaacctgaagaaatcactactatgtctggacagaagttaccactgaaaatgtctgttgattacatttctttctcagctcacacggattaccagcaaaccagtgaatttattcgtgctttgaaaccgcctcatgtgattttagtccntggagaacagaatgaaatggccagattgaaagcagcactgattcgagaatatgaagataacgatgaagttcacatagaggttcataatcctcggaatacagaagcagtgaccttaaac

SEQ ID NO: 7704 - DNA, 559 bp, Homo sapiens
gacagaggggagacgtcagtgcgggtgctaccccggcaggaatcgagcttatatcacgaaggctccttctcacctccggacgtgagaattacaggcttggatctcaaaccgccgcggtgtcctcatgacttctcttgtggaccatgtccgtgatcttttttgcctgcgtggtacgggggggggatggactgcccctctcagcctctactgatttttaccacacccaagattttttggaatggaggagacggctcaagagtttagccttgcgactggcccagtatccaggtcgaggttctgcagaaggttgtgactttagtatacatttttcttctttcggggacgtggcctgcatggctatctgctcctgccagtgtccggcagccatggccttctgcttcctggagaccctgtggtgggaattcacagcttcctatgacactacctgcattggcctagcctccaggccatacgcttttcttgagtttgacagcatcattcagaaagtgaagtggcattttaactatgtaagttcctctcagatggagtgcagcttgga

SEQ ID NO: 7705 - DNA, 577 bp, Homo sapiens
  misc_feature 477: n = A,T,C or G
acagaagggtagtgaaacaaagccagagcatctttgtatattgcaatatacttcgaaaaaaatgaatgtatttttttctccaaagaacagcatgtttcactcaatggtgaaaaggtggaaacatttatgtaactttatgtgtatctgtcttgatatctactgacattgtctatatgaggaaaatgattactggtcatgctcctgtgagttttttgggaaggtagggtcatttctccctgcctgctttgtgccaactagcatgttgcatctacatgcattatgagtctggttaggcattactttaaacatacataaagagacagtaggacattgtggctgagtctacccagctcaaggtaaaggagaatgttgctaattttttagcaaactagaccagcattattactcaaactaaaaatatcacacctgaaaaatttaatttaggacctaaaatgtctagattagctttctgctttntttatttgaataactcattcagttgtgaatgaattcctctttatttggtgccacagtcaccaaatgacaaggatttgccactttcccaccaaattgtgag

SEQ ID NO: 7706 - DNA, 84 bp, Homo sapiens
acaaaactcctgtgcttttgagcaaggacttttgccctctagaaagcaactgaggccaggtgcggtggctcacgcctgtaatcc

SEQ ID NO: 7707 - DNA, 534 bp, Homo sapiens
gttattttaaggactataaagagtttgatttaaaattatgcagggcccctatgtgggattttttaaaaagcaaactggtgtgtattctcatgtggtttgcacagcccagcctcacagcactattgtaaaccctgctctttctgtctcgctagacagattttttgtttgttttcttttttctggttgttttttgttgttgttgttgttgttttacagctgaaaccaaccagcaagcccttgatgaccaagaggcgtttctttcaaagctatagggcacaaacaattgaccatagatgactccgtttgcattcttctgcagaattatttccttcagggacagattttccaacctaagaaactacctaccgtgtgtattctcttgacggggagagatgaacccttcagctgctaagatccaagaaaacgcctcactgccttaaccttaactgttcttcctggcgctaaaaagagctgtattttttaaagtgctggggcaaacaaagcaaccccaaaagagttgatgtgtgttttaaa

SEQ ID NO: 7708 - DNA, 564 bp, Homo sapiens
attgctcgaaactgggccaatcaaagatcagctttgggaagtgctcttgatccacttgctgataaaatacttatcagtatcttatatgttagcttgacctatgcagatcttattccagttccacttacttacatgatcatttcgagagatgtaatgttgattgctgctgttttttatgtcagataccgaactcttccaacaccacgaacacttgccaagtatttcaatccttgctatgccactgctaggttaaaaccaacattcatcagcaaggtgaatacagcagtccagttaatcttggtggcagcttctttggcagctccagttttcaactatgctgacagcatttatcttcagatactatggtgttttacagctttcaccacagctgcatcagcttatagttactatcattatggccggaagactgttcaggtgataaaagactgatgaaagtcatccctcactgttagtaaggaagcagtatacatcaatgggaacagggcccatggaaatgtacaggagtttccctattttggtgttcagcttgaaaaggacttgtca

SEQ ID NO: 7709 - DNA, 108 bp, Homo sapiens
aagcaaaaagaagcctcgaaagtgaaatgtatctggaaggtctgggcagatcacacattgcttcccccagtccttgtcctgacagaatgcccctaccatcacccactg

SEQ ID NO: 7710 - DNA, 542 bp, Homo sapiens
  misc_feature 147: n = A,T,C or G
acagaaggggaagcacagtaaacgcaagaggggatttgtgtacaaaaggcaaaaaaagtatttgatatcattgtacataagagttttcagagatttcatatatatcttttacagaggctattttaatctttagtgcatggttaacangaaaaaaattatacaattttgacaatattatttttcgtatcaggttgctgtttaattttggagggggtggggaaatagttctggtgccttaacgcatggctggaatttatagaggctacaaccacatttgttcacaggagtttttggtgcggggtgggaaggatggaaggccttggatttatattgcacttcatagacccctaggctgctgtgcggtgggactccacatgcgccggaaggagcttcaggtgagcactgctcatgtgtggatgcccctgcaacaggcttccctgtctgtagagccaggggtgcaagtgccatccacacttgcagtgaatggcttttcctttaggtttaagtcctgtctgtctgtaaggcgtagaatctgtccgtct

SEQ ID NO: 7711 - DNA, 587 bp, Homo sapiens
gaggccggaggaacaaagcagtcaggagcgataaaggcaggtgatccctgctggtttgccctttctcccagctctgaccgtcaccgtcacacatgacattcttgaatgaggtcacctgctcactacagattctaaaaggggcttgcttggcaaagacctccagggtcagagtgccggcctttactgtttttggcagttgtgtgcatggaacattggaagcgtttggaacggaatgcttaaggaagatattatttggcagcaagaaaaagggagtgtgcagactccccctacccctcctgggatgagtaggtactgcctgcccgttttttctctacaggagttgaatagtagccagagtacaggcttggcatcagaaggccttagttcaatccttatctcttctacctaccagcagtgtggctttatgcaagctcttgttcatctgaaccttaccgctcttgtctgtaagggatagcaatatcggttttacagagtgggctgaaaggttaaaagaggcgctagttctttttggcatgcagcaagtataaagtaattgttgctgttcacctcctctccatgattaaaga

SEQ ID NO: 7712 - DNA, 239 bp, Homo sapiens
caaaggagggaaacaaaactgaattagaaaactattgtagcatttgagggaggagaggcaaaaagcaatactgaaaaccaagatatcttacttctctacctacaaccttctttgcataaaatgatctaatgcgggccatgtaaatgatatcaactatagaataagccaaccaattttggaataaggagaggtattaaaatagatggctatgatttaaatctcctgaacggaaggttaca

SEQ ID NO: 7713 - DNA, 96 bp, Homo sapiens
gcccctgttttctggcaggtgccctccttggaaactggttttggctctgatcagcggttctttttgcagcaaagcctgcatctgtgttgacttgca

SEQ ID NO: 7714 - DNA, 590 bp, Homo sapiens
gacagaagggagttccgccatggcctccttggaagtcagtcgtagtcctcgcaggtctcggcgggagctggaagtgcgcagtccacgacagaacaaatattcggtgcttttacctacctacaacgagcgcgagaacctgccgctcatcgtgtggctgctggtgaaaagcttctccgagagtggaatcaactatgaaattataatcatagatgatggaagcccagatggaacaagggatgttgctgaacagttggagaagatctatgggtcagacagaattcttctaagaccacgagagaaaaagttgggactaggaactgcatatattcatggaatgaaacatgccacaggaaactacatcattattatggatgctgatctctcacaccatccaaaatttattcctgaatttattaggaagcaaaaggagggtaattttgatattgtctctggaactcgctacaaaggaaatggaggtgtatatggctgggatttgaaaagaaaataatcagccgtggggccaattttttaactcagatcttgctgagaccaggagcatctgatttaacaggaagtttcagattataccg

SEQ ID NO: 7715 - DNA, 423 bp, Homo sapiens
ggacagctgctgttggatgggaagccccttccccaatatgagcaccgctacctgcacaggcaggtggctgcagtgggacaagagccacaggtatttggaagaagtcttcaagaaaatattgcctatggcctgacccagaagccaactatggaggaaatcacagctgctgcagtaaagtctggggcccatagtttcatctctggactccctcagggctatgacacagaggtagacgaggctgggagccagctgtcaggggtcagcgacaggcagtggcgttggcccgagcattgatccggaaaccgtgtgtacttatcctggatgatgccaccagtgccctggatgcaaacagccagttacaggtggagcagctcctgtacgaaagccctgagcggtactcccgctcagtgcttctcatcaccc

SEQ ID NO: 7716 - DNA, 588 bp, Homo sapiens
gacctctgccccagcctggagaagcaactgctagtgttcccgggacacaagtgtgggagtctgcaacttgtggacctggcgagcacaaagcctggcacctcgtctgctccattcacgatcaatgcacatcagagtgacatagcctgtgtgtctctaaaccagccaggcactgtagtggcctcagcctcccagaagggtacccttattcgcctctttgacacacaatccaaggagaaactggtggagctgcgccgaggcactgaccctgccaccctctactgcattaacttcagccacgactcctcctccctctgcgcttccagtgataagggtactgtccatatctttgctctcaaggatacccgcctcaaccgccgctccgcgctggctcgcgtgggcaaggtggggcctatgattgggcagtacgtggactctcagtggagcctggcgagcttcactgtgcctgctgagtcagcttgcatctgcgccttcggtcgcaatacttccaagaacgtcaactctgtcattgccatctgcgtagatgggaccttccacaaatatgtcttcactcctgatggaaactgcaac

SEQ ID NO: 7717 - DNA, 118 bp, Homo sapiens
atctgaacacacaatagctaagacccaaactgggattagataccccactatgcttagccctaaacctcaacagttaaatcaacaaaactgctcgccagaacactacgagccacagctt

SEQ ID NO: 7718 - DNA, 710 bp, Homo sapiens
ttcggcacgagggagggctggaaggtgtacgcgggcaccagcaacctgcaccagttgcctgaggcagcctccattgccgagatcatcatcaacagcaattacaccgatgaggaggacgactatgacatcgccctcatgcggctgtccaagcccctgaccctgtccggtgagggaatctgcactccccgctctcctgccccccagccccagcaccctctgcagccctcgcacttgtcagcatctgtcaactcatatccgggccccaaagcttctgcagggcagaagtcaaagactcttaaagatccttacatggaacacttctgttttataattagggaaactgaagcccaagggttataaataagtttgctccaaatgacacatctcacattacaaattgatgacggagtcagggcttgggtactgatcttaatcaatagattgaattctttcactggtattaactgagcacctaggggccaaacgctatggtaggcatttcacacatatgatttcatttactcttcacaaccaaccctgtggagcaggcactattattaacttcatttgacatatgaggaaatggagctttacagagagataattacctgaggccacaagtaataggtggtagctctgggattggaaccaggtcgatctgattcccaagcaatgtctccccacctggctctagactggcaaattgctta

SEQ ID NO: 7719 - DNA, 283 bp, Homo sapiens
aaccccattaaaaaaaaaaagaaaatttcccttttccaaaagtcaaatttttgatgggcccacacttgccctttgcccaaaaatccttttttccaggatcaaacaaaaaaggtcgggggggggggcttttttttttttttttaaaaaaaaaaatgggctggaaaaagctgggttgggaaaaacagcatggaaacccccctggaatctttgaggggctatggtcttgaatccgggggatgaccactaattttaatgggcattactttatggcacaataactttt

SEQ ID NO: 7720 - DNA, 588 bp, Homo sapiens
gctgtattttccctctattttattgtttgtccttgggaatggtccaaaaattttgctacttcactttttatagaaagaggaatttaaagtgtttctatagctatatatttacaatgaaaaatcattcagatagttcagttcacaatgcaactgaccatctagcagcttgagttcaaggtttataaacacaaatgcctaccagcctaagcagataacctgaaagagaagtgggatggtgaagggcgggttggcttaggttgtatgaatgcagaacagggtagagtactctttctaaaagtggatatcaccattcagcaactgaagattttatgccatgcaggaatataatagggtttatactgtcagattttcaattgaagtcagaaatctgaatgtctgggaaattcttgattcttaaatgttggcataaacttaaataataaaatgctttgtgggccaaacaaaacaagcctatagactaaatgcagtatatagactggcagtttgcactcagctttagttttatcctatcacttagatattctaagctgaccaacacagcctaggtaagaatattataaactacaa

SEQ ID NO: 7721 - DNA, 463 bp, Homo sapiens
aaatacatttcttttttattctgacaccgtgctacaacttccattgatgtagaatatgtaaaagaacgacacaagagctaggaccccattatctgaaaacgacgtcgaaccttatagttctcaatcggaagaccttttcacatgcctgttacttttcatattatcatccttcggttttctgacatcatttcttcataaaagtacatgcacactcaaagataggagctgtgtttccaaatgaattgaatctataactcttggcccagcaccatggctcacacctgtaatcccagcattttgggcggccgaggctgatggatcacctgaggtcaggatttccagaccagcctggccaacgtggtgagaccccgtctccagtgaaaataaaaaaaaatcagccgggcgtggtggcaggtaaccctaaatactcgggaggctgaagcaggagaatcccttagaacct

SEQ ID NO: 7722 - DNA, 573 bp, Homo sapiens
tgcggacggaacttttttttttcttttgctttgttaccacttgtcactgtctccatgttaaaatgccaaaaatgatgtagttgttgttgcttttttccctattttccaccccagtcgctccttaccgtgactcctgcccttggagggcatgtagcagtgtctgtcctgccagtcccaaggccctgtgggaggagactggcctgcatctctctaagacttagtctgacgccacgcgcatctcttgttctgtgttcaatcagtagtccaggggagaagcttctgctacttcagagctttgctaaactaacctaatttgtccaaatcaccccaaaaccaccatctctgacgtaagcttccatgcgacagcctgatccgtttccctggacaggtctctttcctggaatgcagcccaggcacctgtgctcctggcacccttgaggtctctcctttgagccgtggtcaccgagagggttgaggacgcagcacccgaggtcccagcctttgcaggagcctccctgggcttagctggacttagatcttcggtggcctcatgtaaacgtggcagccagcctc

SEQ ID NO: 7723 - DNA, 228 bp, Homo sapiens
tgagggtgcacgtcttccctcctgtcccagctccccagcctggcgtagagcacccctcccctcccccccacccccctggagtgctgccctctggggacatgcggagtggggttcttatccctgtgctgagccctgagggcagagaggatggcatgtttcaggggagggggaagccttcctctcaatttgttgtcagtgaaattccaataaatgggatttgctctctgc

SEQ ID NO: 7724 - DNA, 440 bp, Homo sapiens
atgtttcataatttcaagagtgtgaccaccctgctctagtcatcatcattggatgaatccagttgactctttggcaaaagggtgatacttttcactaaaaatgcctactcttcctgttgatgttccttttctgtttttaccttgtccaatttccacactagtcattttttttattttttagaggatcagattttagcgctggaaaatgagttcaaaaatttcagtgtaatgtcataaggatgttgggatacagagattttttttttccttggaaacaaatggactgggaaaaaacacagcatggctttgctctgagtttcaatctgatgattatgaccatggaagatagtcttatgtaaaggttaaatggtgtttacaagtggatagataaggcggagatggtgagaagccgggttttctctatgctaaatgtgcctact

SEQ ID NO: 7725 - DNA, 323 bp, Homo sapiens
gcaaaggcctgtcttaactctcagtacatcatttactatctagatccagtggacccttttatacacacacacacacacacacacacacacacatacacacataacatattaacttattttacaaataatttatagaattacacccttttatacacacacacattattgcacaaatgattcacagaattaaaataaagtttttcccctgtccctatatttcactcacgcagggtaaaatacagagctgccttctcaattgcacttattctaaaacagaagttagtgagagagcacaccactctaagaactaagtgaacctcttc

SEQ ID NO: 7726 - DNA, 520 bp, Homo sapiens
ggtcattggcacgtgtacgtttcaggaagaagaagcagacgttgaaggcattcagtataaaacacttcgaacatttcaccatggagtcagggttgatggcatagcttggagcccagagactagacttgattcattgcctccagtaatcaaattttgtacttcagctgctgatatgaaaattagattatttacttcagatcttcaggataaaaatgaatataaggttttagagggccataccgatttcattaatggtttggtgtttgatcccaaagaaggccaagaaattgcaagtgtgagtgacgatcacacctgcaggatttggaacttggaaggagtgcaaacagctcattttgttcttcattctcctggcatgagtgtgtgctggcatcctgaggagacttttaagctaatggttgcagagaagaatggaacaatccggttttatgatcttttggcccaacaggctattttatctcttgaatcagaacaagtgccattaatgtcagcacactggtgc

SEQ ID NO: 7727 - DNA, 631 bp, Homo sapiens
ctggggaaggagttggagtgaccgttcaatattttctggcattgggtctactgctgagccagtttctcagtctaccacttctgattatcagtgggatgttagccgtaatcaaccctatatcgatgatgaatggtctgggttaaatggtctgtcttctgctgatcccaactctgattggaatgcaccagcagaagagtggggcaattgggtagacgaagaaagagcttcacttctaaagtcccaggaaccaattcctgatgatcaaaaggtctcagatgatgataaagaaaagggagagggagctcttccaactgggaaatccaaaaagaaaaaaaagaaaaagaagaagcaaggtgaagataactctactgcacaggacacagaagaattagaaaaagagattagagaagaccttccagtgaatacctctaaaacccgtccaaaacaggaaaaagctttttccttgaagaccataagcactagtgatccagccgaagtactcgtcaaaaatagccagcctatcaagactcttccacctgctacttctaccgagccatctgtaatcttatcaaaaagtgattctgacaagagctcttcccaagtgccgccaatactacaagagacagataaa

SEQ ID NO: 7728 - DNA, 501 bp, Homo sapiens
aaccgtgaaaatacttcttcaagttaagggttaggatagggaagaagaagcaagttctgtatgcacaagcaaaaggttggccctcaccatcaaagctcctgtcataaagagtgaatagaaggaaggattgttattattatgactttggttttatttaagtataaaagtatcagcactttaatgctcaaagtatagccataagcaagattagaaaatgtacttgctgtatattgttccagcaacactctgggtttgccctacatttgtatatagttggttttctgtattagtgttttatcatagaccgagtatcatttgtatatttttcaaaattacataaataaatcattttatcattttatttattaagtccagaaactgattttaggggtagagggatgagttgtgctatttaatcttactctggcggataaataaacatatggattcaaaggtgttgagtgagagaagactcttgatatgttagaagaccactgctct

SEQ ID NO: 7729 - DNA, 581 bp, Homo sapiens
ggaactgaaaagggtgatggcttgttccagatgcattttaaccacagtggacccagacaccggtgtcatgagcaggaaggaaccgctggaaacactgaagagttatcgccagtgtgacccttcagaacgaaagttatatggaaaatcaccactctttgggcagtattttgtgctggaaaacccagggaccatcaaagtgggagaccctgtgtacctgctgggccagtaatgggaaccgtatgtcctggaatattagatgccttttaaaaatgttctcaaaaatgacaacacttgaagcatggtgtttcagaactgagacctctacattttctttaaatttgtgattttcacatttttcgtcttttggacttctggtgtctcaatgcttcaatgtcccagtgcaaaaagtaaagaaatatagtctcaataacttagtaggacttcagtaagtcacttaaatgacaagacaggattctgaaaactccccgtttaactgattatggaatagttctttctcctgcttctccggttatctaccaagagcgcagacttgcatcctgtcactaccactcgttagagaa

SEQ ID NO: 7730 - DNA, 482 bp, Homo sapiens
atgggtgaacttacttgcataccaagttgatacttgaataaccatctgaaagtggtacttgatcatttttaccattatttttaggatgtgtatttcatttatttatggcccaccagtctcccccaaattagtacagaaatatccatgacaaaattacttacgtatgtttgtacttggttttagagctcctttgaaaactctgtgtttggaatatctctaaaaacatagaaaacactacagtggtttagaaattactaattttacttctaagtcattcataaaccttgtctatgaaatgacttcttaaatatttagttgatagactgctacaggtaatagggacttagcaagctcttttatacgctaaaggagcatctatcagattaagttagaacatttgctgtcagccacatattgagatgacactaggtgcaatagcagggatagattttgttggtgagtagtctcatgccttgagatct

SEQ ID NO: 7731 - DNA, 128 bp, Homo sapiens
aagtcatgcttttcaccctattgatggctttcttcagagtctaccttaccatatatacccttttatctttccattacacaaggtggtttatttaagtctgtacatcttggttaatatctggacaattt

SEQ ID NO: 7732 - DNA, 397 bp, Homo sapiens
gctttccaacttggacgctgcagaatggctcccgcaaagaagggtggcgagaagaaaaagggccgttctgccatcaacgaagtggtaacccgagaatacaccatcaacattcacaagcgcatccatggagtgggcttcaagaagcgtgcacctcgggcactcaaagagattcggaaatttgccatgaaggagatgggaactccagatgtgcgcattgacaccaggctcaacaaagctgtctgggccaaaggaataaggaatgtgccataccgaatccgtgtgcggctgtccagaaaacgtaatgaggatgaagattcaccaaataagctatatactttggttacctatgtacctgttaccactttcaaaatttctgtgctaaacagtgttacagtcg

SEQ ID NO: 7733 - DNA, 546 bp, Homo sapiens
  misc_feature 463: n = A,T,C or G
ctgctgctgcagacctacgtactccgcctggaagccatcatgaatggcatcttgctcttcttctgtggctcagagcttgtacttgaggtgctcaccttggctgctttctccaggatttgaagtacagaatttcagccagcggcccatcaggctgacaccacacatattgcttctggtactttagccacaccagtgagaattggtggggcaagttgtcctgagaaaggctgtgtggcttttcttcagcacagacatttgggcaagcaactcagcataaggccagtgggtaccatcttctaaaccaggaccatcagcccaagagactcttctacactccagtatagggaggggcaaggttattcccatcctgccccttgtcagaaccagtcccctgctgacctcaagttctcctccttgatcaccgtggccagagcatctcgtgtggaccatctaggctccttgngcttcaagcaggacctgagccacatgctccctgtacgagctgtgctatacctgtcccacatgaacacggagagcctcatgttg

SEQ ID NO: 7734 - DNA, 116 bp, Homo sapiens
ctaactcacagatattctgaaatgccaattcctcctttatcaacaattcctctaacctcgctctcccttccttccttccttccttccttccttcctttctggcttccttgcttgct

SEQ ID NO: 7735 - DNA, 558 bp, Homo sapiens
gacagagggggactccttgcggagctcgccgcctgattctaggctggtcactactccgagcctgtgacgtttgcggcagccaggccgtcgacgatgcccagtgaaactctctgggaaattgcaaaagctgaagtggaaaaaaggggaattaatggaagtgaaggtgatggagctgaaattgcagaaaaatttgttttcttcattggcagtaaaaatgggggaaagactactattattctaaggtgtcttgacagagatgaaccaccaaaaccaaccttagctttggaatatacatatggaagaagagcaaaagggcacaacacaccaaaagatatcgctcacttttgggaactcggtggaggaacctctttattggacttaatcagcatacccatcacaggtgacaccttacggacgttttctcttgttctcgttctggatctttcaaaacctaatgatctctggcccaccatggaaaatctcttgcaagccacaaaaagccatgtagacaaagtgataatgaaactgggaaagacaaatgctaaagcagtttctgaa

SEQ ID NO: 7736 - DNA, 399 bp, Homo sapiens
gacagaagggaagattcattttattgtcatcaccatgggacgtatcctgttgttgagttctctgggtcagacctctgaagacttctcagatggatcctagtctctgggcttgccctgaaattactcgctgctcagggagagagttgaaatggttggcatcctcccactctgttgctccggctgtgtcccctcgctctgttgttccagctatgtcccctctgttgctccaactgcagctcattctgttagagttcctcattcagctggtcactgtggccagagggtgttggcctgctcccttcctcaagtattcttaaagccatggatttttgtggagcatttttcttcctggctctccccttgagtattttcctttcttcgctatcttgggactcttct

SEQ ID NO: 7737 - DNA, 393 bp, Homo sapiens
agcaacctaaaggcgtattttggcactggtctggggacattccccatctctcatcccttttcccccttcacagatggtggtgggcttcgctctacaaagaggactctgatgttactcttgagcttatgagccagagagctgaaaaccgcaggcttgttgtgttaagttacaaggaaaatggatttggtaattaaaattagaagaaacacaccttcaaacttcaacttctttaaaagaaaaaaaaaactgtcctatcttgttctgtaaaatattaaaacgctttgttttacaaaaaatgatgaaagaattcttccacatgtacttctgtgcttaaaacatttttacggacctaagcgctggaaacgttgctgcatgtcggctgggttttttttt

SEQ ID NO: 7738 - DNA, 487 bp, Homo sapiens
gcttttccgtggcgcctcggaggcgttcagctgcttcaagatgaagctgaacatctccttcccagccactggctgccagaaactcattgaagtggacgatgaacgcaaacttcgtactttctatgagaagcgtatggccacagaagttgctgctgacgctctgggtgaagaatggaagggttatgtggtccgaatcagtggtgggaacgacaaacaaggtttccccatgaagcagggtgtcttgacccatggccgtgtccgcctgctactgagtaaggggcattcctgttacagaccaaggagaactggagaaagaaagagaagatcagttcgtggttgcattgtggatgcaaatctgagcgttctcaacttggttattgtaaaaaaaggagagaaggatattcctggactgactgatactacagtgcctcgccgtctgggccccaaaagagctagcagaatccgcaaacttttcaatctctctaaa

SEQ ID NO: 7739 - DNA, 52 bp, Homo sapiens
gcattgttggaaaagaatttatcgactgccacaaagaatcttgattccctgg

SEQ ID NO: 7740 - DNA, 555 bp, Homo sapiens
gtggaagaatgggatatgctgaagaagccccttatgatgccattcatgtgggagctgcagcccctgttgtaccccaggcgctaatagatcagttaaagcccggaggaagattgatattgcctgttggtcctgcaggcggaaaccaaatgttggagcagtatgacaagctacaagatggcagcatcaaaatgaagcctctgatgggggtgatatacgtgcctttaacagataaagaaaagcagtggtccaggtggaagtgattttatcttctgctctttcttcttccacacatgcaagggatgaattgtaaaagcaacatcagcttgaccagtataaaattacagtggattgctcatctcagtcctcaaagctttttgaaaaccaacaccatcacagcttgttttggactttgttacactgttattttcagcatgaaaatgtgtgtttttttagggtttctgattcttcaaagaggcacagagccaaattggtagaggaaggatgcaaagtataaatttgtgtaatattactttaacatgcccatattttacttgg

SEQ ID NO: 7741 - DNA, 500 bp, Homo sapiens
agtgggattgcccagcaaagtgcttatcaggtgatgatcccagtgaagtatgtcacagttatgcagtaacttaaggctgctgtaatacggagatacattgaagttcattagtaacttttcagtgacccaaaatggatactttagtggttatataagtataaattagtatattaggtaagggaaagagtttagtgcacctttaaagaaaaaatggttttaattgatgcaccattttattgtatatttctttacatagtgagaagggggcacatgaggtcagcagtcaagttttcaggttaatgtcgtctttgtcacacacctccttttgtgggttggcgatacttttatttatgagctcgaaattctccacttagcacactattaaggtggaaattggaaggctgatatcagtggcctaaacctgaagttctcgtacgttagtaggcatgaataccttgttaagaatctgggccttcatgtaaaaaagattctctacagac

SEQ ID NO: 7742 - DNA, 468 bp, Homo sapiens
agaagggatttccccagagattgttttaactgattcgaccaaattagattattgacttgacaataatgaacaagatacccctttgaatttttgtcactacatctttttgtaactcatgaaaaatttcaggccaggcacagtggctcacacctgtaatcgccgtactttaggaggccgaggcgggattattacttgagctcaggatctccagaccagcctggacaacagaccaaaaccctgtctctacaaaaaatacaataattagctgggtgtggtggcgtgcacctctgattggtcccacctactcaggaggctggggtaggaggatcgcttgagcccaggggttcaaggttacagtgagctatgctcctgctgtgctgcgcaatccagcctgggcaaaagagtgagacctgtctcaaagaaaaaaaaatagaaatgtttgaacccataaagtagataatgaggaca

SEQ ID NO: 7743 - DNA, 344 bp, Homo sapiens
ataggggagcttctagaaaggaaggacttattgtcttagttacttgatccacttccttacctcctgttcatgcaactttgcttgttttgcttctactaaaatggttctaggtgctgtgtggacaggtgatacaaaagcctgactcacacggttgacattcattcattccattttcatttctctttgagtgatcctgacaagcagagggtctcaggtggatattactgtgtctttgagacctctctaatccttatctatctctcattttaatacagagagtttcatacgcagaccttaagtagacatagtatccagctaaaagacagggtctcactctgtcaccc

SEQ ID NO: 7744 - DNA, 605 bp, Homo sapiens
gtgaaacatggtgtccggttttctattgcattttttcaagtggaaaagttaactaaatggttgacacacaaaaattggtggagaaattgtgcatatgccaattttttgttaaaaccttttgttttgaactatactgctttgagatctcatttcagaagaacggcatgaacagtcttcagccacagttgtgatggttgttaaatgctcacaattgtgcattcttagggtttttccatccctggggtttgcaagttgttcacttaaaacattcttaaaatggttggcttcttgtctgcaagccagctgatatggtagcaaccaaagattccagtgtttgagcatatgaaagactctgcctgcttaattgtgctagaaataacagcatctaaagtgaagacttaagaaaaacttagtgactactagattacccttaggactctgcattaactctataatgttcttggtattaaaaaaaaagcatatttgtcacagaaatttagttaacatcttacaactgaacatgtatgtatgttgcttagataaatgtaatcactgtaaacatctatatgatctgggattttgtttttattttgaaatgggagctt

SEQ ID NO: 7745 - DNA, 578 bp, Homo sapiens
gacttccggtcgcgccagccgcccgttgccagttctgcgcgtgtcctgcatctccagtatggaatgtatgtttggccctgtgctgtggtcctggcccagtacctttggtttcacagaagatctctgccaggcaaggccatcttagagattggagctggagtgagccttccaggaattttggctgccaaatgtggtgcagaagtaatactgtcagacagctcagaactgcctcactgtctggaagtctgtcggcaaagctgccaaatgaataacctgccacatctgcaggtggtaggactaacatggggtcatatatcttgggatcttctggctctaccaccacaagatattatccttgcatctgatgtgttctttgaaccagaagattttgaagacattttggctacaatatattttttgatgcacaagaatcccaaggtccaattgtggtctacttatcaagttaggagtgctgactggtcacttgaagctttactctacaaatgggatatgaaatgtgtccacattcctcttgagtcttttgatgcagacaaagaagatatagcagaatctaccct

SEQ ID NO: 7746 - DNA, 522 bp, Homo sapiens
atactatgtttcgtctacagttggtaaatttttgtttttctttgtattaaatgttgaattgtattgtctggaggaaaagacagaggtctaaaaataaagaaggagtacagtttgggcatggtggttcacccctggagtcctagcactttgggggccaaggcaggcagattgcttgagcccaggagttctagatgagcctgggcaacatagtgagaccccatctctaaaaaaacagttttagggccaggcacagtggctcacacctgtaagcccagcactttgggaggccgaggcaggcagatcataagggcaagagattgagaccatcctggccaacatgatgaaaccctgtctctactaaaaatacaaaaaaattagctgggcgtggtggcacgcacctgtagtcccagctactggggaggctgaggcaggagaatcacttgaacctgggaggcagaggttgcagtgagccaagattgccccactgcactccagcctggtgacagagcaagactctgcctc

SEQ ID NO: 7747 - DNA, 587 bp, Homo sapiens
ataaaggaaacattttaaatcccacaaattgacactttctatcttcaatggactaagatttttttggtcagtaatctctgaaatttccttaaattatatacttaacatagcagagaaactggattgtttttgtatataagactgcttccacctgaaatgctgtcataagtactgggggggtgggggagtgcccatcttgtacatgatattcttagaggtaataaggtaatgacgcatgaatttattttataaactcttggactatgtatttgacatgtaaaatatgtacagtattaacgtcaaccatctctttaaagttagcctataaatattgttgtataattttctttggtcagaaacacttggactgaatagtgacactcggtaaggattttcagtgccatttagcaaaacgtctttagtctatgcaactagcaaaaatctgcataatgcaacaacacagttttcacacttcaaattttacatgaaggggttcttcacgattctcctggaacccagcctagcaaaatgagaggaaaggccctagggagatttatttctgttaaatagttaactctgctgagtat

SEQ ID NO: 7748 - DNA, 548 bp, Homo sapiens
gatgttctaaatgctgaacaacttcagaaactcctttacctgctggagtcaacggaggatcctgtaattattgaaatagctttgattactttgggtaacaatgcagccttttcagttaaccaagctattattcgtgaattgggtggtattccaattgttgcaaacaaaatcaaccattccaaccagagtattaaagagaaagctttaaatgcactaaataacctgagtgtgaatgttgaaaatcaaatcaagataaagatatacatcagtcaagtatgtgaggatgtcttctctggtcctctgaactctgctgtgcagctggctggactgacattgttgacaaacatgactgttaccaatgaccaccagcacatgcttcacagttacattacagacctgttccaggtgttacttactggaaatggaaacacgaaggtgcaagttttgaaactgcttttgaatttgtctgaaaatccggccatgacagaaggacttctccgtgcccaagtggattcatcattcctttccctttatgacagccacgtagc

SEQ ID NO: 7749 - DNA, 571 bp, Homo sapiens
atccatagaaacaactgggagttgagaagtgcagtcttttaggtgggcacctggctgccctgtatgaaaccagaattaggttggtcagcaggaaaacaagaaaacacttactgtgttgactgaggtttttgacgcatcgctttattgtcaaattaaacaactctatctcattgtgcgctgaaacacgtactaccattgcctataattggaaaatgatcctcagaggcacagaagatgccctgatggaaagtttgccccttgggcaaagagacagccatgggaaccttcagacatagagagagaaggtggcttttctccctacattcctcaaatagctaagatttggccagtgtgttttctaagtcaattctagtgtgtttcatcctcacctcttccctctgtggctttgatgatggaagtgtagtcctaacctactgcacagctgggaccccctgcccctagatcccaatactggggatgggaggaccttgcactattcccctcagtccatctatcgaggtctttgcaggaagcatactgggaattgaaacgagagcctaaatgacatcta

SEQ ID NO: 7750 - DNA, 586 bp, Homo sapiens; identical to SEQ ID NO: 2421

SEQ ID NO: 7751 - DNA, 462 bp, Homo sapiens; identical to SEQ ID NO: 2422

SEQ ID NO: 7752 - DNA, 280 bp, Homo sapiens; identical to SEQ ID NO: 2423

SEQ ID NO: 7753 - DNA, 491 bp, Homo sapiens
acagaaggggcacttttgatttacttctgacttcacgagtcactttctgccaaagaaatctctccttttgcttctagcaccgactagatttccttcagctgatgattgactcccagaattcgaaagaaactgagtcccacaaagctctgtctgatctggagctcgcagcccagtcaataatcttcatttttgctggctatgaaaccaccagcagtgttctttccttcactttatatgaactggccactcaccctgatgtccagcagaaactgcaaaaggagattgatgcagttttgcccaataaggcaccacctacctatgatgccgtggtacagatggagtaccttgacatggtggtgaatgaaacactcagattattcccagttgctattagacttgagaggacttgcaagaaagatgttgaaatcaatggggtattcattcccaaagggtcaatggtggtgattccaacttatgctcttcaccatgac

SEQ ID NO: 7754 - DNA, 622 bp, Homo sapiens
gacgcgcgttgtttccgcggtagtcagggcagtttctaccgcaggcttaaggaggcttcgggctcctgggatttctgtccgcgctcctggccctcgtccttcgcgccagagcaggttcgcaaactcctcagacccttctgctcccggccgccgctttccgccggggcgagacccccaggttcaaaatgagcctgtttggaacaacctcaggttttggaaccagtgggaccagcatgtttggcagtgcaactacagacaatcacaatcccatgaaggatattgaagtaacatcatctcctgatgatagcattggttgtctgtcttttagcccaccaaccttgccggggaactttcttattgcaggatcatgggctaatgatgttcgctgctgggaagttcaagacagtggacagaccattccaaaagcccagcagatgcacactgggcctgtgcttgatgtctgctggagtgacgatgggagcaaagtgtttacggcatcgtgtgataaaactgccaaaatgtgggacctcagcagtaaccaagcgatacagatcgcacagcatgatgctcctgttaaaaccatccattggatcaaagctccaaactacagctgtgtgatgac

SEQ ID NO: 7755 - DNA, 639 bp, Homo sapiens
acagaagggcgtgccaccgtcaaggcggcatgcagggctcagactaagcagttatgcacagatatgggttaagtacagaaaacttccaagccagtaggtaggagactgcgccaggtctcctgagcaactcctcctcacatctcccaaccattctcaggcccaccccccaaaaaaaatacaaaacacataatgaccctgataggggcctcttgaatcttgtcttctgcatttgtggcatttgttccattttgtcgcagcccatgccattatcagctgggaaaacttctgaaccccactcttgatgctaggttcccatgaggcaagtgctattagaaatagtttacagacaaggaaaataagaccccagaaaggttagtgatttctgtaaggtcatatgctattaagtaactaagctgggaggcaaagccaggtcagacttccaaacccatgctttcttccactttcatccttctaaatatctccttaaaaggaagctatgaatttggcaagtagtggacataaagagatgctcttgggatgcaatatgacgtaagatcatttgaaacaccaaaaacatggctaatattagtaacaaatcagccatgctcattctttggatcaggtaattttagtatctga

SEQ ID NO: 7756 - DNA, 488 bp, Homo sapiens
gacagaaggggtcatattgggggagttgcaggggggagagaagtagggagaagggttgtcctctttctttctaacctcccctcagtctatcctgtagtttaaattccatgaaggtgctggccatgtctattttgatcactgcattgtccttagcacctatcataacatctagacaatagcaggtattcaataaatgttggaatgtgtgaatgaataagaatttcaggctgaaaaatagagggaagttgttttctgcattcttgaaatcaatatcatattcctgtccggggaactgactaaactctgggtctttaggcagatatggaagtgtccttggcacagattcagttccatttgcaggtttgtgttcagtgtgtcctgtcatcatgactgtaccactacgccagtccctgggaagtggacctggcaccttccttcaccctcacatcaacaggaggacagttggagcctgagttcaagtttacctc

SEQ ID NO: 7757 - DNA, 631 bp, Homo sapiens
gtttgaagctatgattatgaacagagaaatcaacaatcctatgttcaggttcttatttgaaaaccagacaccagcccatgtttactataggtggaagctttattctattctgcagggagattctccaactaaatggcggacggaagattttcgtatgttcaaaaatggatctttttggaggccaccaccattaaatccgtacttgcatggaatgtcagaagagcaagaaacagaagcttttgtagaggaacctagtaaaaagggagcacttaaggaagaacagagggataaattggaagaaatcttgcggggattaactccaaggaaaaatgatattggagatgcaatggttttctgtcttaataatgctgaagctgctgaagaaatagtggattgcattactgagtcgttgtccatcttaaagacaccccttcctaaaaagattgccagattatatttggtttctgatgttttgtacaactcttcagccaaagttgccaatgcttcgtattatagaaaattttttgaaacaaagttatgtcagatattttcagacctcaatgccacctatcgtacaattcaaggccatttacaatctgaaaactttaagcaacgggtaatgacttgcttc

SEQ ID NO: 7758 - DNA, 574 bp, Homo sapiens
acagaaggggaaacttcctagacgccgtacgtgccagatggtgttacctggagcttaaaaagctgcacgcaagtgttaaacttctggaggaatactgttggcgttcaaaagcattgctgtttcagttaagtagttccttaattacttacaatgtagtaaggctacattgaaggaagatataaatttcagtcaagactacgactgagcaaagacaatggccaagaacaaattaagagggccgaagtccaggaatgtatttcacatagccagccaaaaaaactttaaggctaaaaacaaagcaaaaccagttaccactaatcttaagaagataaacattatgaatgaggaaaaagttaacagagtaaataaagcttttgtaaatgtacaaaaggaacttgcacatttcgcaaaaagcatttcacttgaacctctgcagaaagaactgattcctcagcagcgtcatgaaagcaaaccagttaatgttgatgaagctacaagattaatggctctgttgtaatatactggtgatgcatctaattctccacaaagaccaataaattgaatgttttataca

SEQ ID NO: 7759 - DNA, 456 bp, Homo sapiens
acagaagggataacttaaaataacaagtttggaagataaaaatctgggagactatttgttttgtctaaattctgcttttactctggtcttttaacagttggcttttgataatgtattactgccttagtgtgttcctgtgtattgaaggaatacattgtctgacagaattgtggttgaaaatattacaagttctaaataataagagtaataaatatcatatcttgtttgctttgttgtcatagtcgcctgatctcatgcttccctgaattcggctggtgtcttgattacgatggaatcactaagcagagagttttgccatgtgtgatttattcgtttgtgcatagccacagcagagcatccatgcagcccgcagtggctctgtgttccagtgtggcaagtcaccaagacttgctaccttaaggccaggcgcagtggctcacgcctgtaatcccagca

SEQ ID NO: 7760 - DNA, 470 bp, Homo sapiens
acttcatttaaaaaaatcacaaaaatttgaacactggctaaagataattgctatttatttttacaagaagtttattctcatttgggagatctggtgatctcccaagctatctaaagtttgttagatagctgcatgtggcttttttaaaaaagcaacagaaacctatcctcactgccctccccagtctctcttaaagttggaatttaccagttaattactcagcagaatggtgatcactccaggtagtttggggcaaaaatccgaggtgcttgggagttttgaatgttaagaattgaccatctgcttttattaaatttgttgacaaaattttctcattttcttttcacttcgggctgtgtaaacacagtcaaaataattctaaatccctcgatatttttaaagatctgtaagtaacttcacattaaaaaatgaaatattttttaatttaaagcttactctgtccatttatc

SEQ ID NO: 7761 - DNA, 506 bp, Homo sapiens
gtccaggcatctacactgggttctttggaagctctactggaatttctgaaaacatcagaagtgccctatgcaggaattaacattggcccagtgcataaaaaagatgttatgaaggcttcagtgatgttggaacatgaccctcagtatgcagtaattttggccttcgatgtgagaattgaacgagatgcacaagaaatggctgatagtttaggagttagaatttttagtgcagaaattatttatcatttatttgatgcctttacaaaatatagacaagactacaagaaacagaaacaagaagaatttaagcacatagcagtatttccctgcaagataaaaatcctccctcagtacatttttaattctcgagatccgatagtgatgggggtgacggtggaagcaggtcaggtgaaacaggggacacccatgtgtgtcccaagcaaaaattttgttgacatcggaatagtaacaagtattgaaataaaccataaacaagtggatgttgc

SEQ ID NO: 7762 - DNA, 567 bp, Homo sapiens
acagaggggatccaacaatagaggattcctacaggaagcaagtagtaattgatggagaaacctgtctcttggatattctcgacacagcaggtcaagaggagtacagtgcaatgagggaccagtacatgaggactggggagggctttctttgtgtatttgccataaataatactaaatcatttgaagatattcaccattatagagaacaaattaaaagagttaaggactctgaagatgtacctatggtcctagtaggaaataaatgtgatttgccttctagaacagtagacacaaaacaggctcaggacttagcaagaagttatggaattccttttattgaaacatcagcaaagacaagacagggtgttgatgatgccttctatacattagttcgagaaattcgaaaacataaagaaaagatgagcaaagatggtaaaaagaagaaaaagaagtcaaagacaaagtgtgtaattatgtaaatacaatttgtacttttttcttaggcatactagtacaagtggtaatttttgtacattacactaaattattagcatttgttttagcatt

SEQ ID NO: 7763 - DNA, 619 bp, Homo sapiens
acagaagggattcaacctatggggaagactctgatcttccaagtgatttcagcatccatgagtttttggccacgtgccaagattatccgtatgtcatggcagatagtttactggatgttttaacaaaaggagggcattccaggaccctacaagagatggagatgtcattgcctgaagatgaaggccgtactaggacacttgacacagcaaaagaaatggagattacagaagtagagccaccagggcgtttggactccagtactcaagacaggctcatagcgctgaaagcagtaacaaattttggcgttccagttgaagtttttgactctgaagaagctgaaatattccagaagaaacttgatgagaccaccagattgctcagggaactccaggaagcccagaatgaacgtttgagcaccagaccccctccgaacatgatctgtctcctgggtccctcatacagagaaatgcatcttgctgaacaagtgaccaataatcttaaagaacttgcacagcaagtaactccaggtgatatcgtaagcacgtatggagttcgaaaagcaatgaggatttccattccttcccccgtcatggaaaacaactttgtggatttgacaga

SEQ ID NO: 7764 - DNA, 508 bp, Homo sapiens
acagaagggggtcacatctatgtctcctagctcagtgttctttgtcattgtgtgtgtgtgtgtgtgtgtgtgtgtgtgattagaaagggcttcattcataccttttcccttggacctggaaaaaaaattttttttatcttttcaaatgaaatctattgatttctagtaatcatatttgaatcaatgttaaagcatatatagtcttatatgtaaactagattcttaagattatttgaacctttgagatgaagtttacactcaactaaaatcattccattgattttattgattaacatcaatcagtatgtttaaagttattctaagaagcaatagtttatttttaaaaaccttgtatagcaaaataacttaaaaccctttgtgatatcatctaccagtttatttggtaaaaacacacagttatttggtatttgtcagaattcttcagtgcctgctattacagctattttccaattactaatttgaatatactcactcaaggcagcgcaag

SEQ ID NO: 7765 - DNA, 508 bp, Homo sapiens
acagcagggctattttatgccaggcattgggcaaggacccattggatatacagagatgactgacacagcatttagtttttcagaatctcatcggatagaggagacaatccaggctgagagcactatataaacaaaaggctggagtcctgaaaatgctttatgtgtttgcaggggatatagtttatgaaggaggggattaggcttaaaaagagctagacagtgaaaggtgaaagtagggaacagtggaaggtgatatggcctttaaactttgctgcttacaggtctttcaggttacagtttgaacttgatcctggaagcagcagagaaatcaatcactggctactcttaaaacagctgagtgacacaatcaaatgtgtacttcagaaattttccatgtggcaatgtggaggatgggctggattgccttgttattgggagacaaattagaaggctactgcaatagtcctagcaagagatgatgacaggctgggcacggtggctgacacct

SEQ ID NO: 7766 - DNA, 509 bp, Homo sapiens
gacagaagggcttccgctggggaggtcctccatgcgcagtcatgagtcgcttcaagtttatcgatattggtatcaacttgactgaccctatgttcagaggaatttataggggggttcaaaagcatcaagatgacttacaggatgtaatagggagagctgtcgagattggtgttaaaaagtttatgattacaggtggaaatccacaagacagtaaagatgcactgcatttggcacaaacaaatggtatgtttttcagtacagttggatgtcatcctacaagatttggtgaatttgaaaagaataaccctgatctttacttaaaggagttgctaaatcttgctgaaaacaataaagggaaagttgtggcaataggagaatgcggacttgattttgaccgactgcagttttgtcccaaagatactcaactcaaatattttgaaaaacagtttgaactgtcagaacaaacaaaattaccaatgtttcttcattgtcgaaactcacatgctgaa

SEQ ID NO: 7767 - DNA, 647 bp, Homo sapiens
gtagagaaagattgttgtattttgaggtaatttggaaggactttcatacatggtgactagaaacctgatctttttaagaataaaatagggtcactatttacattatatataatatatggctattatagctatattaatctactttaattgtttctaagattattttgtgtaagtcagctagcgtgtgtatagtgtcatttcttatgttttgtatattaacgttttacaaacacaatttgtgtgggtttgtagcatttcttatagtttaaagtatgattcagcattctaagttaaaactaatatgtgaagtcagtcattagtctgcataatctctgtctccctctgtgtgtgtctttctataaagcacatgtgtacacacacacacacaaatatactgaaagctagggtaagttctaaactgaatatcaaaaaccaaaatcaagaacaaagaagtgatattttccaaacaaacatggattctctgccgggtgcagtggctcagcctgtaataccagcctccactttgggagtctgaggtgggagtattgcttgagctcaagagttggagaaacagcctggcaacatggtgagacctggtctttacaaaatttttttggccggacgcagtggctcacacctgtaatccc

SEQ ID NO: 7768 - DNA, 371 bp, Homo sapiens
ggttatatgagagtgttttgccaagaatcggtcaaatgttttacattagggaaaaagcattattgttactggcatagggagggccccagttaaaatagcagtccaattcagagaccttcgtatttgtcgttaagatcaaaaggactcttggaataatggactatgctacaggattattttaagttcagatagataaattagcttcttcccaaattctcattctgcttttcctgtggtactgtatagtatcatgaagttatatctttaaactcttaatttgtactatgtggtgtcttatgaaaaccttgatttgtttatacttagtgaatgaaacacttgggtttaaagttctttaactgatgtcacttctt

SEQ ID NO: 7769 - DNA, 52 bp, Homo sapiens
gtttaagtcctgtctgtctgtaaggcgtaaaatctgtccgtctgtaaggcgt

SEQ ID NO: 7770 - DNA, 150 bp, Homo sapiens
gatcatcctgtctggctgcagtgagagaccaacccctaacaagggctgggccacagcatggagtccagccctaccttcttcccttggcagctggagaaatctggtttcaatataactcatttaaaaatttatgccacagtccttataatt

SEQ ID NO: 7771 - DNA, 376 bp, Homo sapiens
ctcgagatctcccacaaactatggaccaaatccaagaccagtttaatgaccttgttatcagtgatggctcttctctggaagatcttgtggtcaagagcaatctgaatccaaatgcaaaggagtttgttcctggggtgaagtacggaaatatttgagtagacggggccctcttttggtggatgtagcacaatttccacactgtgaaggcagtattagaagacttaattgtaaaagctctcttgtcactgtgttacacttatgcattgccaaagtttttgttagtcttgcatgcttaataaaagtgctgagactgttactaagtaaaaagctgtcaaacatttactgaaaatagaattggccccatggcttgatgtga

SEQ ID NO: 7772 - DNA, 291 bp, Homo sapiens
gacagaagggatcatgaatctggtcatgccattattgcatattacacaaaagatgcaatgcctaccaacaaagctacaatcatgccacgggggccaacacttggacatgtgtccctgttacctgagaatgacagatggaatgaaactagagcccagctgcttgcacaaatggatgttagtatgggaggaagagtggcagaggagcttatatttggaaccgaccatattacaacaggtgcttccagtgattttgataatgccactaaaatagcaaagcggatggttaccaaa

SEQ ID NO: 7773 - DNA, 297 bp, Homo sapiens
gacataggtctcaaagactcttggatcagaatcaggagattagggaaaacaggatggatacctgagcactaacagcagtagacgtagacctctgtcctttaccatctgaggtcttctggattctttgtggggttaattttgatttgatgtcatctgtttgcccttcatcttgcttgcaagtgtgcatggttcaatccctcacatccaggaaatgaattttgcaattgggccagatgctaatttgcacgttgattcaccttctttgcctttaagccttttttttcttttttttttttt

SEQ ID NO: 7774 - DNA, 509 bp, Homo sapiens
atgtataggaattatcatgctttgacattttgattaacattttatagaatgccccacgttgttttttgcatggattgttataagtcaggaggaaggataagttgctccttaaaaacccttgtattatgccaagaccctaatttctgtcttaaaaaagtatgctttacaccttaaagcagcacttttattttgcacattgataatgctgtatgtatactttctttttttccattttattttatttaaaattttttttattttaatagcctttagggtacaattgcattttggttacaatgctgtatgtatacttccatgtagttttcttaatcagtaaaatgatctttcatgttaaagtctctatttgttagttttccctgactgtaattttctttctaccttgtataaatgataaaaatagactctaataaactgagtgtgctctggcatactagttattgacatgtttatattcacaaatataaactccaggctggctgtttttcttg

SEQ ID NO: 7775 - DNA, 515 bp, Homo sapiens
ggtgggctgaggcagcgcagccgctgccgcagggtgcgcgatgccttgaacctgggaaactgtgtgaagcaacactctggattttgaaagacatcttttcatcatgggacagcaaatttcggatcagacacagttggttattaacaagttaccagaaaaagtagcaaaacatgttacgttggttcgagagagtggctccttaacttatgaagaatttcttgggagagtagctgagcttaatgatgtaacggctaaagtggcttctggccaggaaaaacatcttctctttgaggtacaacctgggtctgattcctctgctttttggaaagtggttgtacgggtggtctgtaccaagattaacaaaagcagtggcattgtggaggcatcacggatcatgaatttataccagtttattcaactttataaagatatcacaagtcaagcagcaggagtattggcacagagctccacctctgaagaacctgatgaaaactcatcctctgtaacatcttgtc

SEQ ID NO: 7776 - DNA, 449 bp, Homo sapiens
acagaagggatatacattttcctttctaattttacacacgctattatttatagagcacaaaacactcaaaactaaatcaggaagtatagtcggttagttgagataggatgtggtcttaagtaaacagtgttctaaagtttcaggttgcatgtagtcacatctgtagagggaaacataatttgaaagatgctcttgcaggaaatttttctttgtttagtcaaaatatgctctctttgtttttaagttaatttattatgacctaaaggcatctaaaaaataaataagaaaatgaaattccatatttgtggaaattcatattgaagtctaactgtggctgttttggtaaaagtatttgctgctttgaatcaaatttagcattaaagggctgccacagtataatcatgttaaggagaaaagaatgttgtgcacacttgcattataagccaata

SEQ ID NO: 7777 - DNA, 649 bp, Homo sapiens
  misc_feature 536: n = A,T,C or G
ggtgacttggccaaggtaacacaacctgcctgaccctctggccatgcacacgtgtggagtttgttcccgggccctgtgcctgttcaaagaatggctggacgtcggtattgcccttggtttctgccctgaagtccagtcagtcagcagttctgcttattctgaccctctctgtgcagtattacccaacacacatgcatttcctccttgccttctcagtattgccatcgtgaaccagaattgtcacctccaatttaaacagtgaaggcctttgttaggaagaggggcagggtgcagagggggatggttgctttttctaaatcacagctctgatcaaatccctcctaagcagaagccttccaggctcccctccataaggctccaggtgtttacttaccttgcctgtcaggggcttctgcagcttgcttcctacctgctatctccactcctctccaaaccaccatatcctgaggcttctagaaagcaaactctggcggcatggggttaatgggtctgtgtacccaagacactgtacctgngtgctgtcatctgcctgactgaccttcctgtgtcctggtccgatggtgtctttgatcctatagctaagatcaagacactgaaaatctctagactcaagtctgtgcttttgctg

SEQ ID NO: 7778 - DNA, 499 bp, Homo sapiens
gacagaagggtcaggatccaattttagtgttggacaaagacaactggtgtgccttgccagggcaattctcatgaaaaatcatatattgattattgatgaagcgacggcaaatgtggatccaagaactgatgagttaatacaaaaaaaaatccgggagaaatttgcccactgcaccgtgctaaccattgcacacagattgaacaccattattgacagcgacaagataatggttttagattcaggaagactgaaagaatatgatgagccgtatgttttgctgcaaaataaagagagcctattttacaagatggtgcaacaaccgggcaaggcagaagccgctgccctcactgaaacagcaaaacaggtatacttcaaaagaaattatccacatattggccacactgaccacatggttacaaacacttccaatggacagccctcgaccttaactattttcgagacagcactgtgaatccaaccaaaatgtcaagtccgttcc

SEQ ID NO: 7779 - DNA, 498 bp, Homo sapiens
aatacagtatttcggattaactttagaaaactcaggtttaaggcttattgaccagaagacctctttcttatccaagtgtagggcaattcattgcaccttgaggtaggggaggagcaaaatcaggctggcaggggtccacggcagggcaagctctaggagctggtgagtctagaaggacggactagagagagctggcattggaatggacaatcgctagagggcgccggagcactagcagagtcaacctccgggacccataagcagggcttctaggataaggaatggagtttgacccaaccccaagatatgccctggggatattggttttctcaggtgcatctgactctccggcctggattgcctcgctgcggagaggggacaaaaggttttgccctgagcatctggtgatgtcttccagtgcctggttaggttgctccgcggctggacagtctgactactctcaaaactcctcgtgacaggcctttctgggtctgatcg

SEQ ID NO: 7780 - DNA, 488 bp, Homo sapiens
actgattgattctgcatccgcaaattgttttattaaaaacattctacatcatgtgtggggagataaggaggataaaatgaggagaaagaatattattgaggggaagttcttctgaatacaaaatgtgtttaattttttaaataagtattacattcacagggttcaaactatttgaagtaaagagattatatataaagaatccatccctcaacttacccaggtggtcacttttctttttcttgtgtatctgcccagtattcattcctgctgatatcagtcaataatgaatgatacgtgttttcttcacttttttcattcttgtcaggtagcagactgtgtagacttttctgcacttgcccttttcataacaatctatcttggagaactttccctatgagaacatacagagcttgctgtacatagttgcatgtactgcattatgcaaatgcattatattttatgtaacctgtccactgttggtaggcact

SEQ ID NO: 7781 - DNA, 115 bp, Homo sapiens
aacgtataaataaaatgacagtttgaacatacaaaacccaccccattcctccccacactcatcgcccttaccacgctactcctacctatctccccttttatactaataatcttac

SEQ ID NO: 7782 - DNA, 576 bp, Homo sapiens
gctggagagcagagcaccaagatcgttctggcaggaacagccagtgggaggttccagctgagcgctccccagaggtgagctgatccccagccacagcacacaggaccaggctgcgagaacagcatcatcagcatcatgctattacggtcccaaaccatgggggtttctcacagctttacaccaaagggcatcactatccctcaaagagagaaacctggacacatgtaccaaaacgaagattacctgcagaacgggctgccaacagaaaccaccgttcttgggtttggcattactggatccctctcaattatctctggaaaacaatcaactaagccctttgacctgagcagcttgacctcaaatgcagtgagttctgttactgcaggagcaggcctcttcctccttgctgacagcatggtagccctgaggactgcctctcaacattgtggctcagaaatggattatctatcctcattgccttattcggagtactattatccaatatatgaaatcaaagattgtctcctgaccagtgtcagtttaacaggtgtcctagtggtgatgctcatcttcact

SEQ ID NO: 7783 - DNA, 626 bp, Homo sapiens
aaggccccagctgtggggggcaggcctctcttctcccctagactcactcagcttggtatccatcatcttgagcattcttcagtagattcatctagggttcagattccagactctcagctgaagacagggagccaatttcccccaggtccctgcaggtaatccagggaccccatagggagaacaggctgactggggcattaggaatgtttgtacctctctgcttccctggcagcctggggaagggtgcagggctcagtgcgctaaaccatggtaaacatcttcaatagaactaccctagaatttagtgagtgtgagactgagatattgctcagaataaatttattccatagccatttaggattgcatgttctggaccaaccttgtccagtatgttttctgtttgagctttttcattcttttgttaagccaacaagttgagaatttggccctgctgggatccatgtagtgggcactagctgctctttggccaaggccttcataaatgattcagtctctcattatctgtcctctagccccacaccctgatttagaccgtggcaaaggaagaacttgaggtcaagaccaaccaaatctgtgaattaaagctgttatttttttctctgcag

SEQ ID NO: 7784 - DNA, 528 bp, Homo sapiens
acagaaggggagttgtaacttgcctggtgcccaatagatgtcactctgttttcctagaaactttaaaatatccctcagtgctcctgttaattcatggtagtgccccaaggcactctggcacccagttttggaactgcagttttaaaagtcataaattgaatgaaaatgatagcaaaggtggaggtttttaaagagctatttataggtccctggacagcatcttttttcaattaggcagcaacctttttgccctatgtcgtaacctgtgtctgcaacttcctctaattgggaaatagttaagcagattcatagagctgaatgataaaattgtactacgagatgcactgggactcaacgtgaccttatcaagtgagatggagtcttgccctgtctccaaggctggagcccaatggtgtgatcttggctcactgcaacctccacctcccaggttcaaacgtttctcctgcctcagcctcccaagtaactgggattacaggtacccaccaccatgcccagctaattttttgt

SEQ ID NO: 7785 - DNA, 528 bp, Homo sapiens
gctttctgccgccatcttggttccgcgttccctgcacaaaatgcccggcgaagccacagaaaccatccctgctacagagcaggagttgccgcagccccaggctgagacagggtctggaacagaatctgacagtgatgaatcagtaccagagcttgaagaacaggattccacccaggtaaccacacaacaagcccagctggcggcagcagctgaaatcgatgaagaaccagtcagtaaagcaaaacagagtcggagtgaaaagaaggcacggaaggctatgtccaaactgggtcttcggcaggttacaggagttactagagtcactatccggaaatctaagaatatcctctttgtcatcacaaaaccagatgtctacaagagccctgcttcagatacttacatagtttttggggaagccaagatcgaagatttatcccagcaagcacaactagcagctgctgagaaattcaaagttcaaggtgaagctgtctcaaacattcaagaaaacacacagactccaactgtaca

SEQ ID NO: 7786 - DNA, 88 bp, Homo sapiens
agggatgtatgtcgctgtccaagagaaggctgtggaagaacctatacaactgtgtttaatctccaaagccatatcctctccttccatg

SEQ ID NO: 7787 - DNA, 69 bp, Homo sapiens
gattgtcttatcacctttattagataaatcatgaagtgtccctgtgaaattgaagtgaaactatctctg

SEQ ID NO: 7788 - DNA, 473 bp, Homo sapiens; identical to SEQ ID NO: 2436

SEQ ID NO: 7789 - DNA, 151 bp, Homo sapiens
attcatttctctaacagcagtaatattaataattttcatgatttgagaagccttcgcttcgaagcgaaaagtcctaatagtacaagaaccctccataaacctggagtgactatatggatgccccccaccctaccacacattcgaagaaccc

SEQ ID NO: 7790 - DNA, 547 bp, Homo sapiens
atcagatgaatggaaaaacttaggaaagtgtgaacaagaaaaagaaacattgttgaaagacaaagagattatcttccaggcccacatagaagaaatgaatgaaaagactttagaaaagcttgatgtgaagcaaacagaactagaatcattatcttctgaactgtcagaagtattaaaagcccgtcacaaactagaagaggaactttctgttctgaaagatcaaacagataaaatgaagcaggaattagaggccaagatggatgaacagaaaaatcatcaccagcagcaagttgacagtatcattaaagaacacgaggtatctatccagaggactgagaaggcattaaaagatcaaattaatcaacttgagcttctcttgaaggaaaggggcaagcatttgaaagagcatcaggctcatgtagaaaatttagaggcagatattaaaaggtctgaaggggaactccagcaggcatctgctaagctggacgtttttcagtcttaccagagtgccacacatgagcagacaaaagcatatgaggaacagttg

SEQ ID NO: 7791 - DNA, 488 bp, Homo sapiens
gggccctgaacttttgcaggtgaccagagttgaccgagaaaatatactagcaagtgttgcgtttccaacagaaattaaggtcgatgtgtgcaaaagagtaaatctggacattactactttaatcacatatgtatctgccctcagctatggaggctgccactttattttcaaagagaaagtgctcacagaacaagcagagcaagagaggaaagagcaggttctacctcagctggaggcctttatgaaggacaaggagttgtttgcttgtgaatctgctgtcaaggactttcagtctattttagataccttaggaggacctggggagagagagagggccactgtgttaattaagcgaattaatgtggtaccagaccagccttctgagcgtgccttgagactagtggccagttcaaaaattaatagccgctcattaacaatttttgggacgggagacaccctaaaagccatcacaatgactgctaatagtg

SEQ ID NO: 7792 - DNA, 577 bp, Homo sapiens
ggacccgccttctctctcggcgtttccgctgtcagggccctgcggtgtgactcgcgggctcagctggtccggccgtagcacctccgcgccgtcgccatgtcgcggtttttcaccaccggttcggacagcgagtccgagtcgtccttgtccggggaggagctcgtcaccaaacctgtcggaggcaactatggcaaacagccattgttgctgagcgaggatgaagaagataccaagagagttgtccgcagtgccaaggacaagaggtttgaggagctgaccaaccttatccggaccatccgtaatgccatgaagattcgtgatgtcaccaagtgcctggaagagtttgagctcctgggaaaagcatatgggaaggccaaaagcattgtggacaaagaaggtgtcccccggttctatatccgcatcctggctgacctagaggactatcttaatgagctttgggaagataaggaagggaagaagaagatgaacaagaacaatgccaaggctctgagcaccttgcgtcagaagatccgaaatacaaccgtgatttcgagtccatatcacaagctacaagcag

SEQ ID NO: 7793 - DNA, 519 bp, Homo sapiens
atctatctagtgagttgtattataagcgatgaaatactttaaaagctacccagtaactcttgggattaattttatgaaataaattctgagctgctgcttttgatatagtcagacttaagactgaaccccagtagacaggcaatagatatagaattctggttagctaattgaacttttgtgacctgtttaaaaacaaatcaaatttattgaacaaatgacaaggcacaaatactttcagaattgtatttcagttttgaagatttaaaaaaaatgtgaaaataaatatatattagtatcctttattttaaagtcaattgtaaaccagaagtactgttattttggtgattaaaatccaaaactttagctgtatttcagtaacaaaaacataccttactagactgtgatggctcacacctgtaatcccagtgctttgggaggttgaggtgggaagattctttgagcccaggagttcaaggctgcagtgaattctgatcgcaccactgaactccagcccgtatg

SEQ ID NO: 7794 - DNA, 451 bp, Homo sapiens
gaacagcccatggaagaatcatatgaagaggtggtgactgaggtcgtaagcaggagtggacatgtttggatttccaacagctaccctgctggactgtcatggaagatatgcccagaatgtagcgttcttcagtgagtgaatgtgatgactgaagcccaccacaaatatgaccactctgaggctacaggatcctcaagctgggatatccaaaattctttcagaagagagaagctggaacaaaaatccccagattcgaagacactacaggaagattcacctggagtgagacaaagggtctatgagtgccaggagtgtggaaaatccttccggcaaaagggtagtctaacgttacatgagagaatccacactggtcaaaggccttttgagtgcacccactgtggaaaaagcttcagggccaaaggcaatcttgttacacatcaacggatacaca

SEQ ID NO: 7795 - DNA, 607 bp, Homo sapiens
acagaagggggtcatggagatcctcaatgtcacgctggtgccctacggaaacgcacaggaacaaaatgtcagtggcaggtgggagttcaagtgccagcatggagaagaggagtgcaaattcaacaaggtggaggcctgcgtgttggatgaacttgacatggagctagccttcctgaccattgtctgcatggaagagtttgaggacatggagagaagtctgccactatgcctgcagctctacgccccagggctgtcgccagacactatcatggagtgtgcaatgggggaccgcggcatgcagctcatgcacgccaacgcccagcggacagatgctctccagccaccacacgagtatgtgccctgggtcaccgtcaatgggaaacccttggaagatcagacccagctccttacccttgtctgccagttgtaccagggcaagaagccggatgtctgcccttcctcaaccagctccctcaggagtgtttgcttcaagtgatggccggtgagctgcggagagctcatggaaggcgagtgggaacccggctgcctgccttttttctgatccagaccctcggcacctgctacttaccaactggaaaattttatg

SEQ ID NO: 7796 - DNA, 69 bp, Homo sapiens
gatcatgaaaatgggtctgttgtgcgaagtgtctgccgctgtgcctgctgtgttatttttaactgatct

SEQ ID NO: 7797 - DNA, 503 bp, Homo sapiens
ggggatccacttccttacctcctgttcatgcaactttgcttgttttgcttctactaaaatggttctaggtgctgtgtggacaggtgatacaaaagcctgactcacacggttgacattcattcattccattttcatttctctttgagtgatcctgacaagcagagggtctcaggtggatattactgtgtctttgagacctctctaatccttatctatctctcattttaatacagagagtttcatacgcagaccttaagtagacatagtatccagctaaaagggtctcactctgtcacccaggctggagtgcagtggcgcagtcatggctccctgtaacctcaacctctcagactccagcaatcctcctgcgacagagacagagtctcactttgttgctcaggctggagtgcattggcacaatcttggctccctgcaacctccgcctcccaggtttgagcgattcttttgcctcagcctcctgagtatctgggatgacaggtgcc

SEQ ID NO: 7798 - DNA, 613 bp, Homo sapiens
acagaaggggggtctacccccagcatgagcggcctgcgcgtctacagcacgtcggtcaccggctcccgcgaaatcaagtcccagcagagcgaggtgacccgaatcctggatgggaagcgcatccaataccagctagtggacatctcccaggacaacgccctgagggatgagatgcgagccttggcaggcaaccccaaggccaccccaccccagattgtcaacggggaccagtactgtggggactatgagctcttcgtggaggctgtggaacaaaacacgctgcaggagttcctgaagctggcttgagtcaagcctgtccagagttcccctgctggactccatcaccacactccccccagccttcacctggccatgaaggaccttttgaccaactccctgtcattcctaacctaaccttagagtccctcccccaatgcaggccacttctcctccctcctctctaaatgtagtcccctctcctccatctaaaggcaacattccttacccattagtctcagaaattgtcttaagcaacagccccaaatgctggctgcccccagccaagcattggggccgccatcctgcctggcactggctgatgggcacctctgtt

SEQ ID NO: 7799 - DNA, 698 bp, Homo sapiens
gaataagcttgcggccgcagtttttttttttttttttttttggctcaatgatatatttgccagttattttattttttctaaaaacaatagaaaaaaatcaactttaaaaagcaaaatgtacttaaataaaaaaaattagggtttatagtacctataatactaggtactatatactaggattgaaattctgtgtaactgctataaacgttttattaaagttatttacatttaatggcaatatttacagagaaacattgtgtaaatcttaaaattttttaaaaacaattcttaaatacaaatctgttaaagaaaaaaaaaagatggtaagcataaaaaagttcttttatgcccaaagtccaatttgaggcagtttacattatggctaaatctttcagtctcaagactcagccaaggttgtgaggttgcatttgatcatgcatttgaaacaagttcataggtgattgctcaggacatttctgttagaaggaatcgttttccttacttttccttacgcacaagagttccgtagctgttcaagtttgtgtttcaactgttctcgtcgtttccgcaacaagtcctcttcagaaatgagcttttgctcctctgcttggacggacaggatgtatgctgtggcttttttaaggataactaccttgggggccttttcattgttttccaactccgggatctggtcacgc

SEQ ID NO: 7800 - DNA, 655 bp, Homo sapiens
atggtgaaggccccaggggccaagtcagcccacacgctggtaggtcccaccccctccaggacagagaccctggtggaggagaccgcagcagagtccagcgaggatgatgtggtggcgccatcccagtctctcctctcaggttatatgacccctggactaaccccagccaattcccaggcctcaaaagccactcccaagctagactccagcccctcagtttcctctactctggccgccaaagatgacccagatggcaagcaggaggcaaagccccaacaggcagcaggcatgttgtcccctaaaacaggtggaaaagaggctgcttcaggcaccacacctcagaagtcccggaagcccaagaaaggggctgggaacccccaagcctcaaccctggcgctgcaaagcaacatcacccagtgcctcctgggccaaccctggcccctgaatgaggcccaggtgcaggcctcagtggtgaaggtcctgactgagctgctggaacaggaaagaaagaaggtggtggacaccaccaaggagagcagcaggaagggctgggagagccgcaagcggaagctatcgggagaccagccagctgccaggacccccaggagcaagaagaagaagaagctgggggccggggaaggtggggaggcctctg

SEQ ID NO: 7801 - DNA, 580 bp, Homo sapiens
tcctttaatgagtacttgttacagtaaaagaggtataaagtcctgttcccaagtccaaaccactttttaacttaaatcttgagtttttctgaattactcaatttgaagtaattctctttatctgaaaaatggttttattgaaacgtttgagattaaaaaatatgcattgcaagaagcatatgacaaacattctgagagtacaaaattagttgtaaaaaataacataatttaccagtaaacccactcatatagaaatgtgcaaagccttttgatataaaaagttttgtacaccaagcacctatttttataacttagcttcccatggagagataatggcttgcgtgcattttatgtatccataacatacatacaaggctcggtcttttcaatgggataacagttcacaactcttcgatttgaattgtaatgaatctggtgacaaggatttttctctaatggattccaaagttagccagaacttttaatgtcaagatgaaaaagggtgtaaggtgttatattttcttcaattcctttaccacaggaggctaactccacaatttccctcatgtttctcattcag

SEQ ID NO: 7802 - DNA, 568 bp, Homo sapiens
aaacctctgctgaggatgcatccgagtttggaaaccccacttaagggatggagcctgggggatcacattaaacggaaaatgccaacgacttctaccacctctacgcgtttttagtttttcattttctcgaaggaagcgccagaagcctgtggagtaattgtaactagagggagaacggaaagctgaggtgactgctccggggacttggcgcggcgccttggtggctttggttgctcttccacgctcccggcagctgaccagaatctcttggagggtctcctgggccacctcggccgcgccagtcgtgcagtgagacttctgtagttttaaaatgccacagtccacggcccggtcggcaccgctcgcctgaatcgagggctttgggaaccttggaggctgctgctccaggaactcgcggtcggccgggagccggggagcttcgttgctgggagcgggcggtattcgcggactccggcggccctggcgggtcgcggccgggatccgagccggggatgaccatgctgatggagctgatggggcaagagtgggaacggaggcacgtacactg

SEQ ID NO: 7803 - DNA, 547 bp, Homo sapiens
  misc_feature 522: n = A,T,C or G
ctgccaaaatatttttattctgttttcaaattgaacagcatatattgttagagtgagagtctgtaaattcagtcctcttctttgttggcattcagaagtctttgttgaaatctggatgagattctgaattcaggtgatgttgatttacataaattggatgtctctgggactttccattttgacagtcgctcttctacttcagtctcctgaagacatctctccaacagaagttacataaaaatactaatcttcaaggtgctttctaaaatattttcatcacgtcattaaaatcttctttcactaggcaatggttctgtctctatgggggctggcaggcagggcaaatgaattcctaccaataaggcgggcctagttggttcatgtcaattccaaagcaagaggatggttgaagaagggtattgaatgagtagataacaaatatttggagagagatttggaggaaccctggaagacaagagtaggctattggcaagggctacaagatggtagagacatccttgngctttgactctaattgaaaatacag

SEQ ID NO: 7804 - DNA, 662 bp, Homo sapiens
gcggccgcaccaatttttttttttttttttgtgagtttggacaaactttactgcaataaaacaaatgcttaatttaattcagaataagagataactcttcaataaaatatatcaaattgtacaagcaccctttcaaagggataaaggtataccggagggaggggagagatggacaggaaggtgaaataccagggagcttaatgggctgtttgacaaccccattttcaccaagtcaaaacatggctttaccttctgccccccaacatgtaaaaaagtatataaaattttctaataagtttaggacatacaacaggtacacacacagagaaagcatattttttttttctttctggatctactaattgttcaagaatatttagcatataggtaatggttacaagatactcattttttaagcagaaaattactaaacccccacccaaatcacctttgcaatctgtgaggatgaatgtacctagtatttctcagaaaccatcaattcctctcaacaggttttaacattttactctccaattatctgaaataaagttaccaacagccttgagaagaattaggaagtatttctaattttctacctcacctccaggcagtctcaggattcttctcatcccaggtattggtcttacaaaaatattcttaaa

SEQ ID NO: 7805 - DNA, 423 bp, Homo sapiens
catgttcccgtatgctttattggaatgctgtcaggtccgcgccttccacctgggccctcacacacagcaaggagaggccccagcaccggtcccaggcccacctgcccgcacctgcagaagggaaaggccatcaccctccgtggacggggtctcggccaccacatccaccttctgaaggtggcccagacacctccacgctgctgactgcacttcccatcaaaagggactccctggggcagagtgggccgtccccctacccccgaggaaggcaccctcctgggcggggacagaccttggctccatgctgccaagtcaaggtgctggcgtggaaacaggcacatgtggaacaccacatcccactgtccaaggtggagtccgtgtctggtgaacctggtgaacttggtggtgggacggtgctgatgc

SEQ ID NO: 7806 - DNA, 500 bp, Homo sapiens
aactggtgaagtttttattaaatccacagaagtaaaaaccatatcgtgaggaactgggggaaggggccaccagggagtgggagtcaggccaccaggggagtggggatggggtgacaggacagagaacagagccaggctgggctggccatgggggctccagcctcaggggccatcaccagggccaccagacagctcctgggaactcaggccagcaccaggcaggctcatcggcgggggctccaccagcacagcagagaacttggtgtcaccgaaggcctcgttcatgcgcgtctcgaagaagcgctgcaggccgatgatggactgcacgtctgccttgtcctcagttaacttgttgaattgcttgaacatgcggcccacatcctgggcaaactcctgtggggagctgtagggaggtgacacttctcctggaggcgggcacggatacaggtcagattcagagtgccaccgggctggtacaaggaaaaagtggagtcggtacc

SEQ ID NO: 7807 - DNA, 180 bp, Homo sapiens
caacttgcatattctggggaagtgagaggtaatatacagtgtaaatgaatgaacagttagcatgttggtaatacaaaatatgtttgcttatttatggtaagtcatatgattccctagaggtaaacctgtctaaattgtttacgtgtttataatctaagtgattattttaaaaatggatac

SEQ ID NO: 7808 - DNA, 586 bp, Homo sapiens
gacagagggggttttcccgaacgcccgcagcagggtcagaagggaggtggccggtctccgtcgtgacctctgacggtttctgagcgttggcctttggcacgcgctacccccttttgctttggttctgccatgccgatgtaccaggaagagtctaacctgtctcggcaagctcttgagtcccgccaagatgatattttaaaacgtctgtatgagttgaaagctgcagttgatggcctctccaagatgattcaaacaccagatgcagacttggatgtaaccaacataatccaagcggatgagcccacgactttaaccaccaatgcgctggacttgaattcagtgcttgggaaggattacggggcgctgaaagacatcgtgatcaacgcaaacccggcctcccctcccctctccctgcttgtgctgcacaggctgctctgtgagcacttcagggtcctgtccacggtgcacacgcactcctcggtcaagagcgtgcctgaaaaccttctcaagtgctttggagaacagaataaaaaacagccccgccaagactatcagctgggattcactttaatttggaagaatgtgc

SEQ ID NO: 7809 - DNA, 505 bp, Homo sapiens
ttgtttatcctagtgtttcgtacaagtgaatgttatatcatgtatatctctggggggaagaaaggccgagacctgtcatgggagactgtgcctttgctagccagtctgtaaattgaataatcttgaaacatttaggtaggcacatttggggtgacttcaaagtgctttatgaagtcttctctcctcacacatctccagagactaccatacctgaaatttcatgattgtttaagataagaattgcttttttgatagatatttcagaagtaactgatatttaaaacataattaactgactaatttaaatttttttccttttgggtaatgttgaatctaggaaaaaaatcctgttattcaggagcctttttgagagttaactttcatgcttctttttaaatccatatcccatgcctctttgaaattgtcactcggaggttgggcgcggtggctcacacttgtaattccagcactttgggaggccgggtgggtggatctcctgcggtca

SEQ ID NO: 7810 - DNA, 610 bp, Homo sapiens
gacagaagggaatatttccaatgtgccacctacaagagagatacttcaagtctttcttactgatgtacacatgaaggaagtaattcagcagttcattgatgtcctgagtgtagcagtcaagaaacgtgtcttgtgtttacctagggatgaaaacctgacagcaaatgaagttttgaaaacgtgtgataggaaagcaaatgttgcaatcctgttttctgggggcattgattccatggttattgcaacccttgctgaccgtcatattcctttagatgaaccaattgatcttcttaatgtagctttcatagctgaagaaaagaccatgccaactacctttaacagagaagggaataaacagaaaaataaatgtgaaataccttcagaagaattctctaaagatgttgctgctgctgctgctgacagtcctaataaacatgtcagtgtaccagatcgaatcacaggaagggcgggactaaaggaactacaagctgttagcccttcccgaatttggaattttgttgaaattaatgtttctatggaagaactgcagaaattaagaagaactcgaatatgtcacttaattcggccattggatacagttttggatgat

SEQ ID NO: 7811 - DNA, 481 bp, Homo sapiens
aacgaggctgtctctcttcccttctcttgtttagctatgagattgacacatcatggggaaagcatttagaatgtacccagtgctttggggtgcttggtgccacccagcactgtgagcacaggttcttctaccttggggccacacccagttacctgtatctcactgcacagcagtggctgttggggaccaggcccacccctccatgtcccacctcctgcaactgcagcctgagccttcccatcagcctggggtggtgcagacccatgtgccattgtggatccttcaagttacctgtgtggcagagaggacgtgtgagtgccgtccaaacccaaacactgagagggtccttcccattgcccccacggaagtaaggtgccccagtgctaattccacttatacttgctggtggcaaggacacttctcctccttattaaagtgggggattggctgggtgaggtggctcacgcctgttatcccagca

SEQ ID NO: 7812 - DNA, 445 bp, Homo sapiens
acagcaggggtcaacgtccacatcttcgtctctgagtactggttctgagggctggtctgccgcacagccgcaggtgcacctccaggccaaatcattgctgccagtgactgtggtctgtacttgtttataccctcagacttttttaatgttaggtatttgtagcattaggccaacatgtattaagctgagccagatgaataagtccatctgatgtattttcggtgtttaaaaaatgagcccagttgctcaactgtttggttgaaaaccttgctcattttttaatgcgaaggctaagtgtcaccccctttctctgcctctggctgggccttgctaagggccaaggaaagaaagacattttttagggggcagccagtccaaatgccaaaagaagaccagttcttgccctgattgtatgaaatttgacattttggcacttttttttttt

SEQ ID NO: 7813 - DNA, 384 bp, Homo sapiens
tacggctgcgagaagacgacagaagggtacggctgcgagaagacgacagaagggtacggctgcgagaagacgacagaagggtacggctgcgagaagacgacagaagggtacggctgcgagaagacgacagaagggtacggctgcgagaagacgacagaagggtacggccgcgagaagacgacagaagggtacggctgcgagaagacgacagaagggtacggctgcgagaagacgacagaagggtacggctgcgagaagacgacagaagggtacggctgcgagaagacgacagaagggtacggctgcgagaagacgacagaagggtacggctgcgagaagacgacagaagggtacggctgcgagaagacgacagaagggtacggc

SEQ ID NO: 7814 - DNA, 453 bp, Homo sapiens
ataacgagtacattgtctatgatattgctcaggtaaatctgaagtatctgctgaaactgaaattcaattttaagacctccctgtggtaattgggagaggtagccgagtcacacccggtggctctggtatgaattcacccgaagcgcttctgcaccaactcacctggccgctaagttgctgatgggtagtacctgtactaaaccacctcagaaaggattttacagaaacgtgttaaaggttttctctaacttctcaagtcccttgttttgtgttgtgtctgtggggaggggttgttttggggttgtttttgttttttcttgccaggtagataaaactgacatagagaaaaggctggagagagattctgttgcatagactagtcctatggaaaaaaccaagcttcgttagaatgtctgccttactggtttccccagggaaggaaaaatacacttc

SEQ ID NO: 7815 - DNA, 517 bp, Homo sapiens; identical to SEQ ID NO: 2447

SEQ ID NO: 7816 - DNA, 501 bp, Homo sapiens
agggagtatataatgaaattaagtaaatgaggaattgcctaaaactaagggagtttcacctccatgtaggtagaagaatgtgaaatggtctgtgtccagaagccagatcagaaatggtccatagcaaggtggggagggcagcgggtacccacctggcagtgtagggggttggattcagcttcatcttcctgaccccttgtcaagtggacgagctccagccaaacaaaggaagtgtgttggagtggccaccagcacagaagtgtacctttctgggtaatgtgtcacccagtcccctggccatgtgagaggacaggcacagttgccacacagtactaatagttggtctcttctttaagggtcaaaaaaaaggaggtggagcacttttaagaaagtgttaaggttccatgaagatgttatggtggcgtgctggcaggtgcatatcaaccctgccctgaggccctcagcagccttcggtctccccaaagcaatatggctccttat

SEQ ID NO: 7817 - DNA, 334 bp, Homo sapiens
gacttggttcatcttcagaaaggggaagccaacccctcctgtgctgccagtcactgtaacccactagaactaataattaccaatcccctagatccccattggaaaaagggagaatgtgtaaccctggggatcgaagggacagggttaaacccccaagttgccattttagttcaaggggaggtccacaagcactctcccaaaccagtgtttcaaaccttttatgaggagctaaatctgccagcaccagaacttctgaaaaagataaaaaatttgtttctccaattagcagaaaatgtagctcattcccttaatgttacttcttgttatatatgcg

SEQ ID NO: 7818 - DNA, 464 bp, Homo sapiens; identical to SEQ ID NO: 2449

SEQ ID NO: 7819 - DNA, 391 bp, Homo sapiens
atggccaaatcgtattccatggtgtatgtgggagatatatatatatatagatatagatatatatctcacattttctttattcactcattagttgatgggcatttaggctggttctatatttttgcaattgcaaattgtgctgctatgaacatgcatgtacaagtgtctttttcatataatgacttctttacctctgggtagatacccagtagtgattgctggatcaaacggtagatctacttttagtgctttaaggagtctccatactgttttctgtagtggttatagtagtttacattcccaccagcactgtaaaagtgttcccttttcaccacatccacaccaacatctattattttttaatttttaaattatggccattcttgcaaga

SEQ ID NO: 7820 - DNA, 75 bp, Homo sapiens
gacagaaggggaggcattgaagcagccagcgcaagggcttctgctgagggggcaggcggagcttgaggaaaccgc

SEQ ID NO: 7821 - DNA, 294 bp, Homo sapiens
acaggaaactacagtatttgagttgcttttctaagtaagctaaagcctttgcttgtcttactgtttaacctgacttgctatgatccctgatgtagagctttaagtgaaaacttaatggctaactagtgtggaggatgaccatgtacctgaaaatttcttcaccaaaaataaccatatgggccaggcacggtggctcacacctatcattccaacactttgggaggtcaaggtgggaagattgcttgagcctaggaatttgcgaccagcctgggaaacatggcaaaatcccatctc

SEQ ID NO: 7822 - DNA, 249 bp, Homo sapiens
gagaccagcctgaccaacatggtatcgctcctaaaatacaaaaattagctgggcctggtggcgcatgcctgtaatcccagctactcaggagacttgaggcaggagaatcgcttgaacctgggaggtagaggttgctgtgagccgagatcgcaccaccgcactctagcctgggtgacagagcgagactccatctcaaaaagaaagaaagaaagaaaatgccagacatttattgaggggctggaatgatat

SEQ ID NO: 7823 - DNA, 433 bp, Homo sapiens
gcctggcagcggccctgtgcagatccctgagcgtgtggcagcagtgcggtcgtggtccctccctatgcagcctggtttctagcgtgacacgcccttgacttgaggaccatgaaccgcagccgccaggtgacgtgcgtggcctgggtccgctgcggcgtggccaaagagacaccagacgaggtagagctgagtaaagaagaagtaaaacgcctcattgctgaggcaaaggagaaattgcaagaagaaggtggtggcagtgatgaagaggagacaggcagtccttcagaagatggcatgcagagtgcacgcacccaggcacgcccaagagagcccctggaggatggtgacccagaggatgacaggacgcttgatgatgatgagctggctgagtacgacttagataaatatgatgaggaaggtgacccagatgctg

SEQ ID NO: 7824 - DNA, 382 bp, Homo sapiens
cccaaagtgctgggattacaggcatgagccactgcacccagcccaacaggcagattctgttagatcagtcatatcatctgcataagtgaagagagcattcattacacactgagctactttggcaattgtttgttacaaaccataactcattagatatccctaagctcatcatcggaactgaggcaatatcctaccatgtcacttgattgtccatttggttctgagtcaggcttaacaatcatccacagaacagactagtccaatttctatgggtcccagaagagctgtcaataacaacagtgtcaagtcagatcctgtttgactgtaaacaacagaaaactcagctgatacacatgtgtctcgcccattaaggaatttagat

SEQ ID NO: 7825 - DNA, 613 bp, Homo sapiens
gaaacggaagtggcgtacggcatgcgccggtggcgtgatggagcggcagcagcagcagcaacagcaactgcgaaacctgcgtgacttcctgttggtctacaatcggatgacagaactctgcttccagcgctgtgtgcccagcttgcaccaccgagctctggacgctgaggaggaggcctgtctgcacagctgtgctgggaagctgatccattccaaccaccgcctcatggccgcttacgtgcagctcatgcctgccctggtacagcgccgcatcgcagactacgaggctgcctcggctgtgccaggcgttgctgctgaacagcctggggtctctccatcaggcagctagccatacccaaccccaggaaggaaggccttggatggaccctcagattgaaggacccggtggaccttggggttggtgaatcctaaacagagagaattcgaggttgcctgaaagctgggtgtccttgctccttttcctggagccaatatacccagtttttactcagtttgatttatattctgggcaaggaagctttgcctactttattggcacaatccgttgttctgtcgtttagtgcatatctgctggcttcagccctggcagctg

SEQ ID NO: 7826 - DNA, 531 bp, Homo sapiens
acagaagggatccatttttcatgttatggaacatcggttttcttttcaccaaaatgattatagagcttgataggactttacaaagattctacagaacagtgttttgtaaatttttgttattattttaagcttttattttgaaataattatagattcacaagaagttacaaggctagaacagggttcccctggtcgacctggtttcccccaatggttacttcttttataactttagtacaatatcgtaaccagaaaattgatattggtatgatgtgtgtgtaaaattctgtgtcaatttatcacacgtgtagatttatgtaaccaccttattcgaggtacagtactatttcatcaccacaaagctcttcatgttgctacccctttattgccacacccacctccttaaatgcccccacacccccaatccataaccactggctaccactaatttgttctctgtctctaccattttgtcatctcaagaatgtgccgtatacccagacttcaccactgtacaatatatgcacgtaa

SEQ ID NO: 7827 - DNA, 282 bp, Homo sapiens
ggaagcagggtacttgctgctttgcaagtgtgtccacatctaattaatagtacagttcttactcttggtgtgtccggtgatattaaaaattaatgtgccttatttagataagtaacataaaaatcacaaaatgtatgccttagatttatatgtatttataactagtctatttcctgaaaacagttgagacaccttgtaaaagttaccggtacgatagggccattccaacaaagctgtaaagtggtgataacacagtcataaagaagaggagatagctctggg

SEQ ID NO: 7828 - DNA, 551 bp, Homo sapiens
  misc_feature 356: n = A,T,C or G
tacacaaatgcaaacctttgcaaacacattattatgcttttgcacacacacacctgtacacacacaccggcttgtttatacacagggagtgtatggttcctgtaagcactaagttagctgttttcatttaatgaggtgtggtttaacccttttgatcactaccaccattatcagcaccagactgagcagctatatccttttattaatcatggtcattcattcattcattcattcacaaaatatttatgatgtatttactctgcaccaggtcccatgccaagcactggggacgggggtatggcaaagtagacaaatgttttttgttcatttggagcttagagtccaggaggaatacnttagataatgacacaatcaaatataaattgcaagatgtcacaggtgtgatgaagggagagttggagataccatgagtttgtgtaacaggaggacacagcattattctagtgctgtactgttccgtacggcagccactacccacatgtaactttttaagatttaaatttaaaataattaacattcaaaacgcagct

SEQ ID NO: 7829 - DNA, 314 bp, Homo sapiens
gggccactgggagccaatattaggcattgactctcagccaggagtctgactggtctaacaccacactgcaactcctgacctcttgaagtactaagctactttgctgttagtgacagttattacagtttctcagccccattgtctctgccctctgtggcaatggaaggagaatatagagaagacaaaattaaatatagatagacctgagaaggacagccaggatagaattccatttgtgcctattccctgcctcccctcccctcccccatcctaccagttggttattttctcattgcatacgtgatgtgttcact

SEQ ID NO: 7830 - DNA, 416 bp, Homo sapiens; identical to SEQ ID NO: 2457

SEQ ID NO: 7831 - DNA, 472 bp, Homo sapiens
agcccccaacaccctccctacacccacggacattgggaaatggcatagcggcatttttttattgttgaaatctcttgtgggtattcagtaggctggcaccaggaatgctgggtgccagatagtcccacataatgaggaattgtctgcagaaatgccatagcactcattgagaaacaccgtggtgtgaaattcatgttgtaggtttgttaagccagtattttctaagttcagtgccaaaaagcaagctgtatgctaaggattgtgtatgaatagacaggaagagacttctttgttccacaggacattttcagaaaattcttacttttgtttggagtatcagaaattgcttacagagcagggccttagctcatacctgtgatctcagcactttgggagtctgaggcgggaggatcacttgagcccatgggttcgagaccagcctgggcaaaattccgaggccctgcctctacag

SEQ ID NO: 7832 - DNA, 175 bp, Homo sapiens
gacataagggggaaatgggctggggccctcttgctcaccctagacttggaaaaaccagtttctcttttattgtctgttactaatctctattctaaaaattcagctcaattctcaaccatactccaaactctctcttttccagctacctttactccctctccttcaattccacttt

SEQ ID NO: 7833 - DNA, 418 bp, Homo sapiens
ataacaagagccgtccctccaattaatgcagccctgaggtgtctggctgtggctcaagatttggccccatgcagaccctcccaaaggatactgccttctcaagatcataggcctcagactccaactggtgttatcccagggttccgtttgctgaagtaaaaacactgattttaaaatcccagtgggtacctttgtatggtggcacaagtggccgaatcaggctgaggaatctacggcttggttccagctgtgcagctgacttctgtgagactggggccagccacactactctctaggcctcaggggtcaaggagctcagaggagggccctgaggtctctttccggtgggtatgttcattcttcaactgttcttatgtcacagagggctccttgctggtgggcagtgggttgtaaatac

SEQ ID NO: 7834 - DNA, 490 bp, Homo sapiens
gacagaaggggtctgagttttaaaaatctcttcccattttcaaagatttttcaaatggatgtaggagaggaccaaggaggtaggctatagctgtagaacaacacagtcctattttcagaaacgaacagacacacgttttaggtcaggcacagcccatgtatccaggtgcatcaaactggggatgctaagttcaaaagtgcgtctgttttgaagatttcatctgaaaataatgtgtacactttcattactaccagtttgcattcaaaatagtttttgagactctttaaactcttctggatactttaattttccctttggaatagtgtgtaaacacagtccggatgaactttactactgatacctcacttgaggttgacaggagtggccagcagttagtgcctatggtcatgtaatacactaagtcaatacctgtggagtgaaatccggtctctataaaaaatacaaaaaaaatggctggacgcagtggctc

SEQ ID NO: 7835 - DNA, 565 bp, Homo sapiens; identical to SEQ ID NO: 2462

SEQ ID NO: 7836 - DNA, 91 bp, Homo sapiens
gacagaaggggaaaaacactgctttacatagactgcctttcccaaatcttttcttggccagtttcttgtcattcgtgtcttatttaaaaga

SEQ ID NO: 7837 - DNA, 457 bp, Homo sapiens
  misc_feature 356: n = A,T,C or G
agggtacggctgcgagaagacgacagaagggtacggctgcgagaagacgacagaagggtacggctgcgagaagacgacagaagggtacggctgcgagaagacgacagaagggtacggctgcgagaagacgacagaagggtacggctgcgagaagacgacagaagggatttataacaaaatcaataccaagagccttcaaagattgaattctgctcatcaaataggttcacatgctgaaatcctaatgccttccttctccctttagaaattaaattctgaatgtgcccaaacctggataatgattaaagatagatgagttcttggctgggcaccgtggctcatgcctgtaatcccancactgtgggaggctgaggtggaggcatcacctgaggtcaggagttcgagatcagcctggccaacatggtgaaactctgtctctacaaaaaaaaaaaaaaaa

SEQ ID NO: 7838 - DNA, 525 bp, Homo sapiens
gacagagggggaaccaccgtggcatatgccgtctgtcattgactgaaacgtcattatgcagggcatgactgtacttacaaaattagatggcacttcttaggaacattcctttgctatgagttgttttaaaacttaatgtacttaaattttttttattataaaaaatttccaacataaacaaagagggagaatgtatgtatattaagggtctcactctgttgcccaggctgtagtgccgtggtgcgatcatggctcactgcagcctcgacctcctggactcaagtgattgagggagaatattataatgaatgactttatattcctcacctgggttaggatgaaatgctaaggtcacagctaagcaaaagccactttaaaggaaaggaatgttgctgccacgagtggcgttcctgcagaaaggtcattaagtcagaattactactctgtgttctggagggaaaataccatgacactaagaatttagctgtgggtcagggaggcattttatgtggtgtgaatcaaact

SEQ ID NO: 7839 - DNA, 523 bp, Homo sapiens
gttcgtcttcccggaagcgttggaggacattccctgttgactgcgtcgcgatgtgtggcgactgtgtggagaaggaatatcccaaccggggtaatacctgcctggagaatggatctttcttactgaactttacaggctgtgcagtgtgcagtaagcgggattttatgctgatcacaaacaaatccttgaaagaagaagatggagaagaaatagttacctatgatcatttgtgtaagaattgtcatcatgtaatagccagacatgagtatacattcagtatcatggatgaatttcaggagtataccatgctgtgtctgttatgcggcaaagccgaagatactatcagtattctccctgatgacccccgacaaatgactctcttattctaaggatccttctacagatctgttataactatattgtgttggtttacaatacagcaagcctgatggtttgtcttatttcattcatactgaaaattctttgcatattttttttctgcttagacttacttattctttga

SEQ ID NO: 7840 - DNA, 257 bp, Homo sapiens
actgtaggtgtaatgccttaatcatctttttgaatgttttctcagagctggaggttgctgggcacctaaatgatgtttcatgatagctttgggtgattttactgctatttataatttgctgtataaagtgagcattacttaatttgcaagctgatttctcacagtgtaaatttgttcattcctggtagtctattttctataaaaatgtatttttgcataacatttttaaaaactggtgtaccttcatctatgacgtg

SEQ ID NO: 7841 - DNA, 517 bp, Homo sapiens
gatcagcatcgacagcagtggcagaaacgtcaggccgtagccgaagcctcggaaggagcggcccacggcaaagagacatggtcttgctatgttgccagtctgggctcaaacttctggccttgagtgattctctcacctcagactcctgagtagctgggattacagatgcgggccaccacacctggctgtacaaactttaaaatgtttgagcaaattcaatgagtatagtaaaatatcttcctccctttaccgattcccaccctattctcccccacccccaccccaggcatcaatattatggtttcttgtgcactgagtgattttttaaattattattatttttttatttttgagacagagtctctctctgtcacccaggctggagtgcagtggtgcgatctcagctcactgcaacctccgcctcccgggttcaagcaattctcctgcctcagcctcctgagtagctgagactacgggcgcccgccaccatgcctggctatttttttgtatttttagt

SEQ ID NO: 7842 - DNA, 432 bp, Homo sapiens
gggaaggattcagtggtaagaggcaacgtagtaaagagtatcagctatcaactttgagtcagagacttgggttcaaatgctgactctgccattcattggttacacgtcctcccgctagaaattctgcaaggaatttgctctctcagtgttgcatttcttcacatttacatggagataataattactgtgaatattgaataagtggccttcaataaattatttgtttatttattttcagagacagggtcttgctctgtggcctaggctggagtgaagtggcaccattatagctccctgcagcctcgaattcttggcctcaagttatcctcccacctcggcctcccaaagtgctgggattacaggcatgagctactgcaccctgtcacaataaattgtttaaatagttgcttaattattccttaaattattcct

SEQ ID NO: 7843 - DNA, 578 bp, Homo sapiens
acagaaggggggtatagctgttggtggacagcctcaggtcttgggggcactatagccactaaacgaggtgtgaaaggctcaagaggatgaccagcaattaattatccccagaaagtgaaggaaaagagacctttagggatgttgctggtcaagtcttgatttgaccggagtcaaatcaatcttcaagcaatcttggaatcctcaactgcagtaagcatttcaaaatgcaaacaaactgcttaacaactgacaagacaccagcccatacgctgctcttccaacagtgggttctagctttgaacaaaagtgctaaacatttccttgaatatattcttcctctttttgtcctcatcactcaatactggtgctcttgtcacaggtagaacagcttgtttcttttccatctattcaagtgtgtttctaattctaaaatgctgatcttctctggagtctatgtaggcaattatggtcactggaatagtttgtcttgttttcaaatattattggtgcatgtacaacagcatccaacatatctgtcttgttcctagatatatagctctgattttaggccttttgtg

SEQ ID NO: 7844 - DNA, 556 bp, Homo sapiens
aatataaaccagaaggaagttattgccaccaatctctacctctatggttctaagatcacaaacaccagccctcgatgatcctatggctttagttgccacccatggtggacattgtagttgtctacccaaaattcatttcactctctgctactgtgtagtagccatgtggtttggatggaactgaccagagatggggcctgattaggctaagccagtggttctcaatcctggcccattgggattacctaaggagcttaaaacaaaacagaaaaaaatcagccaaccaaatcctcctccctgaaatgcctgggagtggggcctggatgttggcactttctagatacttcccaggtgagtctaatgggcagccagtgttgagaaccactggtctaccatcttccctgccactggcattggttcaggaaattcacacctatgccagttagcttttgccattccccaagctacaggaactggttgtcgtggttacaatcaacataatcagggtagctcaggactttcgttttatagacatagaaaagtactcagtctcctc

SEQ ID NO: 7845 - DNA, 515 bp, Homo sapiens
acagaaggggagcgttgccctggcggagcagagacaggccctcggggtggaggtctttggtttcataagagcctgagagagatttttctaagatatgtgtaacacaccaacgtactgtgacctaggaaaggctgctaaggatgtcttcaacaaaggatatggctttggcatggtcaagatagacctgaaaaccaagtcttgtagtggagtggaattttctacttctggtcatgcttacactgatacagggaaagcatcaggcaacctagaaaccaaatataaggtctgtaactatggacttaccttcacccagaaatggaacacagacaatactctagggacagaaatctcttgggagaataagttggctgaagggttgaaactgactcttgataccatatttgtaccgaacacgggaaagaagagtgggaaattgaaggcctcctataaacgggattgttttagtgttggcagtaatgttgatatagatttttctggaccaaccatctatggct

SEQ ID NO: 7846 - DNA, 472 bp, Homo sapiens
gacagaagggggagaagccacttcccctctctggatctctgtttcactacctatgaggagattaaactagactgtctataagagtccttctctgagttgttctctgatcttagattctaaaggctggcacttgtatgaaaccagctgtcctgctttctggaaaaagtccagcgccattgttaagcaggaaaatttctcctgtgtggttctgccaaaacaaaagctcagactattattcagatctggctgggcaagagagatttgtcagctacatgtttattgaatgatgaaacagctgaacacattcctgcacagaaaacacacattgtctaggtgacaaagagtaatgtggacacatcagggccaccttctgacctttgctagtttttttgttagtttgttttgtttttgtttctttgtattttttgtttgtttttgtgtctgtttttgagacagggtctcattctgtcct

SEQ ID NO: 7847 - DNA, 158 bp, Homo sapiens
gaaaatgattgaaagttaaactgataatttcttgaattggcaacgtaggatgtcaaaactgattttataagtcagtatttgtacttttcatatttcttaattccttcttagaatgaaacttgtcataaatatattttatgttcttttttttttttttt

SEQ ID NO: 7848 - DNA, 488 bp, Homo sapiens
gacgacagaagggtacggctgcgagaagacgacagaagggtacggctgcgagaagacgacagaagggtacggctgcgagaagacgacagaagggtacggctgcgagaagacgacagaaggggggttctgcatccatggattcaaccaattgcagatcaaaattatttgggggggaaaaaaaaacaataggccaggcgtagtgactcacgcctgtaatcccagcactttgggaggccgaggcaggtggatcacttgagccccggagttcaagaccagcctgggcaaaatggtgaaatcccatctcttcaaaaaatacaaaaagtagccggatttggtggcccgtgcctgtagtcccagctactcgggatactaaggtgggaggatcgctttaccccaggaggcagaggttgcagtgagctgagattgtgccactgtactccagcttggtcaacagcatgagagcctgtcccaaaaaaaaaaaaaaaaaa

SEQ ID NO: 7849 - DNA, 590 bp, Homo sapiens
gacagaggggtgtcttggattggctcacagcctgtctcgatatagattgaagtttagcgctgataaagtagacacaatgattgttcaggcaatttccctgttagatgacttggataaagaactaaacaactacattatgcgatgtagagaatggtatggctggcatttccctgaattaggaaagattatttcagataatttaacatactgcaagtgtttacagaaagttggcgataggaagaactatgcctctgccaagctttctgagttgctgccagaagaagttgaagcagaagtgaaagcagctgcagagatatccatgggaacagaggtttcagaacaagatatttgcaatattctgcatctttgcacccaggtgattgaaatctctgaatatcgaacccagctctatgaatatctacaaaatcgaatgatggccattgcacccaatgttacagtcatggttggggaattagttggagcacggcttattgctcatgcaggttctcttttaaatttggccaagcatgcagcttctaccgttcagattcttggagctgaaaaggcacttttcagagccctcaaatcta

SEQ ID NO: 7850 - DNA, 561 bp, Homo sapiens
cagcatggagtgtttctgctgatttctgtccctgcatctcccctagccccgttccctgccctcctcccttccctgggtgactgctctgagaggcacttcactcacaggcctgtgggatgctccatggggccctgctggctccatggggcccaggtgcaaagggtttctgaaaaacagcaggattaagtactgaaagagcccaacacaattaccctgtaaactctctgttagggcaaccaccaccacctgtcttccaggacacatttttagatactctgacaggccactgcatctcagattcaggggagaaaataagttgtcacctccccttcaaagttccagagtaaacaaatggtgccatcattcaagataacatgctgatcaccctcctcccaaaaagcaagagcttgtttatggctgaggaatcggcggattgtctgaatgacacatatacagagcccccacggatttctgcacactctgggtctgtgctggtggaacattgccaatcagttcttaatgaggcacctgtgtgtaaataccatgcttggtcttctctgc

SEQ ID NO: 7851 - DNA, 414 bp, Homo sapiens
acagaagggatttcttttcaattcagtaagacaagtaaggagaaaaacacttttcaagtcttttatattacactgtatatttatcactgactttactcttgatttcttcctgtatattcaagttattgtctggtgacctttccttgctccagtatatataataacttcattgcttccttgctcctttatgctgttattgtcatatatattatatatgtttatgctgtgagcccatcagctaagtcagcttagcaaggtctcaagatacaaagtcaatgaataaatcaggctgggtgtggtggctcacgcctgcagtcccagcactttgggaggccgggataggtggatcacttggggccaggagtttgagagcagcctggcccacatggcaggactccatctttacaaaaatac

SEQ ID NO: 7852 - DNA, 409 bp, Homo sapiens; identical to SEQ ID NO: 2470

SEQ ID NO: 7853 - DNA, 492 bp, Homo sapiens; identical to SEQ ID NO: 2471

SEQ ID NO: 7854 - DNA, 542 bp, Homo sapiens
aagggtggatcaggcctcaggcccaagttgatccactgatcaaatcccttgaagatcctttctgtccctagtctctgctttgcgctgcttgttggcattattcttccaggctaagtgttcccacaaggctggaacccagggaagctcaaggatttatattctatcctagagaggaaaataaactctttcccatccactgcacatagaaaaatctcaaggaaggatcctgattggccaggcttgggtcatatgcccattcctggaccaatcactgtggccagaggagtggggtaccaggattggccaagcttgagtcacgtgtctacctctatggtcagagggtggagctgttttaagaaaaggatgagaaggccggcagtggtggctcatgcctgtaatcccagtactttgggaggccaaggcaggtggatcatgacgtcaggggtttgagaccagcctggccaacatggtgaaaccccgtctctactaaaaatacaaaaattagccgggcgtggtggcacatgcctgtagtcccagctact

SEQ ID NO: 7855 - DNA, 502 bp, Homo sapiens
gtctcagtcaaagagataccatgttaaaagaattagaaggaaagataaattctcttactgaggaaaaagatgattttataaataaactgaaaaattcccatgaagaaatggataatttccataagaaatgtgaaagggaagaaagattgattcttgaacttgggaagaaagtagagcaaacaatccagtacaacagtgaactagaacaaaaggtaaatgaattaacaggaggactagaggagactttaaaagaaaaggatcaaaatgaccaaaaactagaaaaacttatggttcaaatgaaagttctctctgaagacaaagaagtattgtcagctgaagtgaagtctctttatgaggaaaacaataaactcagttcagaaaaaaaacagttgagtagggatttggaggtttttttgtctcaaaaagaagatgttatccttaaagaacatattactcaattagaaaagaaacttcagttaatggttgaagagcaagataattt

SEQ ID NO: 7856 - DNA, 569 bp, Homo sapiens
acagaaggggtgctcggtcggccacggctctgctgggctcctggcgccgcctcctcccagcccgccgcgggctgcgcgcttctgtgggtgggggaaggcaggactgacgcagactcacggacacagacctaattaaacagtgtatagatgaatgcacagccaggattgaaattggactgcattacaagattccttacccaaggccaattcatctgcctccaatgggccttaccccactccgaggccggggacttcgaagccaagagaaactgaggaaactttccaaaccagtatatctcagatctcatgatgaagtttcctaatctagaggaaagtttatttctgcaaatgatgagccaactagttattgaatgtaaaccagatggcaaaacacttcttgattaggggcaaaaattcaaatgtcttcttaaaacctccacaattgattctccccctgtgatgtaaacttagatatccctagagtttctcagcatctttcttcctgagtggatggcattatccctagaggtcatggaccttacatcctcactgcagtcacctttggaaac

SEQ ID NO: 7857 - DNA, 69 bp, Homo sapiens
gatgccctaatgatgctgacttgtcatggttgcagcatttgaacttttggtgttaaaaaaaaaaaacct

SEQ ID NO: 7858 - DNA, 534 bp, Homo sapiens
gcccaggccccacctctcctccctaagagctaatggcaccaactttgtgattggtttgtcagtgtcccccatcgactctctggggctgatcacttagtttttggcctctgctgcagccgtcatactgttccaaatgtggcagcgggaacagagtaccctcttcaagccccggtcatgatggaggtcccagccacagggaaccatgagctcagtggtcttggaacagctcactaagtcagtccttccttagcctggaagtcagtagtggagtcacaaagcccatgtgttttgccatctaggccttcacctggtctgtggacttatacctgtgtgcttggtttacaggtccagtggttcttcagcccatgacagatgagaaggggctatattgaagggcaaagaggaactgttgtttgaattttcctgagagcctggcttagtgctgggccttctcttaaacctcattacaatgaggttagtacttttagtccctgttttacaggggttagaatagactgttaaggggcaactgag

SEQ ID NO: 7859 - DNA, 577 bp, Homo sapiens
atggacggagccttgaagatgacattcgctctgacacatcgttcatgttccagcgagtgctggtgtctctgtcagctggtgggagggatgaaggaaattatctggacgatgctctcgtgagacaggatgcccaggacctgtatgaggctggagagaagaaatgggggacagatgaggtgaaatttctaactgttctctgttcccggaaccgaaatcacctgttgcatgtgtttgatgaatacaaaaggatatcacagaaggatattgaacagagtattaaatctgaaacatctggtagctttgaagatgctctgctggctatagtaaagtgcatgaggaacaaatctgcatattttgctgaaaagctctataaatcgatgaagggcttgggcaccgatgataacaccctcatcagagtgatggtttctcgagcagaaattgacatgttggatatccgggcacacttcaagagactctatggaaagtctctgtactcgttcatcaagggtgacacatctggagactcaggaaagtctgcttgttctctgtggaggagatgattaaaataaaaatccca

SEQ ID NO: 7860 - DNA, 64 bp, Homo sapiens
aagatggcacaggctctgccgtgtccttggagtgaaagactctttttaccagaggtttcctctt

SEQ ID NO: 7861 - DNA, 568 bp, Homo sapiens
gttacaggcatgagccaccacgcctagcccctgttgtgaacttctaaaaaactatttggaagtgcaaaaccagcaaatcttaggaccaagaaaaggtaaagcagccatgttttaaagtaattaaaaatataataaattgataatataatacataatgatcaatttcagaagctctgcagttctcctctcagatgctacaacctggagccttgagagctctcatttctaaagataacgcatacataagacccagaaatggtacatcaggaaacctctattgttatcagtggcactattattatagaggctaagttgtccacagaaggtaaatgatgggaaggaaagactaaatgactgaggggtagaattacaaaaggacattatggcccaagtattgtacattatgcttacaaatatctgggaatatacatttcttctcagtatttctctgtattattgcatttctttcagcattatataaatgcctgcactgccaactctgctcatgttataaaaacaaataaacagcttctcataaatgtaaaaatgaaagaagctaaggaataca

SEQ ID NO: 7862 - DNA, 629 bp, Homo sapiens
acagaagggaaaaaccactgggttccgagttcattactacaggaaaaactgttctcttctgtggcacagagaaccctgcttcaaagcagaagtagcagttccggagtccagctggctaaaactcatcccagaggataatggcaacccatgccttagaaatcgctgggctgtttcttggtggtgttggaatggtgggcacagtggctgtcactgtcatgcctcagtggagagtgtcggccttcattgaaaacaacatcgtggtttttgaaaacttctgggaaggactgtggatgaattgcgtgaggcaggctaacatcaggatgcagtgcaaaatctatgattccctgctggctctttctccggacctacaggcagccagaggactgatgtgtgctgcttccgtgatgtccttcttggctttcatgatggccatccttggcatgaaatacaccaggtgcacgggggacaatgagaaggtgaaggctcacattctgctgacggctggaatcatcttcctcatcacgggcatggtggtgctcatccctgtgagctgggttgccaatgccatcatcagagatttctataactcaatagtgaatgttgcccaaaaacgtgagcttggagaagct

SEQ ID NO: 7863 - DNA, 624 bp, Homo sapiens
  misc_feature 572: n = A,T,C or G
gagctatagctaggcctgctcctctttgcacagctcaagatgacgtgtacaattactttggcacctcaccagctctttcagaccttttccatgcatgatgggaagacaggtccattctctgagagtccctcactccctccccctcccaaattcccccttacctggatgaaatcctgatgtaaatggaccttgcctgcaaatagaactgaagggacctgttacgtcatcaggcctggcagagctcattggcagagaagttaagagttttattttagacccagagaccaggctgtgcagatccagctagaacaggtctcttctggctcagcctcagctgctggccctcctgctgtggttactggggctccaaaggatggaatgtcagggggatcatgctgcacagtgagcaggacaacctgacggccagaccaaatgcactccaaaggaaatctcaggctagggtaatacagccaaggtgctgcctctacaatcatgggaggtttcaaccttctgggagaaaagccctaatgcagcacatgatggtatagatttgatccaggaaggcagagtanacaaactatttaaagacatgagtcttggctgggcacggtggctcacgcctgt

SEQ ID NO: 7864 - DNA, 458 bp, Homo sapiens; identical to SEQ ID NO: 2475

SEQ ID NO: 7865 - DNA, 562 bp, Homo sapiens; identical to SEQ ID NO: 2476
  misc_feature 413: n = A,T,C or G

SEQ ID NO: 7866 - DNA, 525 bp, Homo sapiens
gtggagaagctgatggagaacatgcgcaatgacattgccagtcacccccctgtagagggctcctatgccccccgcaggggagagttctgcattgccaaatttgtagatggagaatggtaccgtgcccgagtagagaaagtcgagtctcctgccaaaatacatgtcttctacattgactagcaacagagaggtcctgccatccacccgcctgggtaccctatcacctgccttcagcactcgggtgctgccagctcaagccacggagtatgccttcgccttcatccaggtgccccaagatgatgatgcccgcacggacgccgtggacagcgtagttcgggatatccagaacactcagtgcctgctcaacgtggaacacctgagtgccggctgcccccatgtcaccctgcagtttgcagattccaagggcgatgtggggctgggcttggtgaaggaagggctggtcatggtggaggtgcgcaaggagaaacagttccagaaagtgatcacagaatacctgaatgccca

SEQ ID NO: 7867 - DNA, 494 bp, Homo sapiens
ctcctaacctcgctctcgcggcctacctttacccgcccgcctgctcggcgaccagaacaccttccaccatgaccacctcagcaagttcccacttaaataaaggcatcaagcaggtgtacatgtccctgcctcagggtgagaaagtccaggccatgtatatctggatcgatggtactggagaaggactgcgctgcaagacccggaccctggacagtgagcccaagtgtgtggaagagttgcctgagtggaatttcgatggctccagtactttacagtctgagggttccaacagtgacatgtatctcgtgcctgctgccatgtttcgggaccccttccgtaaggaccctaacaagctggtgttatgtgaagttttcaagtacaatcgaaggcctgcagagaccaatttgaggcacacctgtaaacggataatggacatggtgagcaaccagcacccctggtttggcatggagcaggagtataccctcatggggaca

SEQ ID NO: 7868 - DNA, 62 bp, Homo sapiens
ggagaacctgattcggcttggattgagtcaggttccaccccagtccagtcagttgtggactg

SEQ ID NO: 7869 - DNA, 302 bp, Homo sapiens; identical to SEQ ID NO: 2479

SEQ ID NO: 7870 - DNA, 627 bp, Homo sapiens
acagagggggtttgcttgcacatcagtagtttctgctgaacgtgctgtcataatgaagagatttccaagattttttttcctgattagaactggtagccagtatattaaatattgatataaaaataaaagaactggaaccagattcagaatcatgaaaacaacatttttacaacaacaaaaaaactatattaaacagggtttaaaggaaattaaaacagaactatgagaagtacaatttgttatagtatagtatcaaatttctatatagattttatacctcagtggggaaaaataactgattccaatgacattcattttgttttcatctgtgatagtcatggatgcttttattttccttggggtgctgaaattgagctgaaaaaaaaaggctctttgaatatagttttaatttctctctacagttttttttgtttggtttgtgggctgttggaattgtaatttttaattgccttctaaaaaatggaaatttaacaatgtctgatctcagctgaacaaattagatgtttcagttgctcttgggtcaactggcttacagatttacatgtgcacacacacacaaatttcttatcacattttcgacttcttcacttgacctaactgattatg

SEQ ID NO: 7871 - DNA, 569 bp, Homo sapiens
gacagaaggggtgacacattaataatcaaattgctaaaaccctgaatctgcttattcttcagcttcacctctgcactaaccccttacccttatggtacgtcaggattttaactagtactgctttgttgactttgtgaaatggtgccactcaaaagcaacttcctaacttgaggaataactcctttgtagtttactttctgtactggttggtgccttgtattgggatacagctatattcttagctcaaatgtcctctttttgagagcaaagtagttatccaatggtgaggcgagaccctgacgctcatagaggccattccttcctgggtgtcggaccagggctctgtgtcagggaaaaccttctgggtggactttgtaagaatccagtttccaaggttagattcacatccttaatcttgcagagactagaatttcacagctcgctttggaacatattccaattcaaccagttaaaatcagaggaccaagtcgtgggggaggggggcggtgttgaggagaagtatttttaaagatctggcaacttttcaggattatttgtggagaactcta

SEQ ID NO: 7872 - DNA, 458 bp, Homo sapiens
gacagaagggatacaaaagtcatctgggcatggtggctggtgcatgcctatagtttcagctacttgggaggctgaggcaagaggatcacttgagccagggaggtcgagaccagcctgggcaacatagggagaccctgtctctacaaaaaaaaataaaaaattagccagtatagtggcatagacctgtagacccagttattcaggaggctgaagtgggaggatcacttaagcccgggaggttgaggctgcagtgagctatgtttgcaccactgcactacagcctgggcaacagagtaaaaccctgtctcaaaaaaaaaaaggaaggaaggaaggaaccttttttggggtttctacttactaatttggagcctcaggcaaatcacttcagggtctctgagtctttatttcctcctgcataaaaggttaacagcagtattactgacctgtaaaaattatcg

SEQ ID NO: 7873 - DNA, 571 bp, Homo sapiens
acagaagggattccttcaaggcccgttcctcttattaaaaaatgataataatctttggaaattggtcattgggatatttgcattccatcttatttttgatatttttctgtctaatttctaattgtttatattgacaggttacatgctcatttagataatttggataatgaagaaaaatgaagtttaaaaatcaactcaaatcccaccatctggaaaaaaaactaacaaacatgaattgagcttcatttcagagatgacagtgtctcactttttttacctctctctttctgtttctttggtttcatcgaatttggagcctctcttgagctttgatgtcttttaagatgcccactctgtttgctcttatagatcattcgttctttctatttgagtccctaaagtattattgggatttctgaagcttaaccaaaatatgtctcagtattatgcatttcctgaaacatggagtgttctttcagtctgcgtatcagtttgttctagctcagggaattttttttttaaaaaagattaagtttggctgggagcagtggctcactcctgtaatcccggc

SEQ ID NO: 7874 - DNA, 600 bp, Homo sapiens
gacagaaggaggaattctcttccacagcacctgaaagatttttgggccatcctcatcataacacacttctgtttttctcctttccattgtcggatgagaatgatgtttttgacaagctaagtgtcattgcagaagactctgagagcggcaagcagaatcctggtgacagctgcagcctcgggaccccgcctgggcaggggccccaaagctaggctctgagaaggaaacacactcggctgggcacagtgacgtactccatctcacatctgcctcagtgagggatcagggcagcaaacgagggccaagaccatctgagccagccccacatctagaactcccagaccctggacttagccaccagagagctacattttaaaggctgtcttggcaaaaatactccatttgggaactcactgccttataaaggctttcatgatgttttcagaagttggccactgagagtgtaattttcagccttttatatcactaaaataagatcatgttttaattgtgagaaacagggccgagcacagtggctcacgcctgtaataccagtaccttagaggtcgaggcaggcggatcacttgaggtcaggagttc

SEQ ID NO: 7875 - DNA, 88 bp, Homo sapiens
gcgaacttccctcatttctctctgcaatctgcaaataactcctccattgaaataactcctccccaccccaacaacaacattcccagca

SEQ ID NO: 7876 - DNA, 528 bp, Homo sapiens
atacgtattgtgcctaggatcctaactgcgcaccttctttaattcatttataaaatttttaggctaatacgagctttgaatgcaaacacattctcttcagtgatatatctgtatagtctaattaaaaataaaaatatataaagaccttaataaatactaataatggaggtcaaagggcacatagtgaagtgcagttgagaaatgacgtgacctgtgtatttgtcttattcctgctatatcgcataaacaggagaatgaattgaaaattgtaattaagatttattccattttgttaagattaaaaatgagcagtcaaataattctttctctgagagaagagtgtatggtaggtccattgagggtgtctgttgtatcttaaaatctattcgaaatgtttgggtgaattattgtctaaattgacagatgattgcttttgagctaacaaaatatttctgttagcatagctaaagaatatatgttaaggaatatatgctctttgtaagttttgattgagtagataagatgata

SEQ ID NO: 7877 - DNA, 152 bp, Homo sapiens
gctgcgagaatacgacagaagggtacggctgcgataagactacagaagggtacggctgcgagaatacgacataaggggaaaaagcctgggccggacgcggtggctcacgcctgtaatcccaacactttgggaggccgaggtgggtggatcac

SEQ ID NO: 7878 - DNA, 301 bp, Homo sapiens
agcaggagtcagcagcctctggcctgtggaccaattctgaccctatgcctgtttttgtacagcctgcaagctaataatgactttcacattttaaaatgattatttttaaaaagaagaagatgtaactgggcattgaaggtccacaaagcctaaaatatttactatctggccctatacaggaaaagtttgctaacccatgatctatcttcataaggttccccataaccactgaaagtctcttctcagtattatcccactttattggatcctatagcctcttgtcttaagaattcccatactt

SEQ ID NO: 7879 - DNA, 311 bp, Homo sapiens
ccgtgtgtttccaaaatggcggcagcgatggatgtggataccccgagcggcaccaacagcggcgcgggcaagaagcgctttgaagtgaaaaagtggaatgcagtagccctctgggcctgggatattgtggttgataactgtgccatctgcaggaaccacattatggatctttgcatagaatgtcaagctaaccaggcgtccgctacttcagaagagtgtactgtcgcatggggagtctgtaaccatgcttttcacttccactgcatctctcgctggctcaaaacacgacaggtgtgtccattggacaacag

SEQ ID NO: 7880 - DNA, 92 bp, Homo sapiens
ggctcggtcacgaggtggaagaagtagaggacgatactctgaccgttttagtagtcgcagacctcgaaatgatagacgaaatgctccacccg

SEQ ID NO: 7881 - DNA, 56 bp, Homo sapiens
atcttttcagttttttgttttttgtttttttttgtttttttttggttttttttttt

SEQ ID NO: 7882 - DNA, 464 bp, Homo sapiens
attaaatatttgaccataaaatcaaactatcggcacatcgttgtataacatttagaaactatagctcattttaaagctaggaaccctttaaatttcaaggcaccattattgggggtgtgaatttagagaaatatactggaaagcagcctcttcacacatttcttcccagccatgaggtaaagaccttctactatcataagagcaaactgaaggccttcctcaaaggggttggccctgaggctattcattcccttgcatcaagtctcttgaatttcttttcttctttattgtcatcatattattctaaggagccctcttttacttctactcctctctttaaggaggactgggtcaccaccaagaagacttttgatggtgggataacatgattctgttgtctgagtttgtggcgttgctcaaggatggtaaaggttggccaggtgtggtggcttacacctgtaatt

SEQ ID NO: 7883 - DNA, 509 bp, Homo sapiens
gacagaggggggagaaatcacagatgccctgaaaaggtatttggtgaacataaagcgaatgatcgaatggtgagtggagcatatcgccaggaatttggagaaagtaaagagataacatctgctatcaagagggttcataaattcatggaacgtgaaggtcgcagacctcgtcttcttgtagcaaaaatgggacaagatggccgtgacagaggagcaaaagttattgctacaggatttgctgatcttggttttgatgtggacataggccctcttttccagactcctcgtgaagtggcccagcaggctgtggatgcggatgtgcatgctgtgggcgtaagcaccctcgctgctggtcataaaaccctagttcctgaactcatcaaagaacttaactcccttggacggccagatattcttgtcatgtgtggaggggtgataccacctcaggattatgaatttctgtttgaagttggtgtttccaatgtatttggtcctgggactcgaattcc

SEQ ID NO: 7884 - DNA, 612 bp, Homo sapiens
gaaaataaatgttatttgttgatcatttctataatccagagctttagaggaagacacataggtgggtttatgtttcacctcatttggaacaaaagaggacagaagcaggccactctgtgcaccaacctaaaaaattacagagaagagaaaattatctttggattgtgctgccctatataaaggtggcagaaagacatttttaaaaagcttattatttcttgcattattttaaaaagttcagagttgaaatgcctttcaaccatttccttctgtggtcatttttcttgctgcctttttcacccaagattcagcagtcagatgtttactgcacacctattacctattatttgctgttcttgcatggttcaaaccaccattctgtagccacccatcctttgccttatctaacaaacatttttccaggaaggtggaaaaggaagtgttgctctcattgtgtgactcagtgctgctgtccatcccatggaaacatgggcacaatcaagtatttgtccagcctattgcaggcttttcctgactttaaataaattgtgatcaataatagtacctttgattatacatttattattgtgtctctctctgatgtactgggga

SEQ ID NO: 7885 - DNA, 519 bp, Homo sapiens
gctcctcataccctttacctagactcacaaatttttaatatttagtttcctttttagacccaggcttgagtgcagtgatgcaatcatggctcgctgtagccacaacctcccgagttcaggcggccctcccaagtggctgagaccacaggtacacaccaccatgccggctagtttttgtattttttgtagagatgaggttactccatgttgcccaggctgctcttgaactcctgggctcaagcgatccactcactttggcctcctaaagtactaggactgcaggcatgagccagcgcactcaacctaactccattttaaaaatcattcactttgtctctttatgtatatataaatataaaaattatttgtaaataaataaatttttaactatttgagagtaaattgtaaacaatcaccccaagtgtgtatttcctagaataaggatattcttctatgtaactccagaataatattaaaattaggacattactgggtgtggtggctcacgcctttaatccc

SEQ ID NO: 7886 - DNA, 521 bp, Homo sapiens
ggggccggcgaggtgcggggtctggtgatgcgagctgcgcctctcggcaagatttcgcgctgcccatcccgggccctttcatcagtaatcggtagtggatcactctgccaagcggcaggaagaattaaggaaacgacaaggagacgctcggctctctcccgcttggctccttgcggcctcctcttcccttcgctccggcccggtgaaactgaacttataatcgtcactggattgtaagtacccgaggcgaagagagctcgctgagccctgattttttgagtgtctttgttccgggagagtttgtgagttgaaagtatctctgctgggctttctgggccgaaaaccgttccgggggagccgccatttgctttcctgttccctagctagctagctagctctctccgcgttgtccggcagcggcacctagaggttgggacttggcattgcatctgatttaatgaacttaagtctgtgaataagcctttgtgttaacgactggtattcggtcacagcatatttag

SEQ ID NO: 7887 - DNA, 500 bp, Homo sapiens
gaacctagtgaatggtatgcttgggtgttttccattgagagcggatggacctctttataaagttggttgctgcaaaatccagttcttccaaaagccactttatttagggtttattcacaagtcatatccattttggtacagtgtttgtttcctaatatgtattaaccaccttataccaaatgtcttgcaaagaaatgttattaaaaccttgaatttttacaaatgtaaaaaacaaaaagtgtattaatgtatttgttcaggaaaagctacataccgaagggcttttgtatatgaattctgtggtggggagacccatttgtaatctatatggcagttccatctgggttttaagtttagatttcaccgtgtcttagtgcttcattctattggtttattggaacatgtaataaataggagtagtgatgtattaaaacacaagtattcattaatgttttatatcttcactaaaattctatagttatgaaactattttatcaatc

SEQ ID NO: 7888 - DNA, 388 bp, Homo sapiens
ggcagagctagctgaggttttattttggaccaaaaaaaaaaagcaattgaattgttttgtagctggaggcatgggcaaggggggtccccaggtagtaaactccccaggtgggctgagggctagggctgagcctcaggtgggtctcctgttcccagtgctaccctgcatagcggcctccttcccaggctctggggcagcgcaggaggggtaggctgggaggggctgccgcagctgttcacttgggcaggacgtcagaggactcagacaccagcttcccatcacgtgtctcgatcttcttcacaaccacggccctggaggagctggtgcggctgaaggagctggagcccgcgccagagccaaagctggagcccaggctgtagctgaggcc

SEQ ID NO: 7889 - DNA, 633 bp, Homo sapiens
ttaatacgactcactatagggaatttggccctcgaggccaagaattcggcacgaggagtttctcctggcggcgctggtcctgtctctcattctgccgaggagcagccagtacatcaagtggatcgtctctgcggggcttgcccaggtcagcgagttttcctttgtcctggggagccgggcgcgaagagcgggcgtcatctctcgggaggtgtacctccttatactgagtgtgaccacgctcagcctcttgctcgccccggtgctgtggagagctgcaatcacgaggtgtgtgcccagaccggagagacggtccagcctctgatggctcggagatgatggaccgtggaagggaagcgtctgtggggagtgagcgcttagatggccagcagctgctccttctgggaagctcgcaccttggcaacagaacagccctctagcagagcgtcagtgcagtcgtgttatcccggcttttacagaatattcttgtcctattttagaattttccggagtagtttatttgcagtctgttgattatgtgcagtagacccgggacactgcgttttaccgatcaccttgaatgtggtgcctggatgtgcctttttttttttccctgaaattattattaattttcta

SEQ ID NO: 7890 - DNA, 574 bp, Homo sapiens
aaatcattcagtttaaggtcactagactttagatgattgaccctgcaggtttataaggcattctgctcagcagtcttgtaaatagtcctatatgaaagagccatgctactgttggacttggtcccactctggtcaaccttgataacgtcatacgtggcttatggactggatagcactggattccgccgcagccctggccatactgtgccacacgttggaagaactgtgggatgtagaatggagggactccttgtcagacagtgacagcatcatagcatatgcctgcgatttggactttctgtgtaacggctgcttaagttcctctggcacatgggaagtactaaaagaagacagctcagcttcagaatattgattatcttccattttcctcattttgaggctatctgtgaagtgccttatatgatctagagcagaaagtccacttttatattcttcctctttatacctcactggggatgtcttgcaactcatctccagggcactggtttcttcatagtcatcctcagggtttccttcatgtaaattacttgtcactggttcctttcctgttttt

SEQ ID NO: 7891 - DNA, 316 bp, Homo sapiens
gctgccaggaactggtgcggagtgggccagacctccgacggccacccacaccagccccgtggccctccagcggtctcggcactcccctcacacctcccaagatgaagctcaatgaaacttccttttgaacaacgcagctgccatgatgccttgggatgccctggtcctgggggactcaggtgcctccctgattcctgtgggaaccccgggttcagggccagggcctccttggaataaatggttattgttactaggtccccaccttccctcttttctggaagccaaagtcaccctccccaataaagtcctcactgcc

SEQ ID NO: 7892 - DNA, 398 bp, Homo sapiens
gtgagcccctggagtaggcgcttccggccattcatactgcagtcggtcagtgttcggttgaaggattctgtgtgctgtcggacccagagggtgacggcgccgctaggatgaagctcgtgagatttttgatgaaattgagtcatgaaactgtaaccattgaattgaagaacggaacacaggtccatggaacaatcacaggtgtggatgtcagcatgaatacacatcttaaagctgtgaaaatgaccctgaagaacagagaacctgtacagctggaaacgctgagtattcgaggaaataacattcggtattttattctaccagacagtttacctctggatacactacttgtggatgttgaacctaaggtgaaatctaagaaaagggaagctgttgcagga

SEQ ID NO: 7893 - DNA, 481 bp, Homo sapiens
gcattcacatcttctgcctggctttttggagtctccattattccatgacatagaacaaaacaaaaaattagtgaattaatctcgaagctttacttcttcattttcccccactggtgtctgaacttttgccaatgtattttcagccctgctataaactgctataagtgagatcactccaattttatgcagcagttttctgaacctttggcttgttcaatttgaagctgcttgtgaatgtaactttgttcaaaaagctgacagagatagctgcgagtgaaaactccttggcttaaaattgagccccttccgggcatgatggctcatgcctgtgatcccagcactttgggaggcccaagcgggtggatcactaaagctctggagtttgagaccagcctgggtaacatgcaagactccatctctatttttttatttaaaaaataaataagtaaataaaattgagcctcattttttaacctaattg

SEQ ID NO: 7894 - DNA, 139 bp, Homo sapiens
cagcaggagaggagccagggtcagtccacttggcctgaaagttaacgtcacatattcagatgtcaaggggtttctgtgcatgcttttgaagtattgtgtttgggcttttacaacatgtgcctcactgtttcgcatctac

SEQ ID NO: 7895 - DNA, 413 bp, Homo sapiens
atttcgtttcctttttccattttgtatacgttttcctttttttttttcagggcccttttgtcaaattctctcaacctcaaaagggatcacatggccccatttcctcattttttaattctaaaaatatcgggttccctacttggattaatttggctttttaaactgggacttttatttatatgtgcacattctttgggagggggttaggactctttcggttgcaagggtcaaaaactcaactcaaaggaccttaaacaagccccaaaagttaccgggtcacacatctgaaatgcccaagggagctcccaatcaagctggatcagcgagtcaaaccgtgtgctcaggaccctttcttgctaggtcatctccctgtggggaaaccaactgtcccattttgcccaggtctgaggggc

SEQ ID NO: 7896 - DNA, 295 bp, Homo sapiens
gcgtgggctgaccaggcttcttcctacatcttcttcccagtaattttcccctctggcttgacagcatgaggtgttgtgcatttgttcagctcccccaggctgttctccaggcttcacagtctggtgcttgggagagtcaggcagggttaaactgcaggagcagtttgccacccctgtccagattattggctgctttgcctctaccagttggcagacagccgtttgttctacatggctttgataattgtttgaggggaggagatggaaacaatgtggagtctccctctgattggtt

SEQ ID NO: 7897 - DNA, 223 bp, Homo sapiens
gctttctttctagcgctctctctctgtctgtatatgtatatatacttacaaaattattttaatggtaaataatgtgagaataacttacagatactgtgcctctctggccctgaacacttggcctgtatcctttaagagcaaggacgttctcttatacaactcaaggaggatcatcacatttaaaaattttgaggctgggcacagtgtctcacatctgtaatcc

SEQ ID NO: 7898 - DNA, 519 bp, Homo sapiens
ctgtctcagcatttttaataaaaacaaaaaagtggaaataatctaaatgttcaggtccaagggactggttaaataaagtatcatgttttgacatggatatactgtgccaacataaaatgacacttgcaaagaaaatgaaaaacaaaaagtatatatagtgtggttataacccggcgtcggggggtgggaacgaacttacatattggggttagggaggagcatcattgacactacttagtgactgataaaactatgaaggatttgttttttttttctactctagtgtgctttcaaatttttctttcccaagcagacatgagtttataaagcgaaataagacaatggaagatacttgcttcaacaaacctattctatcctttgataagacaaatctcaaagtataatattaataattctgctgagcaactttatccatctatttctaaagcaagcctttaagaatcaataaatggacacgcatggtggctcatgcctataatcccagcactttgggaggcc

SEQ ID NO: 7899 - DNA, 321 bp, Homo sapiens
gatgctctaatctaaattatgaaaacttgatatattttaaaggaatttactcagttgaataataaaccacaatcatcatgagtattttattttatataggcagacagtataaaacttttagatagttcattaataaaggaaaattgaacattttggaactttcatgtgattttagcaaactgcaaatcagtcaaatattaaatccgttaactccatgtgaaagtaaagaatcacttagaatgtacaatgtcacgttttctaattttataaatataaaatcagatatttttcttgtaagttttcttttcagaaatgaaaata

SEQ ID NO: 7900 - DNA, 220 bp, Homo sapiens
ataggtttggtcctagcctttctattagctcttagtaagattacacatgcaagcatccccgttccagtgagttcaccctctaaatcaccacgatcaaaagggacaagcatcaagcacgcagcaatgcagctcaaaacgcttagcctagccacacccccacgggaaacagcagtgattaacctttagcaataaacgaaagtttaactaagctatactaacc

SEQ ID NO: 7901 - DNA, 552 bp, Homo sapiens
gacagaagggatgtgaattaaagaatatatcagggatgatttttaaaaatcagatttggattaagaaacctgttgaattaatacttgcataacagatgtatcactgataaatacttgtaaaagatattcccaaataagcaataaaagtaccattttacaaccgaagtaatgcatcctgtgggtccatttgcaaagatatgccaacagaaatgcatgcagagctctggaagtgataatgcaaataaaacatttcacattataacttaaaataacaagtttggaaggaataaaaagtctgggagactatttgttttgtctaaattctgcttttactctggtcttttaacagttggcttttgataatgtattactgccttagtgtgttcctgtgtattgaaggaatacattgtctgacagaattgtggttgaaaatattacaagttctaaataataagagtaataaatatcatatcttgtttgctttgttgtcatagtcgcctgatctcatgcttccctgaattcggctggtgtcttgattacgatggaatcact

SEQ ID NO: 7902 - DNA, 550 bp, Homo sapiens
gtagaaaggacaagggaagaattatattaaaagcatccaggcatgcttgtgttgaagttcaagatgaaattgcatttattcctaatgacgtatactttgaaaaagataaacagatgttccacatcattactggccccaatatgggaggtaaatcaacatatattcgacaaactggggtgatagtactcatggcccaaattgggtgttttgtgccatgtgagtcagcagaagtgtccattgtggactgcatcttagcccgagtaggggctggtgacagtcaattgaaaggagtctccacgttcatggctgaaatgttggaaactgcttctatcctcaggtctgcaaccaaagattcattaataatcatagatgaattgggaagaggaacttctacctacgatggatttgggttagcatgggctatatcagaatacattgcaacaaagattggtgctttttgcatgtttgcaacccattttcatgaacttactgccttggccaatcagataccaactgttaataatctacatgtcacagcactcaccactga

SEQ ID NO: 7903 - DNA, 338 bp, Homo sapiens
cacaaataaaaataatgcatctcttcagggattgtccctctggagagccccccacccccaagcattgaaacacttgctctaatgttcccatagcatgggtactattttcagctatcaagaaagaatataatggggtgaaaaaaaaaaatcttgcagactatattgggtgtagtcccttttctcctaaggaacaaaaccataggaagaaaaaattgttgattagtgatgataccaccaagtagaaattggcaagatctaggaattggaattatatgttagtaaccttaaaaatagaccaaactcttttattcagtaattccacatcctgaaactcatcc

SEQ ID NO: 7904 - DNA, 489 bp, Homo sapiens
tacggctgcgagaagacgacagaagggtacggctgcgagaagacgacagaagggtacggccgcgagaagacgacagaagggtacggctgcgagaagacgacagaagggtacggctgcgagaagacgacagaagggtacggctgcgagaagacgacagaagggtacggctgcgagaagacgacagaagggtacggctgcgagaagacgacagaagggtacggctgcgagaagacgacagaagggtacggctgcgagaagacgacagaagggtacggctgcgagaagacgacagaagggtacggctgcgagaagacgacagaagggtacggctgcgagaagacgacagaaggggaaagaagaccaaactgagtacttggaggaacgaagaataaaggagattgtgaagaaacattctcagtttattggatatcccattactctttttgtggagaaggaacgtgataaagaagtaagcgatgatgaggctga

SEQ ID NO: 7905 - DNA, 518 bp, Homo sapiens
tggcttgatcacagctcactacagccttgatctcccagtctcaatcaatcctcccacctcagcctcctgggtagctgggattgcaggcgcatacctccatgcttggctttttttttctttttgtagagacaaggttttgtaccatgttgcccaggctggtctcaaactcctggaccgaagcaatccttccacctcagcctcccgaagtgctgggattacaggcgtgagccactgcactcggcctctactttttgtttacatcttgtacttaatgctatttataagctgcttgtggtcatttgagttcactgctcctgccctgtgactgactctctccaaccttttccaccgagcaaacaacctttcccacactaaagcatccagtcacctttcctttatacttgctgactgactgcatttcaactaggttgttacttcaagcaaaaacatgcattttttactttatctctggtagtgaaatgaaaggttcattctctgattataggaatctcaatttg

SEQ ID NO: 7906 - DNA, 475 bp, Homo sapiens
atttattttaggcacaattcagattcagaagcgtcaacagttagtcagaaagatacatgaagatgaattgaatgatatgaaggattatctttcccagtgtcaacaggaacaagaatcttttatagattataagtcattgaaagaaaatcttgcaaggtgttggacacttactgaagcagagaagatgtcctttgaaactcagaaaacgaaccttgctacagaaaatcagtatttaagagtatccttggagaaggaagaaaaagccttatcctcattacaggaagagttaaacaaactaagagaacagattagaatattggaagataaagggacaagtactgaattagttaaagaaaatcagaaacttaagcagcatttggaagaagaaaagcagaaaaaacacagctttcttagtcaaagggagactctgttgacagaagcaaagatgctaaagagagaactggagagagaacga

SEQ ID NO: 7907 - DNA, 251 bp, Homo sapiens
aatgagagatatttcagtggacatctggacatatttatggactttgagtatctagcaagtagaaaggaaaaaaatattcatcatactctaatcatttttttatatctatcgagcttgtttcttgtaaacttttctttatcttataaaggcatatctcgcttttgtatcgacctgttccttaaaaaatgtatttgataaaacaggctaaaattcatttgagtattgaaaagaattctttttttttttttaaa

SEQ ID NO: 7908 - DNA, 236 bp, Homo sapiens
gtccagtggcattgcagagcacggatggttgcaggagccaacttttacattgttggacgagaccctgctggcatgcctcatccagaaacagggaaggatctttatgagccaagtcatggtgccaaagtgctgacgatggcccctggtttaatcactttggaaatagttccctttcgagttgcagcttacaacaagaaaaagaagcgtatggactactatgactctgaacaccatga

SEQ ID NO: 7909 - DNA, 279 bp, Homo sapiens
gaatttgccctcttcaggaatatgaaaattttttttttcttgaacagggtcttgctggattgcccaggctggagtgcagtggtgagatcatgggtcattgcagctttgacctcctgggctcaggcaatcctcccacctcatcctcctaattagctgggattacaggcatgtgccaccatgcctagctagtttctgtgttgttttgtaaaaatggggttttgccgtgctgcacaggctggtcttgaactcctatgcttgatcctgctgcctcggcctccc

SEQ ID NO: 7910 - DNA, 565 bp, Homo sapiens
aagccgatgcttgccgatgttgtcttcgaaattcaaggtacgacagtgccagcccacagggccatcctggtggcccgttgtgaagtgatggcagccatgtttaatggtaattacatggaagcaaagagtgtcctgattcccgtttatggtgtttccaaagagaccttcttgtcatttttagaatacctgtacacagactcctgctgcccagctggcatattccaggccatgtgtctcctgatctgtgccgagatgtaccaagtgtccagactgcagcacatctgtgagctgttcatcattacccagctgcagagcatgccaagcagggaactggcatccatgaaccttgatatagttgacctgcttaaaaaggccaagtttcaccactctgattgcctttcaacctggctacttcatttcattgctactaactacctcatcttcagtcaaaagcctgaatttcaggatctttcagtggaagaacgcagttttgttgaaaagcacagatggccgtcgaatatgtacttgaagcagcttgcggaatacaggaagtatattcactccc

SEQ ID NO: 7911 - DNA, 332 bp, Homo sapiens
tatcctggttttgggacagcggcattcttggcgccacctgtgatatactgcatccccggcgaacgtctgtgtcacttggaggagggcagcccgggcagcggcacctacacccgccacggctacatcttttcgtccttgccggctgtctgatgaagaccagtgagaatggcgcgcttccactggtgtctgtagtgagagaaacatagtcccatttactgccagatgtgggagctattgtaacctgtaaggtctctagcatcaattcacgctttgccaaagtacatcctgtatgtggggtccatgcctcttaagaactcttttcgaggaactat

SEQ ID NO: 7912 - DNA, 567 bp, Homo sapiens
cgacagagggtccctttgctctaggaaagcttggcccaaattgattttcttctttttccccctgtaggactgactgttggctaattttgtcaagcacagctgtggtgggaagagttagggccagtgtcttgaaaatcaattaagtagtgaatgtgatctctttgcagagctatagatagaaacagctggaaaactaaaggaaaaatacaagtgttttcggggcatacattttttttctgggtgtgcatctgttgaaatgctcaagacttaattatttgccttttgaaatcactgtaaatgcccccatccggttcctcttcttcccaggtgtgccaaggaattaatcttggtttcactacaattaaaattcactcctttccaatcatgtcattgaaagtgcctttaacgaaagaaatggtcactgaatgggaattctcttaagaaaccctgagattaaaaaaagactatttggataacttataggaaagcctagaacctcccagtagagtggggatttttttcttcttccctttctcttttggacaatagttaaattagcagtattag

SEQ ID NO: 7913 - DNA, 271 bp, Homo sapiens
ggagctgctttagcccctacgtggtgagtagatcgtctccacagaaatcagcggaggcttccacagtccctggttggaatggaaccggcggtgaggatgagaggcgctgaagaccagaagacccagggcgtgaacggggcgtgtcatccctggagtttctgtagaatttcaggcctgtctgcttgagcagcagaggaggagtttctgtgtgcctgtgaaagactgtgtgtgtgtgtgtgtgtgtgtgtgtgtgtgtgtgtgtgtgtgtgtg

SEQ ID NO: 7914 - DNA, 546 bp, Homo sapiens
ggtagtccaggcggctctcggtggcagtgagcatgcgctccggctccaccacgaacatgtagtagaggttccacatcagcatcgacagcagtggcagaaacgtcaggccgtagccgaagcctcggaaggagcggcccacggcaaagagacatggtcttgctatgttgccagtctgggctcaaacttctggccttgagtgattctctcacctcagactcctgagtagctgggattacagatgcgggccaccacacctggctgtacaaactttaaaatgtttgagcaaattcaatgagtatagtaaaatatcttcctccctttaccgattcccaccctattctcccccacccccaccccaggcatcaatattatggtttcttgtgcactgagtgattttttaaattattattatttttttatttttgagacagagtctctctctgtcacccaggctggagtgcagtggtgcgatctcagctcactgcaacctccgcctcccgggttcaagcaattctcctgcctcagcctcctgagtagctgagacta

SEQ ID NO: 7915 - DNA, 588 bp, Homo sapiens
acagaagggattagggatttactcagccctgctgccgctaacagtggagttatgtcactgatctgaaggtcactgttaagggcttctgctgccatccttgtgggttgctacctttaagtcgcataactctagctgtatcatcctctcacctgtcattcttctgagggtctcagtacaagggccctgggatggagccaacctgggtattcacaacaggcctgacttgatactaagtgattagttttccaagttgtcccactgccattcaaagtcagcccttgagtgtatttgttctcagtcctaaccctggggccagagattggtccgaggttgagaattccttcctcctcatccttggtgttgctttctccaaatgattgttttagactagccaaaaatgccgtggcaaagagctcagaaatccaatttggataccaaaggtttctcatgttaatttctcagcccccaaagaagcatcttactcctgaaccttagacaggaagtattgtttcagtcacagaaagcttttctgggtacctctggttagcactttctactctctgatatttcctatgtacatagctttta

SEQ ID NO: 7916 - DNA, 293 bp, Homo sapiens
agcgcatgtctgtaatcccaaccactctggaggctgaggcaggagaatctcttgaacccgggatgtggaggttgcagtgagccgagatcaggtccctgaactccagcctgggcaacagagtgagactctgtctcaaaaacaaacaaaaaaaaaaagtcggccccgggggctcacacttgaaatcccaccattttggaaggccaagggggatgtttcacaaggtcaggaaatcgaaaccatccgggctaattttggaattttaagaaaaaacggggtttaaccatgtgggccag

SEQ ID NO: 7917 - DNA, 557 bp, Homo sapiens
gacacaagatggcggcacccgaggaacacgattctccgaccgaagcgtcccagccgattgtggaagaggaggaaactaaaacatttaaagacctgggtgtgacagatgtgttgtgtgaagcttgtgaccagttgggatggacaaaacccaccaagatccagattgaagctattcctttggccttacaaggtcgtgatatcattgggcttgcagaaactggctctggaaagacaggcgcctttgctttgcccattctaaacgcactgctggagaccccgcagcgtttgtttgccctagttcttaccccgactcgggagctggcctttcagatctcagagcagtttgaagccctggggtcctctattggagtgcagagtgctgtgattgtaggtggaattgattcaatgtctcaatctttggcccttgcaaaaaaaccacatataataatagcaactcctggtcgactgattgaccacttggaaaatacgaaaggtttcaacttgagagctctcaaatacttggtcatggatgaagccgaccgaatactgaatatggat

SEQ ID NO: 7918 - DNA, 105 bp, Homo sapiens
ccttccgactgtgaaaagacttaagcctgggttggatggctcacgcctgtaatcccagcactttggcaggccgaggtgggtggatcatctgatgttgggagttcg

SEQ ID NO: 7919 - DNA, 643 bp, Homo sapiens
gagacaagctcaccgaaatggccgcgtccagtcaaggaaactttgagggaaattttgagtcactggaccttgcggaatttgctaagaagcagccatggtggcgtaagctgttcgggcaggaatctggaccttcagcagaaaagtatagcgtggcaacccagctgttcattggaggtgtcactggatggtgcacaggtttcatattccagaaggttggaaagttggctgcaacagctgtgggaggtggattttttctccttcagcttgcaaaccatactgggtacatcaaagttgactggcaacgagtggagaaggacatgaagaaagccaaagagcagctgaagatccgtaagagcaatcagatacctactgaggtcaggagcaaagctgaggaggtggtgtcatttgtgaagaagaatgttctagtaactgggggatttttcggaggctttctgcttggcatggcatcctaacgaagatgacctcatgttcattgttcctggttttttccagccagcagcctctacactccatcataggacatcgagtccctcctcctcttctcccatgccttcttccctgccatggcaaatctgagtggcttctctaagcatctgctggtacaagtcaatgtggcaccatg

SEQ ID NO: 7920 - DNA, 514 bp, Homo sapiens
gtccttctgcaagcatctacggcttagcgctaaaacaggcaattccaaaggtgaaaacgcagccaactggctcacggcaaagagtggtcggaagaagcgctgcccctacacgaagcaccagacactggagctggagaaggagtttctgttcaatatgtaccttactcgagagcggcgcctagagattagccgcagcgtccacctcacggacagacaagtgaaaatctggtttcagaaccgcaggatgaaactgaagaaaatgaatcgagaaaaccggatccgggagctcacagccaactttaatttttcctgatgaatctccaggcgacgcggttttttcacttcccgagcgctggtcccctccctctgtcttcaggctctgcccaggaactcgcacctgtgctggagccctgttcctccctcccacactcgccatctcctgggccgttacatctgtgcagggctggtttgttctgactttttgtttctttgtgtttgcttggtgctggtttat

SEQ ID NO: 7921 - DNA, 368 bp, Homo sapiens
atttatcgggatgacaaatccatagaatatattcttttatgttaaattattatcttcatattaatcttaaaattttgtgacgtgtctttttcctttttttccacagttttaatatattattcttcaacgacattttttgtaactttacacttttttggttattttattttaaaaaaatgaaaaattaatttaaaaaaatgcaaaaaaactgttggattatttattttagaaattcccccctttgtgttggactgcaaattgagtttctttctctttaggcctttcacaactaggactgagaatgtatgtaaaagttctgtgacagtacagaaggaaaacaactttttatgtatagcttctaaaagggg

SEQ ID NO: 7922 - DNA, 495 bp, Homo sapiens
  misc_feature 419: n = A,T,C or G
cttgaaaaattaggcttttcataaaacacatcacatgtcattgactgctttttagaaatacacttccaaggcagtacatctgtattgctactgaaaagtgccatttcacagaacacagacttctttttgctctttgacatcttgaaaacatctgtttttcttttttaatacaaaactttgtgctcaagacaaatcttacatgaaactctcataaaccatgaaaatgtagctggccttcgggccttaggcatgaaataagcatgaggaacatattcccctaacttctacccccagcccagcaagttatcctttaagaaatctcctaggaattctggagtttgaaaacaattgctctatgttattcctgcttccagtctctaagtaacaagggcatttaaaagcatagtctcttaaggtcncactatagtggttctttatttaaggaataactcagctgggtgcagtggctcacgcctgttatcccagcactttgag

SEQ ID NO: 7923 - DNA, 511 bp, Homo sapiens
ggtcaggagtacacgcctgtgtttttctacccataagtcagtgccaactcacaggttttaaagatttctgttaaatagttccttttgtcttaattttaagtatctagcaactcaaaatttgcctcctatatggaatttatttatttagttatttttattttattttgttgagacagagtcttaccttgtagcccaggctggagtgcaatagtgcgatctcggctcactgcaacctctgcctcctgggttcaagtgattctcctgccatagcctcccaagtagctgggattacaggcacccaccaccacgcccagctaatttttgtatttttagtagagacaaggtttcaccatgtttgccaggctggtcttaaactactgacctcaagtgattcacctaccttggcctcccaaagtagctggattacaggtgtgagccaccgcgcctggcctctgggattctttttttttccagttgtttctacttacagaaaaatgatttattaaaatgg

SEQ ID NO: 7924 - DNA, 601 bp, Homo sapiens
aaatcttttaattagttattttatcaagacttgagacactttctagctactgctctctagtttaagaataagcttcgtaaaccagaagaattaaacatttaaacataaaattaatgccattttaataattcatatccgaatcatttgtatttttaaaagtattttaaagcaggccaaataaagacatgaatcattaacattatttgaatttacattaaggaaagtatattttgagacatggttgatgtgttttcaccaagaagtaatttatggtcgtggaaaagaatttaataatcttcttgtatagtctcataacatcaaatcaggatctgattagtatttttttcttttgataagggaagaatcaatgtctgccctgataagttacaactgacttactttgtaagtactcatcccaatagatgtcataggccaacagattaaaaaccagagaatccagatgtcaactatgaattcaaaaaataactgaccactcctaactgaaaattttcaatattaaattacaataggtaggccaggcgtggtggcttatgcctgtaattccagcactttgggaggccgaggcaggtggatcacttga

SEQ ID NO: 7925 - DNA, 596 bp, Homo sapiens
tggattgctgatttaaagaggcagcctccaagaggcagagaatgagagcaacacttatcacatttgattgacatcaaatccttttatcaggtaatatctcaaagaactagtgcctcggagaaattctagtttagaaaatgctgtgcactcaaacattctcaattcctggtatgaaccaaaatttaggtgcaacatagcaaatggttaaaagcaaggatgctggagcccactatgctggatccacaacttactcttctgtgaccttcagcaacttgcttaacctctctatgcccaagtttcctcatttgcagaacggcaagagggaaaatgacaagagcagttacctcatagggtcatactgaagattaaaatgaatgatgcagtggctcatgcctataatcccagcactttgggaggccaagagggatggatcacctgagatcaggagtttgagaccagcctgaccaacatggtgaagccccacctctactaaaaatacaaaaattagccaggcatggtggtgcatgcctgtaatcccagctacttcggaggctgaggcaggaaaatcgcttgaacctgggaggtgaggttgcagt

SEQ ID NO: 7926 - DNA, 629 bp, Homo sapiens
gagtggtcagagctgaggcccagaaggcaggcagcacagcacaggcagagagaggcagagatttgcagcaaatgctaaggatgtgggacttcatcatgtattcctaacactcactgcagtgtgaggaatggattggagggacacttgcagtagttcttgggagattatggtccctggaagattgtgggtggtcaggggaggggaaagtgtgtgcttttgtgagacacgtggtaggtaagagtaataggcatcacttattcctgcagagtgatggtggtggccagggaaagggagatttgaggtgatttccaggttttcagacctactcaagtgtatggaaagtgataaccttattgaaatagagaacacttagagaagaaccattagcaggagaactgtgtcagtctgttttaggacatagcaaggtgcatttgagacatgcagaacaggtattaatagtaagacatacagatccgaggccaggcacagtggctcatgcctgtgatcccagcactttgggaggccgaggtgggtggatcacatgaggtcagcagctcgagaccagcctggccaacatggcaaaatcccatctctactaaaaatacaaaaattagctgggcatagtggta

SEQ ID NO: 7927 - DNA, 76 bp, Homo sapiens
gttgataggttgagaggccgggcgtggtggctcacacctgtaatccctgcactttgggaagtgggtggatcgcctg

SEQ ID NO: 7928 - DNA, 481 bp, Homo sapiens
tgtcaggacttaaatagtagctgggattacaggcacccaccaccatgcccggctaatttttgtatttttagtaaagacggggtttcaccgtgttgcccaggctggtcacgaactcccgacctcaagtgatccgcccgcctcagcctctcaaagtgctgggattacaggcatgagtcaccacgcctggccaggaagcagtcttaagggcgaaagacgctgtactgaaacagagctaggcttcgtctcccttcctcctttcaggtctgtggctagtatatagttaatgtgccaggacttaaatgctgagtcacctaaaaagctgagcctcaatcctcaataaccaggaagactcatataggctgcaactcccttccagaggagactgcccgtgttgccttttgctttcatctaatgtctctttactttacaaagaataatatgatctaaaatctgtctctgttgtaagcagtcactgaatatt

SEQ ID NO: 7929 - DNA, 464 bp, Homo sapiens
tacggctgcgagaagacgacagaagggaagcactttgatatccaggacttcgggaaaaaataaatcactgtttgcttatagacatagacttacccctttgactcttaaagagacaaacaagggaggttgtgtctggggcagaagaaaattttgtgggtataatgagattttggggccgggcgcgatggctcacgcctgtaatcccagctctttgggagtccaagtcaggcagatcatgaggtcaggatattgagaccatcctggctaatacagtgaaaccccatctctactaaacatacaaaaaaagaaaaaaaaattagccaggaatggtggcacatgcctgtagtctcagctactcaagaggctaaggcaagagaatcactagaacccaggaggcagaggttgaatgagccaagatcatgccactgcactccagcctgggcaacagagtgagactctgtccc

SEQ ID NO: 7930 - DNA, 579 bp, Homo sapiens
ccacccacctcggcctcccaaagtgctaggattacaggcgtgagccaccgcgcctggccctaagtgtgtactcttggggcgctcgtttagctttgtgggctagggattatggtgcattatctgataaattagaggaaaattttactttatctgagaaacatatttgcagccagtctcagacacactaagtcacagaagaaagaagaatcaaaataaagagaattctgctgtcagctgtttcccctcttgctttacctaaaaaaagcagccatctgtgccctgaggcagacatggcagaatgtgcttactcaacccctgacccccgactcctgacccctcaaaacacacactgggagcttagagcctgcccccaggctgcctctccccaccctttactcctcaaaatacatactgagagggaaggggatgcctgcagctggtccaaactgcttctcttggactaagatatatttacccgggggtgtcaacagcgtgggagtggagagagcaggcaaaggggagcagggaggtcctatggccttgcagaggacaaaaccacaaatccctggcaagtgacct

SEQ ID NO: 7931 - DNA, 613 bp, Homo sapiens
gtatagatacattacaatttatccaatttacttttgatacatatttagtttttttccagcgtttgttcttgattttataaatgtatttctattgaatggaatagcttggtcatagggaatacctgtattcaattatagcagagtttaagctccttgtcaacttttggcattttcagacttttcattttagtcaatctgttgggtatgtggtggtatcttactgtggttttaatgcatattgccttaactactaacatgattgtgtatcttttattcatagtttaatggccatttttataacctcttttgtgaagtgccttttaaaatatctttcccatttttaaattgtggtatttatctttttcatagtactttgtaggagttttccctatatttgggatataagtcctttattgggatctatctacccatctatctattctcactctgtgccttgactttttattttttaaatattgtctttgaattgacatgttttaattttaacttagtcaaatttgccaactttatcctgtataatttctttgtatcgaaggggcttaacaaaatcatctttgccaatgtcattaagatattttctacgtttttctct

SEQ ID NO: 7932 - DNA, 578 bp, Homo sapiens
tgtgtatatatatatatatacacacccatatatacacatatatatacacatatatatacacacacatatatatggagattatctgattaaataagctctaattttatttttaaaatgaaagatttctgaaactttaagtttacagttcaacttattgttttgtaaaacaatgtagcagagactatattaaaatccatatgagaatgtgtatttgatagtttagtgaaaagctgttagcctaggatataggtgcaagtaatggaaacattttcacattaggtgaagagctcaaaagaaaaaggattagtggccaggtgcggcggctcatgcctataatcccagcactttgggaggctgaggcgggcggatcacgaggtcaggagatcgagaccatcctggctaacacagtgaaatcccgtctctactaaaaatacaaaaacttagctgggcgtggtggcgtcgcctgtagtcccagctactcaggaggctgatgcaggagaatcacgtgaacccgggaggtggaggttgcagtgagctgagatcacaccatggcactccagcctgggcaacagagtgag

SEQ ID NO: 7933 - DNA, 562 bp, Homo sapiens
tgtattcttcaccagacttgtctcagagcagctgctcacccaggagctccatggccacagggatgcccaggacagggacgactgcttgcccactgccgtgctctggggctctgggcagtccctcggcctcacccactgctcagattttctgcaggaaaaatgggagagccaccctttcaaagagtgacccgggcccggttcctcctcaaagcctttcggaatgaatctcccagttccccactgactggacatagaacctctgctctttccttctctaaggctgtgctagtccattattcattaaaagacaaaatgaggccgggtgcagtggatcacgcctgtaatcccagcactttgggaggccaaggcgggcggatcatgaggtcaggagatcaagaccatcctggctaacacggtgaaaccccatctctactaaaaatacaaaaacaaaattagccggctgtggtggcgggtgcctgtagtcccagctactcaggaggctgaggcaggagaatggcgtgaacccgggaggtggagcttgcagtgagccgagatcgtgcca

SEQ ID NO: 7934 - DNA, 593 bp, Homo sapiens
actttcccccttaggtgttgagttcaagggaattcccagtaaacttgctgcacaaactctatttcccagaaaaccaaatctaacacactcactcaagaatatgaaaggatattccagcatttttaataaaaaactctctaacatgaaagacagtccaaatcaatgcatggagaataaaggaacttgaaagagacacatagtgtagagaatattaacattaattgtttaaagaggtaaaaattctgtattcataaaataaaaagcaggatgttataagaacagaactttcagaagacaaaaaagaggcccttggaattcaaactacagtaatgaaaatgaaaactctgatagactgattaaaagacacatttgtggcactctccaaaacatagaacaaaatgaaaagaaagagaatatgaaaaacaatatgagaaaattagaagattgagaaagtacaacatttgactaataggaattctagaaagagaacaaaaaaacaaaacagaagggcaaaatttgctttcaaaaaaattaataaagaagatgaaagggccgggctggtgactcacgcctgtaatcccagcactttggga

SEQ ID NO: 7935 - DNA, 640 bp, Homo sapiens
tagcagggaaacctaagtccagaagtcaccccatcatgggtcccaaaatattccataggctacttatatggctgtgtgtgtgtgctgtgtgtatgtgtgctatgagtgcatgagtacgtatgttctgtgaatgagcgtgttgtatgtgactgtgtgtttgtgtgtgtgttgggcacatgatcacgttatctctgttcagagttagggatggacggtgagagcaatgtcaacatcaaaacacaggagtcccaagttgatttttcccgtagatccctgtatcatatcctcttctgggtagcttctctctttccatagtgaatctgggaagatattccattaccacagcaatctaacgtgtccacagtttggaaagaagaaactaaaagggttctgagaaaagcatcctctctttccacccctacccccatcaccaaaagatgaaagatggtaaataggatctatttttaaaagacaaaagaagctgaaattattaaatccagaaggcaacaaaaggctaaaaagggtgaatttatcattgcatgtgtgtacacaaagtatttttataaaaagggtgagtcgagatcgcgccactgcactccagcctgggcgacagggcgaaactccgtcccaaaaaaaaaaa

SEQ ID NO: 7936 - DNA, 473 bp, Homo sapiens
taacaaaattttttttagatacagagacgccttctgttgtccaggctagagtccagtggtgtgttcatggttcactgcagcctcaaattcctgggatcaagtgatccttctgcctcaacctacagagcagctgggatcacaggcgtgtgccactatacccagcttctttaagacacgatcttttaaaatgttccttagttaaggcaatagactcaagtaatgatgcgttacttacatacataagcaacctattaagagtctattagaacatttaatatctcatactatgggataaaggtcccttcctccttttggcttttgcttttcaaaattataatttttagtatcgttcttcctttgcatggctttttccatcaacaccaaacagaaccacagtggaacagagtaacaaagaaaaagcaccaaatcaggcgaggtgcggtggctcacacctgtaatcccagcactctggg

SEQ ID NO: 7937 - DNA, 144 bp, Homo sapiens
ggatgctcaattataagtataatgcaaataggcaaaacaaacaaatccaaactctgaaatatttctggtccctggcattttaaataagggatattcaatccgtatagatattctacatagtcaaactttaatggacttactcag

SEQ ID NO: 7938 - DNA, 616 bp, Homo sapiens
  misc_feature 287, 288: n = A,T,C or G
gtgacaagtgttatcagactgagaataatatacaggcttactgaacatctgtgaccaacaaaagtgccaaatgcctatttaatcctcataaaaacgtatgaggtattactattctattttacaaaggagaatagtgaagtacagagaggttaagtaactgctgagccagggttcaaacccagataactccagacccctcagtaagagctgtattgttccaagggatacatgagaagactggaggaaggaattttaaagcaggaaagaacttgtctgaaaactatgannaatgttaataatgtctactacatgctaataatgtctactaaagtacaactgtgaaaaggttgtcaacaaaaattccttatgacccaaggaaaactaaatttgcgtcccaaggctcttaagcaactgtatttaaactctgcacttaaaaattcatattacaaggccgggcacggtggctcacacctttaatcccagcacttgggaggccgaggcaggcgaatcacaaggtcagaagttcaagaccagcctgaccaacatggtgaaaccccatctctaaatacaaaaattagccaggcatggtggcacacacctgtaatcccagctactc

SEQ ID NO: 7939 - DNA, 580 bp, Homo sapiens
cagaagggttattaaaaaaaaagaaaaacagttttgaaaatgataaactaaaggtatagctaacataacttttggagttttcatacacggattaagtatcaacatctcagaagtcaaaaatgacacagtatttaaagtttaaatttggtggatgaataaatgggacaatatttatttataaacactcaaaatttacctagtattaacttcaaaatattaacaggattagaatttttaaaagatgagagccccctagtggaatatagttcttattgcaatatttcaaaatagattaaaaaatgcttaagatctgttcaaaaccaaaaacatccctttagagtaactggactaaaattatgcgacagaaaaaaaaaacattaaactattactttctcagtacttcattttcagatggaactttaagaaaaagaatagtgccaaagggaaaggttagcaatgagcacagggataaaagcaaatgtagcccaaggaagcagtctgctctgccataaatattaaatgttggttttgccatttttttaagctgaatttctgaaagcagaaatagctgaaaagcaac

SEQ ID NO: 7940 - DNA, 569 bp, Homo sapiens
cccaggctggagtacagtggcacaatctcaaggtggcgagtccaagcaattctcccacctcaaactctccagtggctgggattacaagtgtgcatcaccacgcctggctagtttttgtatttttagtagaggcagggttttaccatgttggccatgctggtcttgaactcctagcttcaagtgatccacccgcctcggcctccaaagtgctgggattacaggcgtgagccaccgcacccagccgataactacatttcaaattcagttacagtcttgtttaaccccatgataattgtgatctcctttttctctgggcctaattttctatttctagttttctagcctattgtaaagaccctttatgctcttatggacaagagaggagataaaattaacatttggtatgctgattttagaattatttctgcaatttttacaaagataaatgcaaagaatatgtcctatgttatgatatttaaagaatttgtagaggttactccgggcatactgcatgcctatggggtagctctgttccacaaggagcaaaaaaaaaaaaaaaaaaaaaaaaa

SEQ ID NO: 7941 - DNA, 123 bp, Homo sapiens
aggccctatctccaatctttgcaagaccttaattgtgattcagatcccacttgcaatggactgcatgactgtaccccctacccccaaatccatatgttgaaatcctaaccccaagtgtgatga

SEQ ID NO: 7942 - DNA, 515 bp, Homo sapiens
ggccagagtgactgaaagtgcatggctccaggtaggtgacatggtactgtataagttttcttgacccatggttggcttcttgagtcaatggatcagagatagtttcgaggtagacagccacatttctatgccccaagaacactcgagatccctctgcattctctgctgctgtctgatcacgtttttgtttcaagacaagcagctcaaactgtcccacagcttagcaagctatagctcatgggccaaatctcgcctattacttaaaaaaattattatatttttggttttaaatttggggtaaaatgcacataacataaaatttgctatcctaacaatatctaagtggcattaaggacattcacctggttgtgtatccatcactaccatccatctccagaacttttcatcttcccagtctgaagctctgtacccattatgcactagctttcacttccctctgctcccagtccctggcaacctccattctactttctataatttgactccctgggagc

SEQ ID NO: 7943 - DNA, 154 bp, Homo sapiens
tgcaaatctccgtggcccatataccagtcaagagtacctgacgagcccttagagcccatttttattcccaagtaagtgattggctggatgacttcccttacctactttgtccagaggctgttcacctgggagacctgctggtatatgggccacg

SEQ ID NO: 7944 - DNA, 533 bp, Homo sapiens
tttacaaagctatactcatggactgagcaatatagaatccttctcatcgtatcttgttacagtctaaaaccttgtagtaaacgctgtctaatattccactcagtaataattttttctttttgagacggattctcactctgtcgcccaggctggagtgcagtggcacgatctcagctcactgcaacctccgcctctcgggttcgagcaagcaattctcctacctcagcctttggagtagctgggactacaggccacaccaacactcctggctaatttttgtatttttagtagagacagggtttcaccatgttgtccaggctggtctcaaactcctgacctcaggtgatccacccgcctcggcctcccaaagtgctgggattacaggcgtgagccaccgtgcccggcctccactcaataagaattttcttaccaattctccaaacttttgaccatctgtaccatataagtaatgctgaaataagtgttcataggcatgttacttttcctgtatttggaatgactaactatactac

SEQ ID NO: 7945 - DNA, 387 bp, Homo sapiens
aatgcaccttcaccctgagactgtctaaaaaccaagcttggctgatatttggaggatcctaggccaggcgagcggagcagctgagtcacaccctgtatgatgtgtctgcaaatagatctgggtcaaaatgaaatacccccttgcctggctcagagagaggcaatggactgtgtgaactcactgcttccctccatctgggcacagtggttgctgaaaagaggaagtcacagcctgggagagttgggtagcacagacaattctcgagttttgaaagctattggcctcaatgagccccgtgctccatgggaataaagggcacaagatcctccaaccccattttgcatttccatgttaaaaggtgtgtgaattcagtgcaaagagatgtag

SEQ ID NO: 7946 - DNA, 450 bp, Homo sapiens
  misc_feature 45: n = A,T,C or G
gctgtacctgggacacaggtgagtgaggaggacctcaaccccggngagtgattacgccctggcaccaggcccactttccttcgctctcaaagataccgctattgacacatctgagccggactgggaactttgagttgtcttatggctgcaatcactgatttgtgttaatcacccctttcttcccttgattctcacttactgtcccacatgactcctctatcatagatagtaaataaaagcttgaatgcacgcatgaatgaacggaagactagactggcccaatgtgggatctaggactgtgactacatttttttatttgttgagccaaagaagtcccataaaagaaggggtcttactcccatcaatcaaagttaagactgtacctggggctttttctacggcatgagtcagcctttacagtgaggtctgctttgcatctcctcacccatc

SEQ ID NO: 7947 - DNA, 559 bp, Homo sapiens
gcaccccacccaggctgggatttcagcccaggcaggctcactgcagaggcctcgcccttcaccactacccaacaggcgaccctctcctgctacttctctcgtaggatctgaaacaaatacagcagaatgttcaggcactatcgcgaggctgggtgatgggggtgtgcgtctctgttatcattttatgaatgcctgggatgcttcggattggaaaaggagataaagggactggcatggaaggaggaggaaggaacaggagtggcgagtggctttctctcttcctctcaggtcccgatcccagaaagagctagaaagcagatgtcgcaagaccccggaacacaggattcttttcctctggaatgcgggtgccctgttcctgcctggcctgaaggtgtgcacgagctcccaagatgaagggttcacgtctgttcatgcctcctccctggctctggtaggtgtggcccaagctctgtgcacgacctacctaccagcagaattagagacaggaggggatgcaactcccgtgaggcttctgcaaaccagtcccgagggtgaattt

SEQ ID NO: 7948 - DNA, 395 bp, Homo sapiens
agagacggggtttcactgtgttagccgggatggtctcgatctcctgacctcgtgatccgcctgcctcggcctcccaaagtgctgggattacaggcgtgagccaccgagcctggtcagagacaggaatgttataaagacgtggatgacagtgacctcccgtttcccgggtatgtcgcatgggccagacggttgcttcacgcacatcctacccttcctcctcctgtagctcccaaagaacattattcacatcacccccattgtggagatgaagaaactgaggcttagagaagttaagtgatgtgccccaggttacacagcacacagagctagacacgggcagggctgggatctgaacccaggtctctccaatgcctgaatctgacctcttaatccta

SEQ ID NO: 7949 - DNA, 578 bp, Homo sapiens
gatatcatttttttctgactctgatttaaaaatctctgtttaccaagatgtttcctggtatgtggtagtgaatataagtgtatttaaaatttcgaacagcgaacttacaaaagaataatcagaataaacttatttttgacttgcaaactttctgtttagtttttatagtaaatcagtaactctagctatttttagaagtcattccagtttgatccctatgttttatttccatttcttgtcattttttatgagttgttatgtttgtttttatagaagaagaataatatgtattatgtgaaagtaatagccaaactttaatttcattggtgtttcttaaaaatttctattaaatcgagtacagcatggattagaaaaataaagccagaaatcaatatcagaagtttaaagaagattgtaattagtaatttgcctgagttacagtcaaggataaagctaaaagtctcagagtaaatgcaatcacagtaagaaagataagggaaggccgggcgcggtggctcacgcctgtaatcccagcactttgggaggcggaggcaggcggatgacaaggtcaggagatc

SEQ ID NO: 7950 - DNA, 668 bp, Homo sapiens
gtggctcacgcctgtaatcccagcaccttgggaggctgaggcaggtggatcacttgaggtcaggagtttgagaccagcctggccaacatggtgaaaccccatctctactaaaaatacaaaaattagctgggtgtggtggcaggcgcctgtaatcccagctactcgggaggctgaggaaggagaattacttgaacccgggaggcagaggatgcagtgagccgagatcgtgccactgcactccagcctgggtgacagagtgagactccgcctaaaacaacaacaaaaaagaatgtgatgcctcagtatagagcatttgggaacccggttaggatggaaggcgagggctgggtaaagtctcttttgctgactgtgacaagtggccgttacaaatactggtgtattgcaaaacttcatgaggattgatttacagcatgtgccgtctttgtaaatggctttacatccgggttgtgctttcatgttccaagaaaacaacttaatctcttagttaatgaaaagtggaaggccgggcatggtggcaggcgcctgtaatcccagctactcaggaggctgaggcaggagaattgcttgaacctgggaggcggaggttgcagtgagccgagatcgcaccattgcactccagcctgggcaacagagtgagactccatctc

SEQ ID NO: 7951 - DNA, 652 bp, Homo sapiens
tcccaacaggccccacttccaacactggggatcacatttcaacatgagatttggaggggaaaatacatccaaatcatgtcagaaatgaatcttaaacacttctaaaacaacagttactaaggaatcagttagatagaaggagtacgttctagtattcaatagtacagtagggaagtgatagtaaacaatgctgataatctgaagtggaacagtttcatgccaaaactatcccccaccagtctgtggaaaaattgacttccatgaaactgctccctggtgctaaaaaggttggggactgctggtttagaccacattattcagagttgttctagtaattattctggtaatttgtctcatgcaatagaaaatacatatgaacactaagaaatctagaaataattcttctcataataaaaaatataaaaacttggtaaaatataagcctacaatattttttctctatattcaggtataaagacagtgtcaaccatgtgacatttataatattcataatctatatttgcaaaaaaaatgtatcatggaatttgagaaggtttagattcttagaaatttcttataaatatttaaacatggtcaattaagggcattgtaattactctcttaatttgcattaattagtttagactctact

SEQ ID NO: 7952 - DNA, 575 bp, Homo sapiens
acgtgccaccacacccagctaatttttgtattttcagcagagacgggatttcaccatgttggccaggatggtctccatctcttgagctcgtgatctgcccacctcccaaagtgttgggattacaggcgtgagccactgcgcccggccaaaagaatcctgtgcctcagcctcctgagtagctgggattatagacacgagccaccacgcctggcccccaaaggtatttaaaggaaaaggtatttctgtcaggatttaaggattctgatcctgagtagtagcaattccatctgctacattccagcctaagtgagtgggcaaaaagagactacgcttaacatcagaatgaaagccaaagtccttacaatggcctacaaaagacctatataatcttactccactacctccttctgctccttaaatgtgatgagtatgctcccaactcgggcctttgtatttatcttccagcccagtggttcccaaactttacagtacattgaaattttcctggctgggcctggtggctcatgcttgtaatcccagcactttggggggctgggcggatcacgagatcaaga

SEQ ID NO: 7953 - DNA, 581 bp, Homo sapiens
gggcacatgcactgccctcagcatagccgccttagcacttcaggacttaaaaggacctcagagtcactgaatcaaagctccctgagagtcaaattcctctgtgaattcctttcttgcagggagggtggggagaactgtccaaacctcagtcttttgagggtgagtttaatttttgaaaacagcaaaacttcagacaaagccaagtctagtgaagaaggtcaacaaccaggatgaacacattaaaataaggtggggccaaaagatgacaaaactggtttgcttctctgacccacaaaatggttctgagaggtaattccagaagcacctagagtaacaccctcctcccactgctgctgccggcacaacctctccaagggtggatagagagctcatattaacatctttaaggctgggcacagtggctcacgcatgtaatcctagcactttgggaggctgaggcaggcgggtcacctgaggtcgggagttcgagaccagcctgaccaacatggagaaaccccatctctactaaaaacacaaaagtaatctggcgtggtggtgcatgcctgtaatcccagctactc

SEQ ID NO: 7954 - DNA, 135 bp, Homo sapiens
tggggtttcaccatgttggccaggctggtctcgaactcctgactttaagtgatccgccctcctcggcctcccaaagtgctgaaattacaggcgtgagccaccactcctggccccttacaattaattatattctac

SEQ ID NO: 7955 - DNA, 81 bp, Homo sapiens
aaagatcctcctgctcagtttgaatcgtgaggtaaggctcaccgtcaggtctggggatactgggcattatctttggtcctt

SEQ ID NO: 7956 - DNA, 267 bp, Homo sapiens
gagggttcagttgagtcttttgcttcagcctcccgaatagctgggattacaggcacctgctaccattcctggctgaccttttgtattttcaatagtgacggggtttcaccatgttggccaggctggtctcgaactcctgacctcaagttaccagcccaactcggcctcccacagtgctgggattacaggcgtgagccaccacacctggccagggtataataaaatgcttaatagaactagtctaccctcaaccggaacaatgaaaat

SEQ ID NO: 7957 - DNA, 58 bp, Homo sapiens
acgcatggaatgtcaaataatatattctaatgaatctaatgaagttagagagaaaatg

SEQ ID NO: 7958 - DNA, 575 bp, Homo sapiens
tgagtccttgatgttcttacagctgttgctgatcactttttggggggttttgaggaaaaactatgaaattgattctagacaatttaggcttttgtggttcactggggcccataaaactactgagctggggaagtgtgattgggagaataatgatatttattcaacgataatgtgcttcacatacataaagagaactctgcacagcccccgatagaaagttacggaaacattctcaagttagaaacagtaaatgttttgaaaataaagtggcactgtcttagaaatgcaagaaggcagaagcaaaatattagatttgataattaagaatataattaatgatgagaaaccccatattttagagtaagactatatcccatttatcatggctttcagtcatttgaaaatttatgttcgttagtttgattgtattttccaccagctctaaggaggagctggaagggtgtgtacttttttcattaacattggattgcaatattcaggcacctatctgttcttactttaaacagaataatttaggaatgttagttctaaactcaagctgagacaagataaag

SEQ ID NO: 7959 - DNA, 522 bp, Homo sapiens
agggctgtggcaagccatatacacaaagatgcctgtttcctgtcttcttggttaaaaacaaaaacaaaacactggaaggaaccccaaagccaagctgccatgggttgcagagtgccagcccttaagtagtgttgttcatgggtaaacaggagacggataagggcaatttcaagaaataacaaactcaaggcatgaatgtggttatccaaacatcaagggactccttcatttgcatttggataattgtgcagttatatgatttgttacatggagaccagatggaagtaagagagctcatcctcaacttcctgtacctctggaagtctttacacacatgctggaaagatagaggagagttcattagcatcaaaccaccatggatttcataatcaattcctaatatctgaatagatgcagaaaagtcacaggcatctaaaagtgtggcccaagttctgttcttcaatcggcccaccaattatccctatgtatctcgattttgttatctaaaagatcacatgatgg

SEQ ID NO: 7960 - DNA, 278 bp, Homo sapiens
  misc_feature 61: n = A,T,C or G
tctctcaggctggtctccaactcctgggctcaggcaatctttccagttcagcctcccaaangtgctgggattacaggcatgagccacctcgcccggcctgggtggatcattttattgcatctcccttctggggcacccctcaagtgaatatatcatttacatcccgtgacagataaagaaacaaaaacacagaggtggaagatgaacccaggtagtttggttgcagtgcccagactaaggaattaattgttctctatcaaaaataaatttatggacct

SEQ ID NO: 7961 - DNA, 471 bp, Homo sapiens
cgtagaaatcattaaccacaacccacaatatgactaaatgtaatttatataatgctactatcacagcaaggtatttcttaattatttgggcattttaaatatttagcctaactacagactaaatttgaggaactgtcctgaatattagcaaaatggcttttctaaaactgaaaatttcattaagagactagatatttatacatgtgtagaaactgtgcattttcgattgtgcccctaaaggaacacaatattcttctgtgagatgggttttagggtggcataaagagcaaatgaggccaggtgtggtggctcatgcctgtaatcccagcactttgggaggccaaggcaggcagatcaactgaggtcaggcgttttgagaccagcctgaccaacatggtgaaaccccatctgtactaaaaatacaaaaattcagccaggcatggtggcatgtgcctgtaatcccagctactc

SEQ ID NO: 7962 - DNA, 588 bp, Homo sapiens
tattatgataggttattgtaggacacagataaaatcaacttttttcatttgtttctttataactattttaagttatttccacagttaatgaattaattttagcatagttttatgaaaagatggaaaggacccagacaagttgagtacaagtttctgataattttacaatcaaactgtttagactgggtaagaattgtgagaattctaatgaagagaatgactcttatgaaactactaatccaggcaaaacaaaaattaattgaacatcatgaaaatactctaccacatttttatactaaattagccagtactaaaattgttttagatatgccgtttgaataaactctgtggtacaagtcaaattatgtatgataacttctcagttatcagtgctatgcacctgaattgaagaaacaaaccagatattgaagaggacataaatttaatgttgtgtgtggactcatggagaacctagacagccaacagccacttgtttatttctgagttcttaaagtttcctctatcaaaatcactgcatttaattactcatcacagaagagataaaaaataaattaagttaaatataaa

SEQ ID NO: 7963 - DNA, 597 bp, Homo sapiens
agacccttgtgtaagagtcccttgtgtaagaaccatcttcactcgaggctgaacacatagaatgccgacaggctgtgttgtagccaattgcacatgctgacatttctgggccttaaccttggtgttgctaaaccatcccaacataatctgccccctcatgaaagccgtgttctgtagtcttgcctgaagatgggatgatggactaaacaggctcttaatgttgagttcattttcatctatatttctgtcccatgttcctttacctggattcctgtctctagtactgctgctatctcttaattgtccaatttaatcccagtaccactgccttgggctgggtactgttccttcatgactctcattccaaatagcttggttcataccccatattagtctgttctcacactgctataaagaactgcctggctgggcccagtggctcatgcctgtaatcccagcactttgggaggccgaggcaggtgggtcacctgaggttaggagttcgagaccagcctggccaacatggcaaaactccatctctactaaaaatacaaaaattagccaggtgcggtggtgcatgcctgtaattccagctac

SEQ ID NO: 7964 - DNA, 456 bp, Homo sapiens
taggtagaggtttaccttccctgcttggaaagcttctattagtgccacaattcatgggcttatggaatgccttgttttatcaccatgtatcacaaatatctttgagcaagaaagtaattttattatgagagaagtgtggcagcagagtcatgcccatggaattaactgatcttacccatcactcaggaacagctagtttgataggatagaggaaagtatgcagaaggatcaatcgtggtgctggctgagagaaaacccctgtaaggatgtagtataggactcaacccagtcaccattatatgttgtcatctactcaatattcagaatgcatgggcctgtgaaccaagaggcagaggtaggagtggctcttctattattcctaataactctcttgaaagtttttttctctacaactttgtctctattatattgtccctataggattggacttggtga

SEQ ID NO: 7965 - DNA, 114 bp, Homo sapiens
atagaagtccttttgagtgctggattttctttatttaggattcttttattccatcttggttccagcttttaacattttaaggacattgcatagaagttatttagggttaggctg

SEQ ID NO: 7966 - DNA, 531 bp, Homo sapiens
agtacctttatgtgtatctggtaagaatgctgcctctaccttttcttcctatttgtactatgtgaatgtggtgcatgaatgtgtggaatgtgtggaatgtgtagtattgggatgccagtatctttcagcgtgtttgggtatatgtccactgtgcataatatttgagatgtaaaaccattttgtgcggtatatgtgttattagttgtaagtcggtgaaatgtacatctgaattctgtgtgcatattgttggtactgatgctattttcgtgcatatgtctagtgtatatgttttaaggcaaactttctttgtgtgttgggtgtgtatgtgacacgaatggggacagcatctgtttttctgagcatggattgatgtgtggtgtctgtatgtatcttggaatggaggagggagattgaagaagtctggctgtgagcagcagaaataatttccaaagttgagtgacatgactctaagatgcccagtttctcggcctggggtcagcctgggtgatagctcagtctgtcagaatgaaa

SEQ ID NO: 7967 - DNA, 604 bp, Homo sapiens
cagaggatatatgggaggagcttgggagatgtgagatttgatcatgctgtgaaattcgagaggaggagatgactgacacacacagtgaggaatcaacgctagataagcatggggggtgggtggggagatgcttttgccgtgcactgtgaggaggcacagtgacatttcaatctaaggagagatgtgaggggtaaagagaggcctgttattagacttcattaaacagggatggtggaggctaagacatctctagaatcaaccgctggcagggagcatttctacttgtagtagaaatgttaagtggaatagttagcttctctctcattgcactccctctctctattaaaaatggagacaggccaggcgtggtagctcatgcctgtaatcccagcactttgggaggctaaggcgggcggaccctgaggtcaggagatcgagactatcctggctaacacggtgaaaccccgtctctactaaaaatacaaaaacaaacaaacaaacaaaaaactagctgggcatggtggtgggcacctgtagtcccagctactcgggaggctgaggcaggagaatggcgtgaacccgggaggcggagcttgcagtgagc

SEQ ID NO: 7968 - DNA, 145 bp, Homo sapiens
agaagggtcgaactcctgacctcaggtgatccacctcgcctcagcctcccaaagtgctgggattacaggcatgagccaccatgcccggcctactctttaataagtgtaaaatatctgtgatgaaacaacttagtctttaatcaaa

SEQ ID NO: 7969 - DNA, 495 bp, Homo sapiens
  misc_feature 432: n = A,T,C or G
ctggggcaaaagaatataatcaatatagaatttgtggacagtttttacacttaaaaaatatattatggcacacagattgttactttttaaataggcactgaacgacaagaaggaatgttttgccatgctctggcatttttttaaataaaacataaaaacagcagcattgtcagagattggggtagaaccaccttgtttggccctttcattactaatccaggagaggcaaagcacagggaagcccacgaggttttaggcaacattaagcttttacaggccaggcaatttcaaactaacaggaagtaatgcatggtgagaaaaaccatagaatgaagatgtcatcaacatgcaagaagagtgggaaatactggccagctgcctcactgtaagaaaaggaataaaatgcttctgggggtaaataatacaaataantactctaagtgtagatgatagattctgagctctgacttacactcctagaaagtaacctaactg

SEQ ID NO: 7970 - DNA, 588 bp, Homo sapiens
ttgctgtcagccagacggcagctgtgacttagttgtgttaaaacctgttgacggccaggtgcggtggctcacgcctgtaatcccagcactttgggagtccgaggcgggtggatcacgagatctggaggttaagaccatcctggctaacacggtgaaaccccatctctactaaaaaatacaaaaaattagccggacgtggtggtgggcacctgtagtcccagctactcgggaggctgaggcaggagaatggcgtgaatccaggaggcggagcttgcagtgagccaagatcgcgccactgcattccagcctgggcgacagagcaagaatctgtgtcaaaaaataaaataaataaaaatacaaaaagtagctgggcatggtggcacacacctgtaatcccacctacttgggaggctgagcagaagaatcacttgaacctgggaggcagaggttgcagtgagctgagatcgccccactgcactccagactgggggacagagtgagactctgtctcaaaaaataaaaataaagtattatgataaattataacagtaatatatggtagaaatgagacccatctagtagtaagta

SEQ ID NO: 7971 - DNA, 350 bp, Homo sapiens
tataagtcatatttgaccggaagaacttgtttcttcagtctctccctatgagctctttcatctttagcgtttaaacccttttaagtctccatttttaaaaacactttccttctgtagtcctagtgggaggatcgcttaagcctagaagtttgaggctgcagtgagctatgatcacaccactgcatgccagcctgggaaacagaccaagaacatgtctcaaaaataaataggccgtgtgcagtggctcacgcctgtaatcccagcactttgggaggctgaggcaggaggattgcttgagctcaggagtttgagaccagcctgggcaacatagtgagacccttacctctact

SEQ ID NO: 7972 - DNA, 240 bp, Homo sapiens
tactagataatatggggatcaaaaggatgaaaaggacatagtctttgccctctcaaaagcataataattgagatatggttcatatacatgaaaaaaatcactattaagcaaaagggaacaaggttgcagttacctttgcagtgtgagtcttcacttaaaagaactgcttttcagccaggcatggttgctcacgcctgtaatcccagcactttgagaggccgaggctggcggatcacctga

SEQ ID NO: 7973 - DNA, 603 bp, Homo sapiens
atagtctgtcacttaccattgtttctgcaagccaagggcattttttatgattttacagttacctaatttatagtttataatataggaaagttcatttattctctaactatatgagccttaaatatcttggagatttttcctatgatttgccccagaaattaaaagcaattcagggggaatgaagaatgaaatagagaaataaaggaagtctgaaaattcagaaaataaaagtatagtttgggcaaagcaactctaacaatattatcatgagctatctatctttttcaataacaataataactcatggtaaagctctatttttttctcataaggctactttgaaatgcaaacacaagcggaaatagtattagaaataagcagtaatggattgtacctattttactaaatgctaatgacaaatatgctcacaacgggcagatgtgtgccttaaaaaagtggtcattttctaagattattaaagtttctgaaagccatccttaggctttcataggctataactgcattaaatattaaattttaagatttttcttgactatggaaaaatcgtggccgggcgcagtggctcacgcttgtaatcccagc

SEQ ID NO: 7974 - DNA, 567 bp, Homo sapiens
tagtattacttccaagaataaatgtgcatatttatagggaaaaatcaaaacataatttttcattctgattctaaagctttcacaagaaagacatttatcatatccagttccattaaaatattcacttcttttaatccacttcaatggtgaaaagaaaaagtaaattacatttttcacatttccaaacaccatccatttccatgacacacacaggtatctccttgccaagaaaagtcagtggttgtctgttttggaagggaagtaagaaagtggcattttttatttcctgaagaaaaaaaaattaaataggtcaaatacataaaacttccatgaaaagagccacacttcatttcagccattaaagaaaaatgtgtttaaattccccaaaggaaccctatgctctacactgggaaaggcttattcactgctgactttcaagaaccagacatgacttatcacaccgtgtaaccaaggcactgaatggaactgaaaccccaaggagtcttcttatctttctgctttctagataccaggaaaaaaaagaagcagttgagattattcactctt

SEQ ID NO: 7975 - DNA, 493 bp, Homo sapiens
ggagagagggacacaaattgattggcagaagctgaatgtttttcctttgctagactttcatccaatattgaacaaattattgcatttagctcaccaggttgccacagtctttcaatacatcagaccagcacagtacttattactttatagcaatagcaatgatataaaaatgaaaaatattgcttgaaaatgtcaaagagatttttcttttggtggtggtggttgggtaattcagaccattcattccattgaaaacaagcatcccaaatttgaataactcttaaaaaattcctcaaaagtagcagagctaataagataacgaggaattattgggttaaaattcagaacatgaaattcctggccaggagcagtggctcacatttgtaatcccagcattttggaaggctgagttgggcagattgcttgagcccaggagttcaagatcagcaggggaaacgtaatgaaaaactcatctctatataaaatacaaaaa

SEQ ID NO: 7976 - DNA, 57 bp, Homo sapiens
accctactcataacatcacacaaagtaaattgagttgaacagagttaacactgaatt

SEQ ID NO: 7977 - DNA, 281 bp, Homo sapiens
gcagccacaacctctcaggctcaagccatcctcccacctaagcctcctgagtagcttgggaccaccacaggcatgcaccactgtgcccagctaatttctgttatttttttgtaaagatgggggtctcactatgctacccaggctgtattttctgaactcctgggctcaagcgatcctcctgccttggactcccaaagtgttgggatcacaggcatgagccacaacacctggccaaaacaaatattttcaatgaaagcaaatggtgggcccttctcctcccc

SEQ ID NO: 7978 - DNA, 476 bp, Homo sapiens
cacgagggttcagagaaaagtaggcagagaaaggcagtttaggaggtgacacaagagggaagcctaaggagagagaactggatggagcttcccaggtgatgacagggttgaactccagggctatacccagctgagcaaggagagctttgcctcttcaggagactggaagttggggaagactccaacaggcttgtggtcagaagctcaggagactgggaaggaaaagtgaatttctgaggagtcctagttcatttcattaatttgttcaattctttaacgtatgtttattatggacctactatgttgccagacgctgtgctagctgttagggacacaatgatgaacaaaataggcatagttttttaccccatgagagttagagggtggtggggagagtcattaatcaaatggcacaaacacatgtaaaattaccataaagcgggtgatacagaaaggcgactggtgttaggatagct

SEQ ID NO: 7979 - DNA, 529 bp, Homo sapiens
  misc_feature 391: n = A,T,C or G
ggcacgagatcatattcaagttggcaggtttgactgttcctctgcaccagacatctgtagtaatctgtatgtttttcagccgtctctagcagtatttaaaggacaaggaaccaaagaatatgaaattcatcatggaaagaacattctatatgatatacttgcctttgccaaagaaagtgtgaattctcatgttaccacgcttggacctcaaaattttcctgccaatgacaaagaaccatggcttgttgatttctttgccccctggtgtccaccatgtcgagctttactaccagagttacgaagagcatcaaatcttctttatggtcagcttaagtttggtacactagattgtacagttcatgagggactctgtaacatgtataacattcangcttatccaacaacagtggtattcaaccagtccaacattcatgagtatgaaggacatcactctgctgaacaaatcttggagttcatagaggatcttatgaatccttcagtggtctcccttacacccaccaccttcaac

SEQ ID NO: 7980 - DNA, 593 bp, Homo sapiens
aattcggcacgaggctgagtatttttttcaagtgtatcatttgcctgttaacttaaaattctattttccccctaattctatgtcccagttttggttagtgtgctctgggatttttgacccattccatagtaatagttattactactaccactacagtaaattcttacaagaactttccatgttttttgggaggaggaggaggagtagttacattcaggatcatatacataattgtttagcttcagttctgtatttatatatgtcacttgtaactgactgggatacgttctgagaaatacattctcaggtaatttttgtcattgtgccaatatcatagagtgtacttataaaaacccaggctatatattataacctattctgggcttcaaacctgtacagcatgttactttactgaatactgttggcagttgtaacacaatgataagtatttgtgtatctaaacataccaaaatatagaaaaggtacagtaaaaataagtttaaaaaaaaggtacaccaaaataatcttatgggaccactgtgtatgtggtttgatgtcattatgcagtgcatgactgtactataaatgcttat

SEQ ID NO: 7981 - DNA, 281 bp, Homo sapiens
ggcacgaggaactaatgaaaagtggttgtctctaaccttggtatgctttcagagcatcagggttaaattacctcaacttttggcaggtatactctaaagctattaagtatataatatgggctcggcatggtggctcacacctgtgagccacctagcactttggcagtccaaggcggacagatcacttcaggtcaggagtttgagaccagcctgtccgacgtggtgaaaccccatctctactaaaaatacaaaaaccgagcgtggtgggtggcatgcacctg

SEQ ID NO: 7982 - DNA, 156 bp, Homo sapiens
cagccctcggtcaaaagaatctgttccagaattccccctttcccctccaaagaagaaggatctttccctggaggaaattcagaagaaattagaagctgcagaagaaagacgcaagtcccatgaagctgaggtcttgaagcagctggctgagaaacg

SEQ ID NO: 7983 - DNA, 257 bp, Homo sapiens
cccctgtttacagcaataagcacgtcctcctcccccactcccacttccaggattgtggtttggattgaaaccaagtttacaagtagacacccctgggggggcgggcagtggacaaggatggcaaggggtgggcattggggtgccaggcaggcatgtacagactctatatctctatatataatgtacagacagacagagtcccttccctctttaaccccctgacctttcttgacttcccctttagctttagacccctt

SEQ ID NO: 7984 - DNA, 537 bp, Homo sapiens
tgccaacatggcattctgtttttgaaaagttacatgacactattaagtattgaaaatgttctaactagaaaaacgattttcttaatcatagtttttattgtggggtgtgtatgtaagttttaacgtgcaaattaacatatagaagtcactttgtgaggtttcatttaaatgtatttctcagattttgctgaatctgtaatagccattgaaatatttaagtaccttggctgttcctggcatcaataaacagatttttctttccctcctcatgccatacaaaagttgacaatagctttatcaccacaggaagaaagctgaccatcattgccctttatttgggcccagttgccatggttacagccctttagctaaattgggaatggtaaccaaaataacatttgcataacattcccttgttctgcccacctctttgcacatcttcaaatcaaggttttggtctgatcaccatactatgctgtagcctacttttaggaagtactttaggctaaatagatttgtttcatttatgctaaatgc

SEQ ID NO: 7985 - DNA, 589 bp, Homo sapiens
ggcacgagataacgcccgtggtgccccatccctataggagctggtgagattgcagcctgctgcctcccctccatcagccacagctattggatttcccacccagaatctttaggtaaatgagatcatgattctggaaggaggtggtgtaatgaatctcaaccccggcaacaacctccttcaccagccgccagcctggacagacagctactccacgtgcaatgtttccagtgggttttttggaggccagtggcatgaaattcatcctcagtactggaccaagtaccaggtgtgggagtggctccagcacctcctggacaccaaccagctggatgccaattgtatccctttccaagagttcgacatcaacggcgagcacctctgcagcatgagtttgcaggagttcacccgggcggcagggacggcggggcagctcctctacagcaacttgcagcatctgaagtggaacggccagtgcagtagtgacctgttccagtccacacacaatgtcattgtcaagactgaacaaactgagccttgcatcatgaacacctggaaagacgagaactatttatatgacaccaactatggt

SEQ ID NO: 7986 - DNA, 300 bp, Homo sapiens
gctggacttggcaatggtggtcttgggagacttgctgcctgcttcttggattccatggcaaccctgggacttgcagcctatggatacggcattcggtatgaatatgggattttcaatcagaagatccgagatggatggcaggtagaagaagcagatgattggctcagatatggaaacccttgggagaagtcccgcccagaattcatgctgcctgtgcacttctatggaaaagtagaacacaccaacaccgggaccaagtggattgacactcaagtattcagagtgctcgtatagccagcg

SEQ ID NO: 7987 - DNA, 415 bp, Homo sapiens
agtgacgtcttctgaaggaaagttcagcattttttctcagatatgataataatatatgctaagatcttggccaggcacggtggctcacacctgtaatcccagcactttgggaagccaaggtgggcggatcacttgaggtcaagagtttgctgccttcaaatcaatcattacttcttagcacctcttgaaatagaaaataaaaaatttggccaggcggtggccaggcgcagtggctcatgcctgtaatctcagcactttgggaggctgaggtgggaagatctcttgagcccaggagtttgagaccagactgggcaacacagggagacctcatctctacaaaaaagaaaaaaaaaaattaattagccaggtgtggccccatttgtacaaaaaaaaattttttttaattagctgggca

SEQ ID NO: 7988 - DNA, 558 bp, Homo sapiens
gaattcggcacgagtccaagaggagaagcatgttccaaaacccttaactttgggaatttagaactagcttttttactatcttctgcacagcataacttcagtctccctttactaattcaaggaaatctcagtgaacaaattgtataagggtagatgagctaaaagctcactgagtcattaatttgtcataactcatctaaatacaatgattaggcttgtgtaggtgtccctagtttctctttctaaatcatgtcttagtagggacagagcaataatggtggatcgtggcaacgggaaggaagatgatgtgtcagttatctattgctgtatgacagtcacaaaaccttagtacttactacagaaacaatgatttgtcacattttgtgggttgtctggatggttgttttgcttatatggtgcaggctgagattactcatgcagcttcacagttcttttgcttatatggtgcaggctgagattacacatgcagaggaaagatgggctctgttcctcattcgtatgcctggggccttggtgcgggttgtggcaatggcgtct

SEQ ID NO: 7989 - DNA, 163 bp, Homo sapiens
ggcacgagaggaagcattcacatatcctagaatagatgacttggctatcaaccccttgccggctgtagctccccatttgttgtagtctgtatgtgctatacccaacctagagcagggcgccatgcctggctaattttttttttttactttttacaaaaatggg

SEQ ID NO: 7990 - DNA, 560 bp, Homo sapiens
tataatctgggggtacagagcaagaagaagtactttgactttgaggagattctggcctttgtcaaccaccactgggagctcctgcagcttggcaagctcaccagcaccccagtgacagatcgaggaccacatctcctcaacgctctgaacagttataaaagccggttcctctgcggcaaggagatcaagaagaagaagtgcatcttccgcctgcgcatccgcgtcccacccaacccgccagggaagctgctgcctgacaaaggactgctgccaaatgagaacagcgcctcctctgagctgcgtaagagaggaaagagcaagcctggtttgttgcctcacgaattccagcagcagaaaaggcgagtttatagaagaaaaagatcaaagtttttgctggaagatgctattctccgagcttcgcaatgccgcctaaggacgacaagaagaagaaggacgctggaaagtcggccaagaaagacaaagacccagtgaacaaatccgggggcaaggccaaaaagaagaagtggtccaaaggcaaagttcgggacaagctcaataac

SEQ ID NO: 7991 - DNA, 519 bp, Homo sapiens
aattcggcacgagctttgcagccttttcctgcccttaaatttgatacctttggtgtaggagctgcataagtgacagttgctgcttttacgtttccacgcgtgatcttgaccctgctagcctgaagtgtatggtttctcttagccagttctaatttttgttcaagtggaagatggatgcctgaagtgtagactgctgctagctgaataccatctgggagcataaaggtgacctgaaggtagggtgatatgtcttaaagcactttgtaatgggaatttttatcaccttttaaattggggttccttctctagtgagttttaatgtcagtggtacattcgtagtgttgctctgtctgtagctattaacgtgagttaataaatgggatagcctccacagcttatttttgggaaggttttgctgatacttcctgagaagcccagggaaataaatacgcatagtactggcattctgcatctctttaagatttgtttttatgtgtagtaattgagttttttaaaagc

SEQ ID NO: 7992 - DNA, 530 bp, Homo sapiens
ggcacgagggtctgctgtgcaccaccttggagaaggctctctgtgctgtagtgtggcagctgcctggtacccgggtggcttggaagaagtcagctcccgtcgtagtgagcacctctggaacctgtcctcagagagccacccttattcgccaagtctttttgacaactcgagctgtgccagctcacagcagggcgtgctttctctatcaatcaatcatcaatcaatcaatcaaatcaatcagtgagagcctggctgggctggtgtcattggtcagggaaatgcaagtcttctggtggttctgggtaaaagtggagacaataaatttgctgtgttgttgcttccatactgagaggagtgaggatcactttgccctcgaaggttttgagaaatggcacacggggctggtttccattgtcctccttgcgggatttacagacgtggattagtgctcgacaaatggagagcattttccaaggaagtaagtaagtaaagtaagtaagtaagtaagtaagttgaatctagtatttatt

SEQ ID NO: 7993 - DNA, 106 bp, Homo sapiens
gagaagaagaaggaatggatatacagaaatctgagaatgaagatgacagcgagtgggaagatgtggatgatgagaagggagatagcaatgatgactatgactctgc

SEQ ID NO: 7994 - DNA, 77 bp, Homo sapiens
gagcagtgcaagagtccctgtgctccagttccacactgctggcagggaaggcaaggggggacgggcctggatctggg

SEQ ID NO: 7995 - DNA, 377 bp, Homo sapiens
ggcacgagcctatggagtaattaccagtgcgaagaagaggcgacaaaggccgtgacagagatgaacgggcgcatcgtgggcaccaagccactctacgtggcactggcccagcgcaaagaggagcggaaggccatcttgaccaaccagtacatgcagcgcctctccaccatgcggaccctgagcaaccccctcctgggctcctttcagcagccctccagctacttcctgcctgccatgccccagcctccagcccaggctgcatactatggctgtggcccagtgacacccacccagcctgcccccaggtggacatcccagccacctagaccttcctgtgcctcaatggtccggccaccagttgtgcctcggcgcccccc

SEQ ID NO: 7996 - DNA, 90 bp, Homo sapiens
cctggagacgaccctcacgtccgtccctcacgtctgtccctcggcaagtgctcctcactgtggagagggcagctgctgacctgcagcaag

SEQ ID NO: 7997 - DNA, 225 bp, Homo sapiens
  misc_feature 25, 26: n = A,T,C or G
cgcacgatgatataccgagagcatnnccagcaaggggacagaacttcagtggcgggtggagccccaaacccaagatttccaacccgacaacaacctctttggctttcacctggccttcagctctgccccagcccaggggtaggtgaggcccatcctttttctgcctatgggcctggctctgggcctcctctccccatggctcagcgagcactgagctggccctag

SEQ ID NO: 7998 - DNA, 294 bp, Homo sapiens
gagtcaaggcctacgaacaggtgatgcactaccccggctacggttcccccatgcctggcagctgggccatgggcccggtcacgaacaaaacgggcctggacgcctcgcccctggccgcaaatacctcctactaccagggggtgtactcccggcccattatgaactcctcttaagaagacgacggcttcaggcccggctaactctggcaccccggatcgaggacaagtgagagagcaagtgggggtcgagactttggggagacggtgttgcagagacgcaagggagaagaaatcc

SEQ ID NO: 7999 - DNA, 317 bp, Homo sapiens
ggttctggagcagctttggcacctgaaggctttggaaccaagggcagaggaccccctgtgctcagtgcaaaaatgagacaaacaaaatcagtctacagaggaatagttccataaatgagaactgacatatagatggagaaattgtgctaagcagtttcttgtgcacaaatttgcggagaaaagggaaacttggaaaaacttcgtaataactaaccattagactgggtcatgagacgtcctctgaaactcccaacagttctccaatacctttccatacacttaaattaattgccaacatctagcagtgacccatacat

SEQ ID NO: 8000 - DNA, 461 bp, Homo sapiens
gactgtatctcattggggatacgaagctctacacacttgaagatggtgaaggaatataaaaatctatgtctcacagtccagacttggagtacaagtaataagaagaataaaacttaatcccttaagtagattcaccataagttagctcagagcaattccagtgcaagtatggtctgtgatccagtagtatcttacagacagcaagttgaacattgtgggatgcatgagctattgaggcctttgcagctttctgctacatggaggctagggccagagtcaagatttatgctttgcagcacactggtcagctgtttttgcaaatcagattaaatgatttttaaatgaggctgagagcatgggagatactaatgtgtgtttccttgtgagctactgcataagttaggaaattgaaatacagaaagatgaaaagtgatttgcccaagcatatagatcaaagctgt

SEQ ID NO: 8001 - DNA, 539 bp, Homo sapiens
tgaggtccttcttgctgtgtcatccagagagtatgagaaagccagaaaggaaggaagccaaatttatcttttatcagtaaccaactcccaagataactaacccactcctgcaataacaacattaatccattcatgagagcagagccctcgtgacctaattacctcttaaaggttccacctctcaacaccattgcattgggatttaagttttcaacgcatgaacactttaagattcttaaagtggtttcttgagatagaatgtactgctatggcttgaatgtgtctctcacattcaagccatagcagttgtgcacatatactataaggcaacaggaatcatccataaacagggggtatgagtaagagtaaggtaactataaatagaaaacatatgtactgtgtacaaatagaaggtaagcttttaaaatggcattggcaggagcactgaagcagagatttcaggggacaagttatcataatggtgggggaacagcattcctgctgctgagtgggcttagaccagcctcctctgacttttt

SEQ ID NO: 8002 - DNA, 438 bp, Homo sapiens
ggcacgaggtggctatccatcaacataagtaaaaaaaaaaaacactttatctccctcccccatttagattatttattaacatattttaaaaatcagatgagttctataaataatttagagaagtgagagtatttatttttggcatgtttggcccaccacacagactctgtgtgtgtatgtgtgtgtttatatgtgtatgtgtgtgacagaaaaatctgtagagaagaggcacatctatggctactgttcaaatacataaagataaatttattttcacacagtccacaaggggtatatcttgtagttttcagaaaagcctttggaaatctggatcagaaaatagataccatggtttgtgcaattatgtagtaaaaaaggcaaatcttttcacctctggctattcctgagaccccaggaagtcaggaaaagcctttcagc

SEQ ID NO: 8003 - DNA, 631 bp, Homo sapiens
atttaaattttcttatacttgacatgtggctcttgtcaattttataacttggccaacatcatacagttgtagtgatgaagctgagacttaaatccaggattttaaatctaaaactaatatttctaaccatatcagtgtttgtttttattcaattggcaacactttaatgtttcttttctttttatcagggcaaaatttgatccctataaggataaaatatattcttaataagttgaaaggttgtatattttaaaatttttggttgccgggtacagtggctcatgcctgtaatcccaacactttgggaggccaagatgggaggatcacctgaggtcaggagttcgagaccagcctgaccgacatggtgaaaccccctccctactaaagatacaaaattagccaggcatggtggcacatgcctgtaatcccagctactcgagaggctgaggcagaagaattgcttgaccctattttattttgatagtgaatttatccatgtttattttaattatgaaatatgcaaccagcccaaatgcccatcaattaattagtggataaataaattgtggtatatgtataccatggaatactattcagccataaaaaggaatgaaataatggcattcacagc

SEQ ID NO: 8004 - DNA, 300 bp, Homo sapiens
caaatggagtccagaggaggctgtaagagccatcgccaagatccggtcatacatccacatcaggcctggccagctggatgttcttaaagagttccacaagcagattactgcacgggcaacaaaggatgggacttttgtcatttcaaagacatgatgtatggggattagaaagaactcaagacactcctgcttgatacagaacaaaaagagcttaacaggaccaacacggcttaagcccagacttgacgtaacagaaatgtgccaataggtaataggtaatttttctttctctgacttgct

SEQ ID NO: 8005 - DNA, 520 bp, Homo sapiens
ctggtcttgaactcctgacttcaggtgatccacccgtcttggcctcccaaagtgctgggattacaggcgtgagcccaccgcgcctggcttcggaattgcatcttaatctctgtggcggctgctattttgttttctaagttcatgagcacaggtggctgcctctatctttctcctccacttaagcaggaacaattcaggaggcagactccacccaatgctgcaaatcggccctattatcattgaccctgacagaatttcaggagtgtcaggccactccatactgcaaacagtacaggttgcttataatcgccaggaggaaagaaaatatccagcttcttcctggtgcaatcatggccataggaggaaggaatcataggaaacagagcaaaggaacaaagttcaaaacctgactttccacttggaagttctctcactaatcttaaaatcaaatataaagcttaaattgtaaatttagcggcatttccctctcagtaccctttccatattcccacaggtaagc

SEQ ID NO: 8006 - DNA, 381 bp, Homo sapiens
tttcttaacatttctagttgtctgcaaccatccctgtcttacattacattattaagttagttctattacaagactaatgaatgacagaatagagcaaacatggactttggagtcagacagacatgagtcagataagagttcaaacccactgactgccgtaaacttgggcaagaaatttaaccctgtcagggcctcagtgtactcattagtaaaggtaataataagtctgtaggaaataatacctacatacttacatttgacatatatttaatgctccagcttaataaggttggagtattcgataactgataaaaaaccttgcacagtattgagcaggtaacagacattcagtaaatggcagtaccattccgatgatacttt

SEQ ID NO: 8007 - DNA, 325 bp, Homo sapiens
agaatagctttcatcccaaaatttgcttggaaatagttagatcatttgatttaattttcacttttataaaataagtgtaggaatcctaaaattgattacttcatttgaaacacaaattcagtaggacgtaatgcatgaaataatttaatttttgacatgtacatcgaatcataatttaaaaacaaggtctgaccaggtgtagtgcctcatgcctgtaattccagcactttgggaggccaaagtgggtggatcacctgaggtcaggagtttgagaccagcctggccaacatggtgagaccccatctctacaaaaaatacaaaaatt

SEQ ID NO: 8008 - DNA, 359 bp, Homo sapiens
gagtctcactctgttgcccaggctggagtgcaatggtgtgatctctgctcactgcaacctccgcagcctgggttcacgccattctcctgcctcagcctaccaagtagttgggagaataggcgacttccaccactctcgcatttgtgataggactttttaaaggactcggagtccaaatactaaaaacaggatggccggaatctccagacctgatgatcttgctgcctttatatttaaagtgccaggactatacgccgaataatgggtggcccccttgaagacgcaaccctgtcctttgcttatgaattgggtgttgtaccgattctcctgatatccctataggcaattgtcggaaatag

SEQ ID NO: 8009 - DNA, 355 bp, Homo sapiens
ctcttgcggtgagggaaagcaaggggaccatcccttgccaccattatctggtaaatcccccatgtgatgcctaatgccttccatccaggcatctaggcctaccccaaatcagcaagtttgaaaggactttgttgtttatatatacatttgcttcattcagctatgaagcaccctgtctcttaccagacctgcaccctccaccccactgatttgcttttgggttgttaaagggttgcgatacactgcacttgccagacatacctctaaaatagctgttgactcttgcctcatccctaaactctcctgctgggagacccctcctattctatatgcgacgctttcatgtgtgtacccg

SEQ ID NO: 8010 - DNA, 284 bp, Homo sapiens
taaggtgtcttgatgtagtaagcaagatagtttttacagtcctaggcttattacaagtttagtaaccccagtggactgagaaaatctttctcaatagctctggcaaaaaattcctctgggaaaatatgactgatgggagtttggatcatttgcccattcttgaaccaatcattgtatagttagccctctgtatataagggttccgcatctgtgtattcaaccaatcgtggatgaaaaatatttggaaaaggctgggcgtggtggtggttcatgcctgtaatccc

SEQ ID NO: 8011 - DNA, 355 bp, Homo sapiens
gatggctccccctatgaaagttgtccagtgagcagggtcaaggtttaggtttggggtacggacatgagtgcaggagccttactctcctgtgtgttgtcagggatggataaaggggatgaagttggaggggtttagtgaatggttgggacagcaaatttcagagaagagcatttggaaataattttctcaaatatatatttttaaaatccatatttgatttttttccctcagggattcccaagcatagtagagctaaaatgaattaatttgggtaaaagtaaagttaaggctaagttaggaaacacttttaaaaacaggaacctgctgcgtgcggtggctcctgccttgtagtccc

SEQ ID NO: 8012 - DNA, 382 bp, Homo sapiens
tgatccacccgcctcagcctcccaaagtgctgggactatagacatgagccaccaaacttggctagaaattttctcttttttcccttagacggagtcttgctctgtcacccaggctggagtgcagtggcggaatctcgactcactggaatctatgactcccaagatcaagagagtttcctacctaagactcacgagcaactgggattacagacgcctgacagcatcgcctggctaaagattatattaatggtcgagatgcgggaatatactgaaggttacgccggcgacaagactacttaatggggcggaggggagaatacgacttaaacggtcccgcttggacaagacgaggaaaagcctctatttgcgagaacaaaagaat

SEQ ID NO: 8013 - DNA, 338 bp, Homo sapiens
tgcagtggcacatacttgtagtccaagcttcagaaggctcaagtgggaggatcgcttacacccaggagattgaggctgcaatgagctgtgatagtgccactgcactcagcctgaatgacagagggacaccctgtctcaaaaaaaaagtcagtttctcacttggactaactactttttaactgttaatagctggtggctgccatactggacagcccaagactaaaggctcaatgggctgttctccactctctgtccaagggaaccttcctttatgtgctttttgctttcaagatggggtcttgcactccagccggggcgacagaacaagactccatctc

SEQ ID NO: 8014 - DNA, 448 bp, Homo sapiens
ctgttttgtcctcattaacctctaatgcttgtctttcatatttctttactgtcatatgatatagcagaatagagttattgatttcaatggtgcaaaatattttgattactaaaaaataccattttcccctgatgaattgactgatgttttaaaaatccatccaacaagtaactgttgaatcctataatatagattgctttgttaaggcaaatggtgaatgcaaaatagtgaacactataatctctggaaaccaaataaaaagacttcggctctcagaagtatacagcaactacatattttaccaccaaccacatgcccaaccaatggtatatacaaattaactattcttataatgaaaaaccttatcccaatcataaatgcgtctccattcggaataaaaataactgtaacatttgaaaaggaaagctttgtcacaaaacaatgacct

SEQ ID NO: 8015 - DNA, 353 bp, Homo sapiens
tgctgtcgtcttggagctttcatttactaatgaggaacaaatgatagtcatgttatgacaatgtgttataaattaacaatcctcttttaaactagatttataaaacctacacacttgagggtttccatttgttctatctagatgtattttgagaaatctgaaacaaaagcttgtttttttgtttgtttgtttgttgtttgaaacagtcttgctctgtcacccagcctggagtgcagtggtgcgatcttggctcactgttaactcggcctcccagattcaagcgattctcctgcctcagcctcctgataagctgggattgcaggcgcgcatcaccacgcccaacataatgaaac

SEQ ID NO: 8016 - DNA, 319 bp, Homo sapiens
cattatgtctacggaggagtgtctctgttatatcagtaggaaatcaaggtggctttttcagagactgtgttggttcctttcaaatatttggaaacactgacagaaggagacattttagatttcctcaaagtttacactgcccatttttggggggaggcatgcctagtttctttgaaactggctatgttttccttaatacctgatttgcctttctctgtaatccttaaaataaaatttgttaaaagtgttcttcattatggaaacaatatatatgtggtaaacagtatagaatggcatacctcattcatacttctccttc

SEQ ID NO: 8017 - DNA, 299 bp, Homo sapiens
aattactgaaactactactttgggctcagaacgagctggaccagaagaaagtaaaatatcccaaaatgacagacctcagcaagggtgtgattgaggagcccaagtagcgcctgcgcttgcgtggtggatccaacaccagccctgcgtcgtgggacttgcctcagatcagcctgcgactgcaagattcttactgcagtagaaaactctttttctcccttgtacttttttttgacctggcatctttttatagggaaaaatggcctttgtaggcagtggaaaacttgcaaggaaagctgccg

SEQ ID NO: 8018 - DNA, 161 bp, Homo sapiens
tgggaaaacgtgactcgggttcctctagagaagcagtggcagatgagagtacaaaggcaatggggagctggaggaaggccttaagcaggggcggcggcatggtaaggtttgtaggaagactggctgcagcagaagcagggagaccagtgtggagtctgctc

SEQ ID NO: 8019 - DNA, 174 bp, Homo sapiens
gtagtgttttcccctggtttatacctcttcttctagtttaacttttactggtcctaagcatttgtcactcaaaaaataccattttatggtgttgggaaaactggctagccgcatgcagaaaactgaaactggaccccttccttacactttatacaaaaattaactcatgatgga

SEQ ID NO: 8020 - DNA, 214 bp, Homo sapiens
agatgcctgctatcctgactaatttaagtcattgctgactgcatagctctttttcttgagaggctctccattttgattcagaaagttagcatatttattaccaatgaatttgaaaccagggcttttttttttttgggggaatgaaaacccacccccttgcccccaaataattaaaaatgcccccttggttttttttttaaggaaacccctttta

SEQ ID NO: 8021 - DNA, 437 bp, Homo sapiens
tgtcccaatattggagagtgttggggaggtggagaatatgccaccgccacagccacgatcatgttgatgggtgacacatgtacaagaggttgcagattttgttctgttaagactgcaagaaatcctcctccactggatgccagtgagccctacaatactgcaaaggcaattgcagagtggggtctggattatgttgtcctgacatctgtggatcgagatgatatgcctgatgggggagctgaacacattgcaaagaccgtatcatatttaaaggaaaggaatccaaaaatccttgtggagtgtcttactcctgattttcgaggtgatctcaaagcaatagaaaaagttgctctgtcaggattagatgtgtatgcacataatgtagaaacagtcccggaattacagagtaaggttcgtgatcctcgggccaattttga

SEQ ID NO: 8022 - DNA, 325 bp, Homo sapiens
gaaggtgtgattttttcaggagctggaagtcttaaaaaagccttgtaaatgcctatattgtgggcttttaacgtatttaagggaccacttaagacgagattaaatgggctcttctggatttgttcctcatttgtcacaggtgtcttgtgattgaaaatcatgagcgaagtgaaattgcattgaatttcaagggaatttagtatgtaaatcgtgccttaaaaacacatctgttgtcttttctgtgtttggtcgatattaataatggcaaaatttttgcctatctagtatcttcaaattgtagtctttgtaacaaccaaataacctt

SEQ ID NO: 8023 - DNA, 269 bp, Homo sapiens
atggagacattcctgctgaatcgccttctcacctcctcggcaattgctcattctagggttgggcatcatagttggtcagtcttaattcccatgccaaaggacaaacaggtgtgacatttggatagatgaatactgggattggctctggagcatgtgttttgagttgaaccttgcagtcctttctctacgcccgtggattttgtggaaacactttgcaatctctttgtctttttttttttaccaaaactagttacattggaatgcttact

SEQ ID NO: 8024 - DNA, 289 bp, Homo sapiens
tcacaatgctttatatttttcagagaatatttgcattcattacatcaactgcaattcatagggattctgtgagctgatatgtcattacattacttctcaggtgaataatttagtggacttattaaaaattagaaaaaattagaaaccaggcatggtggctcatgcctgtaatcccagcactttgggaggctgaggcgggtggttcacctgaggtcaggagttcgagactagcctggccaacatgatgaaaccccatctatactaaaaatacaaaaattagctgggtgtg

SEQ ID NO: 8025 - DNA, 413 bp, Homo sapiens
ccgttgctgtcgaaagaatccacactgcccaggtcggggagcagtggtggccagcagccctcagggatgatagagggtgtcaagaggtatgaacaggagcatgctgctatccaggataagctcttccaggtggcaaagagggaaagagaggctgccaccaagcactccaaggcatccctgcccacgggcgaaggcagcatcagccatgaggagcagaagtcagtccggctggccagggagctggagagcagagaggcagagctaagacgccgtgacaccttctacaaggagcagctggagcgtattgagaggaagaatgctgagatgtataaactgtcttcagagcaattccatgaggcagcctcaaagatggagagcacaataaagccccgcagggtggagcccgtctgctc

SEQ ID NO: 8026 - DNA, 358 bp, Homo sapiens
gtattgactgaactaccagatattgaggcttctttgcttattagctgcatgactttgggcaagtcaagttccacctgagccttgcaagtcaggcctggggagtccaaccacccagaacctttgagtctctgttagagagcaagaccctctcttaagaaacaaaaataaaacaaaaaaagagtattgggatatggggagtttggctcctgtagaaagggtagtctgggaggcctgttagaggagttaacattggacctgagacctgaggatgaacagaagccatcctgaaagaactgggaaaataaagaggtggccaggcgtggtggcgcacgcctgtaatcccatcactttgggaagc

SEQ ID NO: 8027 - DNA, 311 bp, Homo sapiens
acagaaccacttcaactccttctttctctccaagtgtacacaatgtgacagggactgtttctcagaagacatctccttcaggtgaaacagctacctcatccctctgtagtgtcacaaacacatccatgatgacatcagagaagataacagtgacaacctccacaggctccactcttggaaacccaggggagacatcatcagtacctgttactggaagtcttatgccagtcacctcagcagccttagtaacagttgatccagaaggacaatcaccagcaactttctcaaggacttctactcaggacacaaca

SEQ ID NO: 8028 - DNA, 524 bp, Homo sapiens
ggtcataagaaaaaatacttgctaaatatttgaaagaacagctacaatatctctcagtgggaaaaatagaggcagaaagctagtggcaaaatctctgagtgactgtttcccattcttaacccagtatcaaatatgctatggaatcagcactacagagaagctgatataatgggaggcagaatgccattacaccctttttttcccctcaggatcttagaatcagtcaccggtggttttgcaaaaactactactaacaacaacaacattttaaaaaagaaacctcatcttcagagaaagcactggctaaccggtctccattttcagttgctgggataaagaacctatgtgggccaggcgcagtggctcatgcctgtaatcccagcactttgggaggctgaggcaggcagatcacttgaggccaggagttcgagaccagcctggccaacatggcgaaaccctgttgctactgaaaatacaaaattttagccaggcatggtggcatgcgcctgtagtccctactgctc

SEQ ID NO: 8029 - DNA, 574 bp, Homo sapiens
ttttcaacgagaacttattcatctatccaacattcttcatccattcaacactcataaatatttagtgggcattcacaatattccaagttcaaacttgactttcagtgagttcacagataacggtttccaggtggctaaatttgacacatctgggagtcaggcaacaggaattcaggttaaagaaaacaaagagaaagatcagatacttgggcagatagtgaagccagtgagagaacctgggccctcaggcccctggatccatcctctgcagagaggtgctcaatcctttgcagctttgcagagaggtgctcaatctaaattcaggaaaacaaactctcctatcacagatagggaaattgaggctgatcaaactcttgtacaattttgtttattccatagcccctatgtcaccctatcaccgtattaccacttctatctttgtaagtttctactgaaaccccttatcttagtacaaaaaggcttccaagaatacaaaaattagccaagtgtggtggcaggcgcctgtaatcccagctactcaggaggccgaggaaggagaatcaattgaacctgg

SEQ ID NO: 8030 - DNA, 398 bp, Homo sapiens
atacaagaacagctggatttggcccgtgggccctaacttcccgaaagcccctggttaatgtagcctgccccttgtttcccactctatataactataggactccagcccggcacggtggcttacgcctgtcatcccagcactttgggaggccgaggcgggcggatcacctgaggtcaggagttcgaaaccagcctgaccaacatggagaaaccccgtctctactaaaaatacaaaattagcctggcgtggtggtgcatgcctgtaatcccagctacttgggaggccgagggaggagaattgcttgaaatctgggaggcagaggttgtggtgagccgagatcatgccattgcactccagcctgggcaacaagagcgaaactctatctcaaaaacagcaag

SEQ ID NO: 8031 - DNA, 418 bp, Homo sapiens
cagatcacctacaggagagatggccacaccaggaacctgtttgtgtatcatgaaagtgggaaggtgagatgcctggagttgccacctccgcctccagctcgcaccccaggacttggcaggtgcagctcaccacctcccctgctcactggtgctgtgctcagctgcctcttgagattttctgctaccatttgccttaatctatcattgcctcccagtctgagataaagatatgaggagggcagggtgagatcagggagaggaacctggcaagtaccatggctatatctggacagtgcacagccaccaatgaaagtccagttacagaagggactatgcccagggatgcaaagccaggtagggccagaggttctgaatacgggggaggaactgatggacagtcaggcagcagtgcaccccg

SEQ ID NO: 8032 - DNA, 561 bp, Homo sapiens
gtgtatccaggtaaaaagggcattttgcagtcttcctcgctgtttatgatggccaggtaattcagttctcttcagtgcagatgtctcctggggactttttgggaaaagtagtaatctcatatctgtgtgaaaaggcaacacatccagcccaaagtgtatgctatcagtctcacttgtagttaagggtggctgtgaaatacaattctgtcaatttggacatatcacacttctcctgggtatctgagaaaaatttgcctttcctgacatggacaccccttcttccttactatatccagcttatttctactcaaagtgtgccatagcttgggtaactcgggcagcagactctgcgactgagattagtatgcagagagcttgttaggagttctcataggatcaaaacttgaggagcaaagaaaggagagtatgattgggcacaggagggaagaggagaggtaatgcagtgtgaacagaaagttcagacaaagctacagggcgctctcgagataagatgacccttcagtattattccatgttgcacaaaaaagactgatctctatg

SEQ ID NO: 8033 - DNA, 559 bp, Homo sapiens
tggtcttcactatttttaaaccatctcagctaaatcttttatgttattgtatttttaattctggtttgatccctggaggtgaaggctacagtgaaccatgattacaccactgcatctcagcctgggtgacagagcaagaccctgtctttttataaagagagaaagtgagagaaaaagagaaagagaaagagagaaagaaaaaggaaagaaagaaagagagaaaagaaagcaagaaagagagagaaagaaagaaaagaaagctgtgaagatgatacttgttaaccagaatgaaagctcatttggtcagtagattaaatacaaataataattctatcattatgtctcaggcagtgtgctataagtgattattacgtgtcatcttatttcatccttacagtaatctgttttgggtaaattttaggataatttctggctgggtgcggtggcttacgcctgtaatcccagcactttgggaggccgagacaggcggatcacctgaggtcaggagtttgagaccaggctggccaacatggtgaaatcctgtctctactaaaaatac

SEQ ID NO: 8034 - DNA, 331 bp, Homo sapiens
  misc_feature 331: n = A,T,C or G
gcactacacatagttatttctgaaaagaaatcagtatgtaaatagaaatccaacagaaatgataggtgtactatcaattctttattgttgggttcgaaagcaatcacttgaggttaaaagataattttaaaatattaatattctcatatttactattttggtcccaatgcatgtgtataccaaaatagtaatatgtagcacacatgatttaattgctcttttcaaaaacacttaaaaggaatctatgtttaaagaatattcacataatcatacaggcatggtggctcactcctgtaatcccagcactttgggaggccgaagtgggtggatn

SEQ ID NO: 8035 - DNA, 451 bp, Homo sapiens
taagatcttatggacttacatgcatagaaagtaaataaaatgtagtcgcttccttctcactcttctgtgctttcccacacgctgctccttcccttggaaacaccccttctctgcctcaccacagtaactctactcatctcaaaaactcactttaaacatttactgcttccaaggctctttgcttctaacccagcatttgatatggtattattggatggtaatatttttcccatctaaacaaagagctccttgagggcaggggttgtatcttttgtttctatatcctcaaccctaagataaattgcgtataaagcaagaatttgcatgtaaaatatttctttagcttcatgttttactgaaagttcaacctccaacatgcaacaaaaattgctattaaaactcacactgcccatctgaaaaaattttccaacatttatttatttaaaatcta

SEQ ID NO: 8036 - DNA, 55 bp, Homo sapiens
cctacggttgcgatgagacgacacaacggaatgcacttttacatgatgccaactc

SEQ ID NO: 8037 - DNA, 68 bp, Homo sapiens
ggactatgagaatcgaacccatccctgagaatccaaaattctccgtgccacctatcacaccccatccg

SEQ ID NO: 8038 - DNA, 352 bp, Homo sapiens
atagatgagaggtaatgtctttacatgggaacaatccaataaagtcctacaataatatagggcaataaattttggagagctttaattactgtgcaagaaaaatattctagttgaaatgaagagtctccttggcctgtttccgcacagcagagcaaaccgtcttctccattcacatttcttggagttaagagcctggcctaggctgggcgtggtggctcacacctgtaattccaacactttggggggccaaagtgggtggatcacctgaagtcaggagtttgatatatcactgggcaatacaatgaaacactgtgtctacaatatattcaagaattatccacgtgtgggtacg

SEQ ID NO: 8039 - DNA, 187 bp, Homo sapiens
cactgctttgtaagtcttttcttattttttcatatgtacatttgacttttccagctaggctgtaagttccctaagggcagggtgcatattttccatatgttttggcacctatactaggcctgggtatatagtaggcaattaataatatttgttaaggctgggtgtggtggcttatgccagtaatcat

SEQ ID NO: 8040 - DNA, 470 bp, Homo sapiens
tgaggattgcaagtaagtgttaatagggcagacctccaaaatgagccagatacaaaggtatttggcagaggaaaaataattcactaacttgaaatagcagataagcaaccaatggagttagaatcaaatgccattatttgagaaaggcgttcagtaaaattccttcatacaaattaacaaatatttatgcagaaactcctatgtgaaaaacattgtgccaggctcagttatgggagtggggtggggaggggaacatgaagataaataagacaatttcttttctcaaggaaatgaccacataattggagatattggccaataaactataatgcaacacaaagaagttagttaagatagattaagaagagggagaaacatcatctgcatgaaaagtagggtggctatcagtgagaatggagagagaagatattcagatattcaagatattcaaatatatgaggcaaaataca

SEQ ID NO: 8041 - DNA, 453 bp, Homo sapiens
ggcacgagggtgggcaggcagctgcacctcattcctgagaccatccggggcagggcttttctgactgagacacacgaccctgacaccagagagaattctgtatttccccacccttgcaggggctgcccctagagaatcccatcgggtgagcccaggaacccacaagttctgcacccctcggatgggtaggcattttgagggcatgaggtaggcgttacagtgataagatacacagggctctaaaccacagaggccccggttcaaatcctgcctcttctaagtacaaattagttggctttgggaagtgagtcaactttgccccgggctgcagtttcctcgctgtcaaatgcatgggagagggtgtgtgaagagttaaaatgtatttagatttcactgtagtgtctcctccaacatgatctcacactccttttacagtataagcaggctgatgtc

SEQ ID NO: 8042 - DNA, 527 bp, Homo sapiens
atgttcactttatgaaaggaagtaccaggaaaaataatagaaaataatgaacatgagtggagatatagatgaaagctaaataagcattcactgtgtcttatcaagagtgactaataagctgacagctttatttgagttctggtaagcaaattaatatcatataaatcattacaatttggataaagcaaaacctgttatcaaatttaaaaactgtttaataattcaacactccagtggtttgccttgtttaagcaaaaggattctggccaagatattttacttcagctctctgccaaagatgacaattgtacagtgatttgtaccagaagggggacttaagtctttggtaaggatcgccaacagctggaaagtatttattgcataaaatatgtccatgatactttaccaacattgtagagaatgtaagctataaatacagtttatattacaaagagtttacaatctaaaattaaacacaagaatataacggaaaaatcaccaaaacaaattaaatggaaaataatcat

SEQ ID NO: 8043 - DNA, 364 bp, Homo sapiens
cagccccccagtttttatgtggacatgttttcatctctcttggatatatacctaggagtggaattgcttggttgtgtggcaattctatgtttagcattcgaagaaattcattgaatggtaagctgaaaagtgacgtggttgaatttctgatttcagaaagatcactgatgtgatgagaatgaataactctctggagtgctaagatgtgggggcagggagctagcttagtatattattgcaaaatcttgccaaagatgagctgatcaaatgagaggaagcatgaactaagaagggagcagcaggagtggaaaagagagatataatgatgctagtacagagtttatatttacagaacttgaaatgc

SEQ ID NO: 8044 - DNA, 610 bp, Homo sapiens
agattataccaaaaaaatgcgatgcgtgtgggacagcttttaaagtgtttgaaagattttgcattcaacattcaggctatcagtgactccttgagtgaactatgtgaaaataagcgtgacaatgtagtcctggcatttaaacaattgagtcaaaccttttatgagaaacttcaagaaatgcaaattcaaatgagtcaaaatcatttagaataacaccatggaaaactttcaagtctgattatgtggtatttatccctttgcaaggagagatataattaagcttacacaatgaaatggaaaaaatgtttgtcttggagtcaaacagaattaaactcagataccagctctgctattttctaactgaatgactttaagttatgtaatatatctgagctttaacttcatttttggcaaaaccagagtaaaaatgaatacctctagttgttttgaggattaaatgagataatgtaagaaaagtgattgggattgggtggtgacttaatgaacggtagtggttttttaagtagttaatgtatagcaaaattagtttcacattgtcaagttttcaatacatccccaagttaaattgattttaaattaatgatcaata

SEQ ID NO: 8045 - DNA, 491 bp, Homo sapiens
ggcacgagccactgctacagccttagtccagactttctctttctttaatctaggctgttaatatagcctaataaatgttccgggccctccagtctatttgtcattcaatcacttgtttcagaaatattactaggcacttattttatgccatggcacaattctaggtgctgaagacgacacagctgcgaataaaacagacatgggacctgttcttgtggagcttatactttagtgcgtagagaaactaaacagagaggtatgaaagatagtgatgggacataattctactgaaggttgggtgatcaaagaagctttgctgaagagatttgtgttgatgttggtattttctaaaaacagatgaccaatatggttaaatttggttctgagggagaaggtaacatgagatgagctcagataattagacaggggccagatcatttatatgcaaattagattatgagataacagaatggtatatttccctcatccta

SEQ ID NO: 8046 - DNA, 601 bp, Homo sapiens
gacattgtgattgcaaaaagcccaagtgatccacaatcaaatgtatgactgtgacaataactgggaatgaatcaatgaaattgttgaagacatcactcctctaataaatgtggatgaaaatgtggcagaattggttggtatactcaaagaacctcacttccagtcactgttggaggcccatgatattgtggcatcaaagtgttatgattcacctccatcaagcccagaaatgaataattcttctatcaataatcagttattaccagtagatgccattcgtattcttggtattcacaaaagagctggggaaccactgggtgtgacatttagggttgaaaataatgatctggtaattgcccgaatcctccatgggggaatgatagatcgacaaggtctacttcatgtgggagatataattaaagaagtcaatggccatgaggttggaaataatccaaaggaattacaagaattactgaaaaatattagtggaagtgtcaccctaaaaatcttaccaagttatagagataccattactcctcaacaggtatttgtgaagtgtcattttgattataatccatacaatgacaacctaataccttgc

SEQ ID NO: 8047 - DNA, 473 bp, Homo sapiens
  misc_feature 193: n = A,T,C or G
ggcacgagcattagtgtaagtgcaggtaattgcttcattaggacatatgtattgaaggagggagggcaagtctatagcatggtgataaaaacaggcctcaccctctttctctacccacacaggagcatctcagcttgacttcagggatccaggagccaccagccaccctgtaaacagcccagattaatcctgngtttcagtgtcatgggaggaaggaaggatgacctagtaaagagcaacttacttactttctttggggtggtaactcattgctgaactctggatggcactggtgcgttcaaggcaatgtgattgaatcattggggattattactgaattagggagcaaagtattcttatggaagctgtatgctttctgaggctcaccaggccggatggcatgagccctatcctctgtttgagttatttgactggctttttaagggagtctccattttcattctggccatgac

SEQ ID NO: 8048 - DNA, 300 bp, Homo sapiens
ttttgcacaagacaggttgctgaggggtcggcaagcatctgacttgcccaatcccctggatatggtgagccccgccatgcttttattctgtatcgcttttgtctttattgctgctttcaacatttacgtttggttacagttaactattttcggagtgtggtgattgaagacaatttcatcatcccactgtactttttttttgagagggagtttcactcttgttgcccaggctggagtgcaatggcacgatcttggctcactgcaacctctgcctcctgggttcaagcaattctcctgcct

SEQ ID NO: 8049 - DNA, 515 bp, Homo sapiens
ggcacgagcaagaattgctgctgctgttttttttttaattttattttttatttttaaagactttcctaccttctcattgagagagagaaagatgcccagagttaaaataggaggtgcttgggtattttgttgaacttcacaagttaaactggcgaatggcgtccatcagctgttattcagtccttgaacagagcagatatgtttgtgcgaggacaaagaagatgcctcaaagacaaagaagaagatgcctcgtcgtcccctgagctcccacacggcatctgcacatcaccagctcagcatttagcacactggattgacactgccatgttaggtgaggtgacggcatgccctagagtgaaggaatctacagcaatatgatagctaaatgccacatgaagttctggattggatcctggattgggaaaaaacatggctctaaagggcagtattgggacaattggtgaaatttaaatgtagtctatgtattaggggataatgctgttatcaattataca

SEQ ID NO: 8050 - DNA, 561 bp, Homo sapiens
ggcacgagcctaggcgtagtcatttctttattagtccttactttatttttcaaagttacgtaataaatgtctatgtttctaagctatctttagatttgtaaaagggctaaaatgttacttttaaacatgtttggtttattcaaatttgtttataaatctctcctttgtacccctggctaccacccctccccactcctctgcctaaaactaagggaaaatcctgtctttgcccatagcttcagaatgttctgcaattttagacttttacttttaactgatcactgttaagcaagggaggaaatttaccacttctctttgtgatgtaatattgcacagtgaccctaagtggaagccttcctgtgtcctggatgtgagctctgcgctgtcagtggttggcttgtaagctctggctccaagtgttctgaggtgcaaggaaccgatcttgtgcagtagaaagagcttttggaagttggcaagtagcaaggctagttctcatacattctatgctctggccacctttttctgtggcaggaaaacaaaacaggcaaatgcacacaaact

SEQ ID NO: 8051 - DNA, 559 bp, Homo sapiens
cgaggtgcgtctagaggaaatgtactgttttgcagataataagtattgatcagacatgcatttttacctctgctgtgggattttagtctcattactttgttgatctactttgtagttaacctagagaagttaacacagccattgctacagagctttctgccacttgagttccagaattccagaatccagtttcctagggattgtggggagtaaaaagaggtatagggtatggtccctgtatgggagcaatacagtctttattgagtagtgtctatattgtcttgtttactcaggtatttcatatatacattaaaaaaaccgacaataaaaatgaacatatgaaaacttccttatttgtgatacatgagtaaatgttgatgagattagagaaggggtccaaaaaggtttctctgaggatatgagttgagttgcccatcaggatggattgggtagtggatgctgatgtgggcaaacactggaatagacctcagatgctgcatgatgtgcctgtgtaacacagttgaaatttggtgatcaagggacatattacagcagggta

SEQ ID NO: 8052 - DNA, 124 bp, Homo sapiens
gaatttgaggctgcagtgaactggaacggtgtcactgtacttcagcctggtgacatagcgagttgctgtgtcaaacaccatcaccaccaccagcaccaagaacaatatcaacaaaacttggctg

SEQ ID NO: 8053 - DNA, 327 bp, Homo sapiens
gctggagtgcaatggtgcaatctccactcactgcaacctctgccttctgggctctgctccatctcctgcttcagcctcctgagtaactgggactcagtcatgagccaccatgcccggctaattgtttttgtatttttagtagagacggggtttctctatgttggccaggctggtctcaaactcctgcctgaagtggtctgccagccctggcctcccaaagtgctggggttacaggcatgagccaccatgcccagccacattaactttttaaataagacaaatgtgcccataataattacatttattccaaattgtgttagttgtcct

SEQ ID NO: 8054 - DNA, 561 bp, Homo sapiens
tccttacccttcgagcagactgtgcaactttccagtcattcttactttccaacattaaaaaatctaagctagtcatatgttcttccaatttaaatcttctttctcccaactcagacctgatctcgtttcaagattctccggaggagaagggaaacaaggactattcttttagtatttatctcctccaacaacctgagatttaggcagttctcttgaggtttctttactgggcttgaggtaagggaaggagtttcagtctcttttcctgataattcttgccatttggatgatacagtaaagatttcagaatcagtttgcatccactttggcaattctttcataggtaatctaaaacctctttttggaataaagaaaaattatcacctattgttattagttttaggacattaactcagaccagaaaaatgtcctatttaataatttgttatacatattttaaattttaacagatattaataaatagtagtagtttaacaaattttcacttccactaaaattatatcaaacacaatttatcctcatccaaattttgaatctttg

SEQ ID NO: 8055 - DNA, 56 bp, Homo sapiens
catggtatgtgtggccaggggcagggctcatgcctataatcccagcacattgagag

SEQ ID NO: 8056 - DNA, 634 bp, Homo sapiens
tgacaactgagcttaaactaattaggaatctatgttgtgtgggtctagtgataataaaagagatcagaaaattcatccaaaggcagcacagacaggcatccaaacagggactgtatctattctcctatcatctacacagaaattgttccataatttactgactgaaaaacaaaaatcattataccaaaagagttggctttttctttaaaacctttgactaaatatttccaaaccagcagaattccaatcaattttgcttttaaatgaaccctgacttactaccccaaatgacttattctaatagttttcaagaaaagtaaaattttcagccaaaaccaaacaaaacaaggggaatgagaggaaagaggttcagactataggatgacccagagacaagaggatgctgtcttttaagacaaaacttttcctccagacactagaaaaacaatgtaacatttccctatttcttgtccagatgcagaacatcatggaagatgtagaatcaaggcacagagctccaagcccaccatctaacacagctaatttcaaaatccccagctcatctttcacctcacccccctcctcctccttggctttaattatgctaatgttggaggagaatgaataaataaag

SEQ ID NO: 8057 - DNA, 398 bp, Homo sapiens
ttatggttccagtaagtggtgctataattgctggctttaatgattcattcattcaggaaatcagcaagatgtatccaggtaaataaataagttgcttttcagaaaaagtagctaacaaacatatttctatttgtacataggctattgtagtaaatcttaatttccaaagctacccccccaccacagtcttaatgtaacttatccttcttatttcaggaagagcttcagcttcaccttctttagatgtccttattactttattgtcacttggatcaaatggctataagaagctactaaaagaaagaaaggtaagctttccctttaagtgtcgaataacattcttgactagaactgtgctccaaatcattggtgttttctgcctgttggtttcttgcatt

SEQ ID NO: 8058 - DNA, 442 bp, Homo sapiens
ggaggaggaggaaggtcaggggttatgggaggcaaccctctgactttggttggagctatttctccagcgcccagggaacccccagccttctcatggaggcattattcaggccactctcctttagccacacttctggccactgtgggttgccacaagtacctcaaagacagggactgggccctcaggaagatggccccagtgttcccagtctcactcagtcagggtctatttcacgaattaccatcatatcaggaaaccttttgtactgtactaatgcaatatacgtttttgttagctcactttgaactttaaatttacttaaaaggaaactttatttcactaccatcccaaggaactatatccatgaaatcactggtttgaccttctaattggggctttttctaatccttatgaaaataaaggtattttaaaaaaaaaaaaa

SEQ ID NO: 8059 - DNA, 540 bp, Homo sapiens
caaatcttctatatcttcacttattttctgcttacttgtaatctctatctataattacatatttatctatttctccttgaaattatatagattttgtgttatgtatagctgttattagatatataaatatttaggatcattatctcctcttcatgatttcacacttattatgaaatatctcctttatccatggtaataatctttgctctaagatctactttgatatttatatggtcactccaaacttcttttgatcgatgctagcatgatgtgcataccttttttccatcctttacttttaatttgcttgtgtctttatattgaaagtgtgttcttataggcataaacaagaccttatacttttatccaatctgataatagtctttgtcttataattggagcatttagaccaatcatctttaatgtaattgtctatttaaagttgcaccttaactccatgctgtccaccacaactccatcctttccacctcagcccaaatactcccaatgccattttctgcttgattttgacttttgctc

SEQ ID NO: 8060 - DNA, 461 bp, Homo sapiens
ctgttgcccaggctgtagtgcggtggtgcaatctcggctcactgcaacctctgcctcccaggttcaagcgattctcctgcctcagcctcctaagtagctgggaaaggaacgcgccaccgtgcctggctaatttttgtacttttagtggaggtggggtttcaccatattggccaggctggtctcaaactcctgacctcaagtgatccgcctatcttggcctcccaaaagtgcagggattacgggtgtgatccaccatacccggcctatttatttcttaatgaaatgaaatcatgtttctaaggactacttataaaatcttataatcaaagtaataacaacctggacaacatagcaagaccccatctctacaagaaattaaaaaattaaaggccgggtgtgatggttcacaccggtaatcctagcactttgagagaccaaggcaggaggatcacttgagctca

SEQ ID NO: 8061 - DNA, 635 bp, Homo sapiens
aaatatactaaaaagagatacttaaaaagatgaattttcctttctatattaattacaatggatttttagataatatggaaatatataaaagtagtcagtgtttagacatttgaaaaattaatgggaatatatattttgctgtatggttctgaaagtactaattggtaattgaatcataaaatatcagagttgagattaaagagctaaaattaaataatatcttcagagacttaacagagatctttcatttgtgccaaatttagtaagatttgcctcaattcagttttacttatggtgtatattgattctttaaaatgtcacgtgtatggtggctcatgcctgtaatcccagcactttgggaggccaaggcgggcagatcatgaggtcaggagatatagaccatcctgcctaacatggtgaaaccctgtctctactaaaaatacaaaaaaaggcccggcacagtggctcatgcctgtaatcccagcactttgggaggccgaggtgggtggatcacctgaggtcaggagtttgagaccagcctggccaacatggcgaaaccccatctctactaaaaatacaaaaattagccagacatggtggcaagcacctataatcccagctacttgggaggctga

SEQ ID NO: 8062 - DNA, 487 bp, Homo sapiens
tgtactgtaggacattagcagtatctctggctatgaaggcactagttgccagtagcgcacacacccccacccacccaatgagacaataaaaaatgcctccagacattgccaaatgtctcctgggggtggagggaaatccctagaaataaccgaaattggctttttttccctttcttttttgctgtcataagcctttataattctacagaatcttttggccaaacccataagtgaactgtgtgtgacttaattgtcttttattacaacttcatgtgaaatcagtgttcatttcctattaatactggcaacagattcaacagcttaatcacatacaagattatttctatatattcttacaaaaaaatttgtcataaattgcttctgccaaaacacatgaccaaattttcaagtttcatgaaaccatacagacataaatccatgcaagacgaaagcacatagaagaaacgactaccacatacaaagcgtc

SEQ ID NO: 8063 - DNA, 543 bp, Homo sapiens
cacagaacaaagtagcaaaaccctaaaagagtttgttggtatactcctccaacttctgctaacagcagagcttctaactagcctgaattagggagttaaccgggctgacaaactacaatattcctctgttattgatggtttttctttccaaagtttcagttaactatggccaactgcagtctgaaaatattaaatggaaaattccagaaatagacagtttgtaagttttaaataactgttatcaccatatgttgttataattgttctattttataattagttattatgtttccttcattatcgtgcctaatttataaatgaaacttcatcataggtatgtataggaaacaaagcacagtatatatagggtttggtgccatacacagctgcaggaatctgcagaatgtcttggattgtaccacccatggataagggggactagtgtatagccctccgggaggctaagcagtagctcagcacatcttaagccttctcctctcctgtggttcacctgtgatatatccagatctacccattctttct

SEQ ID NO: 8064 - DNA, 490 bp, Homo sapiens
acgacagaagggcagcagtttctgttgtgctccaagaactgtgttatcaggacccaccactcagaatactccagttttatcacatactccgcctctgggccgtagtagaggaggcagtaattatctatcacatgcttgcacccagcatttgctcttcctatctgatcaacttagagcttaagaaaaaaattatatatatatgtatatataaaatttttgggccgggggcggtggctcacgcctgcaatcccagcactttgggaggctgatgcgggcggatcacgaggtcaggagatcgagaccatcccggctaaaacggtgaaaccccgtctctactaaaaatacaaaaaattagccgggcgtagtggcgggcgcctgtagtcccagctacttgggaggctgaggcaggagaatggcgtgaacccgggaggcggagcttgcagtgagccgagatcccgccactgtactccagcctgggcgacagagcaag

SEQ ID NO: 8065 - DNA, 384 bp, Homo sapiens
cagaaacaagaatgtggccctttcacagcccgtctggctcatctgaaagcttcagagaagcagccactttccgaggcagctgtacctaccccgcagagggctattctgcctgggaagttggcagaggcctttgcaaaccagtggctccagcctggggcccagacagggatggggagggctagttctgcacccagctccgtggcctctgcttcctcccaggtaccaggaggtccaggcggcccaaaaagcactgaggacggctgtggcagaagtgctgcctgaagcggaaagcgtgttggccaccgtgcagcaagttggcgcaaatacagccccgtacctggccttgctggcttccccgggagctctggtcagctcagttgtctc

SEQ ID NO: 8066 - DNA, 630 bp, Homo sapiens
ctgggatctcagctggagagaaggacatcagggtgaccatatccaccacgggccgggagctgcagggcagaaggcaaccaactctctccctccaacccaactgcacgtcccccctcagatgtggggctcccgccagcaaagccagagaactctccttccctaaagcagacctcaacatgtcactgtctcctcttaaggaaaataataatgatactttttatttatttattttgagagagggtctcaccctgttgcccaggctggagtgcagtggcatgataacagctcactacagcctcggcctcccaggctctagtaatcctcccacctcagcctcccaaggatctgggaccacaggcatgtgccaccacacctggctaactttaaataaatttttgtagagaagggaccttcctatgttgtccagggtggtcttgaactcctgagctcaagcaatcctcccagcttgggctcccaaagtgctgggattataggcatgagccaccatgcctggccaataatggtgataactaattagggctcccagttcattctagcagcctctgacccattttccatgaagaagagaaagctcttaggaagagaaatcatactgagttactttcatgc

SEQ ID NO: 8067 - DNA, 105 bp, Homo sapiens
gaaagccttcattaatgtcttttaaactacttcctctactctctatacttgtaacttcccaaggtagcttaacataagggtctttaaagctacttccactcaagt

SEQ ID NO: 8068 - DNA, 433 bp, Homo sapiens
gagactggagggaaggaggagtacatttaaaaaatcattttccgggctcccttcctgtggagtccccgtgggctggccacagcccttgacccagcctcagctccgtcagtaaatctctccaggtcccctgtctgcaccgcttcaaatttagggtggcaacagtccccagtgttcctagccccagggtactaaatcattccttccctgttgcttttcttaatccctgtttatacctttgtaaataatctcattgctaaactctcctcaattactcaacttgagtgtgtcatctgtttcctgctggtactggaatgatacctatggagtctggaaatacttctccacccagagaaaaaacaacagctcacatgcacctgcaaataggacttcagtgcgtctcagattcctgaggcggtagggaagggtagagagt

SEQ ID NO: 8069 - DNA, 590 bp, Homo sapiens
tcgtgaacaccctagacctgagaggaggaccagcccagatgaaagcttggaagaattcccaggggctggtggcagtctcagcctggctgctctgcccagggacatggcccacagggctctgctttccctgctgccagctcctcagctggagacagcatggccagtggaggcctcctgtggctgcttctctcagaccaaactcctttgagaaattttgacatgaatgagaatagggtagcctaattgaaatacaatggggtcttcctcctaaattcccacctctaagctagttttctcttgggagggactagtgctctctttttaagaggggtgtgtgtgagtgagtgagtgagtgtgtgtatgcgcacacataggttaacagtttggttctaatttagttgcctgtcccaactgcattgtttactggtagtggtaactttacttcatcatataacctgctcttcacagtggcttcaaaatgcattgtaactcatcactggtactaccatgccctcagacatcatgaagacagactgagggcagggctgggactatgtgtgtacacgtgcgtgcctgtgtgtgccctcaca

SEQ ID NO: 8070 - DNA, 541 bp, Homo sapiens
aactaaaatatgtgagatgatggcaaggtgggcagaaggaaagttcaggaactatggacacaagactgtgggccctatgctacggtcaaagccaacgggttctctgaatacccaaaagctggttctctctctggctgcattctacaatcaccttaggagcttcaaacaacaccaattcctacgtgccctccagactgaatgatcagaacctgaaggtacagcccaggcaccggcactttaaaagagctccccagaagattctaatgtttagcgagaattgacagtactgtcccagtgggtcaatatctccctagcttaagacataccaggcgggatgtggtggctcacgcctgtaatcccagtgctttgggagaccaaggtgggcggatcacttcaggccaggagttcaagaccagcctggccaacatgatgaaaccctgtctcgactaaaagtacaggcttgggtgcggtggttcacgccagtaatcccagcactttggaaggccgaagcgggcagatcacctgaggtcagatgtttgtg

SEQ ID NO: 8071 - DNA, 616 bp, Homo sapiens
aaatacaaagtaaaccggcaaactactttcatttgatgaatatcagtgtgtacattctacatgaaagaataatgcagagaatcgggcaaaagaccaaaagaataattatccatgaataaatgatgtatattccaaaaatgcaaagatagtttgactctattaattggccatatcagatgaaaagagaacctccataaatatctatcagatattaaaacatattacaaagctatggcaattaatacattacggtaccaaatcaaaaataagtttatcaggctggacacagtggttcacgcctgtaatcccatcaatttgggaggctgaggtgggtggatcaactgaggtcaggagtttgagtccagcctggccaacatgatgaaaccgggtctctactaaaaatacaaaaattagctgggcatggtggcacatgccctataatcccagctacttgggaggctgaggtacgagaatcgcttgagcccagaaggcagagcttgcagtgagccgagattgtgtcactgcactccagcctgggcaaaagtgagactctgactcaaacaaacaaaaaagaataagtgtatcaataaaacagagtatagaatccacaaatata

SEQ ID NO: 8072 - DNA, 517 bp, Homo sapiens
caatttcttgctattaattaataataattataacgatagataagtgcttatgaggtgccgggtactgttctgaacactttacatatgtcatttacatgtattgatcatttaattatcacagctaagccatgaggtaggtaatattactgttctcactttaaatgcaatgaaactgaggtatggaaagtttatgtaagttaaataagaaccatttatagagaaataaagttttgcctatagtaaaagatgaaataagccaggcatggtggcatgcacctatagtcccagctactcaggaggctgaggtaggaggattgcttgagctcagaagtttgagaccagcctagccaacatagcaaaaccctgcatcaaaaaaaaaaatggaataggccgggttgcggtggctcacacctataatatcagcactttgggaggccaaggcaggtggatcacttgaggtcaggagctcaagaccaacctggccaacatggtgaaaccctgtctctaccaaaaatac

SEQ ID NO: 8073 - DNA, 571 bp, Homo sapiens
tgctcactttagaagtgcttgccctttcatcccttgcaggatggagagaaggaacactagtgatgagaactgactcatttctgggcacatgctgcctgccaggctccacactgcgtgttgtacagaaatgatctcatttagttcttccaactgctctctgaggtagatacgacttttatctctccacttaaagatgaggaaaattctccaaggtcagacagctagtaagaggcagtgcctgggtttgaacccaggtccacctgacttcgaatctgggcatatgtgaaccttggttacacactagaaagggcgcccgtgtgtgctcatgcaagccatcctctccttgggtcctggggaatcccgaagtcttctccattcaaaacgactcagtgttccctgggagagccagaaatgtctttagagagaagctagaacattctttagagataagtcctatctctcctgtttatttctaaaacatgtcatttgaaaatgggagaagggtcaccttttcccctgcagctgacatgctgaataccatctctaaccctatttgtttctgaagaaactt

SEQ ID NO: 8074 - DNA, 611 bp, Homo sapiens
aacgcaagatgataccaggaaggcagattgggagtgagtttctagtggactctggatgccaagctaaagatgaggactttattttgtgggcaataagaaaccagaggaggcttctggatagagaagcgtagaacaagatgtgatgaggacagggatccagggagaagggctcggtgtcagggatatgcagaatggcaatggggaggggtcccagaagcaggagatggcccagcagaagaatgaaagacacagctggaaaaacacagtggaaagaattacacacccagagaaggagaggccacaaagcagacatggacacagacatacgccaaacaattgtcagctgacatgcctgttgcctcctttgggggccaatgaccttctcttacttgtccttcatacctgcacctagctcagtgtctgtttgagtagacactcaatccattctcgacaaatgaatgaactaatgaattccacatcctgaaaggtggagggaaagggagttaaagcttcaacatggtattaaacagggcagcaagacccagtctctacacaaaattaaaaaattagccaggcatggtggcacacacctgcagtgccagttacttgaa

SEQ ID NO: 8075 - DNA, 511 bp, Homo sapiens
attaggccaggcacggtggttcacacctataatcccagcactttgggagaccatggcgagtggatcagttgaggccaggagtttgagaccagcctggccaacatggtgaaaccatgttgtctctactaaaaatacaaaaattagccaggtgtggtggcgtatgcctgtaatcccagctactcaggaggctgaggcacaggaatcacttgaacccagaaggcagaggttgcagtgagcagagattgtgcctctgcactccaacctgggtgacagagtgacaccttgtcaaaagaaagaaagaaacaaacaaacaaagaaggaaggaaggaaggagagagaaagagagagagagaaagagagagagagaggaaggagaagaaacctcgaagactaaaattcaaggaaaaaaatttttaataggacagaattcaagaaataagaaatgattaatatcattaatatgtaatgattaatatgtagtaagaatataaataaagagaacaaagagaga

SEQ ID NO: 8076 - DNA, 459 bp, Homo sapiens
ttgatcagacactacctgtgagctctctttttcttagttctaataaggaaatagatactaagtcttagaaatttttaaatactttgggcacaacaacatttttttaaacaaagacctagagcaacatgttgctggactttctgagcaaagaaagtcaagtgatatagaaaactgactcctgggccaggggtggtgtctcacgcctgtaatcccagcactttggcaggccgaggtgggcagatcacgacatcaggagttcaagactagcctggccaatgtggtgaaacccatctctactaaaaatacaaaaattagccgggcatggtggcatgtgcctgtagtcccagctacttgggaggctgaggcagcagaattgcttggacccgggaggcgaaggttgcagtgagcagagattgtgccattatattccagcctgagcgatagagcaagactccgtct

SEQ ID NO: 8077 - DNA, 363 bp, Homo sapiens
atgaagggacagacacatagttcaatataacagaatacagaaatcataaatagacccacaaaaatataccaactgatttttgaggagagtgcaaaagcagctcagtggagaaaggatagtcttttctacaaaagaagctggaacaaaagaacatctgtatacaaaaataaacaaaccataacctaaaccttatacttcatgcaaaataaaatttaaaatagatcatggatagaaatgtaaaccacaaagctatacaacttttagaagaaaatataggataaaatctttataacttggggttaggcaaagtgttctccgatgtgacactttaaatgtgcagtatgctgcatttaaagaattgat

SEQ ID NO: 8078 - DNA, 109 bp, Homo sapiens
gctgcaagtagcagaacagtgactaaagcaatgaagtcataaagtatggagagctgatacacggagcatggtggaatggtgggttggaaaaagtttaggggccaggcac

SEQ ID NO: 8079 - DNA, 215 bp, Homo sapiens
catgcttggctaatttttgcatttttagtacagacgggtttcaccatgttggtcagggtggtcttgatctcttgacctcgtgatccacccgcctcggtctcccaaagtcctaagattacaggcatgatccactgtgcctggctaaacagcattactatacattctatatttacaaatttacaggtataacatgtcttgtatgatacatatacttg

SEQ ID NO: 8080 - DNA, 368 bp, Homo sapiens
taatagtaagaaaattattgaagtgtgtttttataaagaatgactacaacttttagagatttttgcttgttgatgtttaaaagctctttaatttttttgtgccctgctaatggactgtctttttagctgccccaaagtatctctgtttgattactaaagaaatcagtagaaaacttttattgtttacaaattgaagtctcagaaatagacaatgcaatataattttcattaataaagacctataattagagtgacaatgtaatttattgcccaatttgataaccttgagaatgggagattgttttacatatatatacacacacatatgtatatatgtacaaacgtgtgttcattacatatataaacac

SEQ ID NO: 8081 - DNA, 60 bp, Homo sapiens
catggctgtccaccggagcaagggggcgccctaatgctgtatattcttgccttgtacctc

SEQ ID NO: 8082 - DNA, 492 bp, Homo sapiens
caataagttttcattttaccaaagaattaaaggaaaaaagaagaaactagttactaattaaggaatagttagggaaattccatattgctgggagtgcaagtggtaaaaattctctggaaaatgatgttgcaatattaatccagatcttaaatatatttatatacgttaactagataattctccttctacagttttatcccatagaaaatattaaaaatgtggacaagatttatgtccaaagatttttttatctaaattctgtttaattcatggcaaatgtctgtatgttcaacaatagaatactatgtttaaaaaaattaaagtgtatttatgtgatgaactattatttcatggaacttgtttcctgtcatcagaattcatgggtacagacctaaatatactttataatctgtgagggtttgtgatcaggggaggatggtagcaaagattaaaatgaaatatataccaaaaacttaatagtaattatctctc

SEQ ID NO: 8083 - DNA, 584 bp, Homo sapiens
aatataatgagctaatgatgtgcaaatataaagggtcaggctggacagatttctttttttgccctggtatttagtatttcagactacataaattagtcaatacttctttgttgagtgaaaggatgaaagacacaagttctagcctgttgaattgttgttttctcttgggatgatctctcagttttccacttatttattttctctttctcacgatttgattctagttctgactatccaaatattatgttatgatttttgcaatggtcttttccattagttttctcactgagagagccaagtagtacccagctctagtcccattaagccatctttttaaaaaccccatttttaatatgttgccttcaaaaatacttacaaggtatgccagccttgagcttggcttccaggggtggcatcatgaggatgaaagagcagaattatctacacataggccaggcccggtggctcccgcctgtaatcccagcactttgggaggccaaggcaggcggatcacgaggttgggagatcgagaccatcctggctaacacggtgaaacccggtctctactaaaaatacaaaaaatt

SEQ ID NO: 8084 - DNA, 233 bp, Homo sapiens
tatgaacccaggaggtggaggttgcagtgagctgagattgtgccattgcactccagcctgggcaacaagagtgaaactctgtctcaaaaaaaaaagaaaaagagggagacgttaataacattaagcatgaaaagaaagagtttacacgaatacaacgaatacatacagatactgacaaaattagcattgaaagaacacctgggtaaaggtgaatttttttttttttttttttt

SEQ ID NO: 8085 - DNA, 411 bp, Homo sapiens
aggagagatacctatgataatggccgtcgcaccaacgtttgtcagaacataaaactggagataatctaaaaatctatcaacaggagaatggataaaaaatttgtggtatattcacataatggaatactaaaccaaggttaaaataaatgagctagaacttcaaagaatgccctatggtttgtatgtggcctctccataactcaggatttgaaacttgatggtcattgtgatggtattaagatggccattaagaagtgattacatcatggggcttctttgttcatgaattcctttatgaatgggattaacacccttataaaggagaccttttgcccttccaccttccaccatgtgacgacacaatgtttctcccctctggaggatgcagcaataaggcaccatcttggaagc

SEQ ID NO: 8086 - DNA, 129 bp, Homo sapiens
gcaagactcccatttataaagaaaagaataaactctgttcactatagttgcaagtcaagtatattttcttggttacatatttcttaagaaaagccctggccgggcacagtggctcacgcctgtaatccc

SEQ ID NO: 8087 - DNA, 526 bp, Homo sapiens
gcagtggtgtgatcatagttcactggaacctccaacaactgggcttaagccatcctcccaccttagcctcctcagtagctgggactacaggcatgcattgccacacctagctaacttttgaaatttttgtagagacggggtctcgccgtgtttcccaggctggtctcaaactcctgggctcaagcattccttccacctcagcctcccaagtgctgggattacaggcgtgagccacttggcctggctggtttacattttttaatgcccgtcttcagagtcaaaactgggattgccctggtgttagtttgcattaaaaattgctgatatgagatttatgcagagctgggacttgctgatattgttggactttgtcatctgtacttgaaatatgagaaagggaactgcttaaaatatctgggctccctttccggtagctttagttgtttcccatctttaaaccaaatgctgaaggcataacataaattaatgtattgctaaaggccgagtggataaaatacacaacagc

SEQ ID NO: 8088 - DNA, 598 bp, Homo sapiens
aatgtgtcttatttttaaaaaaatgtaaaaatacataaatagtagtagtataatgagaaactatatagacacgcaaacttgaaaaatcttctattaatttacgtgattactgtagcataatcccaaattaaactcactttttctggatgactgacttgggtaaaataattcatatatgaacaatgtgggtaaaaagaaaaaagtctccagtttacactataaatagagtgattttatcaaagcaaatattaggaatttatccttggctttttaaaacaaaaagatactaaaatacttgagaatcctaatttgataatactgaataatgccacagtttatcctggcagagtaggacattttaaaaagctataaaattcactatatactcggccgagcatggtggctcacacctgtaatcccagcactttgggagccgaggcaggtgggtcacttgaggtcaggagttcaagaccagcctggccaacatggtgaaaccccatgtctactaaaaaatacaaaagaattagctgggcatggtgatgggtgcctgtaatcccagctactttgggaggctgaggcaggagaattgcttgaaccc

SEQ ID NO: 8089 - DNA, 545 bp, Homo sapiens
ttatcaggtaggtttgatctgagatgtatagtaatgatgactttcttcttcgcccaagtattttgtgtaccttagaccagtttagcaaatgaagtccaagaactatttgaataagtcattcttagaaaataactttaggaagcaactgactccattcatgtgtatgcctctaattgtaggttcacttctgtccgaatatgaatttttaaaataattttagcattatattagcaatttgcaatataccatttttatgcatgtaaagttgtattctaacatatttactttttgctcatttgattaaatttattactgtgtatcccatcattaaggtaactaattttcagtaattaaactgttggtcttctgtttagccattattctcagttctgtgcaggagtgagctgaaacaaagttgtatagcccagagagtgagaagctgcatttcatgtctcccaacagtcagaaagggattatgtactggttaaggaaggagtttggcgaatattttgaaacccttttgggaaagcatagaatattgaaaa

SEQ ID NO: 8090 - DNA, 458 bp, Homo sapiens
tgctgtcgatgagaataaagttagaatgagaatgttcctagcatggtgcctggcatgagcagattctcagcagatgggccctcctgtaatccgctgagggctctcctgcagtgccagcagggatcctagtcattgtctccaccactcctgtctgtcttcacccagaaccttgtctggatcctgggaggaagcaaacatctcctggtgggaatgtgaggccctgccaggttgtaggagtaactggaaaagggcaggtggccctgcccactatgtgggcacctcatgataaatgatggctctcattagccctaactcctcgggcaccttcctacctggcaccattatgctgggactaccctctcactctgggagcttcacgataaacccatcttggcttaccctggacgcctgtcagctcctggcagggtgcaggccagagggataccttttgcaccatg

SEQ ID NO: 8091 - DNA, 541 bp, Homo sapiens
ttgttattctcctattactccaaactatggcaaccctaggggaggatcttttctttcattcccttccccaacccaacaaaatataagcaaacaccaggaatgctctgctccttaatcccatacacttttaaaacagtcctcacattagaaaatgatgtgagaaataaacacagatttttttttttctattgagatggagtctcactctgtcacctaggctggagcgcagtggcacaatctcggctcaccacaacctcaggttcaagcgattctcctgcctcagcttccctattagctgggattacaagcgcccgccaccatgtccggctaatttttgtattttccagtagagacgggtttctgccatgttggccaggctgatctcagaagtctgacctcaggtgatctacttgctttgcctcccaaagtgctgggattaccagcgtgagccactgcgcccagccatatttttgtctcatgttgagatgaatgcaaattaaagtatacttcaagaaacaataccaaaataatgcaaaacata

SEQ ID NO: 8092 - DNA, 300 bp, Homo sapiens
aattccgttgctgtcggcaggactcctattggcacagatcgaaaccataatagatactggctcttctcagatgaagttccaggattattcattgaaaaaggctgggtacatgacagcattgactaccgattcaaccatcactgcaaagaccacacagtctctggtgatgaggattactgtcctcgcagtaagaaagcaaacttaggtaaaaatgcaagcatgaacacacaacatggaacagcaacagaagttgctgtagagacaaccacacccaaacaaggacagaacctatggttttta

SEQ ID NO: 8093 - DNA, 337 bp, Homo sapiens
agctccaccaggtggcgctgccgggcctcgtgaccacttggaaaaagcagtgtcaccagaacgctgcggagacctgccagcaggggtcacactgaggttgcctcgtggtgtccctgcctctgcaggtgacctatgaaattcctggcaggcccagcacagtggctcacgcctgtaatcccagcactttgggtggccgaggcgggtggatcacctgaggtcaggagttcgagaccagcctggccaacatggtgaaaccccgtctctactaaaaatacaaaacttagctggccatggtggcaggcacctgtaatcccagctactcgggaggctgagacag

SEQ ID NO: 8094 - DNA, 416 bp, Homo sapiens
ggctcttgctgaagaggccagtgaagaggaacttccctctgatgttgatttgaatgacccatactttgctgaagaagttaaacaaataggtataaataaaaaatcggtaaaatctgcaaaagatggcacatctccagaagaagaaattgaaatagaaagacaaaaggctgaaatggctttgcttatgatggatgaggacgaggacagtaagaaacacttcaattacaacaagattgtggagcaccagaatctgagcaaaaagaagaaaaagcagctcatgaaaaagaaggaattaatagaggatgactttgaggtaaatgttaacgatgcacggtttcaggcaatgtacacttcccacttgttcaatttggacccctcagatcccaatttcaagaaaacaaaagctatggaaaaaa

SEQ ID NO: 8095 - DNA, 339 bp, Homo sapiens
gaattccatctacccattattctttatatctcctacttggatcttaatctccactctggcaattccccataagctaaaataataaatgtgtccttaatcatttatttccaattccttaatatttctataatgattttttatgtgccagtcttcaccattctggtatctgcactcccagtttataaaaccatcataaacactaggcaattctgctctttttcaggcaaaaagttaaaaaaaaaagagcatttttatagtttgtgccacatctatagtaactgggactacatcaaacaaagaattcctggccaggcacagtggctcacacttgtaatccct

SEQ ID NO: 8096 - DNA, 424 bp, Homo sapiens
acagactaaattttctctgtaagaggttatttcctagatagttaatatttttggtactactttgtgctgtattttataactattaaggaatgttgcagagaaatgctatcaattgttaaaattttgccatgaatacagcagcctcactgaattctcttagtagttctaatagcttgccatttgattctaacaggttttctatgtaaaagatggtgtcatcttcaaacaatgatagtttcatttcttctctttcacctcttaccttccttgtgtttctttagcattgggcaggtccttcagggatatgtgaaacagtggcagtaacaaccagacatcctggcctctttgtttttttttccatgatgaagtctcactccgttgcccaggctggagtgcagtggcacgatctcggctcactgcagcc

SEQ ID NO: 8097 - DNA, 553 bp, Homo sapiens
aaaagagatgggtcagggaggaaagccaagatggaaaatggatgggaatgaatgaggaacatgatgtgggttggggtgtcaattcatggttaatacaacatgtgtggctcagtataaccagattgtcataagaagctcaggcagctctccccctctgttgcctggggcttttcgcagttacaataaaagtggaaagatgaagaataagggcaagcagaagacacacacatttgcctgtttccctctttttgtccagattgagtagatgggaggcagggctgttacccatgatggtgtttcataccagagtcaatctactagtttgcttggttttataggcgtgattcccaaattttgaatctgaagttagctgtcagtttaaattcagagggtccgcagttgtttttcaggtttttcttgattctgcctttggaaaccaggaagatgttgaatttacttttcatctgacaatattgcacatctgtgaacccaactgatctgaaagtgtttacctcttaactctgtgaagttagctggttattctggatggctg

SEQ ID NO: 8098 - DNA, 220 bp, Homo sapiens
caaagcacacaaatggcctaccatcttttattcttccttctagcttctggagagagaaatgattgttccagtttagaatgccaggagtttactgggtgtttgtattttttatctgtgccttaaaaaaattagattataatgaacaagacatctttatgttttacagggaaggaaaaagcagtgaaagtatgcattttcgaaagaaaagtgtgttgggaaa

SEQ ID NO: 8099 - DNA, 537 bp, Homo sapiens
cagggtagtgcatgtgacggtgtccaagacgcacagcagattttcattcacaaaaaaatctgaccacaagagctaaacggaaataccttccgctgtccttcccaagtcacagagcaaacacctcagttcccaggggtccgcatcagttctggtggaggcggtgactgtgagcgtgaccagctgggctaattcgtcctgacatttagttgggacagctatagtttcctacctctatgaccagagagtgaagcgtttcactgaagaactgtggccggcgtctccaggaaaggaaggagcctcgctttctccagggcaggggcagcgtggggcggggcaggccgggtgtgtctgtggggagtgggcgcgtgctcacactctttaagctgcgactgcttcctttaggacagaatgaagttcttcgaggaggccgatgaagacagaatatggataaggccaaacctacacaaaatccttctacatcttcatatcaaaacatgttaaacataaacctccaaatacctacagggatacaagcac

SEQ ID NO: 8100 - DNA, 408 bp, Homo sapiens
ggcacgaggaaagcttcatgttccgcacctggggggcggatgttatcaacatgaccacagttccagaactgtcagaagataaatttctgttgttctcagccatccagtttgtggtactttgtaacggcagccctaggaagctgatgcaggtgggattgattcccctgctccagagaaaggactgttttcacagaagaggcgatgcttgaactgaatctgaagggatcaatgtggcttcccttggcaaggcatggagtgaaggtggagtatatcccaagtggggaggacagcacgtgacatggcgcagggcttatgaaacaacatgccttcttctcttcaagtacttaagctacattagtaagaccagaacttagtggtgagggttgaagctggctggacaggcagtta

SEQ ID NO: 8101 - DNA, 166 bp, Homo sapiens
aaccttttcaggctccaccatacccaggctcttaccttagcagaagcctgtgaagctggtagcagaaacgagaaggaacaaaattaactccaaggcagtaagccatccacaagaccactacacgaagttaaggctgtgtgaaagagggagtttatttaattttatt

SEQ ID NO: 8102 - DNA, 497 bp, Homo sapiens
cagacctgtgtttaaattttagctctgtgatctggtagcttttgaccttgagtaaattgcctaatgttactcagtcttagtttcctcatcagaaaagtggtaaggatgataaagtagttcataaacattcattgagcactaagtatttgcaagatactggaggtataaagatgaataaaacactgttcatgtctttgaagacttcctagtcaagtggtgaaattaaacataaaaacaggacattttaatattacgtgcaaagcacatagtgggcaatgtgttggtttgaagaaggatttttgaggaagtggaagctgaactgcagtttgtagaataagtaagagtttagtcaggcaaagcagatagacaaggtcattttgggtggagcgattaatataggcaaagtcatgcaatcatgaaatagcatgatatgtatgtgaaataagagtacttttgcattgtaggggcattaaacaggtgagcagtcactggagatg

SEQ ID NO: 8103 - DNA, 303 bp, Homo sapiens
ggcacgaggtcctccaagacctgattcagcctttcacacggtggtgccactggtcccagggtgcgccggccccatctcctcagggcagtgggtggggaagactcaccactacccctaaaatgggaagagaccagggttccaaagtgacccccagtgggggcttcacacgccagggagtacatgagatgatttctgtggtccctgatacacagctttcattttgagagacacaattatttgagtatctagtaattcaagcctgggattcaaagatatcatttaagatgaaactgaatatttctc

SEQ ID NO: 8104 - DNA, 183 bp, Homo sapiens
ggcacgagattgcctcccagcttgggagcatccaaagtagaaccatgactgggtcatgaaatgggttaatttggtttctttcattacagggcaaagttctccctgtggactgagaaataaacatattataaaagttacatatgctcatagaatagaaatcaaagagtaaaaagtattgagtgt

SEQ ID NO: 8105 - DNA, 556 bp, Homo sapiens
cccattcccggaaggaggagacagttactgtctatcccgcagacgtggtgctctttgaagggatcctggggcagaatgaggtggactatcgccagaagcaggtggtcatcctgagccaggatagcttctaccgtgtccttacctcggagcagaaggccaaagccctgaagggccagttcaactttgaccacccggatgcctttgacaatgaactcattctcaaaacactcaaagaaatcactgaagggaaaacagtccagatccccgtgtatgactttgtctcccattcccaggaggtacgagacctgttccagatgaagctttttgtggatacagatgcggacacccggctctcacgcagagtattaagggacatcagcgagagaggcagggatcttgagcagattttatctcagtacattacgttcgtcaagcctgcctttgaggaattctgcttgccaacaaagaagtatgctgatgtgatcatccctagaggtgcagataatctggtggccatcaacctcatcgtgcagcacatccaggacatcctgaatgg

SEQ ID NO: 8106 - DNA, 377 bp, Homo sapiens
caagaggagaatgggatcaacagaaggcatatatggggagtgtctggatggctggaaaattccattttttgaccaagatgtggtaaacacggggagtaaagttataattctttctcttactgtgcttttaggttttgttgctttctgtctgtatgctgtgttccacaataataaaaatatttaaaaggcaaaaaaaagtaaaataatgaatataaaattacactgaaactacatattctcatagatagaattgtaattattagagtttttgctgaataaagtcaaatagactattatggtcgttataaacgcaagttaaaattttagggccgggcaaagtggctcacgcctgtaatcccagcactttgggtggctga

SEQ ID NO: 8107 - DNA, 509 bp, Homo sapiens
ggcttgctgataatctcattttataattggttcagcaatccagcaggaccaactttttaaaaaaattaataacagtagttttatgaaaactaagtaagaaaacagtttccacctatttctgaggtctcctttagaaggagtaacagacagcttttatttctcttaaagttataaaaatcacaatcgcaagtcacaatgaatactgggaagggaaattacttttgcagagtgatcaagtaaatgatagcgggggctaaacttttttagtaaacttgtgaagattacatacagtaaagtgcataaatcttgagtgtacaattcaatgaatttttataagtaaacacactttgagagcaagcatcctaagactccacttcctccagaattagctgatgttcaggcataaggttgtttacaggtgaattcatgacacctttgactcttctactgtctcagaccttaggtaacatacctgcagctgcttttctaacaaactgttgatcagcaaa

SEQ ID NO: 8108 - DNA, 463 bp, Homo sapiens
tgcccctttttagcctcccagagcttcgaggactcaattcgaacccgaaatcctgccgtgggggaggggttgcgtcgagacctgggcccggggaggttctcctgcgtcactttctgtcctgaaaggcgcccttcctggtttctgtggctccaattttctatgcagccccacaccccttgttgttttgatcctgagaaataaaagggaggctgaattattcaaatttaaatgaggtttccccttcatggaagtgctgctgacccttcgtgcagaaatggggagcacttgaggacacaggtgggtggaggccctttgtgcgtggctggtcgtattcgggcagccctccgtcgctttttataaaactttgtgtgagaagaatatattgataatgtcagtgaaacaagcagacattgaaatggaggcacagattactccacaaggagttcttctgtatattttttct

SEQ ID NO: 8109 - DNA, 551 bp, Homo sapiens
ggcacgagcattagtatttttgtgatttcattttttacacttaaatattgattcatgtggaattcactttgatgcagggtgcagtagggctccagtttaatttttttttagattgctactcagttgtttcagtactgcttagtgaataagccatctttattatcttgagatgtcacttttattatgtactgaatttctctgtttatgttgggtctttagctgtactatgtggtctcttccattgatttgtcttttactgggctgtgtcatactgtttttaattattgtagtgttatattttagtatttggtgaggctagaccctcttcaattaacttttgctttattttttccaaaggaaatttaggagccggacacatatgtgtgttcatgtattttcattgggaatgcattaaatatatagattaatttagggatcattggcacttttgtgatgttgagtatgtctgttcaggaacatggtattgcttttccatttattcaagtctttcaagtattttttgggagcattttaaagttgtcttcatatag

SEQ ID NO: 8110 - DNA, 528 bp, Homo sapiens
ggcacgagagggacaaggctataaatatcattaataccaggttcaggagtttgcactgcactaaaaatcaactcagctatttgagcaccttttatagagtggaaatggggttgggcagtagagaagagcacttttagagaggcttttctgcagtagtcaggggttacacctgttaaccagccataattttttttttaagcggctgtgctgaggatgagccccatgtagttggtgcaggtggggacacactgcctgtgtaactagaaaaactaggcatggccgggcacggtggctcacacctgtaatcccagcactttgggaggtcaaggggggaggaacacttgaggccagagacaatataatatataatataatatattgaccagcctggacaatataataagagcctctctgtacaatttaaaaactaaaagcctggggtggtggcacatacctgtagtcctggctacttgggaggctgtggcaggtggattgcttgaacctaggagttcaatgctgtagtgagct

SEQ ID NO: 8111 - DNA, 559 bp, Homo sapiens
tcggcacgagacctcttcttcattgttaaaatggaaataataatactacctagctcgtgggattgttgtgagacaacaacaaatgagacaacagagatctgaaactctgcctggcccctggtatataccaagtccacagttaaattagcctttgttactaaatcattgtttgggtagaaatcctcagattttggatttctcaagtgctccttttctactgtccaaaaggcagaatgttatttttgctcgattccattatgtaatatcctatgaatttgaaatttcggaggaggcacagcatggggctgtggaaatggtgcaggtatctgcatccgaaactccgaagttgtgtggggaggtcctctctcctgagcccagaggcaaaaagctgctcccaagaaatgatctttatgccccacagtccaaagccccacattaaacaaagtctcaagacaagaaggcaatgtgaccctggcccccatgttttgatttgacttttaatttcaaaataatatcattgtgggggggcttatagtttttaacagctgaaagttatata

SEQ ID NO: 8112 - DNA, 544 bp, Homo sapiens
ggcacgaggtgattcctatttcaatatgtgaaacacttaaccaaagaatatatttcgatgaatcttaaacttgccttaaaaacagaagaggttaaaaagaatttagaaaaaataaagttttagagtgtttgagaatgtgtatataaaatattttcaaagccataatatggatgctcttatggctcagaagcatgcctactagaacacgtctcggaatgagagatgtttaattctgtcacctcccagaaagttttgcagggtttctcacttgaatttgcttccctttgcaacctcttgtcctgaaggcccccttcccacctggaaatgctgaggcatgggtgtgataagaatcagtcattttgaagagaataagatgatgactttattaacatttccatatatgctgattgtgtgtgtggcggggtgggggctggggtggaggcttaaggcaaaagctagaattagtcatatgaattatgggcttgtttggagacccacctgaggctcagccctagccctcagcccacctggggagtttactacc

SEQ ID NO: 8113 - DNA, 377 bp, Homo sapiens
  misc_feature 377: n = A,T,C or G
ggcacgaggggagacaggaaggagaagaaaaacaaaagtgagaaaaagagctgaaaatgggacaacaagaaagattcctttttaaggaaaatgaataaactacctgtcaaaataagtataacatccttttcattctggaattttaggaatggttgccttcccttccaaaaattccccatccagttatcataaagcgaattatctgacacctatacacattacatactaaagtatttattgaatgagcaaggaccaccagtcaacaagctctacctatatacaacatttccaatcagtctatctattctctcacattaaaatacgtctagacaggccaggtggtgttggctcatgcctgtctgtaatcccagcacttn

SEQ ID NO: 8114 - DNA, 119 bp, Homo sapiens
caagtctgtccagaactcccctggtgccgcctggcatgctgctgatagtttgcaatgtcttcacaagaaatggtatcagaaacctcctgtcatatcagcatgggtctcttgcttcctgc

SEQ ID NO: 8115 - DNA, 74 bp, Homo sapiens
aaagagtttatgacacactattccagcagcttcttgtttgtttggcttctaactaacttacattgggggagttt

SEQ ID NO: 8116 - DNA, 190 bp, Homo sapiens
gatcagttgtttgtatttcatcctaagcacaatgggaagctattcaagagttttatgcagaggattgactttgccagcactgcattaaaaaaattaacttaaaaattttaatgtagttcaaatctgcatgtctggttcatttcagctccttcactgccaaacctgggggcagggactgcttcagtttctc

SEQ ID NO: 8117 - DNA, 387 bp, Homo sapiens
gcggaaacagggatcagaaaggaaatcaaataacaggaattccatcctggacactggggcctgacaaagagctcttggaccagtgctggatgcaatttgggcggtttggtttgaatgggggaaatatgagtttccagaacagggtatttgaaatcatggctactcagaaaattgaggcagtggtcactctggctgtaaatgcggcactctgtgattgtcaagacctttgtaattgagggtgccttggctgggtccaggatatacttcatcataagccatatctggagccagcatgaattacaggggacaggaattcccattcatcggtcacttcccacatggggctagggatttcgtgtgtacactcattccatcttctcacgtggc

SEQ ID NO: 8118 - DNA, 107 bp, Homo sapiens
gttgtgcagtcaggaatagcatagagttaaaatgcaggaggtctgcctttgtattctcttggtatctactgtacaagttcattgtgtgctctggagttggatttctc

SEQ ID NO: 8119 - DNA, 102 bp, Homo sapiens
gtgggcgagggaatagtcagagggatcacaatctttcagctaacttattctactccgatgatcggctgaatgtaacagaagaactaacgtccaacgacaaga

SEQ ID NO: 8120 - DNA, 250 bp, Homo sapiens
gaatggggaaatgcattgtctaagtacctctacacctctacggtcccttctattctcagaataaacttaagttatgcttgagtataacttgagtaggggccacgtacgggcatcattgcgggattcagccacaatggtgtgattcaatctgccctctgggctttggttacatttaacgtgcattcattgaacaactaacttgactcaacactgtactaagtgctatataccagggatgtacaaaacagat

SEQ ID NO: 8121 - DNA, 364 bp, Homo sapiens
  misc_feature 226, 294: n = A,T,C or G
gcctaggctggtctcaaactcctggcctcaattaatcctcctcccttggcctcccaaagtgctgggattacagggatgagccactgtacctggcagccttgagcgatttctcacctcctcattggcccagtttccttatctgtaaatgagagtagctgtaaaatatggttaatgtgaggaccaaacgggtcaattagggaaaagcagtgtctctgccagctaattntattattattattattttttttttttattttgagaaggagcttacttgtctccaggctggagtgcagngcgaagactcgctcactgaagctccgctccaggtcacgcattctctgctcagctccgagagctggatacg

SEQ ID NO: 8122 - DNA, 479 bp, Homo sapiens
atagcgtttattcccctctttcttacttgaatggaatccatttttaagctttttgattttttttgtcataaaaaaaagcacataacattcttcataatagtattgttattcaactttttgtcatggttgaaatattaatgcaatactgaagtgtctataaaccagatttatttattaccacactgacaaaaagtacaactaacagttggcaggtagataacatcagaaaaatccatgctatgaaaaggaattttagtatgaactcatcaaagtaactagtaatttttaacagactctagtgacatatatgcctctctctctaactcaattataaaccctttgagggcaagtgttatgagtgagttgtgttcctccaaaattcatatgttgaagtcctaacctctagtacctcagaatatgaccttatttggaaatagggtcattgcaggccaggtgtcatggctcacacctgcaacccc

SEQ ID NO: 8123 - DNA, 413 bp, Homo sapiens
  misc_feature 353: n = A,T,C or G
ggcacgagaaataatcagctaatccaagaactgggtcctaaagcatacacatgcacaaacacatacgtgcacacatacatatgaacacgtatatttctattcacaaaccaaacttgcttcaaccgccacctccatattcatgccatcgggaagagctgctatcagcagcttcacctgtatgaatttcacaaggcttcactttcaccccagagaacatgtttctatactcatcctagcagaagaaatcagaacgtacagagaacccagatgtcactcttcagacttcaacgctcctgtctccatcacagtaaagtcccctggcattcttctctatagcctgtttggggtggggntaacagttccccaattctctcctcctgcattaccccacaccaccaaacaacccccacact

SEQ ID NO: 8124 - DNA, 339 bp, Homo sapiens
gactgacagagatgcctggcaggacaatgcattaaggattgcagagcaagagcacacccaggaggatttacagcaattgaggtcagacttggatgcagtttctatgaaatgtgacagctttctccatcagtctccatctagttcaagtgtcccaactctgcgctcagaactgaatctgctggtggagaagatggaccatgtctatggtctctctactgtatatctgaataagttaaagacagttgatgttatagtacgtagcatacaggatgctgaactcttggtcaaaggttatgagattaagctgagtcaagaagaagtagtactggcagatctctc

SEQ ID NO: 8125 - DNA, 399 bp, Homo sapiens
ggcacgagctaccctccacgggagacgaagaggtgtttgtttccggctccaccccacctcccagctgtgccgtgcggagctgcctctctgccagtgccctccaggctctgacccagtctccgctgctgttccaggggaaaacaccttcctctcagagcaaagaccccagagatgaggatgtggatgttcttccctccactgtagaagactctcctttcagtcgcgctttctccaggaggcgccccatcagcagaacttatacacggaagaagctcatgggaacctggctggaggacttatagccacaaacattactgagcccaaaagatcaaggagtcagccaggaccctgtggacataaagaagttggatgcctggtcccaagcctcttttgccatgg

SEQ ID NO: 8126 - DNA, 400 bp, Homo sapiens
ggcacgaggagacttctgtcagtttctgcttgaaattttcccatttttaagagaatatgggaacatttcatatgatctccatcacgaagatagtgaagatgctgaagaaacatcagttccagaagctccgaaaattgctccaatatttggaaagaaggccagagtagttataacccagagccctgggaaatacgttcccccccctcccaagttaaatattgatatgccagattaaactcctagagaggacccaggcacacacagactccacttggccttcgcctcttgttcattcatcccaaacctggaaatggaaacaggcttcaaacactcgtctcacgccgtgtttgagatcaccgcctcatcagtatgcatcatagatggaggtggtttcagtatg

SEQ ID NO: 8127 - DNA, 330 bp, Homo sapiens
ctgtgcatcttggacaactgattgaatcttgtgcctcatttttctgtggaattgaaacaataccctgacccattgggcaatggagatcaaatggcattgatgcaggtaacatgcttaacacagggcctggtatgtagtgggcattcagtaagtggaagttacgattattattaggtatcaaagaacaaaacttaattgtcagaataagcaaaccagttggaataataaacgtagcctttagagttaaatggcacaaccctgatagccacacataaactgttttggttatttttcgttggatattcccagtctttatttctacatccctct

SEQ ID NO: 8128 - DNA, 399 bp, Homo sapiens
ggcacgaggcaatgcccattcatcgattctcagtcctggccctgctagtgatgcctccgctgatgaacggaaggcaggtgcaggtaaaagagtggtgtttttggaacccctgaaggatactgcagcagggcagaacgggaaagtcaggctctttcccagcgaggcagtgatagctgagggcatcctaaagtccacgagggggaaatctgactcagattcagtcaattcagtgttttctgacacaccttttgtggcgtccacttaatttgtgcctatatttgtatgatgtcataatttaatctgttcatatttaactttgtgtgtggtctgcaaaataaacagcaggacagaaattgtgttgttttgttctttgaaatacaaccaaattctcttaaaatg

SEQ ID NO: 8129 - DNA, 214 bp, Homo sapiens
acgacagaagggtacggctgcgagaagacgacagaagggtacggctgcgagaagacgacagaagggtacggctgcgagaagacgacagaagggtacggctgcgagaagacgacagaagggtacggctgcgagaagacgacagaagggtacggttgcgagaagacgacagaagggttctgctgcgagaagacgacagaagggtactgctgcgagg

SEQ ID NO: 8130 - DNA, 327 bp, Homo sapiens
ggaaatggggctgggggccgtccccgggagacaggcggccttccgagagggactggagcaggccgtgcggagtgggcattgcttgatgggcaggaagttgagtgttccttgcaagggtgctgtggcaagaggaggcctggtgtatttggcagcgttcctgaggctgtacatgatccacctgatggctggtcgagtaccccagggagctgatcgaatagcagtcaaggctgagatggaggccgtttttctggagaacctgaggcatgcagctggggttttggctcacgaggacctcgtgggactgctggagcccatcatcacgcgcat

SEQ ID NO: 8131 - DNA, 491 bp, Homo sapiens
ggcacgaggctttctggagcagctcaagtcctgcatagtttggtcttggacgtatctgtggaccgtgtggttcttcatcgtgctattcctggtctacatcctgcgggtgcctttgaaaatcaacgacaacttgagcacagtgagcatgtttttgaacacattaacaccgaagttctacgtggccctaacaggcacttcctcactaatatcagggcttattttgatatttgaatggtggtattttcgcaaatacggaacttcattcattgaacaagtctcagtaagccacttgcgcccccttctgggaggggttgacaacaactcttccaacaattctaattccagtaacggggactcagattccaataggcaaagtgtctcagaatgcaaagtatggcgaaatccactaaatttatttaggggtgctgaatacaatcggtatacttgggtgacaggacgagagcctcttacttactatgacatgaatctct

SEQ ID NO: 8132 - DNA, 347 bp, Homo sapiens
  misc_feature 312, 347: n = A,T,C or G
gccagttaggaaacagttaaagttgacccaggattaaatcaaatttggaaatagggggaaatgttctccacatggacagcaagtcacccatttgtgcatgcttttgccccagctagacacatctcccacatctctactgctaccacctggtctaagctaccatcatcttttccctgggccactgtaatatgctcccaagctataaaatataaaagctctgcaggccattatctgcttactcccctcattcactacactccagccatattgacctttctttttgtttggttggtttggtttgtttgagacggngcctcactctgtcatccaggctggagtacagtggn

SEQ ID NO: 8133 - DNA, 622 bp, Homo sapiens
gggcgcacgggtgcagtggcaccaggcagtggtggcagcaccgggtgggcagccatgattaatagagtgctgagggcacccctttccacaggtgcatggctcctgcccctgcttccatagatcatggacttagcctcaacatatctgactgaaattgaatttggcttctctctcagctgttcagttcctatattatacaaggttagatccctttctctatgagcagaagaaccaaaccatctgcagcttcggaggagaaaatgtgctttcaattatgcacctggcctgaatgttgagccgcagttcgatgggtccctaattgagccatcatggtgcgaacatacagggagacactgtgtgcatcaggcctgtgggttttgccctaagataatgacagtacagcagccacatcaccacggtgaccaccacagctgccaccactgtcacctccaccaccgcagaaggcccaagagcctgcagacatacatgctgggtgagaaggaagttacccagcaagggtccagggcagcaggctgtgttagggtccctggaaagcctccctgtatcctccagccagaatgcatcatcctgtccccagagtgcctggcctgctccacagtca

SEQ ID NO: 8134 - DNA, 647 bp, Homo sapiens
atcctttttaccttcttcctcccagtcaacctctctctttttcacgtactctaccaacatccccacccaatctccccttatgcctccaaaattagtcctatcctgattgtggagtttggggttttctttgattcaatggatgataccagtcacaccatttgaaaaaagcatatgacagtgttgttcagtgttggtgaacaggaattcttgatatttatttttaaggattccatttaattgctaattacagatctttgttaaattaagccgaccttcactcacatttaaaaaatttaactttgttttggttttcatgagacaaatatctctctttaagtgaacaagcttttaaaagaattagcttcttcagtatggaaagcaagatgcaattcgcagctggtgcaatggcttacaccagtatgtaatcccagcactatgggaggccgagggggaagaatcccttgaacccaggagttcaagcccgggctgagcgacacagtgagacatctttacaacaacaacaacaaaaacaaaataacaataacaacaaataattacctcagcctctcgagtatactgtaggtacaaagccaccacgtgtacctgtagtcccagctactcgagaggctgaatagagggattgcttg

SEQ ID NO: 8135 - DNA, 635 bp, Homo sapiens
  misc_feature 341, 485: n = A,T,C or G
attcgccaatggatgcaggaaaactgagatgggatttccccacgttgcccaggctggtctcctgagctcaaagcaatccagattgctgggattacagctgtgagccaccgtgcctggctgagatgacttttaaaaaaagacttctctaaagtagaaggaagggtggaattgtatgcacaagaagaaaaaaacctggaagaaaaacatactaaagaggctggagtgcaatggcgcgatcttggctcaccgcaacctccgcctcccgggttcaagtgattctcctgcctcagcctcccaggtagctgggattacaagcatgggccaccacgcctggctaattntgtatttttagtagagacggagtttctccatgttggtcaggctggtctcgaactaccgacctcaggtgatccacccacctcggcctcccacagtgctgggattacaagcatgagccaccgcgcccggcctccctgttccagttntctataatctgttcatattatattctgggtatatgtgggtggtgtgattatccatgtggtcttattttcacattctttgcattaactataatgacttaatgttttaagataagtttcattctacaaagatgtatgtacaatacctggtat

SEQ ID NO: 8136 - DNA, 292 bp, Homo sapiens
tcagcttacaaataagaatgggttcagggaagccaacataattacccacgttggaaaaagatctcttctaaccccgacaggttgtcaggattacaacaataaagaagatttttttaaaaatgttattaactggggaaagaaaaaaatgtaactttttaattttatcagtgaggtcacagggggtcaatcagaatctaacacatatgattaaaaagaccaaaaatgtaactgtgcaagattggattattcatttctgctatcacctcagtttttgaattctaaagcaacctag

SEQ ID NO: 8137 - DNA, 622 bp, Homo sapiens
gagtccccaagtggccatgttacatgtgatctgtgacatatacgatcagatgttacctgcatcctagggtcgcctggcatgcccatgagtgacgcttaggaccgtgcctggtgctggtgtgtggacaatgctgggccagtttgcccagggctatgcctgccacctctacttttatttcaccctctggaggcggacgcattggaaagcatgtggggcaggaggtgaggaaggaaattcagacaagctgagcagagcggccaggactggaatcttgggtgccaacccgcaaggtggggaaactgatttccatttcccagtaattacaggtcaataccacacctgagaaggcaggcaggaatggaacccagactgactccagggctttgttgcttcctgtatcagaaccaaaccccgggtgacctcctgttgcatgccccttgtcccaactttatagattaggacactgcagctccatcttgctacccaagagttaagactttttctggaggacctggctccccgggtttggaaatagtaccattgtttcctaactgggtgaccccgagcaagttgcttaccctctcttggcttcaacgatctcatctataaaatgggatcactt

SEQ ID NO: 8138 - DNA, 451 bp, Homo sapiens
gtgagcagagatcccgctactgcactccagcctgggtggcagagattccatctcaaaataataaaataataataataataataataataataataataataataatgtatcgaaatacatctatgttacctaccaagtctaaagaagccccagcccaagtattgcacctcttccctagtagggagtgtgatctacagcagctttcccttcactttgtacgaaatatctcaacatatcccagactcctagatggcttactgcgacgcccctatatatttgtgagatttattatccatcctctggcacacacatcatgccttaccaaatcatccaggatatctgctattcccttttcttaaggtccatcaagatgatgtcatcagtgcctcagcagattagcctgatatccattagaatggagatttagtaaaaaaaatccctgtaaactggc

SEQ ID NO: 8139 - DNA, 585 bp, Homo sapiens
aatgggaggctttccctgttgaaactcctcaaggacatcggttgccaaggtttattaagagtgaatcttccccacatgggttatcccctctactgcctctagtgacagaggatcacatttcactggcaaaattattcaggaaataggaaaggttacacacaccagccaaatattccactggacttaccatcctcagtgataaagttctatacaaagagccaacagcatcctcaagctgaactggctaaactgtctgaagaaagaacttgccatggccacagatattacccatcacactgactctcagatccttggcccttccttcacacaaacgatcctctttgaatcattacgggatacccatgagaataccctactaatgcaaactagcagaagattccaaactaactcagttcaacaacctcagatattgtcagggattaattaaatacacacagcctcactatactccacaattgaggcttcttgtatctttaaactccctgatcagtccttacttgcttcataagtaagtgatctggcattttgaaaaaacaccaacatcagaaaactaaccttgaaccc

SEQ ID NO: 8140 - DNA, 495 bp, Homo sapiens
attacatttcagacttggaaacatgcttcaattctaattcagcaacattatcgaacatatagagctgcaaaattgcaaagagaaaattatatcagacaatggcattctgctgtggttattcaggctgcatataaaggaatgaaagcaagacaacttttaagggaaaaacacaaagcttctattgtaatacaaggcacctacagaatgtataggcagtattgtttctaccaaaagcttcagtgggctacaaaaatcatacaagagaaatatagagcaaataaaaagaaacagaaagtatttcaacacaatgaacttaagaaagagacttgtgttcaggcaggttttcaggacatgaacataaaaaaacagattcaggaacagcaccaggctgccattattattcagaagcattgtaaagcctttaaaataaggaagcattatctccacattagagcaacagtagtttctattcaaagaagatacagaaaactaact

SEQ ID NO: 8141 - DNA, 453 bp, Homo sapiens
caatctcaaagctattcctgagaatccaaaccaatatagtccccttgtttttcaattttttgaagtatgagaaaaaaaataagaaaaagttaacatacatttccaatactaattttctgctctcagagctttaaccgctcagtaatgcataaaacaaatatttataccaaggatatgaaccaaactgctacaggtaatctcttcaatcatgatcaacaagtcttgtttttttctaatcctagatagctttacagggtaacaactgtattaaattgtgacaaatttgctgttgtagaccaaaagtcactggcggctaatatgcattctaaacttgcaacaaattaaaagttttcaaaagtactctacctcctctggccaaagtgtgaaattatatagtttttaaaaaatgcaggctggcgtgatggctcacacctgtaatcccagcactttggg

SEQ ID NO: 8142 - DNA, 582 bp, Homo sapiens
catattttttaattactttatttaatacagagaagatgagaagacaatgtaaatgctgctttgtgagtgatgggaagaagtacttttagtgatagcagtgaatcaaagcataaggtcatcaatagtcgacttcattgcccagtgttttcaaagtccccacgtgtgttggttattctttagtaaagtagacgtgacaatgctcgttggctgttattgtgaagcttgactgataatactgggattttgagatcaagaggctagaagccaagatgtttgaaatatgtaaggtcagctgcctgctctttcctcctcccctacgagtgaatcaacacttgctttataagcttttcttctctatctcctttctctattgttagtttcacttcctactcttaaaaattctgagctttcaaaatcatgtttatcaggagaaaaaagagactgaaagagcttaaaatgggatacctctggccgggtgcggtagttcacgcctgtaatcccagctcttagggaggcagaggcgggaggatagcttgagcccaggagttcgagacctgcctgggcaatatagcaagaccccat

SEQ ID NO: 8143 - DNA, 482 bp, Homo sapiens
tcatatccggataaaagaaaatcttcaatgaattgcaaaatctttagaggcagaaggcacccaagagacaggtcaccatgcagaacaattctaggtggctccattcacatttagcctatgtacgtggtggcccctgggattgtgcagtgcgcaacttacacaactgtatgcagggattctgctgaatccagtcattaccacccttgcccttcctcacacacagatttaggatccttttacagaggaggcaagtgaggcccagaggaggaaagcaagttgttcaaagccacccagctaaccacagagccagactaaaatccagattattgaattttagagcaatattctttcctctctacaatgatgactggaaaggatattgtcacccaaaacagccacctccaccacagcaataagttcattcttaaaagtatttgtttcaggccaggcatggtggctcacgcctgtaatcccagtacctt

SEQ ID NO: 8144 - DNA, 495 bp, Homo sapiens
aactagatggagtcctggcactcactgtgattgagaacacatgacaaactaataggtttactgggcaggcggctaagctgatctacttgctggttcaattagctccactttccggaggctagcattttcccaaccttgccccatgctcttgtgggtacatttaccctatttggggccttagcgctttacaaatgaacgtttcagtttaagagacattgccacataacttatattaagtggtatgaattcaaaagcaagctctgccactacacatcagaatccagcactgaaggaggtgtggaagtcagaaagatggacaggaagatcccttcaggcttaaaaaggaccccagggccgggcgctgtggctaacccttgtaatcctagcactctgggaggccgaggcgggcggatcacttgaggtcggcagatcgagaccagcctgaccaacatggagaaacgctgtctctactaaaaatacaaaattagccgggtg

SEQ ID NO: 8145 - DNA, 465 bp, Homo sapiens
agaaagcagccaccattggcaagccaagagagagccctcaccaggaacgattggaccagcaccttgatcttggattttctagcctccagaacttacagtacgggtggctggcaagatggccgaataggaagagctccagtctacagctcccgcagagatcaacgcagaaggaacagcagtctcagcggttagcagcacaagagatgatttacacaatgaagaaagtacatgcactttgggcttctgtatgcctgctgcttaatcttgcccctgcccctcttaatgctgattctgaggaagatgaagaacacacaattatcacagatacggagttgccaccactgaaacttatgcattcattttgtgcattcaaggcggatgatggcccatgtaaagcaatcatgaaaagatttttcttcaatattttcactcgacagtgcgaagaatttatatatgggggatgtg

SEQ ID NO: 8146 - DNA, 328 bp, Homo sapiens
  misc_feature 328: n = A,T,C or G
gccacccagtttcacacaggccagagaggctgacctacctgcccagaggcaggggaagaatccagaggacctctcccggaggaggcacgagaagcccacgtggcagccaagaagagggagagcatcctgggccccggaagcacaatgccaggggcagacatgcactgggaggcacggggccagggacaccttcagtgagcacagggtctgggtaggcttcgggaggggtgagggcggagaggcagccaagccgggttgtgggaggccctgcctaattctgtaaagactaggattagaaacatgacaaaaatgggttaggcacggtggn

SEQ ID NO: 8147 - DNA, 155 bp, Homo sapiens
cgagtgggaagctggtcagaggggtgggcactcctctgggctccgccacctcctggcacaccccatttggtctctgtccactcctgtcacctgctgtttttgaagcaaattttggaattgtgtcattttatttgtcagtatttcagtatgtaaag

SEQ ID NO: 8148 - DNA, 350 bp, Homo sapiens
aaacaccacttttgagatgctaaaaattcagtcccaatgggacttgttcaaattcagttcagtttctggtcatcaaaaaatcaatctgttttaagatctagtcttacccatgaaaactttaataatggtagatatctaaaacatgagttaattacccccaaaatgtttcagttttttcattgttatattgccaaaaaccattctggctatatatatttttaaaagaagccatttgcatgtcctttagtggtagaatagaaatttggttaaaattggatgacatttactttaattatcttcaaagtatgatgaacttttcatgtgtggaatgtgtggtctgataatttttt

SEQ ID NO: 8149 - DNA, 549 bp, Homo sapiens; identical to SEQ ID NO: 503

SEQ ID NO: 8150 - DNA, 398 bp, Homo sapiens
catatagagattgcaactgagagttggtcgtaaaactaaaaatattgttgggaacagagcaggtcaaaactcccatgattgatctaataatggaattatactggtaaaaagccactgcacttcagcctgggcaacatggcaagactctgtctctaaaaagagacaaaacagcataaaaatatgcttgatataaactctagccctcttctagttatttgttcatttgtacattttcatttcacgcctgtaatcctagtagtttgggaggctgaggctggcagatcacttgaggtcaggagttcgagaggagcttagtcaacatggtgaaaacccgtctctactaaaaatataaaagttagccgggcctggtggtgggcacctttaatcccagctagtcg

SEQ ID NO: 8151 - DNA, 300 bp, Homo sapiens
aattccgttgctgtcgaacgtcttgaagaatagtgaaaagtcaaagtttcaacagcatgtgcctttccgggaaagtaaactgactcactattttcaaagtttttttaatggtaaagggaaaatttgtatgattgtcaatatcagccaatgttatttagcctatgatgaaacactcaatgtattgaagttctccgccattgcacaaaaagtttgtgtcccagacactttaaattcctctcaagagaaattatttggacctgtcaaatcttctcaagatgtatcactagacagtaattcaaa

SEQ ID NO: 8152 - DNA, 282 bp, Homo sapiens
aaccgatcactaataaacatcagaagaacccaaattggggtatgttctgcaaaataactggcccatagtcttcaaaaatgttacggtaaaggaaggtgaagaaaggctgagaagttggttcagattaaaggaagctaatgagagtggccaatgcagcttgtggtcaccagtttggttctggaccacgcagctcatggcaagaaagatattatttggataactggtggaatttaatatgaactgtggggctgggagtggtggctcacatctgcaatcccagcg

SEQ ID NO: 8153 - DNA, 340 bp, Homo sapiens
gcccccaaactcctccatcccagcaggcccagagccactgataatctcagcatttcctggccctctctgtctctttgcttctctctacctctgtttttctttccatttatattcctcacctgcccttcctcttaacatgtagctgattccctaaggcatcgtgttgcagtaaaaagacctggatgctggattcttacagaccctggtttaaatcctgacttttacacttatcatatcactgatacctgttaaaatctgtatttatcacctctcaaaccctcagtttcttcatctgaaagtgggtatactagcttgcctcattggatgacatattgaacaa

SEQ ID NO: 8154 - DNA, 457 bp, Homo sapiens
attccgttgctgtcgaaaagaagttaaaacgttcccacaggcccataaaagtcttgtgagttctggcattgtggttcacacatcagatgcccaagttggccctggtccgcagcagaggagggctttgatgggacttagggtatcacaggtgtgctctggctgttgtggggaacagactgtaggcagccagtgtggaagtgcagggacctggaaggggttgactgcactggccctggaaggccctggtaagaggtggtgaggttgaaaataaggttgggggggccgggcgcggtggctcacacctgtaatcccagcactttgggaggccgaggcaggcagatcacgaggtcaggagatggagaccatcctggctaacacggtgaaaccctgactctacaaaaatacaaaaaatttagccaggcgtggtggcgagcatctgtagtcccagttactcggg

SEQ ID NO: 8155 - DNA, 212 bp, Homo sapiens
acgacagaagggtacggctgcgagaagacgacagaagggtacggctgcgagaagacgacagaagggtacggctgcgagaagacgacagaagggtacggctgcgagaagacgacagaagggtagccatgtgtggtggcaggcatctgtagtcccagctatttgggaggctgaggcaggagaatcgcttgaacctgggagacgaaggttgcagg

SEQ ID NO: 8156 - DNA, 296 bp, Homo sapiens
tcatgggaagaagttgaagggttttagttagggagagtcataataaaggttgcagtttaacaatgtcattcttgaggaataccaggtaaacttacagatcaaacacttaatttatttctacttcctccgaaaactccactgacatgaccataaagagtcaaataaaggccaggcgcagtggctcacgcctgtaatcccagctatttgggaggccgaggtgggcggatcacaaggtcaggagattgagaccatcctggctaacacagtgaaaccccatctctactaaaaatacaaaa

SEQ ID NO: 8157 - DNA, 509 bp, Homo sapiens
cattcatcactatttttagtttaaaacaagagcaacacatctggaaggtattggcttttcaagtcaactgctggaaagacagctggggggtgtccatttcaggaggcttaccttggtatcctggggtcgtgccacgtgctaactccagtctgtgtatgcaaaaagtaaacttggccctggactgttgttctttgttctacacaagaaattagagatccaaatgagacaagttcaattccagggagagtttgtaaccaaccctcgatgccctcacgtctggtattatctaaatctagataacactcccctcttatcccagttcttctctctgaggtggccgaataatcccctcttctccatctcgccccatgctctcctttccagaacactacagacaccctcatctagcctacatgttaccttggtttgctttggtgttcgtttgcctaagattttcacttgatttctaaactgggagatttggagcaattgctgaaaattcatgatta

SEQ ID NO: 8158 - DNA, 430 bp, Homo sapiens
  misc_feature 375: n = A,T,C or G
gacagaagggctgatccactccaagtgttctcagggcattgggtttttatcctatgacgatgttaatttgacaggcaatttgtctccacagcactcttctcttcctctcctatagtggggacagcatctagtgcttcaattaccttttcagtccagtcatttgcacagggcttcgatcactctgggccaagcactgtgctaagggttttacatgaattatctagttcagtccttacaaccactctatgagatgggttttatcttcatcattctcatcttacaaatgaggctcacagtagttaagtaagttatgcaaagatacccagccatcaagtatcagagcaagaattcaaacccaactttaactcacttcanaactcaagcttggctgggtgtgatggctcacacctgttaccccagcactttggga

SEQ ID NO: 8159 - DNA, 143 bp, Homo sapiens
gaggtttctgacccccatacccgtcctgcagccttcgagcaaatgtgtggaaaggaaaataacccatatcgaaatcagaacaacggtgttttaaaaatacgaattgagtctggccaggcgtggtggctcacgcctgtaatccc

SEQ ID NO: 8160 - DNA, 597 bp, Homo sapiens
ataactcatgtgataaaggccactattagttattccattgaacagcaggagctggagcatgaaaagggtaacgatcagttcaagttcattcagaaatccttgactctactgtctcagcctcactctgaaatacatttttataggccaaggatcagcaaacttcaaccagcaatccaaatctacctccatgcctatctttataaataaagttttattagaacacagctatacccagttgtttacatattatctgtggctgctttccacactgtgtcagagtcgagtggctacaatagagactgtatgacccacaaaacctaaattatttgctctctggacctttacataaaataatttgtgacctctaatctagaccaccaatagttttgtttcttcctgcccttcttaaaattctgatcacaggccgggcgcggtggctcaagcctgtaatcccagcactttgggaggacgaggcgggcggatcacaaggtcaggagatggagaccatcctggctaacatggtgaaaccccgtctctactaaaaatacaaaaaattagccgggcttggtggcgggcgcctgtagtcccagctactcg

SEQ ID NO: 8161 - DNA, 500 bp, Homo sapiens
ctggatgtcagcaagaatggaatacaggagtttccagaaaatataaaaaattgtaaagttttgacaattgtggaggccagtgtaaaccctatttccaagtaagttctcaggctccctgatggattttctcagctgttaaacctaacccagttgtatctgaatgatgcttttcttgagttcttgccagcaaattttggcagattaactaaactccaaatattagagcttagagaaaaccagttaaaaatgttgcctaagtaagtaaaggtgctattctttaaaaaacttaatttataatttttaatgattaagtctttaaaaatgtaaatttttattacctaaaatgtggtgcaaattatttgtaaatcctgactgtgtggtcatcatatttaattaatggtgttaaaatattaaaatgtatgtgtctgttgttggtgcttaacgtggtactgtgttggtaatgatttatagctgtctgaaatgcagtcttgtgtgtgaca

SEQ ID NO: 8162 - DNA, 587 bp, Homo sapiens
ggacagcgacctggattgtccttctcccttctctgaaaaattaccccccatatctcccgtgtccacgtcaggggatgtctgcaggttggtttgccaggaagtgccattctagccatctctgctcgcatcaggaacctcctcttgctttagtatgtgaagtttcaggaaaatgaagtaataggaagttgtaaccagttgtgggttgatggttttctccagaagaatggagtatcaatatcgtttgaaaaacttaatttttatgatgtgagtcccaagatagttttacaaatgataaaagaggaagaagctggctgggcgcagtggctcacgcctgtaatcccagcactttgggaggctgaggcgggtggatcacctgaggtcaggagtttgagaccagcttggccaacgtggcgaaaccccgtctctactaaaaatacaaaaattagccgggcgtggtggcgggcgcctgtaatcccagctactcaggaggctgaggcaggagaattgcttgaacccgggaggcggaggttgcagtgagccaagattgcgccattgcactccagcctgggcaacaagagtgaaactct

SEQ ID NO: 8163 - DNA, 591 bp, Homo sapiens
cgagggccgctcctccacagtccccctgtggctgtggcaacagccaagactgctgctgctgctgctgctgtgaaggagcccttctttggccaaagctagggaaggaatttcaggggaacttagaaaagtagatcatacatgccagcgctgaagcagaacttaagatcagcaagtcaccacctgcctgattttgaatcctacctatgctatctttcacaagcagacatgcaagctgtgcttgaatagcctgcattagaccggatactctgaaaaacagatgtcaaggcaaaattaaatgtgcagagattttggctgggcacaatggctcacttctgtaatcccagcactttggaaggccgaggcgggcggatcacctgaggtcaggagtttgagaccagcctggccaacatggtgaaaccccgtctctactaaaaatacaaaaattagccaggcatggtggcaggtgcctgtattcccagctactcaggaggctgaggcaggagaattacttgaacccgggaggcagaagttgcagtgagccaagatcgtgccactgcactccagcttgggtgacagaacgagactccatgc

SEQ ID NO: 8164 - DNA, 600 bp, Homo sapiens
ttctagagcacgcaacctagatccctcacatgtgcagttcacaatagggttcacactcctatgacaacctaatgctgccgctgatctcacaggaggcggaactcaggtgggtaatgctcgctggcccaccgttcgcatcctgttgcacagtccagttcctaacaggccacggaccagctgaggacccctgctctagagaatcgccaaatgtgagggtggtcatgaaagtttcaaacaggtgttaaaggcaaagtgatataaaagaatcatcactgcagttttaaagagtcctataaggaagaactctcatctttttctcttgatcaaattcactttcagaccaaagagacatgcatatagaatttaagcagaatactgtgattcatgtaagaaaaaataaactacagagatccagaaaacaggctgggcgcaatggctcatgcctgtaatcccagcacttcgggaggccaaggtgggcagattccttgagcccaggagttcaagaaaagcctgggcaacatggtgaaaccccatctctacaaaaaatataaaaattggccaggggtgggggtgcacacctgcagtcccagctatttggga

SEQ ID NO: 8165 - DNA, 95 bp, Homo sapiens
cgagactccatcccaaaaaaaaaaaaaaaaaaaaaaaaaaaaagggggcgttttttcccgaaacccccccctgaaaaaaaccctggggggggggg

SEQ ID NO: 8166 - DNA, 204 bp, Homo sapiens
gaagatggggaacgacttttaatgggtttggagttctagggagagggttaatgaaaatgttcttagacttagataaatgttctagacttacgaaaaatgatgaccaatttctccactaaaaggataaatgaattattggttaaggaaaaaagaatgcattaacagtctgggtgcggtggctcatgccagtaatcccagcacttc

SEQ ID NO: 8167 - DNA, 604 bp, Homo sapiens
gaacgcggttcccggggagactgtatgatttttcaaatttttatcagtctaagtataagagaagaactctaacctccccaggtgatttggatatctactctggagataaagttggttcatcgttaaaatattctgatgaaagcaagcattgtagaacaccattgggcagcttattcaagcacgtaaatgtgaattgcctagatgatgaactggattctttccatgatttgaagaaacaggaaacagaagaagagttaattgaaaatgattatagagttagtaccctcgaaaataaccaagcagtcttttaaagaaatagaaaaagttgccttgccaactaatacgacctcatcgagacctcggactgagtgttgtagtgatgcaggtgactctcctttgaaacctgtcagctgtccaaaatctaaagcatcagacaagcggagtttacttccacatcagatcagtcagatatatgacgaattatttcagatacatctgaaattgcggtgtgaaactgcagcacaacagaaatttgctgaagaacttcaaaagcgagaacgttttttacttgaaagagaacaactgcttttcagacatgaaaatg

SEQ ID NO: 8168 - DNA, 567 bp, Homo sapiens
tgcccaggctggagtgcagtggcgtgatcttggctcactgcaaactccgcctcccaggttcaagcgattctcctgcctcagcctcccaagtagctgggattacaggcacccaccaccatgcctggctaatttttgtatttttggtaaagatggggtttcaccatgttggccaggctggtctcaaacttctgacctcaagtgatccacccacctcatcctcccaaagtgctgggattacaggcatgagccactgtgcccggccacatttgtttccttttaagaggatttttacattatgttaaaaatcttgattggtagaagttatatttcataattttcttcttcctttgtatgaataatatgcttttatagtgacgtcacaagaggtgccttttgcagagtgcctcatacgtgtcactggactaagtaagcattttatctcattaatcttcacaacaggctattagagtattataattttaattttgcagatgagaaaactgaaacttaaaatgttttaaacttggcaaggcacggtagctcgatagctcacgcctgtaacctaat

SEQ ID NO: 8169 - DNA, 548 bp, Homo sapiens
aactgttgtatttttaatagacaatttcacgacgttggcgaggctggtcttgaacccctgacctcaggtgatccacccgcctcagcctctcaaagcgctgggacaggcgtgagacaccgtgctgggacagtagtaacttctaatggataatgtatgcgtggggtggaaaggggagtaccagtatttttatttcaaacacatatacaaaacaccagcttgcaattcaccctgaagaaccctcagcacagagcagtttcataagtccatgccatcgtgccatatgccttcttcactggccacttcgattagtgaggaaagaatccaaagaagttaaaatatagtgggccgggcacggtggctcacacctgtaatcccagcactttgggaggccgaggcgggcagatcacgaggtcaggagattgagaccatcctgctcaaaatggtgaaaccccgtttctattaaaaatacaaaaaaattagttgagagtggtggcgctcacctgtagtcccagctactcaggaggctgaggcaagagaatcgcttgaac

SEQ ID NO: 8170 - DNA, 571 bp, Homo sapiens
tggagcacactcctgcagtcattcaaggaagaggcaaggcccatgattggcattctcagtcaaatcacacgaagggctgcttttctgatatagtaacacccaacagatgaaatcaggagatttcctcttcaagccctttacatttccattgtggccagagtctcagatctgggtgcagacacaaccctgctacactacaggcctgtcctttgaaattcctccacatccattcctcaagcagtctccagtctgggtcaagctcctggagaggctcatcttcccacctgaactctcaaacatccttggtcacataggattgattaagaattcattcctggagctcctgctgcagaatttcctcctccctattcacctctgtgcatctctttacttccttgtttaagaaacaagggcaggccgggcatggtggctcatgcttgtaatcccagcacttcgggaggctgaggcaggtgtatcacctgaggtcaggagttcgagaccagcctggccaacatagtgaagccctgtctctactaaaagtacaaaaaattagctgggcgtggtggcaccc

SEQ ID NO: 8171 - DNA, 54 bp, Homo sapiens
aatggagggctctgtgaagtctgaagttatttattattgaaaaggaagaaaagt

SEQ ID NO: 8172 - DNA, 353 bp, Homo sapiens
gtcatcaacatcctcattgtcatggcaaattgtgagtttatctttgccagtgtcagatagttcatcaacttccttttagccagattgcaaaaagtcccatgactctatttccaactccaatgccatctgacatgagacaaaatcagagtagattaagatagtggtcttaactgaatgtagttaaagtatgctacttgtgcaaatttttcagaaatatatgaccatatgaacatgttgctgaggccttgccaggccttgaaaggggcctgtgcaagtgaggggcacagagattaagttttattagcttctcagaaattctacctctgaataagatttttgagtactttgcatgc

SEQ ID NO: 8173 - DNA, 200 bp, Homo sapiens
cctacggttgcgataagacgacacaacggcccaaagtgctgggattacaggtgtgagccactgctcctggccctaatttttatttttttagtaaagatggggtctcgctacgttgcccacgttggacttgaattcctgggcttaagggattctcctgccttggcctcccaaagtgctgggattatggcgcatgatccact

SEQ ID NO: 8174 - DNA, 363 bp, Homo sapiens
  misc_feature 193: n = A,T,C or G
aagacgacagaagggtacggctgcgagaagacgacagaagggtagcctggcttaatccacgtattgacttgaacccggcacctctgcatgctgggcacacacacatccacacaggtgagcacagtcgtgtgcacctgcacgttacacaggtgaacttttctcatccagtcctgaggtttccactgcatcttanacacttagccgaggtgtgtcaggaccagcaatgttgtctttgcggccctttgatggtcccctttgcagtcagtcatcccagccatcaaataattgaacacctgagattcctttcagcaaatcatagccattggtagatgcacaaatatttaaaaaaaaaaaaaaaagggc

SEQ ID NO: 8175 - DNA, 343 bp, Homo sapiens
tcaaagtctggtgtagaaatacagcggtgaagagtttgactgtgctttccggctggcacacgagggaatatatacattgtatccatttattaactcaagaattattactgtatcaatggaagatgttaagatactgttgacccaggaaaatcccttttttagaaaactcagcagtgagacctacagtcaagcaaaggacctggcaaagggaatcatcgtgctgaagtatgaaccagattctgcgaatccagacgctctgcagtgtcccatcgtcttatgcggatggcggggaaaggcctccattcgaacttttgtgcccaagaatgaacggcttcattatctc

SEQ ID NO: 8176 - DNA, 421 bp, Homo sapiens
  misc_feature 393, 414: n = A,T,C or G
ctatatacagacctatcgactatgggatctttgggaaagaacaacagttagctttcttagaaaatgtaaagaggtcacttacacaaggaagattatggaaaccaagttttcttaagaaccctggcttcctaaaagatgatttgaggaaccctcccaacccctcagagtcattaagctcaaattctcccagtagtcaggtgccagaagatggcttatctccaagtgaaccgcttaatatctatgaggatgacccagtggactcagattgtgacacagacacaaccacagatgatgaatactacctggatgaaaatgacaaagagtcagaactgtgaggctttttcaataaaatgctttacttttttcccaaaagcttataatggactaaggtgnacatgtgcatgtgcatggaangataaaa

SEQ ID NO: 8177 - DNA, 160 bp, Homo sapiens
ttatactaggaattctttataaacttaataaatgaaagctttttctcttataggcccgattctctagtggacttctggtgaaattatgtggctaccttccattaatgttaatggaggttatggatataaatccctccatagtgatggaagaatgagcccc

SEQ ID NO: 8178 - DNA, 400 bp, Homo sapiens
ctggccctttcttaaaacatttctcttgcttataccaggatgggagtaaaagatgccttaatatttagtttttgtattgttggagacattgattttaataaaatcctatttatctgctgttgtgtgcttttagttgttggataactgaggtctcctaaatggttcaacataaaaccacatttcaagtcttgtttctttttggagtgtcttttcaagtattcaaatgtatttctcaacctgagcatctttttaatcatatacatgggagtcttttaaatgctgaactgttacacatgcttgatttaaaaataataataatagaggaaactattggtctagttgtgccaagaaaagtttctgatgtttatgtgtgatgtacagtgattttgtatatgcgccc

SEQ ID NO: 8179 - DNA, 377 bp, Homo sapiens
ggcaccaggccatctttaagtcctacccgacagtgggggacgtggcgctctacatggccttcttccccgtgtggaaccatctctacagattcctgagaaacatctttgtcctcacctgcatcatcatcgtctgttccctgctcttccctgtcctgtggcacctctggatttatgcaggaagtgccaactctaatttcttttatgccatcacactgaccttcaacgttgggcagatcctgctcatctctgattacttctatgccttcctgcggcgggagtactacctcacacatggcctctacttgaccgccaaggatggcacagaggccatgctcgtgctcaagtaggcctggctggcacagggctgcatggacctc

SEQ ID NO: 8180 - DNA, 329 bp, Homo sapiens
ggcacgagggaaggattagaagatattgacgaagaaagggatgaggatgaaggtgaagaagatgaagatgatgatgaaggggaggaaggagaggaggatgaaggagaagatgactaaatagaacactgatggattccaaccttcctttttttaaattttctccagtccctgggagcaagttgcagtctttttttttttttttttttttccccttttgggccaaacccccttttttttggggctttttttttttcccccagggttccaatttttttggggggaaaatcctttggccaaaaaccaggggaaaaaaattttttccccttttt

SEQ ID NO: 8181 - DNA, 621 bp, Homo sapiens
cggtgagtgtaaatttggcactgaagtgtggatgcagactcccacgcccctttaaagtttttctagagcttccatcccaagcagagccctgcctggccatcttctttgaaggactcagcacttctgctttcataaggcttggtgggtgtttctagaccttcctaggcattgaacctatgaccacacaggacacccctttctctgccctttcagtctcctatctgcccctctgggtcagtggttctcttgtcttcatccaagcctggtcaaatgtgcaagccaccctaggtctgaaggaagaaggaaggtgggtcccagtcttggaaggtactgaacccacgtggtttccttgtttgctcaaaaacagccaaaataagggccctcattccctcgctcaggttagttagaaataggacaaatgagtaaaaaaaaatatacaaggaaatgtttttggccgggcacagtggctcaagcctgtaatctcagcaccttgagaggcaggaggatcacttgagcccaggagtttgagaccagcctggacaacatggcaaaaccctgtctctgaagaaaaatagaaaatgtgcctgacatggtggctcatgcctgtggtcacagctactc

SEQ ID NO: 8182 - DNA, 624 bp, Homo sapiens
agcgtgtcgtgaaccaaggtcgtcattattctagcacaccgaaggtacacccatttcaaaccatgtgagctgtgagtaggcacagggttgggtcgctggggtgggaaaggctgcatgcgcttgtgcctaaggatgtttaacatgagagagctggaatccataataatggttcgcatccacccttgtatgatcatcaggatctcagccttcctcattttactctgtccatttcatttttgcttttattttttatgttaattgtaggcaaattaacaccttgtttaaaaaataaactggtgggcatggtgcctcacacctgtaatccctgcactttgggaagctaaggtgggagggttgcttgagtccaggagtttgagaccagcctggacaacatagtgagaccctgtctctacaaaaataaaaaatattagctgagcatggtggcatgcacctgtagttctagctactagggaggctggggcaggaggattgcttgagaccaggaggtcagggctgcggtgagccacaatcatgccactgcaccgtagcttgggtggcagagaaagactgtctcttaaaacaaaacaaggctgggcacggtggctcacacctgtaatcccagca

SEQ ID NO: 8183 - DNA, 637 bp, Homo sapiens
attatctactggatttttactttcatgaaaataaaggacaccttcaataaatgagtttttactgcgttttggtttttagaaatacggtcttactgtgttgccctggctaaattcaaactcctgggctcaaataatcctcctgcctcagcctcccaagtagctggggctccaggctcgtgccactgcacccagctagttttcacttctttaaggtgcataatgtaaacgtgaagatgatagagaaagcctgtgttagacatttgcatttcatgggattgagccaaatctgggctgtttgctttctctcatgccaggcagggcagccaggggaggaggtgtcagcatggcatctggcaaaggggagaagaggacactcagcagggaggagccattactcaggctggggtccgtcagcctctgggcttcaccagcaatccccaggcagagtttaatgcagccaatcaaaagtgcatagctgcattcagctgagcccttgatctgaagtggctctactctggtcaagggggctcaaactccttggctaggacttgaggcatcaaagatgacaccttttcctttgggaagtactaatgagcctactcaattctctagatgtttcctaacactagtggtaaac

SEQ ID NO: 8184 - DNA, 616 bp, Homo sapiens
tgctggtcccactacaataattacacccacggctagaacatggagcaaagcaacaaatttcaacatcacagggtggagagggcagggagaatcacaaagctgttgaaactgaagttctcaatgcgtgcgatttatggctgagcagctatctcagtctgtagcatcaaagccttaggtgagagcagaggtgacagggacacccaatgcctcggtggccagttcctgctcaatttgaggtcacaggtcacatgagatctatctgttgacttggaaactcttcaaatctgggcacaactccctgttcccacagataactccattcttctcacacgcttttgggtatctcgagtggtgattgagaatagctcctgctcctctccttctctgccagctgctagaggaaatgtctccactatgaatagtaggaattgtgtttaatatttgcgagatttgcttcaaaatcatgtggataggccgggcgcggtggctcatgcctgtaatcccagcactttgggaggccgaggcgggcggatcacaaggtcaggagatcgagaccatcctggctaacatggggaaaccctgtatctattaaatatacaaaaaattagacaggcgt

SEQ ID NO: 8185 - DNA, 648 bp, Homo sapiens
cactataatgtaaaaaaacaattaggcaaggatagatatatgtaaaataggtgaagggtggggatcaatccgaggaaggtgtgccaaacgggaagacagcttcacaatccagtctgttgatttacctaggacttgtagctagggtttaaactgtttttgccttgaaggtggtatttcactgggtgtgtgccctgatctgcctaggagttgtctgccttctaccactctcaataacaaaaattgaaattgcacaaatctttcaattacggatgatgacaaaaacactattaaacattaatggagctttgccatttttagaggttggagttaaaggctgaccatgataatccctttaaagtagccactacaattaactgctacctcttatcccacaaattataaagtatcttcctattagagacatctcaaagcactttgggaggccaaggttggaggatcacttgagttcaggaattcaagaccagcctgaccaacatggtgaaactccgtctctactaaaaatacaaaaattagccagacattgtggcatgcacctgtaatcccagctacttgggaggctgaggcaggagaatcacttgaacctgggagatgaaggttgcagtgagcctagatcacgccactgcactc

SEQ ID NO: 8186 - DNA, 438 bp, Homo sapiens
  misc_feature 368: n = A,T,C or G
tacggctgcgagaagacgacagaagggtacggctgcgagaagacgacagaagggatcccaacaagaaataccttgacacccctggccgggcgcggtggcccacacctgtaatcccagccactttgggaggccaagtcaggtggatcacctgaggtcaggagttcgagaccagcctggccagcatggtgaaacgctgtctttactaaaaatacaaaaattggccaggtgtggtggcaggtacctgtagtcacagctctcgggaggctaaggcaggggatttgcttgaacccgggaggtggaggttgcagtgagccgagatcgtgccattgcactccagcgtgggcgacaagagtgaaactccgtctcanaaaagaaatacctcgacaccccttaaatctaaatactcatagtcccaaaaaaaaaaaaaaaaaaaaaaaa

SEQ ID NO: 8187 - DNA, 564 bp, Homo sapiens
atgacctttccccgctttcaccagactcagtgaaggacttctctgaggtattgacagaggcctcagatggccaaggggccagatcctctttctcctgcactccacactggattgtgacacaagcaaaagatcatcctttatttatgttacttatgttaaatgactgagatctggaccttgtttgttagcttatcctgactaatgcatacaggaattttaccattatgagaaagacagtaaaaatattagacaaataccaacttaaaaattctaatatgatctaggctgggtgcagtggctcacgcctgtaatcccaggactttgggaggccaaggcgggtggatcacgaggtcaggagttcgagaccagcctggccaacatgctgaaagcccgtttctactaaaaatacaaaaaattagccgggcatggtagcacgcacctgtactcccagctaatcgggaggctaaggcaggagaatcacttgaacccaggaggcggaggttgcagtgagccaagatcgcaccactgcactccagcctgggtgacagagcaagactctgtctc

SEQ ID NO: 8188 - DNA, 549 bp, Homo sapiens
tcttctgacctcgtgatccacccacctcggcctcccaaagtgctgggattacaggcgtgagccactgtgcccagcctaggcttcatttttgacccctccatacccattcacacaaatgtggttccattattttgatggatcaatttgttccgccaggacaactgtaatatgtctggcagtgctttcactttgatcatctaattagatttgctcctctcacccaccctgagagataggtaaggacatggattctccctaaattaactggctggcaacaagataattagtcacaatgtttgaactggcttattaccgcctgctcaggcattcacaatggaggcaattttcttaagtacatgttcaaggcaaacaagggtcacctggtatggatgtagctgttgagcgttagctgagcctcatcttgaagggctgcaatggcggcagcattccggaaacttctcagttcagaaccactatgtgtaggaactagaaatgaagaccaggaaactgtgatagacagcatagaaattgcatctgggagccgagcgc

SEQ ID NO: 8189 - DNA, 323 bp, Homo sapiens
ctgtagctggcctcagtcattcagtccacaagcagagagaacccctactgggtggctgacactgtgccaggccccaccctcaagatgctagagaagagataggacaggcccaggttaatctcttttccaggcaggctgtggagtaaggaaggaccacagcagagtaaagcaatggagaccgacgtctcagaaaccctcagggaagttggcattttaactggtctttgaagaccaggtaaggcttttaaaaatgtatattaaacaaattaatttttcccattatatatgtagttaagacatgttcataattttttttttttgaa

SEQ ID NO: 8190 - DNA, 91 bp, Homo sapiens
ttatcatggtgcttggcatattgtaaatactcaataattatttttttctaaaaaggttgaatgaatttctactgcaggttttgggctttta

SEQ ID NO: 8191 - DNA, 384 bp, Homo sapiens
aagttcaatttctctataaattaatcattaatgttgaaggcacactgaagcaagaccagcatatgggcccctgagtcaaattaacaaggttttcttgaagtattaactgtctcctatataaatattgtaaaggttatgaaaggcttatggaagttgtatcttatgatcaagattaaaattttataatttttaaataaaattttgaaaaacaaatttacttggcttcttgtgcacctgtccaagattaagcccgtttcttatgagtccccacaggcacctgagaaggacaccatggcctacacttgtgaacccttataatacctaaagctgttgttttagaaataaacagataatggggccaggcgcagactcacacctgtaatc

SEQ ID NO: 8192 - DNA, 552 bp, Homo sapiens
aacacatatggtatatgatatatgtattatgggactgtattcttactaaaaagtaagctagagaataaaaaatttattgagaaaatcataaggaagagaaatatatttactattcattaagcagaagtgaatcagcataaaggtcttcattctcgtcatcctcaggttaagtaagccgaggaggaggaggaagagaaggggtttgtcttgctgtctcaggggtggcagatgatggaagaaaagccacatataagtagattcgagcagctcaaacctgagttattcaagggtcaattgtgatttgatttcctctagcctttaagtacatccaatttactaacctctttatggctgccttacctactatgccagaaagcctgcttttctcatctaaatccttttaaattatagtcacatcattgagatgcacccatatttcattctcatcacagaaagatagcaaaacttatttttaagatcagccaggccaggtcgggcacagtggctcacacctgtaatcccagcactttgggagactgaggcgggtggact

SEQ ID NO: 8193 - DNA, 589 bp, Homo sapiens
catacaacagcagcatacttattaccttgaattggtgatttaatagaggcacagctggtagcacaatacatattgtttaaactatttgagcacatctggtcatatcctattaaatcatttaaatccaggtaaaattggggacctccccacgtccatgggaattatgacagaaaactttccgaacagcaaaacacatgcaaggagacacagtaatacctacagaaaaaccttactagtattcaagttaaattaggtatttgttggaccctgggataaatgtggaaattgacaaacacaattaaaagacttactttggccaggcgcggtggctcaggcctgtaatcccagcactttgggaggccgaggcgggtggatcacaaggtcaggagatcgagaccatcctggctaacacggtgaaaccccatctctactaaaaaatacaaaaaatcagccaggtgtggtggcaggcgcctgtagtcccagctactcgagaggctgaggcaggagaatggcgtgaacccaggaggcagagcttgtagtgagcggagatcgcgccactacactccagcctggacgacagagcgagact

SEQ ID NO: 8194 - DNA, 378 bp, Homo sapiens
aatgggtttactaaatatttttagacaatttcttaagtatctacttttatttgcatacagtaagttaggaaagacatttaatgttcctcatacacctgctgtgttattttgtgtgtgtgagacagagtctcgctctgtagccgagccaacctccacctcccaggttcaagctattctcctgcctcagcctctcaaatagctgggattacaggcgtgcaacaccatgcccggctaatttttgtatttttagtaaagatggagtttcaccgtgttggccagactggtctggaacatttaatgttccagaggcggaggctgcagtgagccgagatcgcaccactgcactccagcctagacgacagagcgagactctgtctt

SEQ ID NO: 8195 - DNA, 315 bp, Homo sapiens
aaaagcttggcccagtgtaggccctaaataaatattttctgaaataataagaatattttgggctgggcacggtggctcacgcctgtaatcccagcactttgggaggccaaggtgggcggatcacaaggtcagaagttcgagaccagcgtggccaacatggtgaaaccccatctctattaaaaatacaaaaattagccaggcatggtggtgggcacctgtaatcccagctactcaggaggctgaagcaggagaatcgcttgaatgtggcagggaaaggttgcagtgagccaagattgtgccactgcactccaacct

SEQ ID NO: 8196 - DNA, 401 bp, Homo sapiens
acattctgaacttccgtttcctcatctggaaaataaagctagtactgggaaatagtcataatttttacaaggattgcattcaattaaaacatctagaacatactgcagctcttactttaataagataagaaatcctctccaggtgggtaggagtgaccgacagcaaggagtcatggactggagaaatgcctggagtccacagggcagaggagcttccaaatatttggtttaggacagagtcagacagtcatatagcctccagtcgcagacaggagctcaagtattgaacaggaaactgaggcagaaattccaattctgaacaagatggaggcgacagggcacggatttggcatgcagataccccgggctccctccgtctccatccccatccccccatccct

SEQ ID NO: 8197 - DNA, 477 bp, Homo sapiens
atatcctaagctaaatatgtaggttattcattctattagaggaatatgaagtccatgttcttagtgaactggcacattgagacatactgcctgatgagatgggctgccaaattagtaattgtacttttcaatgagatgaagaaacatctatcttttttttctcaacttagtctgaaaaaattttatgtcattggtcactgaaataacacatattctttgtacaatacaaaaaacacataaagaggaaaacaaaagtcaactagtatcttattttctgttcacattattttagtgttttgctttttagtgcatcttcaatgcctttgtatttgtttatatgataatatggtataataatatagtatcttgagctgggtatggtggttcatactggtaatcccagcactttggaaggccaaggtgtgaggattgcttgaggccaggagttcaagaccagcctgggcaacatagcgagac

SEQ ID NO: 8198 - DNA, 629 bp, Homo sapiens
aaaggcaaaaatctcataaatctagtttaaaacacagcaaaacctggggggtggggagaagctggcaaaatgcatataaggcattaatagataatacagaaagacctccaagaaatcaatacaaaacatttttagaagtccattttaacttctgtcaacattagcaggacatctaatttgaatacccactactgtgctcattcgagaaagttcaataaatatcttttcatgcctaacatgtactaagggctagagagatcagtataaacacaacagatgtgtaccactctctcaggtaacttacagtttggatttgattcttacgtgataaaagcattccattataggatcatctctctgtgcccacagtactaataaataattctaatccatttgtttatttatttctccatagttctattatgttttccattgttttggaaatattataattctcatgctacagggtcccacaatggggtaatgtatatttttaaggaatatttcctgtttcttaattcatcatacttttaaccaacttattgggctcacattctgtaccagtctgtaatatatgctaggactataaaggtcagtaaaggtgattcctgttctcagggaatttacag

SEQ ID NO: 8199 - DNA, 434 bp, Homo sapiens
agaatttatgcccttgcctgactggctgccttatccaattcagcatgctggaacttaaaaatattggccgggtgcagtggctcacgcctataatcccaacacatcgggaggctgaggcgggtggatcacttgaggccaggagttcgagaccagcctggccaaaagtggtgaaactccctctctactaaaaatacaaaaaattaccggggtgtggtggcagacgcctgtagcccccgctactcgggaggctgaggcaggagaatcgcttgaacccaggatgcagaggttgagtgagcggagatcgcaccactgcactccagcctgggtgacagagcaagactccatctcaaaaaaagaaaaagggggggatactggatcatgagcaaatgtccactgatgctatcagcacggcgatggagactggcccatggatg

SEQ ID NO: 8200 - DNA, 51 bp, Homo sapiens
gcacatgagtgtacctcccgttttctgcccagcacactccctggtgcactc

SEQ ID NO: 8201 - DNA, 615 bp, Homo sapiens
gtatttatcttagctaagtgcctgtttaattgagtagagtgatatgtgtgaaatgtgtgtagaagtgtgttatgcgtatacatgtggtttagtgacgtaagttgaaactgtgtttaacagagttctgtatgtgtgttaatgagtttattgtgtgtaaccaacattgtgatatatgtgtgggacattgggtttaacatgtggggtgcatgttctgcttggtttaataatatacgttggaacttgtttaatacaggtggttcatgtgatacagaaaataatatttgtgaaagagtatgttaaccatatggatgcacatccttcacactttagtgatatatactgaacctctgtgtttagtgatatatacgaaccactgctaagctagggaggtgtgtgtatgtgtgtgtgtgtgtgtgtgtgtgtgtgtgtgtttgtgtgtttatgggataaaaaatgtgggccgggtgcagtggctcatgcctgtaatcctagcactttgggaggctgaggcgggcggatcacctgaggtcaggagtttgagaccagcctgaccaacatcaggaaaccccatctctactaaaaatacaaaaattagccgggcatggtggtgtatgc

SEQ ID NO: 8202 - DNA, 647 bp, Homo sapiens
ggagaaggaatcactcagtgttatttgcttcatgctagttcattcatatctttcttcacgctagtgtgctgagataactgaaatgtttgggaggatggaaacataggctgctaattctgaaaccagtgatgaagacaataaattgctcaggtttcttagcttggttctgcccttagctcctccaaagaagaatccaatgaaagaaatgtgagacataggaatactaccactggagagaaaggtgtgaactgaactcaagatggagatggagttgtgagctcttttatgattccactctccaagagaggtgtggactatcctctatcagaatccccctgggttgggcctcacatctgaacactcttcttgattagtgtggaactgccgaagtcaggatttttaaggcataataatactatttaacagtactcaggccgtgtgcagtggctcacacctataatcctggcactttaggaagccgaggcaggcagatcacgaggtcagaagatcgagaccatcctggccaacatggtgaaaccctgtctctactaaaaatacaaaaaattagctgggtgtggtggctcgtgcctgtaatcccagctactctggaggctgaggcaggagaatcgcttgaacccaggagttag

SEQ ID NO: 8203 - DNA, 644 bp, Homo sapiens
  misc_feature 406: n = A,T,C or G
ttcatgcatttgacttattaaaacacttctgaacaagatatatgatttctggtaggttttagttacatttacatgtgtttatgttgtgtgtgcatgtgtgtgtgtgtgtgtgtgtatgtatttttggtgttactggcataagttgtgctatgcaatctaggagattgaaactaattatagcagtgaggctaacaaagtgtgaaaagtgtgaaagccatgaatctgaatgaaactttccacttctgtctatgagtttttataaaaactctgatgatattttcacccaaaatatgtgtttttcttattttaaattgttagcaagctaaataaatcatcctgattatttttatattacatgggttaattaatacatttttgcaaatgacatcaattcctttcttctcgngtctcttcttgtcctttttgcttccctctacaaacactcaatgcatattatatgtttttatatacacacatatggaccatggttctaggtgttaaacacacagaggcaaattaaacttcaatcctgacctcagtgaaattacaactcaatttgtaagcatcatgataaggataagtaaaagattatgtgaagtaattcccaagattgtttatggttttatgctacacagcacaataag

SEQ ID NO: 8204 - DNA, 264 bp, Homo sapiens
caatttcatgtcaggaatttatcctacattagtgcttacatggggcacaaattccagtgtactagagtattcactgcagcattgtcagtaattacaaagaactggaaataaccttaatgtctatcaaaaaagacctggttgattaaactggcacattcctcaacaacaacaacaacaaaaacagaatgctatgcaagctgtaaaaaagaatgagaatagatccctacgtactgatatagaatggtctgtaagatattaaatggg

SEQ ID NO: 8205 - DNA, 143 bp, Homo sapiens
ggaggatcttttaatgtaatgacccaccttttcttgttaggtcggccagtggttcctttaccggttcccctacatcaagctccaattcagtttctggccaggcacagtggctcatgcctgtaatcccacacttggggaggctc

SEQ ID NO: 8206 - DNA, 167 bp, Homo sapiens
gaactcctgacctcgggtgatctacccacctcggcctcccaaagtgctgggattacagctgtgagtcaccatgcatggcctggaatctggatttttttcacaaactttctcagagaattacacctgactccactgaattctacaagcccagattttctatttttgct

SEQ ID NO: 8207 - DNA, 562 bp, Homo sapiens
ctccgtcttgccaggcgagtggcgagtcttcagcggcagaacgtggtcctcccttcggggtccctgagctgcaatgcagccgcttgaggctggggacggctccaaggagcccccagtcaccaagaagcagcctccagaaaggccgctgcgggttccggggaaaggcgggctgaacgtgcattcccgtgagactgcctggaggggcgagctctgctgcggggcagggggtgcctgatgtgggctgaggcctgtgcagagaagccaagaggacacctggaccctccgccgagtccagccaccagagacccagagccccccacgaaagcagagcctcgggccgggccctgtggctcacgcctgtaatcccagcactatgggagcccgaggcgggaggatcacgaggtcaggagactgagaccatcctggctgacacggtgaaacctcatctctaataaatatacaaaaattagccgggcgtggtggtgggcgcctgtagtcccagctactcgggaggctgaggcaggagaatggcgtgaacctgggaggcggagcttgcagtgag

SEQ ID NO: 8208 - DNA, 303 bp, Homo sapiens
cccagagagggcaggcattggagatgagtccaaacccaactcctgtcacctgtgagctgtgtgacccaaagaaagttatgtaacctctctgagcgtctaatgtcctctgcaaagcatgaagatgaaaatcctttccaagggttatgtgtgtcttaaaacactttcgaggccaggcatggtggctcatgcctgtaatcccagcactttgggaggccaaggcaggaggatcacttgaggtcaggagttcaagcccagcctggccagcatggtgaaaccctgtctctaccaaaaaaatacaaaaat

SEQ ID NO: 8209 - DNA, 577 bp, Homo sapiens
atcagtaccagctagggtaaacactactctagtatcaagtgtgaggtggaattagtaaatgaccagcctgccaacatggcaaaaccctgtctctactaaaaatacaaaaattagccaggtggcacatgcctgtaatcccagctacttgggaggctgagccaggagaattgcttgaacccaggagacagaggttgcagtgagccaagattgtgccattgcactccagcctgggcaatacagcaagactctgtctcaaaataaataaataaacaaataaaaaaacaaacactacattctactagtcttcatcaattgacttcattcatctccaccttccccaactcttaacttccctatcttcatcttgatggcaaccaatgtaacacaatatgaaatttttacttttaaaagttgacattaataagagttaaaaaactaaacatgcggccaggtgtggtagctcatgcctgtaatctcaacactttgggaggccgaggtgggtggatcacctgaagtcaggagttcgagaccagcctgaccaacatggtgaaaccccatctctactaaaatacaaaaa

SEQ ID NO: 8210 - DNA, 377 bp, Homo sapiens
catacttttcaaaaatgttcctgcctattgtaagttccttgtgagcagtgactgtttcatggtattgtcacctgcacagttcctggcatttattcatgccttgataatgttaatgaagtgaatgaattaatatttggatgtctgtatccttcacaataattgtactgaacaacggcggtatatatatccatcgaataattcctgctcatagtagcaagcctccagtgtttcacctccaaaaatgtccagaataacaacagctatccttagtcaacattttccattaccaaacatttggctaaggaattcacactattgcttcatctgtttgcttcaacaatcccatgagcttagatagagcaacttgctcaaggcta

SEQ ID NO: 8211 - DNA, 407 bp, Homo sapiens
tgtggggtacattgtcaagccacaaacataacctgctctgtaataataccctcctacattgttatcttgctttggcacagtatgattcaagtcttaatcttaacactaaaattaagtggtttcactctattaaaggcatcatcctcaactgaaactcactaaagcatatacacgtcacgtggaacagctgaacacaaagctcttaatctgaagttgacctatttagtaaacctatagctcaaaatttgacctcatcacctcagaaaatcagggataaaatctgtctttatattgtttcaggtacttgggtatcagagacattatttgtttatcaagacctaacaaaacactttcttattttttaaaatttctgtgtgtgtgtgtgtgtgtgtgtgtgtgtgtgtgtg

SEQ ID NO: 8212 - DNA, 597 bp, Homo sapiens
gacagaagggcagctctgccacttatttgtcacaagcctgggtaacttgctgaacctcattttccattttaaacatctgtgacaagggtaatgagagcgcactcattgaacatctagtgcctgtgccaggaactgtgctcagcactttatatgaattctctcatttaatccccaagactgtcattacccccattttatctgaacccacatctgtctggctttattatcctggcagcactcgctggtggaggctgcaggaggatgttttgcaaagcacccacattcaagctttcccatctgtcaccagaaatattctgcaagcatgctgaggccaaacagccttcccccttcctccttccctgccggcaggcagccccgcctttaccaatctggcagagtaggcccctgggacaagaatcccagccccatctcactcacggctcttagaaaagacagtggctggccaggcgtggtggctcacacctataatcccagcactttgggaggccaagcaggtggatcgcctgaggtcagaagctcgagaccagcctgtctaacatagtgaaacgccatctctactaaaaacacaaaaattag

SEQ ID NO: 8213 - DNA, 549 bp, Homo sapiens
tccggctgcgaggcgacagaagggtacggctgcgagaagacgacagaagggtacggctgcgagaagacgacagaagggtacggctgcgagaagacgacagaagggtacggctgcgagaagacgacagaagggtacggctgcgagaagacgacagaagggagatccattaaatctctagtcatatgcatgaaattattagaggtatatgtatactgaaaaaatgaatttagtgctgaattttcatttgcctttcctatatatagtcctctgtattaatgtcagcaatcagattaaaactgaaaatttgacttcctctgcttcctctaataaaatctcatttttaattccttattagagaattatttcagcaatgaaggataatcatattttaaataaaaaactgtctcttatcagaaagccttattgctttaaatcattcttaaagatgtatttgaatgccttgttcaccagcgagaataggtactacaaggaaattcagaagaccaacaagtgggtcgggcacagtggctcacatctgtaatcccaaca

SEQ ID NO: 8214 - DNA, 646 bp, Homo sapiens
gaaattaggtgcttcctctatattcattactcatgcgtgtttattaaaatttagttatataaatgagaacttgacacattaacaagtagttatatggctgttaactcaatttctctttaaagacttgagaaaataagggaaaaatgaaagttaaaaagaagaccctatttattgaactacagccatttcattctcatgaaaatggtatgttcatggccaatgcagttaatttactggtgaacaaaagtagtccaaactagttcattgaaataatatagtgcaaatccactgacctcagaaataacctcagaaacttatatctaagcttaaaaggggccgttgtctgggcgcggtggctcatgcctgtaatcccagcactttgggaggccaaggcgggtggatcgcctgaggtcaggtgtttgagactagcctggccaacatagtgaaaccctatctctactaaaaatacaaagaaacttgctgggcgtggtggtgggcacctataatcccagctactcgggaggctgaggcaggagaatcgcctgaacctgggaggcagaggttgcagtgagccgagattgtaccattccactccagcctgggcaacaagagtgaaactccgtcccaaaaaaaaaaaaaaaaaaaa

SEQ ID NO: 8215 - DNA, 533 bp, Homo sapiens
  misc_feature 432: n = A,T,C or G
actttccctgaatcattgatactttccatgatggagggtgcagcctgggatagtgctggtggggccaggaagctgatggaagctggctgatgcatgggcttgagctggagcctgccttgatgggtggtggacacccctgaccactggcggtgaggagctctgccatggtgctcatgctaaagtggcatcgactcccttcctgtggcggggctccctgccatgtgccagctctgtgctggccacatgacatgctatctaatttaatcttcccagtggccctgttttacagatgaggaaactgctgatgctcagagaagttaactgtcttgcccaaagtcacagaattagtacctggtagatccaggattttaccctagaccagtcttacttcacaggctgtgccgtttctcctaccctctgtcacctctactnggtgggtgcctgaatgtgcctggctaagcctgggcccctagcattgcctgtctggctccacacccccaccaagctgtgtcttccctctccctgcttggggc

SEQ ID NO: 8216 - DNA, 598 bp, Homo sapiens
agtggtagtacaaagaatggtaggataacaagaaattagacttttgcaagtctctgatattttacatgaagtggtgcattttaaactaagtagactgtagaaaaacgtgcagtagtccagacacaggggctcacacctgtaatcccagcactttgaaaggccacgacaggtagatttgaggccaggagttcaagatcagcctgtccaacatggcaaaaccccatatctactaaaaatacaaaagttagccgggcatggtggcacttactgtaatcccagctacttgggagactgaggcacaagaattgcttgaacccggcaggcagagcttgcagtgagccaagaacacaccactgcactccagcctgggtgacagagcgagactctgtctcaaaaaaaaaaagaaaaatgtgcagtatatattatagttacaaaagcaacaacttaaaaaataatacaagcaagtacagttcaaaagtcagtagagaagttaatatactaaaattgaacactaagaaaaattcaagcaatgcaaaagaggaaaagaacggaggagcaggaattttaaaagaaatggaacagatacaggccgggcatg

SEQ ID NO: 8217 - DNA, 396 bp, Homo sapiens
  misc_feature 185: n = A,T,C or G
gtgctacctgacacctattgggacattcgtcatgtcctcaaatacaatgcttcaaaaaacgctgctgatcttgatctctttttcagtagtaacctggatgatttttataatttctcagaacttcacaaagctttggtctgctctaaacttatccatctctgtccattactggaacaactccgcanagtccttattccctaaaacatcactgataccattaaagccactaacagagactgaactcagaataaaggaaatcatagagaaactagatcagcagatcccacccagacctttcacccatgtgaacaccaccaccagtgccacacacagcacagccaccatcctcaaccctcgagatacatactgcaggggagaccagctggacatcctact

SEQ ID NO: 8218 - DNA, 428 bp, Homo sapiens
gaagcacacagcctcgctgctgtggtgctgttacgcagaacgtgaggctattcctgaggaaactggcaaacccgagtgggcctgtgcccttcaaaaaatgtcaaggttgtctgggcacggcggcctgtaatcctagcactttgggaggccgaggcaggcagatcacctgaggtcaggagttcaagaccaacctggccaacatggcaatacccagtttctactgaaaatacaaaaattagacgggcgtgacggcgcatgcctataatcccagccactcgggaggctgagacaggagaatcgcttgaacctgggaggcaggggttgcaaggagctaagatcacgccactgcactccagcctgggtgacagagcgagactccatctccaaaagggaaaaaaaaaaaggcagggtgcgggggctcatgccta

SEQ ID NO: 8219 - DNA, 452 bp, Homo sapiens
cctgcgtttccctgttaggaacctcggtggtagccggagctctgagaaacccctaggcagaactccttgcctagtttgtggcagaaatcagggaaggaaaggcaaatttcaggtctttctcacaataaataattaaagataggtagatttgattaatggatggatggatgaaacgtgggagtctacgggcaaatatttatcagacactggaagtgtaagttgtcacaaagattatggagtgcacctgtcttatgaccctgttattttatcctagtatatgcactagagcatattttctaactgtgtaaattgaaggctcacaaattagtttagtgagagaaaagataacggattggaagagaattaccatattcattagttgtgtttttaaatttttaaagtaaaatagagacatgatttttttcatgctttcaaatgcatctataaaaaat

SEQ ID NO: 8220 - DNA, 462 bp, Homo sapiens
gttgagactgcaatgagccgagatcatgccattccactctaacccgggtgacagaatgagaacttgtctcaaaaaaataaaaaaataaaaaaaaaatgtatcaaccaaagtcatggagaaccaaaccaagttttgtctacaaccatgattcttacagtttttggtttcaggactctttgcattttgaaaaataactgaacacccagaagcttttgtttatatgaattttatctatcagtatttactatattagaaattcaagtgaggaaaaatttaaatatgtatcaattcatttaacagaacatgagtaaactcattacatgtaaacataaatgacttatttttaataaaaaacttattttccaaaccacaactaaatatataccaaaggaagtctacctgatgaactaatcttataatgcaatcaaaacaaaacagctgaccaaaaaacaggctggggcg

SEQ ID NO: 8221 - DNA, 338 bp, Homo sapiens
actaaagaattatggtcgcttccagttgtaatattttttgtcgctgaaatatcatttaaaagttacatttcaaaatgtatgtatacaactataatatagccattggaaatatatattttaaatgttcagttattttttacagtaatctgtcatgcctgtgtcattgttgacatgaaattaatgttagaatcaatgcaagataatatggatcaggactgaaacagaaataagaattctaacctcataaaagagaaaatgagaagagtgaaatttcaaattccttcaaatggaaggcatgaaaattctcattagctctgggtactaatatagtgggatag

SEQ ID NO: 8222 - DNA, 451 bp, Homo sapiens
tgttctttaaaagtcaaaaggctttttgacctttaaataactcttacatctggtcatcactgttgaaatgttctactaaattttcagagtggaaaagttttaggcttaaaactgactggtaaaaatagaatatttctttgtattgatttttcagtatagctgtacagccagttatccttcgttaagtgtttcggtattaaaactgctcacatttgtaaatattgagcagctttattgtcagaacaagaatcccttggtttcccaatccccaacttttaacattgtaattaaacatcctgtataacctattttattctctgccaaacaattttatgactgctgtttttactctttgtgatgaaaatgggatggagaagataaggttctttgtccttatggtggtatttattatcatcctccatcaatgcagattgggtaaatagagaaaaat

SEQ ID NO: 8223 - DNA, 300 bp, Homo sapiens
tatacatccagattctattcaaagtgccttattagcatcaggtcttggatcaaaacgacctagtttttcatctacaccagttatctcacctgctcctaacagtacaccagctaacagtaacaccaacagtaacagtagccttataacaagtcaggatgctgtggaaagggctcagcagatgaagaaagacctgcttgataagctagaaaaattagctgaagaccttccccctaataccctggatgaacttatcgatgaacttggtggccctgagaacgttgctgagatgactggccgcaa

SEQ ID NO: 8224 - DNA, 414 bp, Homo sapiens
ggcacgagagacgcgctcctgcgccggtatttctgggaaaagccagcttctgtttgcactggtcttcacaactcgttacctggatctttttacttcatttatttcattgtataacacatctatgaaggttatctaccttgcctgctcctatgccacagtgtacctgatctacctgaaatttaaggcaacctacgatggaaatcatgataccttccgagtggagtttctggtggtccctgtgggaggcctctcatttttagttaatcacgatttctctcctcttgagatcctctggaccttctccatctacctggagtccgtggctatccttccgcagctgtttatgatcagcaagactggggaggccgagaccatcaccacccactacctgttcttcctgggcctctatcgtgc

SEQ ID NO: 8225 - DNA, 288 bp, Homo sapiens
aaaataaaagtaaattctaggcaagctaaagagtgaaatgtatcatcacataggaggaagtgggggaaaaaagtgaaatgtaagaaatgaaatgataagaagaacttagtgggtattcgtttgattttggaggcactctaggaaaattctgccagattgtactacatttaaaaaaaattttttttaacttttgtgtgcttcagtttggtcatagacaaatgaaaaggcacatcacaaactaaaaagaaaatcagttcctatatatgataaagggttaatatgttttta

SEQ ID NO: 8226 - DNA, 413 bp, Homo sapiens
ggcacgaggagatccaagtggtttagaaggggatgattgctggtgaaggttctgaacatggtgacaggtgggaggctgagcacacactcgtacaccgctggcaggaagagaaatgacttttctggactacaatttggagataacacaaacattaaaaagaagaaaaaattgtatccctttttgactaagcaattctaggattgttatttttttctcctgaggaaactagcatggatgttcacattcaggtgtggggatgtttatcaatttgctattttagaaaagagaaaaaaagtttagcatgtcacaagataattttcatcaatatatggtacatccatttagtgaaatgctgtacagccatttaaaaagatacagaagaggccaggcacggtggccttacttggctaatt

SEQ ID NO: 8227 - DNA, 583 bp, Homo sapiens
ggcacgagagattatgagcatgtagaagatgaaacttttcctcctttcccacctccagcctctccagagagacaagatggtgaaggaactgagcctgatgaagagtcaggaaatggagcacctgttcctgtacctccaaagagaacagttaaaagaaatatacccaagctggatgctcagagattaatttcagagagaggacttccagccttaaggcatgtatttgataaggcaaaattcaaaggtaaaggtcatgaggctgaagacttgaagatgctaatcagacacatggagcactgggcacataggctattccctaaactgcagtttgaggattttattgacagagttgaatacctgggaagtaaaaaggaagttcagacctgtttaaaacgaattcgacttgatctccctattttacatgaagattttgttagcaataatgatgaagttgcggagaataatgaacatgatgtcacttctactgaattagatccctttctgacaaacttatctgaaagtgagatgtttgcttctgagttaagtagaagcctaacagaagagcaacaacaaagaattgaga

SEQ ID NO: 8228 - DNA, 527 bp, Homo sapiens
gaattcggcacgagcacttgtcaggggagaggggacagcaaggtgggaggttgaagagctttgaggctcagcagcatgtttgtggcattcggtggacaccatggccttgggcggctggacaggtttttgtgatgtgagggacacgcatggggcacatggtaagcttggcaagggctccaggaacgctgacgaagggttttaggacccccacccccatgcctgtaccagggctggcctccagagcgggtgaagacagagcagctgtgggcttttcattctgaggtcttggcccccctggccaccgcaagggactctttgcttgtcagggcttgcaaaaaccaaccttcgagaaagaaaagggaactcttcacgttgaatgttgactttgtgtgtatgcgtgtgtgtgtgtgtgtgtgcacgcgcgcgtgtgcgtgtttacttcatggaattttgttttgtgaaattcccctccaatcgtgtcagaatttacctccatgccccagtcacactgttggttctgcgctctg

SEQ ID NO: 8229 - DNA, 499 bp, Homo sapiens
cataagggagatgctgagtagacaactggggcttatgggtctggagttcagaggagagatcgggaaggtgtccatttggagtcatccacgcagagatgtgtgaaggctgctcaatgattttgaggtttaaagaaaaaaagagatgtgaaaccaggggccctgatgaggctgcccaggtggtaaggaagacagaagagaagccatgggacagctgagcccgggcaccctcaagccttggaggcatgaagtttggtggggatctggcaaagaacacctgggagcagccagcgggcagcagaccccagagtagcagggaagacaagcacttcaaagaggcagcgtcagccaggggcagtggctcagctgtaatcctagcactttgggaggccaaggatggcagatcacctgaggttaggggttcgagactagcctggccaacatggtgaaaccctgtctctactaaaaataaaaaattagccaggcattggtggcatgtgcc

SEQ ID NO: 8230 - DNA, 516 bp, Homo sapiens
  misc_feature 457: n = A,T,C or G
tcgcagcgatagcccaaaggctctgcagtattccctccaatggccaaggattccgtgtgtcatctgcaggagtgagtaggcctgctgtatttcttgtaactgctgggtgttacaaaataagttacaatgttttacactttaaaaaaaaaaaacagaaggaacatttgctttattggttacttactagtttagcctctaggttatggcacagcatgctaaaaaatcatgtgtttaaaagtaaatgttggtaaaatgctggcatctggtcctattgtgttgatgcattttcacttctgtggtcataggaaatggactggtctaaagagagtgaggcacaacacaagcagggcattagtttgaataggaagtcaatcatatttggttttatggcctggtgtattttgggtttaagataaaatagggaaaaatgtcagaaatgatccctatgcatttattntcatggatacccttaatttcatgggcatgcctaataatgatctatgttctaactggagc

SEQ ID NO: 8231 - DNA, 246 bp, Homo sapiens
ctgctcatggaaacacaatgactatatctaagtagacttaatatattagaaggatgggtatgagaatgtgaatgttgcaaaggtaaatccttatcttccgtatgaagtatcaatagcatgcccaaaaaatgaactatgtaaaagaactgtaaagttatcattaaagatagagtggagtatagcaaatgaatcagctaaatatttgaaaatgggtaccctctggggagtggaagatacatgtatgta

SEQ ID NO: 8232 - DNA, 521 bp, Homo sapiens
ggcacgagcttgagagaatagatctagatgggtggggcacggttctggggaatggaagggccaaagaggaaagtgggcaatggtggggttgagaacgcagcttctggactcagcaggcctgggttcaaactctgttaatcactcctgttaatcccagcgctttgggaagccaaggagggaggatcacttgaggccaggagttcaagaccagcctgggcaacataatgagattccatctctacaaaaaataaaaacaattagccaggtgtggtggtgcacacctgtagttccaggtacttggaaggctgaggcaggagaattgcttgagcctgggagtagtgagtcatgagtgcagtggcacgatcatggcttactgcagccttgacttctcaggcttaggtgaccccccaacctcatcctcccaggtggctgaaactacaggcacatgccaccatgcccagctgattttttgtagagacagggcttcaccatgttgccaagctagtctacaaagcatctga

SEQ ID NO: 8233 - DNA, 573 bp, Homo sapiens
ggcacgaggcgtccttcagatatcaaattcaagcctctaaataagaccaaggagtatacagcctgtgaactgatgaacatatacaagactgacaatcacctgaaacattatttacatatcattgaaaacaaacccctgtatccagttatctatgatagcaatggtgtcgtcctttcaatgcctcccatcatcaatggggatcattccagaataacagtaaatactagaaatatttttattgaatgcacgggaactgactttactaaggcaaaaatagttcttgatattattgtcaccatgttcagtgaatattgtgagaatcaatttacggtcgaagctgctgaagtggtttttcctaatggaaaatcacatacctttccagaattagcttaccgaaaggagatggtgagagctgacctaattaacaaaaaagttggaatcagagaaactccagaaaatcttgccaaacttctgaccaggatgtatttaaaatcagaagtcataggtgatgggaatcagattgagattgaaatccctccaaccagagctgacattatccatgcatgtgatatt

SEQ ID NO: 8234 - DNA, 468 bp, Homo sapiens
ggcacgagggggccatagcctctattcctgcccagctgtggatcctcagcttgccatgttaggtacactggaccagcttgtggagccatagcccaggagctcagggacattgagtgcaggtttcttactcctacctgctggccctgtggctgtccctggtggccagcccagctgcagcaaaacctacaaagcctccagccatggtaggcgtcttggacctgccccagtcagctggggcttgggctgctaggggttttggcacacgtccatgtttggcggagggtgtgccttcaaaccctgaagggcctaatttcaccattctttctggctgcccaagggaacttccctgcttttctcccttgctgttggctggataaaactggcaatcagaaagtcaagagctacagctgatggtcatggtgttcccagagagtcaggaatatccatggaagctgagcagatgccctg

SEQ ID NO: 8235 - DNA, 555 bp, Homo sapiens
gaataacaacctaactactacccctcaacctcacccccaccccaggaaaagtaagtctttttctaacgatccaccagattagggttacatttaacagtaactagaaaggttaattgtaaccttaatcagaaagattaatttctgtcctttcagtcttctttctgtgctcataaataagcattgattcttttaatcaacctgcgcagtatctttctcattttaacagttgtctagagctcagttgtcccagcatttatttcactggtccctgatggatggagggtggtgttgcttcagtgtttgggcagtgcagacgatgttgagattcacattcggtctcgtctctttgttgttataggataagttctcaaaggtgggattcctagatccaaggcttctgacacacacactgctgattgaacctcagtggcagtgtttgagtgcacctgttcctcactcccatttcacctttattcacatgttgattcactcagcatttagtgagtgcctattatgtgccaggccttccttcagtgctggggcccttcagcaatc

SEQ ID NO: 8236 - DNA, 112 bp, Homo sapiens
ggcacgagatgaggtgtgaagccattaaatccgaagaagagctcaaagaatgagaacgtgattgcatgaaatgttcatccagaaatcttgggatataggagaacagggggag

SEQ ID NO: 8237 - DNA, 585 bp, Homo sapiens
ggcacgagccctccccggcttcccccggagtgggtcaccacactgttttttatcatcatgggaatcatttcattgactgtcacatgtggtttgctggtggcttcccactggcgaagagaagctacaaaatatgctcgatggatagcattcactggaaccactatgagaagattataggaaaaacaccaagactagaggactctgggttccttttatgcaaagtcaactcttctgggtcacagttacccagcaacaaaaataaagagaggaccaggacgatgccagcaccccgtttatcctgagtgaactctccggaggcctcttcaagcttgtgggttctctgctgtcttgaagccatccatccatttgataggttttgcaaagacttggtcctgccaagatggttttaatcatttctgctaaaaggaatggactcgaggatttgatctcattttagatgcagttgtcctcacttggccattttacagcactttagtaaatatggccagtgtatttggtcactattaaatcaatccccattcattatctgtcagggcaactcagtgaactaaatactatgttctg

SEQ ID NO: 8238 - DNA, 87 bp, Homo sapiens
cctcgtggaggacacagcagcatgggacagtcagggaggtcccggcaccagaagcgcgcccgcgcccaggcgcagctccgcaacctc

SEQ ID NO: 8239 - DNA, 467 bp, Homo sapiens
ttatagtaatgacaaatgacttatcagtgttcatcatctgaaagctaagtggttcgttcaatcactttttcaaagttgatagtagattgcatggtttcatgtttcctcatattggtttattaattctatttaatcaaggaaaataacttcagattccataaagtttcagtttatttttagtttactactaggtgagatagcacattacatacttttactatcaaatattattttagcagcttcccatagtaccaaatgatttgattccctactctcattttttaaagcatataaatatttatgggcttaaaaagggggtttttaaaaactgaggatatcagtaataaattgcagaatattttgcaaagctttcttttggaaagcaaacttttgtgcctgcctatatgcaaagtattttatcagggacttgaacaaagacctcactctttttcacttgtcttatgtcg

SEQ ID NO: 8240 - DNA, 545 bp, Homo sapiens
ggcacgaggtgacctttaaaaagcaaaaaaaccaaaaaccaaccaaccaaacaaacacaaaaaaacaaacccacaaaaaatgaaaaaacagctacttctgaaacacataaaagtatcttgatcttttaaaaacaggtcctgaaactacagatccattgctgagactactcgaaaaactgtaaaacatgggcattattttaattcgtgaacaactgaaaagattcaatggagtgccatgtggtcattttagtatgtgagtcaaagcagaataatagggaaacattaaatctctcctttacagtttaagaggttgaaagcaaaaggaaagtctgaaaaaagaacaggggaggtttggttggtaatgtttttggtagaactggttatccttgttcgtatttagtaggtgccttttagtcttacgagagtagcacccacagatggccaagttcaaatatcaaagaatcagaatgcaaagtacaactggaaattcacactggaattcaactggaaatatgcatcaaaaaatatggctctttggaaatctg

SEQ ID NO: 8241 - DNA, 291 bp, Homo sapiens
cactccaccctggacaacaagctcaaaactccgtctcaaaaactaaaacacacaaaactacattgaactgtactgaaatagtacagcacacccactaaaaaaagctagcattgaaaagattgacaataccaagtgttggtgcatctgtgaatcaatttgaacccgttacattgctgatgcaaaaaggtacaacgatttcataaaactctctggcaggttcctgtaatgttaaatatacgctaccatatatccaatcctgtttacccaagagaaatgaaaacgtgtccacac

SEQ ID NO: 8242 - DNA, 568 bp, Homo sapiens
gccagtccctaggaagagagaaccaaaatgtctaccggaccagatgtcaaggctacagtgggggacatttccagtgatggcaatttaaacgtggctcaagaggaatgctccaggaaaggtttttgttcagtccgacatgggctggccctcatcttgcagctctgtaatttttcaatttacacccaacaaatgaacttgagcattgccatcccagctatggtgaacaacacagccccacctagccagcccaatgcctccacagaacggccctccactgactcccagggctactggaatgaaactctaaaagaatttaaagcaatggtaagtttaatgagactctggactctttctttgactcaaataatttgacttaaagagttataaaagagtgagattcatttaaccactaagtatttactgaacatgtactatgtgccaggaatggcacaagtacctaagtatcaggccgagcatggtggctcacacctttagtcccagcactttgggaggctgaggcatctttactaaaaatatgaaaatcagccaggcatggtcataggcacct

SEQ ID NO: 8243 - DNA, 337 bp, Homo sapiens
agccacattggctaaaatgactgtagactgaatgggctcataagcttgttcttttatttacaacctacctccctgtctcttttctttccttcttcccacatggaacactgaggaatagccttggtaattcaacgccaagcctgcccccatgacttctgaccccagtctactccactgccagcctcttgtccccactttgcacacagcttatcagcattcacatggaccctactgccctttccaacttgcaaataatggcctcactagtgagccatggaattaattagtgggtagtgaccaatattaaaaattttacttcacagtacatctcgcatag

SEQ ID NO: 8244 - DNA, 325 bp, Homo sapiens
tagcagtagtagtagctacctcaaaggactgtagtgaggagtaaagttacatacaaagcacacagaactgcacctaactcagagtatgtataataaaagtattagctaatattactgtagtggaaaactcccttaattcaagtgattgtaccttttttactcaaatacctcctcctcaccctgcatctcctgtggctccatgaaatcaaggccctgcccagaacagtctctgtgccaagacagcttttagctcacccacaccactttatttacagataaattctgacatacagatgtgggtttcaaccttggttcctgtgtcctc

SEQ ID NO: 8245 - DNA, 315 bp, Homo sapiens
taagtgtttataaaaggatccccttgtgtcagggagatccttcaggccatttcaaccattactgtattttatttaatttgcttaattgatatattcttagaaaattgtgtcagtgaatttttttaaataaaatccaatttttaaaaaccagtagacccaattttttaagaaaaaaatccttgtcctatttacttttgataatattttactattcggggtatggtatctgtaaaataaaaacataattataatgtgttacttggaaggattgcatgttcaagataactgaagctgaaaatgttaagttgaaaactt

SEQ ID NO: 8246 - DNA, 374 bp, Homo sapiens
gttataattttaagcaacataaacaagtaagaataaatattttagaagtgcgatgttatatttcttggtttaagtggtagattgatatatgttttctatcatactaataaacaacttgtaaatatcaaatgcttcataatttagaaatgtaaaacatgataatcaaatccaaaagtaatctaacacatttaaaaactaaacatatttaggccaggtgcagtggcccaagcctgtaatcccagccctttgggagaccaaggcaggtggatcacctgaggtcaggagttcgagaccagtctgaccaacatggagaaaccctgtctctactaaaactacaaaattagccatgcgtggtcgctcatacctgtaatccc

SEQ ID NO: 8247 - DNA, 78 bp, Homo sapiens
aaaaaaaaaaaaaaaaaaaaaaaaaggggggcctttttttccggaacccccaacttaaaaaaaaccttgggggggggg

SEQ ID NO: 8248 - DNA, 111 bp, Homo sapiens
ggttgatgggaatttgaaatagacatcctatctaaagggcatcttgagtatatctaaatttaaaacacacgtaccgtttgacctaataatcccacttttttttttcttttg

SEQ ID NO: 8249 - DNA, 70 bp, Homo sapiens
gtgcaagtgcaaggctccttctcctcatgctcactgcctgctggggaatagggtactggggacatacccc

SEQ ID NO: 8250 - DNA, 369 bp, Homo sapiens
tatcctcctcagtgatacatcatgaagttgtgtgctttgcctaaaatgcccagttacctgaaattgtataaattcttgccaaaagtgtttgaacttaatacaaacttcccatctcttacctcttagcactgtgctcatcttgaggggacatagtcccaattttgtattttatataatactgttagtgaatatgtgtagacttcatatggttgtgggtaagagaatactgcattcagatagaaaagatgctatatagctaagttgatccaggatccttgggctacctgctaggcagcttgtggtgaacaatcataatctctaaaaaataccttgtctggaccgggcgcggtggctcacacctgtaatccc

SEQ ID NO: 8251 - DNA, 163 bp, Homo sapiens
gagtggggaagggacttctgcatcacggcatagcatatgtttctgagatcactggaagaagctagcagtgccaggagcctaaagccagctcactgtttggtcgtccagcggagcaggtacagctcacaatccctaaaccagggaaacctggctgacttccact

SEQ ID NO: 8252 - DNA, 385 bp, Homo sapiens
aagctttcattgctatcagataaaaagagttcttgatgaaacagactctgactttattcctcttttagttcgagccttcatgtaatttctggatgaaacacctctactctgtcctcatatccttactttcttactgtttcttcttatttgtttgccttttattcttttcctaagaaattgatggtgtcagtatctttattctagatacacttatcttctgctatcttgtgctgacacatatttatttccaaagtgcctctgctaaaatcaaaactatatcctcagaactttcaaaaatttcagtttacctgcccaagtcagaaatgtgctttccttgtgctttttcctatttctccttttataggagtccctttgttttaacctt

SEQ ID NO: 8253 - DNA, 360 bp, Homo sapiens
attccctattagtatgacatttacttttggttattagtaggtagtcattaacatgtttaagagtttccgctattcctgttttatagtgttattgctagaagtggttcctgaattttataaaatgccttttcagcatctattgataaaattgtatgattttttttctctttaatttgttgatgtaatgaattagaatggtaggcatttgatgtggaaccaaacttgtatttctggaacaaatactacttggtcattgtgaaataatgatttgctacatgagtggattttatttaccagtatttaatttagaattattgcattctcattccaaagtacaattggattttggccctctgatgc

SEQ ID NO: 8254 - DNA, 300 bp, Homo sapiens
aattccgttgctgtcgatgctcccaggtctccagtgtcacctctcggtacagtgtcctctgggccaggtccagctgttcccactcctcctgtgtgaatgccatagccacatcctcgaagcacacagatgcctgaaacagggcacttgttactgctcagagaccccaggtcctcatgccctcacggaggtacctgttaaggcctaaatgttggtgtccccccgtaaaattcatacattggaacctaatacccagtgagatagtgttaagaggtggggtctttacaaggcaattaatgtcct

SEQ ID NO: 8255 - DNA, 220 bp, Homo sapiens
gaggaaggaaaaatgtgcccaaggccattatggagaacaaacacctatgcagttggagaatgctgaagacacccaagggtgttgtcctctccctcctgagagaagctaagaagatccaggcttagagtgctacagaaatagagatttaggatagaaaaaaaggaaggatttcctaactaccaccagggctatgaggcactgatatgacttacttgtgaac

SEQ ID NO: 8256 - DNA, 345 bp, Homo sapiens
ctggccaacatggagaaaaccccatctctactaaaaatacaaaaattagctgggcgtgcacctgtaatcccagctactcgggaggctgaggcaggagaatcgcttaaacccaggaggcggaggttgcagtgagccgagatcatgccactgcactccagcctgggtgacagagtgagaccccgtctcaaaacaaaccaacaaaaaacagagccaggtgtagtggtgtgcacctggaacataacttctcacaacgctgccgtgggaagactgcttgaacctccaggagcgcgaggaacactctggtcataccaaccgaggtctcaaatttcaaaggcatttctattc

SEQ ID NO: 8257 - DNA, 341 bp, Homo sapiens
tggatcagtgactcattgtgtgaatagggtcacagagaatccctaaaccattgcttttcatatcaggagtccaacagtctttcaggttgcccctgactgagggctttgagtatttagtggagttttctggtaaatcatagctattgtaatttaggtttcagcccaactagatgcttcctactatccctggtaaggaatggaactggctcacagtaaatgtagctgtttagtaatagatgtagatattcttattatcctctctaggtcttctattctgatttcttatttttaagattaagaatttaatgtctagaaaagttaagtgaccatgtcatagctat

SEQ ID NO: 8258 - DNA, 450 bp, Homo sapiens
  misc_feature 23, 37, 39, 40, 41: n = A,T,C or G
gtactggcttttgaaaagacccnacgaaagctcgcgngnnnttttgtgcgaagcggcctacggtttttagaagacaacagaagggtggtaaaatcactgaggctttaccaaaaggttatggggacaatgcacctaaaaaaatcagcagtttacaaatggataacttgtaacaagggaaaagatgacgttaaagatgaaggctgcagcagcaggacatccacatcaatttgcaaggaaagaaattaatcctctttgtgccctaactgaagagtcagccaggtgtggtggctcatgcctgtaataccagcactctgggaggtcaaggcaagtggatcacttgaggtccagagtttgagaccagcttggccaacctggtgaaatccattctctactaaaaaaatacaaaaattatccattcatggtggcgcacgcctatatgtccatctactt

SEQ ID NO: 8259 - DNA, 541 bp, Homo sapiens
gagacagcccttctgtgccccctgcctgggcaaatgacacctccacccacataggctcaaagctggggagcaagatatcctccttaccactgccctctcccaccccccacctttcccaaaccctcacagggcacagcacagactactctgcaccccaatatccactctccccttcttccaaagcaataggacttccaatacgtagctgggcacagctacccagaaataagaccacatttcccagcctcccttgtatataggtgtggccaaggggttaaattctagccaataggatgtgtgcaaaagtgaactgcgcaggtccctgcatgtgtctctaagggaaagggcaggtctacctccatcattagcttcccttctcctttccccttcctggcagttggagtgtaggagagggtgaccatccgatttggacaataagagcaaagacaatcgtttagggaaaatggagcaacaaggtaggaggagcctgggtccctgatgccttggaatagccaaaccagagctgcgacacttacttaca

SEQ ID NO: 8260 - DNA, 341 bp, Homo sapiens
ggctgtacaaagagacagaggctgttagctatggctgaagacagtggcaaaaaaaaaaagggcgtaagaattttgaagctatgttcaaaggtatccttcagaggggatgggataacttcgtgataaaccacatgctaaagaacaacgtggctggacaaacatctatccagaccctagtacctaatacggatcaaaagtcgaccagtgtaaaaaaagacacccccaaaaaaaaaacagttaaaatgttgaaatacctgggcaaagatgttcttcatggggttttaaattattgggcaaaacacgatgttttgactttgagggaagaggaaaagaaaaaattt

SEQ ID NO: 8261 - DNA, 248 bp, Homo sapiens
gctttgagtatttagtggagacttctggtaaatcatatctattctaatttatgtttcagcccaactagatgcttcctactatccctggtaaggaatggaactggctcacagtaaatgtagctgtttaggaatagatgtagatattcttattatcctctctacgtcttctattctgatttcttatttttaagattaagaatttaatgtctagaaaagttaagtgaccatgtcatagctatacagaaaat

SEQ ID NO: 8262 - DNA, 503 bp, Homo sapiens
ataaagccctttccttccacaacttggtgtctgaggggttcttgtctgcggctcatcctgctacagtttctgctaatttttttgacttttatttttcttgtccatctctgatgcttgctttgctactccactttgaggattttgggcagcttcaccctcagccattccaacagtccatccatttgcctcaagctctaggcagtttctcctggttcttctgttcctggcatctaagatttgtcagcagggcctggtttccaggaaccatgcatggctatggcctcctcccacctggagggctgctcctgcacctctgactggcaatggttccagctgcggcccagctgagcacagcaggaatggcagcagcaactggagcatccatgcccagggtcacctagcccagggacaccttagctacaacccagggttgatgtccagctccatgcaccaaaagccaaggccaaccagagcatttcctggacaagatctctcggtctgca

SEQ ID NO: 8263 - DNA, 580 bp, Homo sapiens
aattactttgagcagatgccagtatttcttctcaatgagatttcaaagaataagaaagctaaacacagtattatcaagaattaaatgtgagcattctgcctactttctgcaagtggcctacattcaacctttggaggtatgcttatacgtttaacgactaaagtaacataacataatacttaacagtgccactcaggggttttagctgtgaaaaagcagtggatcctaagaacagtgggcactgaagttgcctgtctctatgtcaggttacagctcaagctgtgtatatgctgcagacgcccaagctgaatttaagagaatccgctctaaaacattacttgctatttagacacatgcttaaagttatttccttttaaaccttaggcagattgtgaaatattcccgatgtattgtctcacaatgcataacaaagcttttcacatattttcagatatttgggaatgtttccatatgtctggcatgcctgtaatccagcactttgagaggtggaagcaggagaatcacttaagcccaggagttcaaaatcagcctaggcaacaaaaggagacccccatctcta

SEQ ID NO: 8264 - DNA, 78 bp, Homo sapiens
ctgccgctttccgagcgagtgtcatggcggccggcgtcgagttggcaggagtaacccacggaactgaggaaagtcatt

SEQ ID NO: 8265 - DNA, 260 bp, Homo sapiens
aaattgctttgctagagtaggttttaacatatgtttttgggtaatggtggcgatgatgcaataaaggacagccgttattcaatttactctgtggcactaaggcaacttgaaaactctctgttgtaacctgacatagagctttgcatatagtaggaactcagcacatgtttggtagattttaagcaattattttttttctgtttgtattagtctgttctcacaccgctgtgaagaaatacccaagactgggtaatttataa

SEQ ID NO: 8266 - DNA, 137 bp, Homo sapiens
cacttaaagaaattagaaaaagaattacaaactaagcccaaaataagcatataaaggcaataataagactagagtagaaataaataaaatagagaattaaaaaaaaaaaaaaagcaaaccggggaccgggggggggg

SEQ ID NO: 8267 - DNA, 445 bp, Homo sapiens
tccacaagactcttgaaattatatattctgcagtaggataattatgttatctaaccagaatagtaatgacacatgcatttaaagctgataaaaatgagtcttgtcaaaaggaagtgacagcccaacttgtcaggccaaacacgctttggcatagaactttatatgctctttaaaatgactttaataaaaacaataagctaaccaatgcaatcaaactttgaaggtaataacaatatcagttatcaattttgtcctctcgatactccttggctagttttgcatttctgctaacatcattggtcctggatgattctgaaacttcagcctacaataccgtaaagtctttactgtatacgttcaacttcaagcataagataaattacaattaaaagtataatcagaggctgggcacagtggctcagccctgtaatcacggcactttggg

SEQ ID NO: 8268 - DNA, 353 bp, Homo sapiens
tacggctccgagaagacgacagaaggggtataaataaaacaaatacatttgaatacagttgaatatacaatatacaaaattttcttccaagtataaaacgaaaataaaatacactactttctttaatagaatagaacattgtaataatgttccattgcatttgaccctcacataaatgctatgaggtagcattaagagataagatttgaggctgggcatggtggctcatgcctgtaattccagcactttgggaggtcgaggtgggcagatcattaggtcaggagtttgagaccagcctgaccaatacggtgaaatcccgtctctactaaaattacaaaaagtagtcgggcatg

SEQ ID NO: 8269 - DNA, 412 bp, Homo sapiens
cgcacgagacacattcttccatttgtcagtaagagtaataatttgactgttttattggattttagcctttttgatttcatatagctgtatcttaatatatcattgtttttaatatgtctacattgaatacttattacttgtgcaatgaaaaataataattaaagatgaaagttaagcctgttaccactttcagagaacaacgtgacgttttggaatttaaaattttttcagtagatttgagaaaaacttgggttaaaatgaagatttatgctcagaactgagattccagggtttaagtctggttttaaagctgtcttcaagattttaatgtattttctgtgtgtataggatgctctcatttctgtttttaaaaatgaaagggatcgctcctgtaatcccagcactttgggaa

SEQ ID NO: 8270 - DNA, 410 bp, Homo sapiens
ggcacgaggcggagcttgcagtgagcagagatcgcaccactgcactccagcctgggtgacagagcgagactccatctcgaaacaaacacaaaaaaaagtttcaaagacagaaagtggaagttacaaggctttttaaggccttatcttgaaagtcaaagcaacatttattttgcattccattggtcaaactcaagtcctaacaggcctaagggggtcaagtaaaaggtgggactcacaggaagttccatatacattacagcttcacttgcagtacagaggggaagggaaatcctactgggacagaacctcaagtagcatacctggttgtatattgtgcctggaagaaaagatggccagaagtatagatctatagatggatggtgattgatggatggtttgactggatggtc

SEQ ID NO: 8271 - DNA, 340 bp, Homo sapiens
ggcacgagactttgcatttgctcgtttcgttcaacttttccttccttctctgcctgccaaagaaactgtaataactgtaataattcttatgactttctcttcaatgacagttatcttcctttaccctaattccttccctcctcatccttcaaatccccttcctcatcattcaaagtctaactcaagctagcctttcctccttattttccccttatctttccaatccgtatggagatttctcacctttcctgatagaggttgcgccagaatggcgaggattaaattgtaattgctctctaatagactgctgtgtccgcccactagatttcaagctctctaa

SEQ ID NO: 8272 - DNA, 590 bp, Homo sapiens
ggcacgagattccagcaaccatcacaaataacagaaagcactattcatgaaatcccaacaaaagacacgccaagttcccatataacaggtgcagggcatgcttcatttaccattgaatttgatgacagtaccccagggaaggtaactattagagaccatgtgacaaagtttacttctgatcagcgccacaagtccaagaagtcttctcctggaactcaagacttgctggggattcaaacaggaatgatggcacccgaaaacaaagttgctgactggctagcacaaaacaaccctcctcaaatgctatgggaaagaacagaagaggattctaaaagcattaaaagtgatgttccagtgtacttgaaaaggttgaaaggaaataaacatgatgatggtacgcaaagtgattcagaaaacgctggggctcacaggcgctgtagcaaacgtgcaactcttgaggaacacttaagacgccaccattcagaacacaaaaagctacagaaggtccaggctactgaaaagcatcaagaccaagctgttactagctctgcgcatcacagaagggggcatggtgttccacatgggaaatt

SEQ ID NO: 8273 - DNA, 514 bp, Homo sapiens
tcggcacgaggcaatgtggtgattaatatagtaaatgtctttatagtaatagtgagtaatcattaattctaaagatagaattattattacaataaacaaactttagtcacatattggcagtttttctatttcaaacacagcaccagagatcagagtctacttgaaacttacatttgtgttatttaacaatttttctgtatctttttcattggtgttttgttttgtttatcttttgtttttgtttctttggtttggtttgtttttgttttgttttttgagatacgatctctgtcacacaggctggagggcagtggcacagacatggcccattgcagtctcaaactcctgggcttaagtgactcttctgccacagaagatgaggaagaatacatttttcatagtgatggggtctcactatgttatctaggctggtctcaaactcctggcctcaagcaaccctccaccttggcctcccaaagtgctgggactatagacatgaatcaccacactcagc

SEQ ID NO: 8274 - DNA, 139 bp, Homo sapiens
ggtttttttaaaaaggttttatggccagggttggtggctcatgcctgtaaacccagcactttgcaatgccaagctgggcagatcgctagaggtcagctgttcgaaaccagcctggccagcatggtgaaacctctctcct

SEQ ID NO: 8275 - DNA, 316 bp, Homo sapiens
aggaaagcttcaaggggaagtttacaaaaattatagtgtccatgataacatagggctatgggaggttgaggctgcaatgaactctgatggtatcacttcactccagcctggttgacagattgtttattctatttaaaaaaacaaaaacaagtccgggcggggtggctcatgcctgtaatcccaccactttgggaggccgaggcgggtggatcacctgaggttgggagttcgagaccagcctgaccaacatagagaaaccccgtctctactaaaaatacaaaattagccgggtgtggtgacaggcgcctgtaatccc

SEQ ID NO: 8276 - DNA, 535 bp, Homo sapiens
tgtttactcagcacatttcatcctcagctaccaaaggtaagttattgttttaggtcgttttccagtttctatttagcctaagaactccacccaagttagaaaagaataaaaatgaggtaaaaataaagcagcattatgaaacttaaaaaagggaaaggtcacacactaatgcttttccatcctgggcactggggactggggtgaaggctggggggtccattttcattattatctttgcatttacaaacacagcctccgacgtttagtatttgctttgaatgaggaaccgagaaataatgtccaagatgagttcaaaaagaggtgaatctagtacttggtagctaaagtaataatccagttgggctatattactctgggtattaagaaacaatagctaataagaagtagtttcagccaggcgccagtggctcatgcctgtaatcccagcactttgggaggccgaggcgggcagatctcctgaggtcaggagtttgagaccagcctggccggcatggtgaaaccctgtctctactaa

SEQ ID NO: 8277 - DNA, 221 bp, Homo sapiens
gaggctgaggcaggagaattgcgtgaacccagcagacaaaggttgcagggagccaagatagcaccattgcactccagccctgagcgacagtgtgtgactccatctcaaaaaaacaaaacaaaacaaaaagaatacaaataaacagtagaaatcatctccataaaaatgattcatttacaaatcttgtgggtggagactcttttcagaataatccttttggg

SEQ ID NO: 8278 - DNA, 62 bp, Homo sapiens
gttgtttctactttctggagattatgaaactggtataattatttgtgtaaaagtctttatgt

SEQ ID NO: 8279 - DNA, 443 bp, Homo sapiens
aagtgatattgcttggcgttcttttcctaatacatcttggagttcacttcatatcaagtaatagactgtttcattattctttgttatagctttatattttttctggtggatatatcataggtgagaggcccactccccatgtatggacattaagctcctccccaatactttgcaatgatgtacaacgttaaaatgaatagtcttggggtttttttgttttatttatttttttctgagacagagtcttgctctgttgcccagactagagtatgcaacctcagctcactgcaaccttcacctccaggttcaagcaattctcctgcctcagcctcccaaggagctgggattgcaggtacctgccatcatgctcagctaacttttgtatttttagtagagacatggtttcaccatgttgaccaggctggtcttgaactcctgacctc

SEQ ID NO: 8280 - DNA, 564 bp, Homo sapiens
gcatctagaaaggaaggagggatgcaccctcatcccaggcagaggaaggaggaaaggacaggagggaattgtaagagggaaagaaccatagctatttctaagtgaccagagcaaaaggtgggcagtgacaatagcaacagagaagactgagagctagaaggacccagtgtccggttttgttttgttttttaaattaaaaaaaaaaagtttttgggggccaagtgcggtggctcacgactgtaatcccagcactttgggaggccaaggcaggcagatcacctgaggttaggagttcaagaacagcctggccaacatggtgaaaccccatctctactataaatacaaaaattggctgggtgcagtggctcacacttgtaattccagcactttgggaggccgaggcgggtggatcacctgaggtcaggagtttgagaccagcctgaccaacatggagaaaccccatctctactaaaaatacaaaattagcttgggcgtggtggcacatgcctgtaatcccagctacttgggaggctgaggcaggagaatcacttgaacccaggaagc

SEQ ID NO: 8281 - DNA, 88 bp, Homo sapiens
gtacagaaaagaaaccccagtacatctctgagttttttggggtttgtttgttttttgttaagttctgggatacatatgcagaatgtgc

SEQ ID NO: 8282 - DNA, 646 bp, Homo sapiens
tgacaactgagctgaaattaattaggaatctatgttgtgtgggtctagtgataataaaagagatcagaaaattcatccaaaggcagcacagacaggcatccaaacagggactgtatctattctcctatcatctacacagaaattgttccataatttactgactgaaaaacaaaaatcattataccaaaagagttggctttttctttaaaacctttgactaaatatttccaaaccagcagaattccaatcaattttgcttttaaatgaaccctgacttactaccccaaatgacttattctaatagttttcaagaaaagtaaaattttcagccaaaaccaaacaaaacaaggggaatgagaggaaagaggttcagactataggatgacccagagacaagaggatgctgtcttttaagacaaaacttttcctccagacactagaaaaacaatgtaacatttccctatttcttgtccagatgcagaacatcatggaagatgtagaatcaaggcacagagctccaagcccaccatctaacacagctaatttcaaaatccccagctcatctttcacctcacccccctcctcctccttggctttaattatgctaatgttggaggagaatgaataaataaagtgaatctttgca

SEQ ID NO: 8283 - DNA, 654 bp, Homo sapiens
tgacaactgagctgaagcgaaggaggaatctatgttgtgtgggtctagtgataataaaagagatcagaaaattcatccaaaggcagcacagacaggcatccaaacagggactgtatctattctcctatcatctacacagaaattgttccataatttactgactgaaaaacaaaaatcattataccaaaagagttggctttttctttaaaacctttgactaaatatttccaaaccagcagaattccaatcaattttgcttttaaatgaaccctgacttactaccccaaatgacttattctaatagttttcaagaaaagtaaaattttcagccaaaaccaaacaaaacaaggggaatgagaggaaagaggttcagactataggatgacccacagacaagaggatgctgtcttttaagacaaaacttttcctccagacactagaaaaacaatgtaacatttccctatttcttgtccagatgcagaacatcatggaagatgtagaatcaaggcacagagctccaagcccaccatctaacacagctaatttcaaaatccccagctcatctttcacctcacccccctcctcctccttggctttaattatgctaatgttggaggagaatgaataaataaagtgaatctttgcaaaaaaaaa

SEQ ID NO: 8284 - DNA, 601 bp, Homo sapiens
tggggcccaggaatctgcattttaaaaacaaatgtcccatggactacacttgatcttagccaaaaggccaagatgtgatcatatgtctcatgtaattctgattttgttgttccttgggtcatactttggcaaacaccaatctgtgggtttttaaagaaaattgtttttttcttacttaagagaactgttaaaagtgtatacggtaaaacaaaagtcagaaagtttaaaagagtagacagtaaaaagcatctctccccatggataaagatgatcatggcagcagttttggtaatagtgaaaaattaaaaacaaaatgtccggccgggcgtggtggctcacacctgtaatcccagcactttgggaggctgaggtgggcggatcatgaggtcaggagattgagaccatcctggctaacatggagaaaccccatctctactaaaaatacaaaaaaattagccgggcgtggtggcaggcacctgtagtcccagctactcaggaggctgaggcaggagaatggcgtgaacccgggaggcagagcttgcagtgagcagagatcgcgccactgcactccagcctgggcgacaaagcgagactccgtctc

SEQ ID NO: 8285 - DNA, 448 bp, Homo sapiens
gacagaaggatacggctgcgagaagacgacagaagggtcagcgactggtgtgcaattctctttcaccccgtcagggtgagggcacatgtcaacaactctggcagggtgaggggaccagctgcgacctggatcatctatagggtggtggctcagcctctctaagcctcagtttcctcatctgtcaaatgggcagcaacaactatgtcagagagttgatgggacaaatgaatcaaccgcccgggtgtggtggttcatgcctgtaatcccagcactgtggggggccgaggcgggtggatcatgagatcaggagttcgagaccagcctggttaacatagtgaaaccccatctctactaaaaaatacgaaaattagccgggcgtggtggcaggcgcctgtaatcccagctacttgggaggctgaggcaggagaattgcttgaacctggtaggc

SEQ ID NO: 8286 - DNA, 336 bp, Homo sapiens
aataatttcttggttaaatgtaaggtaagtagtcaacacttaaacgatgctacaggccaggcgcagcggttcacgcctgtaatcccagcactttgggaggccgaggcgggcggatcacgatgtcatgatatcgagaccatcctggctaacacggtgaaacccctgtctctactaaaaatacaaaaaattagccgggcgtggtggcaggcacctgtagtcccagctactcgggaggctgaggcaggagaatggcatgaacccgggaggcggagattgcagtgagccgagatcgcaccattgcactccagcctgggggacagagcgagagtccatctc

SEQ ID NO: 8287 - DNA, 370 bp, Homo sapiens
gatgagattatgaaagtggaaccctcgtaaatgggattagtgcccttctgaaagtgacggaagagagctcgccagcaccttccatgtggggagacagggaggatatgacagtctccaacctggaagagggtcctcaccaggccccgatcatgctggcactctcatcgtggacttccggcctccagaactctgatcaacaaatgtgtgttcttaaagaaaaaaaaagtgtggaaagcaatgttaatgttcccaatcactttgagtacattctttccttaactatgtcttaatgcatagttgtgttggatggcctagtttgtaatgttagaatatgcatgttagtgaattaataaatacagcagtaaagaat

SEQ ID NO: 8288 - DNA, 633 bp, Homo sapiens
ggatgacgtcgtggttgcggtgctctactatgcacaacaccgtggctacattaaaataaaagaagttttaagccctactccccgcacgaagcagaggaagggtgagcagggaggagatcctcctgtcgtgtccattctgagccttaagtatatttctgtttttcaaggcaaatagattctggtccacttttagaaaccttaatctcggtcttcgttgtgtctggtgaatacatgagtgaccagcaggtggtgccagagacagttggtagccagggaatgccctaactgtcctcggctgggatagctgaggtcactcactggctggagttgagcatctggggctcacatgcagacgtgatgggaaactggatccttttaatatgaaaaatgggtaactgtagagctaattcttattgtataaaaatagcactcatttttttcactttaatagatatttatcaggctgggtgtggtggctcatgcctgtaatcccagcactttgggaggctgaggcgggcagatcacctgaggtcaggagtttgagaccagcctttccaacatggcgaagccctgtctctactgaaaatacaaaagttaggtgggtgtggtggtgtgcacctgtaatcgcagcta

SEQ ID NO: 8289 - DNA, 119 bp, Homo sapiens
cacttgaggccagggttccagaacagccaggccaacatggtgaaaccccatctctactaaaaatacaaaagttagccagacgtggtggtgcaagtgcctggtgcaagtgcctataatcc

SEQ ID NO: 8290 - DNA, 235 bp, Homo sapiens
gatattaacaagttttgtctctatctcagaatgcatttcggaatgcccttcctggagcactacagacactgtctctcaaaacgctccttgaactagcttcaccgtgttgctgactcccttgtaaattaaagaaaatatcttatacgtattccttcattatttgtatgaaagtcaagcttttcatattgtgaaaattatacttcaggctgggtgcagtggctgatgcctataatcc

SEQ ID NO: 8291 - DNA, 477 bp, Homo sapiens
tctggctggcattatcttcctctaggtacgattccccttgctgtctggcaggcagctatggtagagcagatctctctaatcagggcctgagcttattaacggctgggtttccattgttggcaggcacagactagaatggatcatcccagtctaggtgtactactctccagaggcaccagtttagagcctggattgtttgttaggatctttccctgcacccaggaaactctaaattttttcacctcggtaccttgtaacttgaaaattctactctgttatccagctctttttctgtttgttttcttagcctctcatcctgcacagcttaagaatttggcaaatacgggctgggcgtggtggctcacgcctgtaatcccagcactttgggaggccgaggcggaaagatcatgatgtcaggagatcgagaccatcctggctaacacggtgaaaccccgtctctactaaaaacataaaaac

SEQ ID NO: 8292 - DNA, 67 bp, Homo sapiens
ggccttcaaggaaagttaaataattggtaaggccaggcatggtggctcacgccacacctgtaatccc

SEQ ID NO: 8293 - DNA, 555 bp, Homo sapiens
atgaagatgacgaggataaaaacctttacgatgatccagttccactggataaatagcaaatatatcttctcttatttatgattgatttgcttaataacattttatcttctctagcttactttattgtaagaatacagtgtatatacatgtaatatacaaaatatgtatgaattgtttgttttcagtcaacagccttgcatcttacagtattttaccctccccattctctggtaactactattctatattctcctttctacttgtatgagaagaaccttttagattccacatgtgagtgagatcattaagtattatttttaatttgaaagaatgacttagaaaaatacttgacctttacctacttaattcttgtttccacaattctatggtttcaaagataactgttaacttggctccttctaaatgcaccactgaataagcgctcattatgagtgactataatcctaacagaaagattgctcatttaaacccattgcaaaagtcagtagaagttaatagtttatatttggtcatagaaccttttatagtgactga

SEQ ID NO: 8294 - DNA, 589 bp, Homo sapiens
atcttaactaattacatctgcgagggtcctatttccaaataaggtcacctgaggttctgggttgatatggtttggctgtgtccccaccccaatctcatcttgaattgtactctcagaattcccacgtgttgtgggagggacccggtgggaggtaattgaatcctggaggcggtttcccccatactgttctcatggtagtgaattagtctcacaagatctgatggttttataaggggtttccccttttgcttggctctcattctctcttccctgccaccgtgtaagacgtgcctttcaccttacaccatgattgtgaggcctccccagccacgtggaactgtgaatccattaaacctctttttctttgtaaattacccagtctcaggtatgtctttatcagcagcatgaaaacagattaatacatggttagacatgacttttcgtgggatactattcagcccagtacaaggcatctttgtggactctgctacattctgcggggtttaaggttgcaattacggaataaaatagtggggagaactagttacaaagtgtggagaagacaggagatgggtcttcagaagtattt

SEQ ID NO: 8295 - DNA, 444 bp, Homo sapiens
aatttttgtgtttttagtagggatggggtttcgccatgttggccagcctgttcttgatctcctgacctcaggtgatccgcacaccttggcctccccaagtgctgggattacaggtgtgagccacggcacccagcctgggctatttctttctctcctctgggatgaggggtgggggattgctctccagggcattacaagataaatgatcagaaaaacctacaccagccattagtggtgatgtaacagacagggtttctaatacagagaaaccgtaaagcaagagtaacttactgatctgttctactaacttgagcatcactcctccaacatgaaggtctccagatactctcagtgtgacgtctttctgctgctcttcattgggatggtcaacgcggaccacaagctcccaggaagcaaatgtaaagtcagtggatgacagcattg

SEQ ID NO: 8296 - DNA, 636 bp, Homo sapiens
attctcatgcctcagcctcccaagcagctgagattacagacattcaccaccacaccgactaatttttgtatttttggtggagacagggtttcgccatgttggccagcctggtctcagactcctgacctcaagtgatctgcccgccttgatgtcccaaagtgctgtgattacaggcgtaagccaccacacccagcctaataaatgcttttttattgtgaaggtagtaagagacttatacccagatctcaatctggagtcttcagtgttcatttcagaaactgaaaagcaatgactatccatcaccactccccacttccatgactactgtacaatctcaacttcattgctcttggctctcctttccctcaattatatttattaataaaaataaccaggccgggtgcaatggctcacaacccgtaatgccagcactttgggaaactgaagcgagaggatcacttgagctcaggagtttgaaatcagccagggcaacatggcgaaacctcatctctacaaaaaaatacgaaaattagctgggcatggggcacacctgtagtcccagctacttggaaggctgaggtgggagggccgcttgagcctgggaggttgaggctgcagggagttgtgatctcacca

SEQ ID NO: 8297 - DNA, 547 bp, Homo sapiens
gtgaaaccccgtgtctactaaaatatatatatacacaaaaaattagctgggtgtggtggcgggagcctgtagtcccagctattcgggaggctgaggcaagagaacggtgtgaactcgggaggtggagcttgcagtgagtcgagatggcaccactgcactccagcctgggcaacagagcgagactctgtctcagaaaaaaaaagaatcctacaaaaagatattctcatggagagccctaagccaacataagtgactacagtagagtagcaatggccacagggcaggtccagccagagaaactatctaagagagacccaccatctccacctccatgtttccagaaacatcctagtagcacagaagggcatctgaatttttcccatggtttccccgacatccttccccatgagctccaacaatagtttggctgagagaaatccaatggactgggaatgtccttatggttgcatagaccggggcaagtttagactgtgaacatcagcggcagatggcagtgaggatagatacctaaaaccaaagccatctc

SEQ ID NO: 8298 - DNA, 641 bp, Homo sapiens
tggccaaggcaggtcgggggagtaggaggtagtggctaaggggtgcggatttctctatagagtaatgaaagtttctaaaagtgactgtggtgatcgatgtacagctctgggaatactctaaaacctactgaattgcagatttcaataaataaagtgaatggtatgtgaattatattttaataaagctattattttaaataataataatagggggctgggcacaggtagtcatgcctgcctgtaatcccagctctttgggaggctgaggcaggaggatcacttgaggtcagaagtttgagcccagtctgagcaacctagcaagatcccgtctctatgataaaaaaaataaaaaaattagctgggcatggtggcacatgtctgtagtcccagctacccgggaggctgacatgggaggattgcttgagcccaggagtttgaagctacagtgacccatgatcatgtcactgtactgcagcctgggtaacagagcaagactctgtctctaaaaaggaaagaaaagaaatgcaagtttttaccactttgtgagtgtagccaagttggtggagaaatagacaagaataaaagggcactgaataatgaaggtgagtggctggttaggctcagttgctagcttatcagct

SEQ ID NO: 8299 - DNA, 542 bp, Homo sapiens
gaaatgtgtgcgcactgtcctgagttttcatctataagaacttgagtgtgtatggatcaattaactggaactcctcagaaaacagggtgaagttttgaaagaaagttcaagttacataaagcattgaatcacaaattactttgtgatttctcagaggatgtcagcggtaaaggcggtaaggctcacatgtcagatctccatggggaatttttatacctacaaattaaagccaaattgattaccctgtatagataataacgtagagttggagatgccacataaagagaaaaatcttcagcaagtgtgtaattattagaaaaccatatacttctagctcatgattcttttctgctttgtgttgggtagatgcagaaaagttataagcatcaacttaatgtggttgaggctttctgaactgatctccatttaaccagttcactgcattaactggtgttctcaactccttctatgacataagtcaactgatgctcatgctgggtgggttcgttgaccatggacatcccagttgcatgccacgcact

SEQ ID NO: 8300 - DNA, 536 bp, Homo sapiens
gctaacggtattaaaaattaaaaaaatgagagagtgagtaagctaggacactttgaatacttcataagttatacctatgctacttcaatttaaatccttcaggttaaaacaaaaaatgattggaccctttaacagaataggtgagatctgcccacactgtgtgcaggatttgggtcaggatttcctgaggccattcttcccacagcaagcacgttttggatgccccctatgttcagcccctcaggggtgctgattgtcctcttttctcctttccctgcctgcccctacccccatccatgccctcacttgtgaaatgtgagtgtgtaggtcttatactggcccagaatttaatttgatttgggaaacaatttaagtcattacatgctcaagattttcttcccccttcacacccacccaaaaagcatcattgactaaaattttaaactaataaccaacagggtattgataccaaaagcagctgttaaagaaatagcacttcaggccaggcacagtggctcacacctataatcccagca

SEQ ID NO: 8301 - DNA, 548 bp, Homo sapiens
gtgtaatcagtgaaaccgatcaaattttgcttagactgactgaccaagagaaaaagaaagaaaatgcaaatcactaaaatcagaaaagaaagtggtgacactgctactgactttacagaaataaaaaggaattataagagaagaccaaaacaaatggacatcaaattaggtaccctagatagaaggcaaattgctagaaacatacaattacaaaaagaaacttgagaagaaataataatcaaaaatctcctaataaagaaaagtctaggctgggtgcggtggctcacgcctgtaatcccagcactttgggaggccgaggtgggcggatcatgaggtcaggagatcaagaccatcctggctaacacagtgaaaccccgtctctactaaaaatacaaaaaattagccagtcatggtggcaggcgcctgtagtcccagctactcgggaggctgaggcaggagaatggcatgaacccgggacttggagcttgcattgagccaagaccgtgccactgcactccagcctgagcgacagagcgagactctgtccc

SEQ ID NO: 8302 - DNA, 114 bp, Homo sapiens
gattattgattcctccttttttgtatctttatgtaaagcattattctttctactttctagttacagatacacacacacacaaacacacacacacacacacacacacacacacac

SEQ ID NO: 8303 - DNA, 437 bp, Homo sapiens
tttgtactatattcacttcaaaaataaattcatagtctaagaccttgtaacaaagaaaactgcaggctcagatgacctccctggtgaattctactaaatatttatagaaaaaataataccaattgtacacaaactcttccagaaataaaagaggaaagaggtcagcattaccctgataccaaaagcagacaaaggcatgagaagaaaagaaagtgacagaccaatttgcctcatgaacgcacacacacaaaactgcaacaaaatattagcaaatcaaggccgggcacggtggctcatgcctgtaatcccagcactttaggaggctgaggcaggtgtattgcttgagcccaggagttccaagatcagcctgggcaacatggtgaaaccttgtttttacatatatgtgtatgtatatatattcacacatatatatcaca

SEQ ID NO: 8304 - DNA, 560 bp, Homo sapiens
tacccagccccatttaacttgtaaataagtattattataaactccacaatttggctctgaacttttttgtcaccaaggcaaaaaaagaaaaacctgataaattgtgaagtttttattgccaaaaaattttgttttaagtcatttttaattagatatttctgggtttctgttgaaagtactttctcaaattaagagaaagtataacatagtatactactgaaatttccagagcgaataaaatgataagtcagagattttccttttaatgtttttttacaatgtaggctttattaagcccaaaatataatgttccagtatttcaataattaaataacaaatgataaattaatatctattaaattacagtttatcgaagctattctattgttcgtgtgtggtggctcccggatcatttatggatacagaatgttgccaaccgatgctctggcttgagctaagaatagaggataatttgaatataaaattcaaacatggccaggtgcggtggctcacacctgtaatctcagcacttcagtaggccgaggtgggcggattatgtc

SEQ ID NO: 8305 - DNA, 402 bp, Homo sapiens
ttaagctactcagattatggtgctgtgttatggtaacctgctatggtttgaatgtgtctcctaaactttatttgttggaacctaaatccccaaattcatatgtttatggcatttggaggtgaggcattgagagaaaattaggatgagataaagtcatcaagttatgcctccattatgggactggtggctttataaagagaagaaaaaaagacctgagctgacatactgttgcccccctgacaggtaatcccctctatctttttatgatgcaataagaaggccctcgccagatgtggcccctcaagcgtggacttcccagcctccagaactggaagaaataaatttctttttaaaataaattactagtctgtggtattctgttaatagcaatagaaaatggat

SEQ ID NO: 8306 - DNA, 587 bp, Homo sapiens
tattaaacaatatccaattcaaaagttacatttgtttttgttactgtacgtttgtagagaaatatttgctggggttatcacgtgtttatccatttgtgatacatcaaaaaaccttcatataaaagaaatagtacatctgctcctaatttctcatgtttgtttcctctccttacatctttattttcataactgtatttggaatatttatgaataattccatcttttaagcctgacagcattaattttatcagaccagagagcctccccatgtatctctggcacattctagagtcaaggtgattagcccagcaggggtctgaagaagtactcataagacgctttttcagaaaccctcactgctggagtatcattttagtccctgcacaactgtaacccaaacttgcaaggcttgtacataacattttgtcatatatacagtaaatgtatataatgaattgaatttcttaaacagatattacaaagccgtagtagcaaatactttactaaaatgctaaacagcattcaactagataagtttatcccctttagaatagttaccatgacaggctgggcttggtggctcatgc

SEQ ID NO: 8307 - DNA, 457 bp, Homo sapiens
tgcccaggttttgagtgggtgtaagttttcagctcattggggtaaatgcctaggagtgcaattgctgggccatatggtagacctatggttagccttgtagaaactgccagtctgcttttgcattctcaccagcaatgaaggggagtcactgttccacatcgtctccagcactgagtgttgtcagtgtctcgggtgtgctgtgcttttaaactattttctttttaaagccgggcagattggaaagtatgcatcatttttgttgcccacaagaagcttgttttgaactgttttatgttcacagtttgggatttttcaggcaatattgctgagctttaacaggaactttgcagtcctgtcaacctgaatttgagcccttcatttgcaagtaaccttgccgtgtgactatgagcaaggtacctaacctctccattgttcagtttctttatctgtaaaatgc

SEQ ID NO: 8308 - DNA, 590 bp, Homo sapiens
ataatatgcctaggagagtatatgctaccttgggtgaatagtacatattgatagtaacatattgatcatgggtagctattttgcaagtgacaacaagggcttcagatttgttagatatttgacgtcaaaattcaaggttatcaggaagcattaggccaattatcagttcctaaagtgcgtctcagtaccaagaacatcaaaagccatgaggcagtttcagcagctactgcaaatggtctcctgggttctgtaagaataatttcattccagttagcacatttaacaggtaagttccaaatatacggttttccccaaatttgggggaagagaaaattgagaagaacttgctcattttcttcctgctcagtatatcatttggcttcctcttccagttcaccaggaataaatacaaaataaatatattggttaaatgtaagtcgagattaagaataaggggaatgtagaagcgatctttcctttactttaaaacttcaaatttaagcaagtgtcactttctaagaaacctctatcgtgtggtgacatcatttgaaagccctcttccttcataacaaattccttatgctctctct

SEQ ID NO: 8309 - DNA, 63 bp, Homo sapiens
ggtggggagtaagctggggctgcctttctgaaatgcaatttggtaacttgtaccaaaagcctt

SEQ ID NO: 8310 - DNA, 473 bp, Homo sapiens
tacttgttaagttttggtgttgtgtcaaagaatagccacaattatacaaaaaggctgtctcaaaaaataatgataattaataaaaaaaatattagttgggcattggtggtgcattacctgtagtcccaaatagttgagaggctgagttgggaggatcacctgagctcaggagtttgaggcttgcagtgagccaggattatgcattccatttgcattccagcttgggtgacagagtgaggggaaaaaaaagacaacatacgggaaaaatctgggagggaatattcaagtaagaagagaattcaagttagaaggattttttaataaaaatgaacagccagggctgggagtggtggctcatgcctgtaatcccagcacttttgggaggccaaggcaggtggatcatctgaggtcaggagatcgccaccagcctggtcaaacatggtgaaaccccatctctactaaaaatacaaaaa

SEQ ID NO: 8311 - DNA, 575 bp, Homo sapiens
gcaggagcattcatctctgtggccacatgtttggtccagtgtctgacaaataacattcaacttgtaggaacaagtgagagcagagcatcctttctcaggaacaaggcccatcccctggtgagctgctccactggagtcccaggtccctaacctgtggcctaggtagaccttaggatttgcctcactgatgccaatgagttgctgctgcttacttttgaaacaaagtgttggcatgttccagctgctgcgattcaattgcctttcagacagtgtggtgcccaacaaagcatccgtctcaacaccccgcggcctccccagctgccactagtagcaatccattacccacaggcagctcaacaactcaatgtgacttgggctccacgcctctacacaaaagatgcttccctgccctgttctcctccttcctgttgtgaaagcagcctcccttgcccttacccagctgtggctctctcagcggcttcctctagccccaaaggcctgctcagaataaggacctgcacacaagttgtgtggccctgggcaaaacctggagctgcttgatgttctgagcctgc

SEQ ID NO: 8312 - DNA, 539 bp, Homo sapiens
actccaaattcctgctccactacctgtcaataaaatggctttttgtgagcttggtccgggaataggattcttaaattaatatgttgtcacagtttaagaaaatgagcacagtgatcttaagacacagagatttattgtttctggcaaagtcaaacctaaagagaagaaacaacaaccactctttttttttgaaaacgtgttaggtgattttctttagctatacaactacacatcaaacaaggatttgagtgtgaggcaatgtgttagaacattgagtaagacacaatcccagttgctgcaggaaatttaaatagtgataaatgtgtaagaaaagtactgtggagactatggaagaagtgatttattttgcttcacagaggagggccttttgcaataagctatagaagtgtccaaaatggctctttcaagaaaaaatgacatctttcctcagttaccaccactccatcctaatgtaacagcattaacaatagcttttttggcaatatgagaaaagttggtaagatagagtaggaagtctt

SEQ ID NO: 8313 - DNA, 70 bp, Homo sapiens
tctatacaatcattggtcttttgtttctctatttttctaatcttttctatattagggatattaatccttt

SEQ ID NO: 8314 - DNA, 546 bp, Homo sapiens
agttcccatgtttagaatttgctttatagatgtactcgcaaaattatgtcaagattatgtaccagagttttttgcagcacaattttaaacaagaaaaacaaccttaattctgtcaatgaaataccatgccggccgcgcacagtggctcacgcctacaatctcagcactttgggaggccgaggcaaatggatcagctaaggtcaggaattcaagaccagccgggccaacatggtgaaaccctgtctctactaaaaatacacaaattagccaggcatggtggtgtgcacttgtaatcccaaatacttgggaggccgaggccagagaatcgcttgaacccaggaggcggaggtagcagtgagccgagatcacgccattgcactccagcatgggtgacaaaagcaaaactccatctcaaaaaaatatatacatatatcatgccaccatgacaaagaatgaagccgactggcatatggataatgtagaaagagctccagaataaaattgtatgtgaaaaagtaaggtgcaaacaatgtgacactattattt

SEQ ID NO: 8315 - DNA, 597 bp, Homo sapiens
ggcacgagggttgttctaggtagtttcatgcggatgctgacctaaactagaatgtagaaattagtaggaaagtgaatgcccactaggtggaaacctgaaagcacggggacctgcgatcttgtttactgttatattcctgctgcgcagctcagggtctctatgtaaaaaatgagtgaatttattttctagctggtgcctacaaaataatctgcaatgtatccatactggtttattaatggtaacaaatgaaccgtactaatatgagataataggggaaactagatatggagtgtatgggaattctatctttactatttctggaaacctaaaactactctaaaatagaaggtttatgttttgaaagcactctgctcattgcgctcttgtctgaaaagtgaagcctggcctcaagccactttgagtatttctcttctgccagttaattatcttaccattgcctctcagtgatattaagagaaaacccatccttaacatttttcattactttttaggttcaaaatgagcctgtttggaacaacctcaggttttggaaccagtgggaccagcatgtttggcagtgcaactacagacaatcac

SEQ ID NO: 8316 - DNA, 506 bp, Homo sapiens
ggcacgagctcagctcatgggaatctgtctctcactggtcctcactgggtttatcccagtgaccaattctaggatgaccagaacaatgattccactgggcttgggagtgtttgctggtacctctaatctctgtgtatagttcatggtacctgtgtgctctgtggctaggtcctcagagtcagtccctgggcacgtactgtcagccttcagttttccccacagactgtgttcctgggcctgaatcgctcagactacatgttccagcgcagcgcaaatggctccccagccctgaaacagatcgaaatcaacaccatctctgccagctttgggggcctggcctcccggaccccagctgtgcaccggtgggtcccctgggcagcccccggcatacctgtggggtgacatgctgatgggtgtacagtcactggctaagccagggaactccagctatgattgtgctttactgggccccgggtcacatgttgcccctggccaccccgacagca

SEQ ID NO: 8317 - DNA, 401 bp, Homo sapiens
  misc_feature 89, 158: n = A,T,C or G
taaactgtatatctgtaatatgaatcccagcttttgagtctgacaaaatcagagttaggatcttgtaaaggaaaaaaaaaacaaaacanaatggagatgagtacttgctgagaaagaatgagggaaggagttggcatttgttgaaagtatagtctttntctcttttttttttaattgcaacttttactttagatttaggaggtcgtgcgcaggtttgttacatgggtatattgtgtgatgctgagcttgggatgcgaatgatcctgtcacccaggtagtgagtatagcacccagtgaaactgtagtctcatgccaggcactgtgctagcccactctggctcatttaatcctctcctaagaagagaggagacacagcgtccccatttgacagatgcagaaag

SEQ ID NO: 8318 - DNA, 378 bp, Homo sapiens
ggcacgagcttttttgtatttttacgctctgctgtccatgacatatttctaacacctttatgattattgttcctgcttgtaaaagggctgatatttacatgagtgcaaggcaggaagaaaaggtagctgtgccagccacttctggcaagcagttctcccaccttagcctcccaagtagctgagaccataggcatgagatttctcaaaattcctcccagcaggctttcacttagtttcattgttgagaactgtgacaggtccatctctagctgcaaaggaggctgagaaagtgaacacagcagtcctccttatccttggggaatacattccaagactggatccctgaaacagcagatagtactgaaccctatatatact

SEQ ID NO: 8319 - DNA, 550 bp, Homo sapiens
ggcacgaggggaaagaaaataactttgtgaagccagtgtattctgtttttaaaactgtgcctgcagtgcaatactccttctggtgtattttatccattatttcacttgctggtcgtcatttcacagccagctttgacatgcccgtgaggacaggagccgccgcttcagttgtcactgcagagccatcgtatgtcagttgcaatttccatctgaagctatgtctttgacttcactttaagcagaaaattttgtaccctggtggtcgagtcttcccttaaaaattgttaaatcatttggctttaatggttcaataatttggggtggcttcatggtgtttcttttcttcccagtttaaaaaaaaaactttttaagcgtaaaatctttaaggggtacacatttataagtctggctaatttctaatatgctaattaaacatttcccattttaaggttatatacagtgaggctcttcaggacaattattttctgggttgattgggcatatgtttgccgtgtaaacacggatatgataaagtgtcagtaacaatgga

SEQ ID NO: 8320 - DNA, 398 bp, Homo sapiens
  misc_feature 296: n = A,T,C or G
ggcacgaggttgggcttagaagatggggctgagtagggagagagggtgctgcctgggagctgagccatacaagtgactgcacaggttgacatggaggattaggtggagtgaggcttccaagcagggaggggaatgatggtggggcccaaatgaggagccacatcgaagtagatgagagaatagaaggtgaagtaagggctggcgttgggtagggggagacgccagcagtgatgctgatgcccaggctgtaggtgtataggtgccatccacctggtaaagagagagctgtagcgcangaatgaggttgcacatgtagaagaagggaaggatacaggggagagaagtgtcttctagtcctaaaaaacagcctgtgggctggcatggtggaacaaacctgt

SEQ ID NO: 8321 - DNA, 644 bp, Homo sapiens
cccgaccccgggccacctgggcccccgggttccgccggcactctcgccaccaccgcgtgggtctgacaagatgtaccaggtcccactaccactggatcgggatgggaccctggtacggctccgcttcaccatggtggccctggtcacggtctgctgtccacttgtcgccttcctcttctgcatcctctggtccctgctcttccacttcaaggagacaacggccacacactgtggggtgcccaattacctgccctcggtgagctcagccatcggcggggaggtgccccagcgctacgtgtggcgtttctgcatcggcctgcactcggcgcctcgcttcttggtggccttcgcctactggaaccactacctcagctgcacctccccgtgttcctgctatcgcccgctctgccgcctcaacttcggcctcaatgtcgtggagaacctcgcgttgctagtgctcacttatgtctcctcctccgaggacttcaccatccacgaaaatgctttcattgtgttcattgcctcatccctcgggcacatgctcctcacctgcattctctggcggttgaccaagaagcacacagtaagtcaggaggatcgcaagtcctacagctggaaacagcggctcttcatcatcaacttca

SEQ ID NO: 8322 - DNA, 383 bp, Homo sapiens
ggcacgaggcttagaaaattaacctttttctattaggctggtgcaaaagtaattgcggtttttttgccattaaaagtaatggcataaaccattacttctattaataaaaccctcaattttcattttcatagcctttcagaatgggagtaagctttgcaatcaacctgctccttcatcttatctgtacacttgataaatctgattcagtggttggaacggaatctgcttttcctgtattggttacaagcaagcactttgcctgggtgagtgtagctgcagtatagcatagaattaagactacagtttcatagtcagcgcagcttgaaatgttggctctatcatttactagctgtgtgatcttgcacaaaatccttaacttctct

SEQ ID NO: 8323 - DNA, 663 bp, Homo sapiens
gaatcatgactgctggctgaagcctgcatctttgggtaaacagggcaattaattcccagagaacaaggacatcatggatagttaaggcaaccagataggtgcttatcctctaggtctccatccaaaatggagtaatgacacctactttcgtgttttaagatttaaacgcagtaacatatgtaaagtgcagagtctgatgttcgagtccacaacgatgtaaataatgcaaaaccagtggattactcatgcttaatttatattttacttggaaatttatttcctttttcttggttatctctctaaataaggtaacttttttatacattttctttttatatgtatttattcttttttttttgtgacggggtctcactctgtcaccaaggctgaaatgcagtggtgcgatctcagctcactgcaacctccactttccaggctcaagtaattctccagctactcaggaggctgaggcaggagaatcgcttgaactcgggagatggaggttgcactccgtctggatcatgccactgcactccagcctgggtgacaaagcaagactgtcttaaagaaacaaaacaaaactacaaaccaatttgttttaaagcatgttttttctctgttaaagaaccttccagtgagtaacacaggacataaatttactat

SEQ ID NO: 8324 - DNA, 595 bp, Homo sapiens
ggcacgaggcctctgtcctgaactttttaacccggtgccacaacccgagggtctccataggggcaggtaaacggggattttaatcattttaagtgtcttagaatgatattttgggaaaaagcactccttttcctaaggactgcgactcggtgaacagaaaggaggctatgcggtgtggccagccaactcaaggaggacgaagcaacctttgcctctaaactgcctggaaccaaatgtcgatttttctgacccctcccagggagtgctgagtagtgatggtgtctggagggtcaaatccattcccaatggcaaaggttcctcaccactccccaccgctacaactccaaaaccactcatcccagtgtttggggcactgtgttcctcttcgtccctgcaccagaccctggaagccttggccagagacctcaccagactcgacttgcggcgctgggccagcttcatggatgctggagtggagcacgatgacgtagcagagctgctgcaggagctacaaagcctggcccagtgctaccagggtggtgacagcctcgtggactaaagttcccagtgtgggagaaaggagctagtttgcaat

SEQ ID NO: 8325 - DNA, 576 bp, Homo sapiens
ggcacgaggcaacacaaactgaatttccttattgctgatagctgcctgtagaggggtggtcaaagagactctacctggaaaactcttacagaaaaacattattgaataccctcttagtttcagagtttccagtctcatttctccttaaatctattcaccaaaacaccaccagtttcccctaccacaaacacacacataagtacacactcacctattttcaccttctcttccacttccacctttgtgttgaacctgattaaactctgatacttttaactccaaaatatgctatgctcttattaacaactggatcttagtagtttgcaaatgtttatttctcgtttatatgcagttcattgtgagcaggtggatgttctgctccatacccactgcagtccgagatctagacagaaaagtagcttttctctagaatattgtgggttccataccagacaggaaaaatgaaattacacagtggcttatataatttttgcttgtcactttcacccacatttcattgcaaaagcaagtcacatagccaaggttattgggtttaggaggggtctctgaaaatgg

SEQ ID NO: 8326 - DNA, 300 bp, Homo sapiens
gggccacgactaccaaattggcccctaccgcaagaacctgctatgctacgaccaccggacagacgtgtgggaggagcggcggcccatgaccacggcgcgcggctggcacagcatgtgcagcctgggtgacagcatctactccatcgggggcagcgatgacaacatcgagtccatggagcgcttcgacgtgctgggcgtggaggcctacagcccgcagtgcaaccagtggacccgcgtggcgccgctgctgcacgccaacagcgagtcgggcgtggcagtgtgggagggccgcatctacat

SEQ ID NO: 8327 - DNA, 436 bp, Homo sapiens
ggcacgaggcacaagccactgtgcccggccaatactgcataatattttaaaaagttaaaattatctcttctggctggtcatagtggctcacacttttaatcccagcacactgggaagctcagtcagaaggattccttgaggccaggagttcaagatcagtctgggcaacacagaccccatatctccaaaaaaataaaaataaataaataaaacagttatcaggctgggagtggtggctcatgcctgtaatcccaccactttgggaggctgaggcaggcagatcatgaggtcaagagatcaagaccagcctggccaatgcggtgaaacttttgtctctactaaaaattcaaaaaataaaattagccaggtgagttggcgggcgcctgtaatcccagccgcttgggaggctgaggcaggagaattgcttgaatctggg

SEQ ID NO: 8328 - DNA, 661 bp, Homo sapiens
gaattcggcacgaggccttttgtggggtctcatacataactcagtttccacaaagctgtgccccagctcagccctatggatagaagcatggtctggggttcctttgctgaccagggtgtgtgctttgtccaagttactgaccttcccaaacctcatcaatgcacataaaaagagcacttgcaaacaatgaatctagacatggaccttcacaaagaaataactcaaaatggatcccaggcctaaatgaaaaatgaaaaactataaaactcctagaagataacataaaagaagatctagatgacctagggtttggcaatgactttttagatccagcaccaaaggcaggatccaggaaagaaataattgataagctggacttcattaaaacgaaaacttctgctctgtgaaagatgctgccaaaaaatgaaaagacaagccacagactgggagaaaatatttttgatggaaatatctgagaagagaggcttgttatccaaaatatacaaagaatttctaaaactcaataatttgaaaataaacaacccaatttaaaaagtgggccaaagatcttaaatgacgcctcaccaaagaagatacacagatggcaaataagcatatgaaaagatgctcccggctgggcacggtggctcacgcccgtaat

SEQ ID NO: 8329 - DNA, 451 bp, Homo sapiens
ggcacgagcctgtgtccagcgtcctcggttcaggggaaatgttttggtgttcatgagtagtatgtcccccagtgccccattgtgtgggcgtcctcatggggtatccattcttctaggaagatcctggggctgtttccagttcgaagccattattaataaagctgcaaggaagaaatatttttatggatgtgtgtttttatatctctgataaatatattcaactggaatcattgggtgtattgggccattctcccattgccaaaaagaaatacctggccaggcgcagtggctcacacctgcaatctcagcacttgggtggctgatgcaggtggttcacctgaggtcatgagttcgagaccatcctgaccaacatggcaaaaccccatctctactaaaaatacaaaaattggctgggcgtggtgtcaggtgcctgtaatcccagctacttgga

SEQ ID NO: 8330 - DNA, 558 bp, Homo sapiens
ggcacgaggatgtcctgctatacaccatccactgccctgccccttaagcctcacatctttcatctctcctagttccaacccatggtctccagacgatgactctgcctccctgttctggtagcattcacagattgccttgtttagtagcctttcacatgagatccacttgacagcccctgtcctcacccctcctcaaactcctcaccacactgaaactcttccagctccatgagtaggttcttgggtggtttcttcacctgcaggttcaggtcaatgctcagccggggactcgacagggatgctttgcaggtctctggagtgctctttgtgcagtccctcctctgtggtactctgcccttgaactctcactgccttggcctccccaaagtctaaactttgtctcctcaactcagaaagtcctctgggctctgtctgggctccccttccctgtatgtggaattaaatctctctgcaggcaggaagttggggcaatcctagggctcactttgttatcttcccatctctcagggatcactgtcctgatgtctattgtcctgg

SEQ ID NO: 8331 - DNA, 108 bp, Homo sapiens
ggcacgagagcctgctgagggatgcccaagaagttccagggtgagaacaccaagtcggcagcggcccgggcacgtagggcagaggccaaggcggccgctgatgccaag

SEQ ID NO: 8332 - DNA, 370 bp, Homo sapiens
ggcacgagccctccagccactgctttatactctccttctctggttgaaatttttgaagtaaataggtcactctgcccatcgttcatcttccagtcactctgtgtgtttatcttccagggaagtgaggctctatgctaccaagccactgaaataatttttttttttttcaagactccatctcaaaaaagggagatgatttacaaaattaagccagggggggccccacacctgaggcccagctattggaagcctaagcgggaagatggccctacctgggagggcaggctgcgggagccagaaggcccccctgcctccaaattggggacaaacaggaccttgctaaaaaaaaaggggtggttaattttcaaaa

SEQ ID NO: 8333 - DNA, 480 bp, Homo sapiens
ggcattcggagggaagctgacatccacgccaagtcgagacttccagggatgtggccggggagcagtcacatgctgtagctttcatgagcacaggcatcagtcaggcagatgtttgtcgactggaatggcgccaaatcttaaaggcagaccacgcaaaaagaaaccatgcccacaaagaagagattcattcagtggtgttaaggattccaacaacaattccgatggcaaagccgttgccaaggtgaaatgtgaggccaggtcagccttgaccaagccgaagaataaccataactgtaaaaaagtctcaaatgaagaaaaaccaaaggttgccattggtgaagagtgcagggcagatgaacaagccttcttggtggcactttataaatacatgaaagaaaggaaaacgccgatagaacgaataccctatttaggttttaaacagattaacctttggactatgtttcaagctgctcaaaaact

SEQ ID NO: 8334 - DNA, 368 bp, Homo sapiens
gcagttaaatcaggtggagcagtattaaatggtgaaggaacagccacaaatactgaggaattttgggcaaataaaggtttaacatccattaaaaaggacatgactgacataagtcatggttatgaagatcttggcctcttactcaaggacaaaatagcggaactgaacactaaactctccaaattgcaaaaggctcaggaagaatcaagtgcaatgatgcagtggttacagaaaatgaacaaaactgcaacaaaatggcagcagacacctgcacctacagatactgaagctgtgaagactcaagttgagcagaataagttgtttgaggcagaactgaagcagaatgtaaacaaagtacaggagttgaa

SEQ ID NO: 8335 - DNA, 340 bp, Homo sapiens
ggctgacgaagatggcgactgaggcacagagtgaaggggaggtgccagcccgcgaatccggccggagtgatgccatctgcagttttgtgatctgcaatgattcttcccttcgaggtcagcccattatctttaatcctgacttttttgtggagaaactccgacatgagaaacctgagattttcactgagttggtggtcagcaatatcacaaggctcatcgatttacctggaactgagttggctcagctgatgggggaagtggaccttaagttgcctggcggggctggcccagcatcaggattcttccggtctctcatgtctctcaagcgaaagggagaagg

SEQ ID NO: 8336 - DNA, 137 bp, Homo sapiens
tcgcgccattgcactccagcctgggagacaagagcaaaactccaactcaaaaaaaaaaaaaaaaaaacccgggaaaaaaatttttgggggtcaaaacttaaaaaaaaaaaaaaaatttttaccccaaaaaaaggggg

SEQ ID NO: 8337 - DNA, 357 bp, Homo sapiens
agcggggaggcttatcattttaggccatgaagttctgacatggtttgttatgcaggaatagacaactaatctacaccacatacaaattataatgttccttttttttttggttctattattgggttttataatatcacaatatgtcctggaattcttaattccacaattttaaaaaacaatatgataatacactttgaggaggtaccatagttcatttaaacaatcccttgtcaatgaacaattggattatttccaataatttggtcctggattttgaggatccaaatcccaatctacttgactgtcctggatttgccaggccttagggaatttcaaaaatgaaggtagggagggacc

SEQ ID NO: 8338 - DNA, 226 bp, Homo sapiens
ggcacgagcttgtcccagtaaccgccggttggaggcggccgaaccgcagtagggaaagacccaggctgcgggacgcggtgcaggctgcggcgctgacggcctctgctccttccgcgggtttccgactccctgccctagattttctgcttagcgacttggggtcccctctcgtttgcttctggtaggagtcgcaatcccagcagcaatagcccagaagaggacacgg

SEQ ID NO: 8339 - DNA, 320 bp, Homo sapiens
accaaaaagcatgacatatagaaaacaaataacaaaatgcagaagtcagtccttccttatctgtaattacattaaatgtaaatgaattaaaaggcagaaactggcagaacagatgaaagaaaaaacaagtccaactatgcacagtctacaagatactcactttggattcaaagatgcatataggttgaaaggagaaggatgaaaaaatatattccatgcaaaaaacaaggaacaaaagagtggctatactaatatcagacaaaatagactttaagacaaaattgttgggccaggcacagtggctcatgcctgtaatcctc

SEQ ID NO: 8340 - DNA, 655 bp, Homo sapiens
aaagtagttaatacagatgggatgcagccagacccgcctcatgcagtgatttcagcagatgcagatctgcctccaagctctcatgggcagaaagagccgcaagagaacagtgtccttgatgagcaattaactcatttacctaagtatctggtgcactaaatagattcacatcctgttctgtatgaatgaatggaaaacatcaaggatggcctttgtatgagtacaagtgtccaatgtgaaatctgtgtacaaagcacatgccattggaagcttggtcatcaggaaggcagaaaggaaattggctctttatagaatctttatagtacagaaacatatagaggtacatttccttcctctgagagtgccgttccataccacctggagagaatgccaggtggtaacaatgtacagcaggtttaatcaagacccagcatcctaaatcatgcgcagagtgccaggcgcgcaaggtggctcacgcctgtaatcctagcactttgggaggccgagacgggcggatcacctgaggtcagaagttcgagacatagcctggtcaacatggtgaaaccctgtctctactaaaaatacaaaaattagctgggatggtggtgcacgcctgtagtcccagctacccaggatgctgaggcaggagaatctc

SEQ ID NO: 8341 - DNA, 450 bp, Homo sapiens
gagagagtcaaattatataaagcaaaaatatcagaaagtaagtagaaatggataagcccccaaatattatagacatttcaaacacacatctttgagtaatagataaaagaaaaaattaaaagagtaagttttaaaagaagctagtggattttaaaaagggcaaatattatataaggaacatgaatattataattcatgttattttcatgttcatacagaatacttacaaaaattaacattttctagaccatgccacaaattcaaacaattttcacggaaataacgtgacacagaatatatttcctaaacaaacagcaatgaaggcagatatcaatacaaaaatgaaagctagaaacataagtctaataatattggttggaagctattttaatgaatattgaaatattttaaaggtgaatagtcaatacaaataaaccaaacacttttgta

SEQ ID NO: 8342 - DNA, 526 bp, Homo sapiens
taggactaaaaaggcattattccccgttcctcttatcaggaacctcattgacagaggcatttactttctatgaatacaaatgactatggctattgtgattagaagcagaagaaaaccagctcatgaaccagaccctgaacacaatatctgggggcatgacagatatcccagtcactcctggagcaggggagagagctgaagaggcatcacgttaagaagacgcaccagtgctgggcacatttggtgaatctaattaacaggggcaacttgtcggctgggcgccgtagctcacgcctgtaatcccagcactttgggaggccgaggcgggcggatcgcaaggtcaggagatcgagaccatcctggctaacatgatgaaaccccgtctctactaaaaatacaaaaaaattagccaggcatggtggcgggctcctgtagtctcagttactcgggaggctgaggcaggagaatcacttgaactagggaggcggaggttgcagtgagccgagatcacaccgctgcactccag

SEQ ID NO: 8343 - DNA, 641 bp, Homo sapiens
cccatcttgattatactttttcctgctgtctctttcttcaaattctggatcttatcttctatcatatccttcttatttacaaattactacataagtgcttgacttttaaaattaagaccacttaaattcaatgtgtatttttagtcagagtttactgtcattccatgtccacttaggttctctctctcctcattttctctgtttattaatatttagggccagtcaacagcacaaattaatgggaaattcctcctttggcattactcagccctttgttttaatttggttagtattaaattattttagtagcaaagttatcattcagtggggactaaagaatttaagtgctttaagttttatacttcctctagataaaaatatattgttctctttgggaggctgaggccggcaaatcatgaggtcaggagttggagatatcagcctgaccaccatggtgaaaccccgcctctactaaaaatacacaaatcagctgggcatggtggcagcctcctgtaatcccagctactcaggaggctgagtctggagaatcgcttgaacctggcaggctgaggttgcagtgagccaagatcgtgccactgcactccagccctggcaacaatgcgagactccttctaaaaaaa

SEQ ID NO: 8344 - DNA, 596 bp, Homo sapiens
ggcacgaggtcacctccactagagggggataaaaaggataataggaaatcagaatattttgatttgtagttcaactgttgatcaattatctttgagacttttaacattcatgactaaggaggattaataattaacatgagctgtagaattaaggtttgtatggcatgataagtataaaccagttttgggaccgctataattctaaaaaagcaggtagactagatgattagttgtacacttattactgctaattcttgattgtagaacaaattttcctatgaaaaccatgttgtgtattttatatctctattagttcgttaaaagtttagcagttttagatgtcgaaccagtaaaaaacaagttgcccattctatcattttttttattgtggtaaaatatatttaagataaaatttacgattttaaccatcttaagtgtacattggtacagtggcattggttacgttcacaatgttgtacaactgtcatccctatctatttccaaagctttttcatcacccaaacagctctatacccactaaacaacaactccacatcacccactccccagccctggttatctctgttctactttct

SEQ ID NO: 8345 - DNA, 369 bp, Homo sapiens
agcctggccaacatagtgaaaccccatctctactaaaaacacaaaattagccaggcttggtggtgcgcacctgtaatcccagctactggggaggctgaggcaagagaatcacttgaacctaggaggcagaggttgcagtgagcctagatcgtgccactgcactccagcctgggctggacagagcaagactccatctctgaaaaataaaataaaataaaataaaacaaaaaaacagaatagaagaagatagctaagaaccacagtggtcaagccagcctggcttcaacagagatgaatggagagaccacggtcagccccattaacagaagaactggggccaggaacggtggctcatgcctataatcccag

SEQ ID NO: 8346 - DNA, 300 bp, Homo sapiens
aattccgttgctgtcggagagactgaaaacagagaaaaagttgccgcctcaccaaaaagtcccactgctgcactcaatgaaagcctggtggaatgtcccaagtgcaatatacagtatccagccactgagcatcgcgatctgcttgtccatgtggaatactgttcaaagtagcaaaataagtatttgttttgatattaaaagattcaatactgtattttctgttagcttgtgggcattttgaattatatatttcacattttgcataaaactgcctatctacctttgacactccagcatgct

SEQ ID NO: 8347 - DNA, 173 bp, Homo sapiens
agaaacagaaacttggtcttccagccccttatcagcctgggcacaagagcgacactctgtctcaaaacaaacaaacaaacatttaaaaagcgtctttggatttaaaccctcatctgttttctatttcatttattctttgttttgttttgagacagagtcttgctctgtcaccc

SEQ ID NO: 8348 - DNA, 339 bp, Homo sapiens
cccggagcaggagaagcaggtacaagcaaatgtgtgggcatggccttcatacccccaagcccagtcctgctcctagaaataaggagacaaagaccttcatgcctcagaccccctggcccatcccattgactccacagcctcagcttcagctactgagctctccacaaatgtggctcccactatgtgagactattttgcatgatacatagattattggatatctaaagacctattagaaaaatataactagcggccgggcgcggtggctcacgcctgtaatcccagcactttgggaggccgaggcgggcggatcacgaggtcaggagatcgagaccatcc

SEQ ID NO: 8349 - DNA, 339 bp, Homo sapiens
cgctgggagcccctcggcatcatgctctggccagcaaagcccctgcggcagcggcagcagctgtggctgccatcatcctggacaccatgttgccttgagaggcaattgttccttcccccattccatgggcactttcccagttatgacacaggatgatctggtcccagtgctgtaatggggagtggggatcacaggtggggcaatggaggagctctgaaagtggctttggatatctcactacccaaaaggaaaggcattagccaccatggccccaacaaaactaaaataaaaaggaaagggggtcaggcacggtggctcacgcctgtaatcccagcactt

SEQ ID NO: 8350 - DNA, 268 bp, Homo sapiens
gatcctggtaccccctgcccgcgccgatataatgctttttcgcccccctgggacctcggacttgggcttccctttggacatgaccaacggggcagccttggcagccaacagcaatggcatcgccggcagcatgcagccagaggaggaggcagctcgggcggctggtgcagccattgcaggccaagcctctttgcctgtgttacctggggtggaccgcttgcccatggtggctggacccctatccccccaactgctgacttccccattc

SEQ ID NO: 8351 - DNA, 479 bp, Homo sapiens
  misc_feature 433: n = A,T,C or G
aatgtgaagtaacaaagatcaggcagctgcaagtgactcctgaatcttgagtccagggctttcgccactacagtacagtggttttcttttctttggtcggggagagtgggctggaatggagagtgaggcccacaaattacctgcagaaacgtggaggcgtgagggagaacatgcttgttaaatatgcaggtagattaggagacaccaaacagagattcagacacagtaaggctgggatgagatcctcgaagctgtgttttaacaaactccactggagagtcccatattccctcaaatttgggaatcacgaccctgaaccaggttgggcctgaagcagtcaactgaattcactttttcggatagtaatttgttcccaggggcagtgacaaccatgatgttccaggtttggtctggcactctgccttgaacgtangaagctcttgatgatttgtggaatgaatttttaaaaaattactatc

SEQ ID NO: 8352 - DNA, 594 bp, Homo sapiens
ccgttgctgtcgcaatttctgagtctctttctatttaatgccaccaatttctgaggaactagagtgcagagtggattgcttttcagctttttctattaggattcagatagctttttaattgctgctaatatatttgtcattcatattgcttttttgttttcaaaattcagttaatattttttcttctcattcattttgactttgtaggttcatgccatttgtaaaaccctctttgttgtctttttattggaattttgagagggagttaaatgtctgtttttaatctaccatctttaaaccaaaattccagctatttaatttcagcatgaagaattgcattaaaaacagagcagtgaatcattttatgaataataatgctggattttatttttaaaaattatcctagcctaaaatgtttaggatcatcatagcattaagagagatttatatttggtaagaaatcaaaaacatcgtcagttttcatgcttaaagtatttaggatcataatagcattaagaaagatttatatttggtaaaaaatcaaaaacatggtcagttttctagtggaaatttttcatggcactataaatcttt

SEQ ID NO: 8353 - DNA, 261 bp, Homo sapiens
gagggttttcaggcagaggaacagttggccaaggaagtcagcttctcagagctcaagagatctgagtttaactcattaaagatggcatggaagaacagtgtcataatgcaaatgggaagatttcttctcttagtaattttatttctgccacgtgagatgacaagttctgttttaactgtgaatcgtaaaactgagaactatatcctggatactacacctggctcccaagcatctctgatatgtgctgttcaaaaccacacc

SEQ ID NO: 8354 - DNA, 444 bp, Homo sapiens
aaatatctaatatattttttctaattaagaacaaataaatgaaaaaaacaagtgaaacctttaatttgcatataaataagggaattaacaccagcatctaaggttatgtcaatctgtagaagattaattctttctcaccagaatttgtttccatgacatattcaagccatttatcaggcccagatattccactttccagtataagccttcaaagtacaaaaacatgaactgtaccaccccacttacgttgcatggatgttctcttgcttacttttattcaagtcccttcctaaacttgttgagcagtatttccacatacttactgatcataacaatcacgaaaaatagttgttatataatagagctttttatttcccgttattactagatgagcaaacatgccatcttgaattctaatcagtaacacacatgattcttattaca

SEQ ID NO: 8355 - DNA, 432 bp, Homo sapiens
aaagcacgaaaaattatttataatagtctggagaaaaaacacactgtaatatttcaagtgtatgcagtagaatgtactgtaactgagccctttcccacatgtctaggctccaatgtctcctgtaggtccacctaactgtgtgttttcagggacaatgccatccatgtttgtgctgtagacttgctgctgctgaatcctttctggggactttctcatcgggcagggagcagagggcttctcgttcatgcaccctttgcctgaacacccatgtagctgctgtgttgtgtatatattactcttaagaggagtgtgtgtgtctgtgtttgttttaaaagtcacttatttcttacagtgatttcaattgcaccatgacttcttcactaaaaccacaaagtcctgcttaaaactatggaaaacctaacctgattagag

SEQ ID NO: 8356 - DNA, 308 bp, Homo sapiens
agctgagtttaatataatcaatagaaatacatattaatgtaaaactttaactcaaaagataaaaaagcctctgctttaaaaggtttaggcaatttcggtaagtatttttattacagaattatagaatatctagaaaggcatgtgttgaataaagaatgagaacaagtagttgcttcaaactatatattatattcaaattatgtagtgcacggtattagtttctatacattcgttaaaatttaaaaaattctatttcttattttgtttaaataaaccaaaatattttatttcagaaaataatttaatct

SEQ ID NO: 8357 - DNA, 323 bp, Homo sapiens
  misc_feature 82, 281: n = A,T,C or G
caaaaacaaaaccaaaacactcttaatagaatagaaagaaaaaaacactcttaatagaatagaaagaccatccactgagtgngagaaaacatctgtgaattgttgtatacaaagttgtatacaaaatatataaagaaggccaggcacagtggctcacacctgtaatcccaggattttgagaggctgaggtggggggatcacctgaggtcaggagttcgagaccagtctggccaacatggggaaacctatctctactaaaatacaaaattaccaagcgtgcngggtgtcctggaatccagctactagagctgagcagagatcgt

SEQ ID NO: 8358 - DNA, 505 bp, Homo sapiens
gctgaaaggcctacacattaaaaactaacactgccttccctgaagggagatagtcctttcattttagctccttgcattgaaatagcattgaggattaaatttgtgtaagccccacaaaattcaaaatttatgtgcttttctgaccacttgccttctagtggaaattttaagcatattagaggatatgtttctgtgggagctgatcagaatggtactaggagtacaaaagaatatctaaaactaaaacacagctatatttcagatcatactgcttcatcacatcgagtgcatctacaaaggtaataaatagtatgtggctgagttagggcttgggaccattttctagaagatttgccctttctgcaattctagtctctataatgattggagtgtaggagttaagttgtggagcgtctcataaatttaactagaatcatcccctcttaaaatctaaatcaaatattgacatattagtcggccattatttgattacatttttattggt

SEQ ID NO: 8359 - DNA, 377 bp, Homo sapiens
agagaggagagattggtgggcagtttttgtgactcggacacattaaaacacatacatactctcaaatgaagttgcattcaggcaaatgcaaagaaatacagaattcatatttataaaaaccaaaagaaaaaagggaaaacaatgccttgtgtgagaataataaacatcaaattctattattattatttttttaagatggggtctccccctgttgcacaggctgcagtgtagtgacacgaacatggttcatggtctttgatctcctgtgctcagtgatcctcccacctcagcctcccaagtagccgggactatgggtatacaccaccacacccagctaatttttaaattttttgttgagataaggtctcactatgttg

SEQ ID NO: 8360 - DNA, 377 bp, Homo sapiens
gcgtgagctactttttttttaaacagataatcaacagggccaaagcaattaagtcattttcccagtcacttggccaataagcagcaagtcaatgaccagaacaaattatacaactttcatcttcccataactgatctaagcctaccaaaaaaacggatgagactagacagaagaaacagtgtcaccttcatccccggtcatctagtcaagaactacgcaaaagccatatgtaacagaaatctaggaccacaggctacagtgccatggcacaaacatggctcaatgcagcctcaacagcttgggctcaagcaattctcccacctcagcctccagagtagctggggctacaggcatatgcgccactgtgcctggctaat

SEQ ID NO: 8361 - DNA, 497 bp, Homo sapiens
tatatagccatctgtaaagtttacttcacatagtaaatgagttaacgatatttaatttcccatatttcttaaccatatctttttctttcatattttaatgctctcaacagagcatctaaataaagcaacagagtgaacacagggactttcaggcatatactaatggtgttcctaaaatgattcaatttgatcttacgcttcagtatttcttttcaaggtaaattaagtttgtgctgttgaaaaaatgttaaattgttgtttgcatcttctaatgagtatagtagctgagagaagatagctatttgcattcagaggcatgtccaagtagggagttccttcttctaactcttatagttcaggaacataaccaagtaataaagtgagtaataaacaaatagtgaacagtggccaggcatggtggctcatgcctgtaatctcagcactttgggagtccaaggtgggcagattacttaagaccaggacttcgagactagcct

SEQ ID NO: 8362 - DNA, 580 bp, Homo sapiens
gattataggtgtgagccactgcacctctgcctcccgggtaacctctgcctcccgggttcaagcgattctcctgtctcagcttcccaagtagctaggactagaggcgtgtgccaccatgcccagctaatttttgtatttttagtagagacggggtttcaccatgttggccaggatggtctcgatctcctgacctcgtgatccgcccgccttggcctcccaaagtgctgggattataggcgtgagccacaaaagttaaaaattttcaataaatgtgctgagtcctcaaaaagaaaacagaaaagtaccaagctaaaagatgcaagatcaggatctgacctcactctacaattttctgtctgtataagctggataacttacttaactcctcagagcctcagttttctcatctagaaaatgataacagcattttaaaaaaaaaattttttttaatttttttaaaattttattttttgaaaaatagagatggggtcttgctgtgttgcccaggctggtcttgaactcctgggctcaaatgacctgcccacctcagcctcctaaagtgctaggattatgggcatga

SEQ ID NO: 8363 - DNA, 547 bp, Homo sapiens
caggggatccaggatcatcaccaaggtcattttcccagacagatgtgctgaggctgtagaaagtgctttttatttggttgggagcttgtgcataaatgcgagaggggctgcacatctgacggactagaggtgactcatggctgaaccggaacaggacatcggggagaagccagcagagcttgtgtttaaagtcagaattcagaaccccaaagaaaatgacttcattgaaattgaactgaagagacaagaactgagttaccaaaacctactaaacgtgagttgctgtgaactggggattaaaccagaacgagtggagaagatcagaaagctaccaaacacactgctcagaaaggacaaagacattcgaagactgcgggactttcaggaagtggaactcattttaatgaaaaatggaagctccagattgacagaatatgtgccatctctgacagaaaggccctgctatgatagcaaagctgcaaaaatgacttattaaatactcccaggaatggccgcgcatggtggctcaccccctgtaatcccagca

SEQ ID NO: 8364 - DNA, 351 bp, Homo sapiens
cttccgggatgccacatcctcctggttttgttcccctgccctggttgacagcactttctcctgcccttggctagttcctcctcccctaacctgcaaggtgtcccagggtcttctctatctgtcctcactcatctccctccatggctttagaaaacatttctctgtggctgagaaatgtgtatatagggctccaacctccactgaactcctgaagtcccgacacacgtcactggctcctgctgtcatcccacctggacatctgaatggcttctgattcccctttccagtcccctcccccatgtttcaaatggcagtcaaccaggccgggtgcggtggctcacgcctgtaata

SEQ ID NO: 8365 - DNA, 620 bp, Homo sapiens
  misc_feature 463: n = A,T,C or G
gctacaaaataatcaaaacaaatcataataaaaacggaagaaaaaaatatttcagtgttccttagactcttacaatgtaattcaaactgagttgtaatttcaatacacttcttctgttaatgaatgtgcagataactggtttaattttccattcaataaatttttcttataaagatgaaggaaggccaggcgtggtggctcacacctgtaatcccagcactttgggaggccgaggcgggtggatcacgaggtcaagagttcgagaccagcctggccaatatggtgaaaccccgtctctactaaaaatacaaaaattagcttggcgtggtggcgtgcgcctgtagtcccagctacttgggaggctgaggcaggagaatcacttgaaaccaggagggggaggttgcagtgagccgagattgagccattgcattccagcatgggcaacagagagattccatctcanaaaaaaagatgaaggaagaggattaaatatagtgcagattaaacaacatgaacaacttgtcccctgaagtatgttaatatgtaattagattttattatttaggcaaggattcccctaatggagcacatttctgaaatgatgaaaagtattaggatat

SEQ ID NO: 8366 - DNA, 302 bp, Homo sapiens
gagatctcagctctctgcagcctccacctcccaggtgcaagtgattctactgcctcagcctttggagtcactaggattacaggcgcccgccaccacacctggctaatttttgtatttttagtagagatggggtttcaccatgttggccaggctggtctcgaactcctgacctgaggtgatccgcccacctcggccacccaaagtgctgggattacaggcatgagccaccgtgcccggcctaggagaaatgagaactttttaaagaaaatggttccatcggctgggcgcagtggctcacgcct

SEQ ID NO: 8367 - DNA, 291 bp, Homo sapiens
agacagccataaaaacacaatagttcacaaaggtaaaaatatgtggaaagtatttccctctccccttctagatatggtcaaatgggaggtcatagaaatcccttttgccttttcagtttttaattttgttttgttttgtttttgagatggagtttcactcttgttacccaggctggagtgcaatggcgcaacctcggctcaccgcaacctccgtctcccgggttcaagtgattctcctgcctcagcctcctgagtagttgggattacaggcacccaccaacacgcccagct

SEQ ID NO: 8368 - DNA, 546 bp, Homo sapiens
gggttccactgtggtttcccaaggagaggtaaataataacagctagtatttattgagcacatactatgtgccaggctcggtgttactcatttaacactgtgttttctattaactaatttaattctaacaattccatgatgtagcttttattttcagatgaagtcaccaagacttgctcatggagacacagctggaaagcagaagcaccaggattcaagcctgggccggtgggaagcctgaggctcttacccgccctcccttcagtgctgccttccttcatgcttcacttgttcctttttcaatgtccctgcttttcctgccctcatttcaactgctcatccgtcttcccagacttttctacagacgtgcggcattgcagtactgctcttgctgcaaatgtcagatttccttggtcagatttgcttattgtgggactttctgctgagatatatcagagatgttacaactgcgagaaatgcaggcagttctctgcgatccatctgccatgcaatgacaagagatgcttaaaggctgtctggtagaact

SEQ ID NO: 8369 - DNA, 337 bp, Homo sapiens
ctcactcttgtcacccaggctggggtgcaatggcgtgatcttggctcactgcacgctccgcctcccgggttcaatgattcccctgcctcagcctcccgagtagctgggattacaggtgcctgccaccatgcccagctaatttttgtatttttagtagagacaggtttttgccatgttggccaggctggtctcgaactcctgacctcaggtgatctgcccgcctcggcctcccaaactgctgggattacaggcgtgagccaccatgcctggccagcttatcaaaactttaaggagtactgaaaatcatttagaagttagtaagttatagtctttatac

SEQ ID NO: 8370 - DNA, 197 bp, Homo sapiens
gctaaacctagccccaaacccactccaccttactaccagacaaccttagccaaaccatttacccaaataaagtataggcgatagaaattgaaacctggcgcaatagatatagtaccaaaaaaaaaaaaaaaaaaaaaaaaaaaggggggggggtttttccggaaaccccaacaggaaaaaaacccgggggggggggg

SEQ ID NO: 8371 - DNA, 473 bp, Homo sapiens
ctcttctaaaactgcctggaactgaattctgccaacaacctgaatgaacaagaaaatagattctcccttagcgacaccaggaagaaatgcagccctgatgacacctagagtttagcatagtgcaaccaatgtcagactttcaacctacagagctgaaagatacatttgtgctgttttcagtctctaagtttgtggcagcaatagaaaatgaatacactcttcttacaaattttgtctgcatatttttattggagtggggttattttaaaacaagaaaggacttgtgagtttaaactaaagattcttagaacattctggaatgatatttatttttatgaaataatttctagtttaaacacatgacattgattttagcttgcattctaagtcatctgagatttgaaggatgttccatgtcttagtcttatttattggggcaactttgcaattccaaaaattatatacacaaaatg

SEQ ID NO: 8372 - DNA, 568 bp, Homo sapiens
gctgaacttgatttaacatggttttattttgtttttaacaaatagaggccatgatgactgtttaggctgagtaatggaggcctctgctccaagggcaggctgcttttcaaacagttgccatctcagtaatttttatccatttgcatctcacaacatcacaagacaggtttacataaaagtccaggttaccctgcaggctgcgtggtaacctttgattttaggttgatactggagagaaggtccgagaagaagccatccttaacaggaaatacattaaaaaaattctttgaaactggttcctgtgtcattgaaaggcttgggtaagaacacacacatggctgggcatggtggcccatgcctgtaatcccagcactttgggaggccgaggtcagcagatcacctgaggtcaggagttcgagatcagcctgaccaacatggcaaaaccccgtctctactaaaaattcaaaaattagcccacacctggtggtgggcacctataatcccagctactcgggaggctgaggcaggagaatcactggaacctgggaggtggaggctgcagtgagcc

SEQ ID NO: 8373 - DNA, 333 bp, Homo sapiens
tcaagcaattctcctgcctcagcctccagagtagctgagattacagacatgcgccaccacacccggctaatttttttttttttttttaaggggagacggggcttttccttgtggggcagcctggccttgaactcctgaccacggtggggaagaaagctgaagccgacaagaatgataatgccttagaagaccttcagctgctgatgtttgaagccagccttactatctgtgggaataaccttgatgatcccccaacccactggaaccgcctttattgaaaggtcaaacagaggctctgtattggcgaagaggcaatggcacctgaaggaaccc

SEQ ID NO: 8374 - DNA, 447 bp, Homo sapiens
aagatagactctcactctgttacccaggctggagtgcactggtgtgatcatggctcactgcagcctccaactcctggtttcaagcgatcctcctacttcagcctcctgggtagctgagactactggggcatactaccatgtccggctaattattaaatttttttcttttgtagcgggggcagtctcactatattgacccggctgattgattttgaactcctgggctcaatcgatcttcccaccttagactcccaaattgttggaattacaggtgtgagccaccacacccagccacaaaggcctttttctgccttctcagctatctccatctgctggcccaactttggtattaaaaaattctgttggcccggtgtggtggctcaagcctgtaatcccagcactttgggaggctgaggtgggcggatcacctgaggtcagaagtttaag

SEQ ID NO: 8375 - DNA, 477 bp, Homo sapiens
tttggggaagtctggatgggttactataacaacagtaccaaggtggctgtgaaaaccctgaagccaggaactatgtctgtgcaagccttcctggaagaagccaacctcatgaagaccctgcagcatgacaagctcgtgaggctctacgctgtggtcaccagggaggagcccatttacatcatcaccgagtacatggccaagggcagtttgctggatttcctgaagagcgatgaaggtggcaaagtgctgcttccaaagctcattgacttttctgctcagattgcagagggaatggcatacatcgagcggaagaactacattcaccgggacctgcgagcagctaatgttctggtctccgagtcactcatgtgcaaaattgcagattttggccttgctagagtaattgaagataatgagtacacagcaagggaaggtgctaagttccctattaagtggacggctccagaagcaatcaac

SEQ ID NO: 8376 - DNA, 528 bp, Homo sapiens
ggcacgagccaccatgcccagccaagccatgaaatcttaatggctcaactaaacaaacatttatttctcattcacactacatgtccatggtgaggaagaccactctgctccatattgtcactcagagatctagacagatggagtctttactatcttatgatgttgctgtctcaacacacagcttctaaagttcctgtggtgggataaggtgtaaaaaacttaaactttctcttaaatgctttggccctggctagcatcagtcctatgaatcttcctcagtgctagggagttgggatgtgcagtcctccctgatgcccaaacagaacaggcaaaccagatattactgagtgcaagaaatccctactatgtgtactgaggaacaggattcaagctgtattagactcaccttctggttggaagctagaagacagtggaataatgctttcaaaattctgatgcaaaagtatttcctgtagatttgtgtatctagtcaaagcatcaatcacatgtgaaggtagaatgctaaca

SEQ ID NO: 8377 - DNA, 250 bp, Homo sapiens
cccatccgggtggtgcacgtgctgggcatggtgggcacatccctgctggcctctctgtggcaccatgtggccccagtggcaggacagttgcattctgtggccttcttatcactggcctttgtgctggcactggcatgctgtgcctcgaatgtcactttcctgcccttcttgagccacctgccacctcgcttcttacggtcattcttcctgggtcaaggcctgagtgcccctgctgccctgcgtgctggcc

SEQ ID NO: 8378 - DNA, 63 bp, Homo sapiens
ccctttaagggatattttgtctgtgatgattttctttctttttttttttttttttaaaaaaaa

SEQ ID NO: 8379 - DNA, 469 bp, Homo sapiens
ggcacgaggttacctggggggcctttgggacgtcaacagccagatgctgacggtgctcagagccttcccttgtcggagccggctcggggacgcagagactgcagctgccatcgaagaggagatctaccagagcctgttcctgcggggcctgtccctggtgggctggtaccacagccacccacacagcccggcgctgccatctctgcaggacatcgacgcacagatggactaccagctgcggctgcagggctccagcaatggcttccagccctgcctcgccctgctctgctccccttactattctggcaacccaggccccgagtccaagatctcgcctttctgggtgatgcctcctcccgagcaaaggcccagtgactatggcatccccatggatgtggagatggcctacgtccaggacagcttcctgaccaatgacatccttcacgagatgatgctgctggtggagttc

SEQ ID NO: 8380 - DNA, 385 bp, Homo sapiens
ggcacgagaaaggtaccattccaggggttctggggaaaagaattttaaaatgccatcctctaatacagacgtttataaaacttaaatgaaatgattgggcttaaccatatgcaagaaagtctgcagaaaataaatcacctagaaactataaatagaaatgtgctgctgaggctgggcacggtggctcacacctgtaatcccagcacttggggggctaagggaggcgtatcacctgaggtcaggagtttgagacaagcctggtcaacatggtgaaacgccgtctctactaaaaatacaaaaaaaattagccaggtacattggcacatgcctttaatcccagctaatcaggaggctgaggcacgaaaattgctcgaacccaggcggc

SEQ ID NO: 8381 - DNA, 606 bp, Homo sapiens
ggcacgagctttcatggtatgtccataggtgtaaaatgatggccttaatgcttataataataaggtaggtttttgtatgtctaatatacagagaaatttccaaagactttttaatctttgcttagcataaggagtttagtcagtaactattacaaggaaaaaatgatcagttttcatttgtcagttctataagccccaggcaagtttctttcggttttgactttttattaattaaccatatcctaagtgctaaaagccatgagtcatttttaaaatttatctttttttgtatgccatcacttctagttttaccactttgtactcacaaagaagccacaaatggattaatcattatgtcatctaaggaaataaatccatggcataggggtaaatttaaaaaatactttgtactaggattttataatagcttaaatttattgaagggctactgtgtcacaatcaacatgctcagcatttttcatgtgttattttccatttgtaactggcaactacttaggattatttagttaaaatcccttcctttatggaatgagatgtctgtttattacgtttacagccacattacagatctattgacataaactc

SEQ ID NO: 8382 - DNA, 396 bp, Homo sapiens
ggcacgaggtttcaaactcctgggctcaagcagtcctcctgcctcagcctcccaaattgctggggttacaggcttgagccactgtacccagcccatcaataatttttgcctgaaacaatttttattgcgatctttgtgttgagagtcctccatggatctgttgtgtgcttacatgtcttgctgggtgtgccaagaatgcaaggcccaagaatgctctttatttgggccttttctcagggttgtttacacagctggtaatcttcaaaaacaagttaatgtttcctcttggacaaagagcaggcttgcccactgcttggtataaaaacaatagatttcagccgggcgtggtggctcatgtctataatcccagcactttgattttttttttttttaaaa

SEQ ID NO: 8383 - DNA, 472 bp, Homo sapiens
ccaacctatatatgtacttgacatatagtgttatgagtatttgtttacttatttattttaaggcttcctccaattactccagcatatatagcttttcttccaaatctacgaaccctgacatatcattagtaacatttatttgatacttaatccaacgcagggtacttttatacttacaaatttaagaattaagtgaggctgggtgcagtggtacacgcctgtaatcccagcattttgggaggccaagatgggaggatcatgatgtcaggagatcgagaccatcctggctaacacggtgaaaccccgtctctaccaaaaatacaaaaattagctgggcatggtggcacattcttatagccccagctacttgggaggctgaggcaggagaatcatttgaacccgggaagcagaggttgcagtgagccgagatcatgccactgcactccagcctgggctacagaggggaaaaaaa

SEQ ID NO: 8384 - DNA, 487 bp, Homo sapiens
gtgtgaggattcaggggtgaggtggatgcattctggggagaagaatggcatgagaagcaacaggaatgtgtgaaatgtgttcagggactagtggagagatacgcctgactggagaagaatgttctctaaaaaggaacaatgagagattatgttggaaaaggtggggccagttcatgaagggcagagtggggaaaggaaaggaaaccaaccattataaaggccctgcggtatacctgtgctttcccattcagtccttcagaaaagctcagaaggttgtacagcttaaagcttaagagcctggactctggaatcagagtgtctgggttcaaatcccagctctgccagtcattggctgtataataattttgggaaagttatttaaactctctgtgcctcagtctcttccatctgcaaaatgagggtagtaatgctaactacttaacaggattgatgtaaggattaaatgagttaatagctatgaagtact

SEQ ID NO: 8385 - DNA, 612 bp, Homo sapiens
gagctaccaaagaagcacctgacaatgagaaaatgctgatgagatgagaatttaagatataaacatctcctgggagtatttgcattataagaggagattatagaaggcccacctttcagaagatacacaaagaagtctgtggccactctccccagcaaaacagcaatttagtaacaatcataaaaacattttaagtctctgagaattgtcctaaggggataatgacaaatagagaaacagtcatccaagaaaatctaccaaatcttggcaagaaccatgagagtctgtggcatctggtccctgacctgttccatgaccaacccctactagctctgccttacaggagctttactctggggcagtgcagtcaggaaggctgggctctccatccccccaggtcccatcaagaaagtgaaaaagagcctacagaaagagagaaccaccgggcatggtggttcacacctgtaatcccagcactttgggaggcccaggcaggcagatcacctgatgtcaggagattgaaaccagtctggccaacatggtgtaacctcaactctactaaaaatacaaaattagctgggcatggtagcacatgcctgtaatctcagctac

SEQ ID NO: 8386 - DNA, 535 bp, Homo sapiens
accacagcagagttactgaaactgagaacagatttttgccaaagacagagcacagatgcagactggcccctacatctgtgggagaatgcagcagacaccacggcactatcaggcacagaaacgcattgcatccctacacgagcaggaaactgtcatgagctattataaaactaccaaaccataaaccattagaaccacaaatcagccaaggctggatgtggtggctcacgcctgtaatttcagtactttgggaggctgaggcaggtggatcacctgaggtcatgagtttgaaaccagcctggccaacatgatgaaactccgtctctactaaaaatacaaaattagctggatgtggtggcacacgcctgtagtcccagctactcgggaggctgagacaggagaatcgcttgaacccagggggtggaggttgcagtgagccgagatcgcaccattgcactccagcctgggcaagaaagagtgagactccaggccaggtgtggtggctcacgcctgtaatcccaccagcattttggga

SEQ ID NO: 8387 - DNA, 651 bp, Homo sapiens
gtcatcttttaggtcttgggaagaagcacttttccaaatcattctttaagcaaaggtattgaccacattttactctgggagggtattcctgctcatttgagaagcccacaaaatgcctcggcttcaacaacatatccacggttctttgtgttcctctcatctcatccttgcatgacactcggcaagcagggtgacagtaactaacccctatcattcaagttcaagattacagtcttgctgcctccccacatacctaccagacattgccttaatctttgggcaaagattttgatttgacaaaaagcaaataatctcaagagtattgtattttatcatttttcttaactttgaaagggatcttgtagataacaggagtaagaatttggagagggggccgggcaaggtggctcatgcctgtaatcccagcactttgggaggccaaggtgggcagatcacgaggtcaagagatcaagaccatcctggccaacgtgataaaaccctgtctctactaaaaatacaaaaattagctgggtgtggtggcgcacgcctgtagttccagctactcaggaggctgaggcaggagaatcacttgaacctgggaggtggaggttgcagtgagccgagatcatgccactgcattccagcctggag

SEQ ID NO: 8388 - DNA, 599 bp, Homo sapiens
gagagcagggatgaggccccacattgtcaagcccaagaacactggtattcagtcctaactcccatcaccactggtgctctccagactggcagacttagctagagatagtggctgctaaaagaggaaattactaagacagtggcattcaggggtccctgcaacttccgggcttggctcctgttgtattactctccaatgaagcctacctagacaatgaaggcatcagcacaaaatataaaaagaaacagtataatatcctaagggagatattatattactacaaccataaaataagaacagcatgttattaaaaataataaacaatgagctcagaaaagactcactgtaaattaagaatgatacacaggccaggcgtgatatggctgacatcagtaatcccagcactttgggaggctgaggtgggcggatcacttgaggttaggagttcaagaccagcctgggtaacatggtgaatccccatctctactaaaaatataaaaaaattagccaggcatgatgacgcatgcctgtaatcccagctactctggaggctgaagcaggagaatcacttgaacccaggaggtggaggctgcagtgag

SEQ ID NO: 8389 - DNA, 611 bp, Homo sapiens
atgttttatctcttacccattcatagagggtaaaagagagcaggccctaaacagagcctccttttaaactgatttttaaaaaactacctctgtggccgggcgcggtggctcacgcctgtaatcccagcactttgggaggccaaggtgggtggatcacctgaggtcaggagtttgagaccagcctggccaacatagcgaaaccccatttctactaaaaatacaaaaattagctgggtgtgatggtgtgcacttgtagtcccagctacttgggaggctgaggcaggagcttgaacctgggaggtggaggttgcagtgagccaagatcgtgccactgcactctagcctgagtgacagagtgagactccgcctcaaaacaacaataacgacaaaaaactacctctgtttctaacttctaattggctatagattataatgtctaatactgcattatcaacattttaaataccattttacactattagtatgaaaaacatagtaatcattaaaattgcatctgctagaatatttaatctgtcagaaaactgggtttaggaaacaatttaggcatgtaggctatcaaatatggcaaaaatgaaaagactatggagcat

SEQ ID NO: 8390 - DNA, 424 bp, Homo sapiens
tggctctgggagaggtgatggcttgtgacgggaaattgaattcaatttgcttcaccaaacttgtcctggagaggggggtgaagcagttcaaaagaaatacaatgaaactactggtgagcacattattgtcagaatttacagtagatacatgtgtcactcctgaaggtatccacagagacactgaacaataagagagacggggccatggcaggacagagcagcatgctccggacccatagggcgagatggaaagatgctctgggctctacatcactacatgatgctgcgtactctgggtcctagtcctcccatcagcaaattaagaatatgcaatcctccattcatcttatgaagatatcatgagcagatatttgatgcttattagcattttgagtttttaaagttcttaaaggaaatccatgtc

SEQ ID NO: 8391 - DNA, 597 bp, Homo sapiens
accaatatggtcaccaccacatttcctgatcactctgtgacagtggtcaaaatgttgagattagtgaaaaataattggaaacaatctgaaaggtgaaagtcttctttttcttttgagatagagtctcactctgtcacccaggctggaatgcagtgaaatgatcacagctcactgcagcctcaacctcctgggctcaagaggtcctcccgcctcagcctcccaagtagctgggaccacaggcacacattaccactcctagctaatttttaaattattttgtagagagggagtctcactatgttgctcaaacttgtctaaaactcctgggctcaagagatcctcccacctcaacctcacaaaatgttgggattacaggcatgagccactgtgcctggcccaaggtgaaagtcttttcatagaagaaaagataaacttgttgtatattcccatagttttaaaaatactcaggtatcaataagtatcaaatataatgttgattacacaaagccaagttacaaaaatatatgtgctagtatttttgtaaaacactgaaacacaaacaaagctaagtattctttatgaatttatatacacata

SEQ ID NO: 8392 - DNA, 589 bp, Homo sapiens
gcaattactcagtagttttattaacaacttgtaaatattcttttgattcttggaaacacctttatatgggagacaaaataaatatattgtttccagtaacaaaagtacatccccatggaatgacatattttacagagttcatcctatacctttttgttggtttgttttttgttaacagttgtttaatacatttagtgagccaggtattgtgtgagtcactgagaaacacaaaaaagaaatgagaatggatggcaagcctcagagctcagtgaagtggttttaaaattctatgaaaataactctgtgaggccaggtgtggtgacccatgcctgtaatcccagcatttttgggaggctgaggtgggtggatcacctgaggtcaggaattcgagaccagtcccaccaacatggtgaaaccccgtctctactaaaaataaaaaattagccgggtgtgatggtggacacctgtaatcccagctactcaggaggctgaggcaggagaatcacttgaaaatgggaggcggaggttgcagtgagctgagatcacaccattatactccagcctgggcaatggagcaagactccatctc

SEQ ID NO: 8393 - DNA, 583 bp, Homo sapiens
aaatatagaaagactatcaaatatcttgacaaaaatagagaggatgtttttcttatataaagctcatgaccaagtcttcagcaccaaatttgtatgtaaattctttgaattttttggaagaaaaatattgactagccttttatttgatttgatctttcagaacattacccactgagtaaatccatattccactctaagttttaataaaatctgtgacggagatgggtatttctgtcaatactcatttctggggatatgtgtgtgtgtgtgtgtgtgtgtgtgtgtgtgtgtgttgtatgtttcatgcctttatacaggttgagtatctcttgtgtgaaatgcttaagaccaaaagtgtttcagatttcagatttttaaaatatttttgaatatttgcactattcttactgtgtgaagatccctcatctaaaaatagaaaactcaaggtgccatggctcatgcctgtaatcccaatattttgagaggctgaggcaggtggatcacttgaggtcaggagttcaataccagcctggccaacatgatgaaaacttgtttctactaaaaatacaaacattatctggac

SEQ ID NO: 8394 - DNA, 482 bp, Homo sapiens
cagatttgaggtagactttctgactgatttcttttttagagagcggagcatgcatcttttcaaattcatattattgttgaattaattactaatagaatttatcctcagtgtgtttttccaaacaaatagatcacttgtaattggcattgctttgcaaatccaaaatcagacatccacgttcttaaaagcagtttatcctttttataagattctgtgttttcccctcaagatgactcagattttagattaaatgatagaatgcattctagatacatttctaagtaatcaagcccagacctggaaagtgtttacagggcttgctcttctaaatccttgtgaataatcagagaaactatttgaaaaatggtgttgtgtcagaaacaagttgggatccattcatttctgaaaaatcaaagaatttgcaaaatgagaacactggggccaggcgcggtggctcacgcctgtaatcccagcactttggg

SEQ ID NO: 8395 - DNA, 321 bp, Homo sapiens
ttttgtttagaaaggactcttacaacaattataaaaaaaacagaccatgcgcggtggctcacgcctgtaatcccatcactttgggaggccaaggagagtggatcatgatatcaggagttcttttttttcctggccaacatggtgaaaccccgtctctagtaaaaatacaaaaaaactacccatgcatggtgatgtgtgcctgtaatcccagctactcaggacgctgaggcaggataatcacttgaacctgggaggtggaggttgcaatgaaccatatcacgccatgcactccagcctgggcaacagagaaagactccgtct

SEQ ID NO: 8396 - DNA, 605 bp, Homo sapiens
tgtcattacccgagctagggcaaagcaacttcagactttacaaggccatggaggtgaggctaagacagccggtgcctggaatcagtactctctgccacctcatcttctgcaatctaataaacccaatctttctcttttttttgagacagggtctcgctctgtcacccaggctggagtgcagtggcatgatctcagctcagtgaaacatccacctctcgtgctccagcgattctcccacctcagcctcctgagtagctgggaccacaggtgtgtgccaccacacccggaataatttttgttttttttgtagagactggatctcaccatgtcgcccaggctggtctccgactcctgagctcaagtgatcctcctgccatggcctcccaaagtgctgggatcacaggcatgagccaccgtgcctggccaaaacccagcatttctaaggacttcattaacaaagaaataagaacaataccaactctagtaagcgacttctgtatttttatccacaaactaaataatgctaacagtaatttttaaacccatttttttccctgtgaacatacatagcttatgcttttccaataactaacatctctgaaaaa

SEQ ID NO: 8397 - DNA, 641 bp, Homo sapiens
tcctatccctggcttatgtaagagccaactagaccacagagcatataaaatcaagtgctgcttcacaaatgaaataaagtgttccttgattcattactaatgcgactatccacatacatggaaaaccacaactcagatattccccttttatttttctctagaaacatgaataaattgcttttggcacacttaattggtgtttgggacatacttttcacaattgaagtccttagtaaattactcaggagagagactctcctctttcagtacgttatttaatacttaggcttgttagtgtgtgtcatttacacataaatattttgttgtgtgaatgatgatgcctagatcctctcatctgaggcctggctaatagctagtatgcttcttgttaagactggttcagtcaaaaataagtgttaattatttttacgtgtgacaatggtattatgattatgtttttgaaaaaaaaatttcacaaagtgatctacagattgaatgcaatccctatcaaaataccaatgacattcttcacagaaatagaaaaacaatctcaaaacttgtatgaaaccacaaaaggttccaaataaccaaagcaattttgagtaaaaagaataaagctggaggtatcatactacctcact

SEQ ID NO: 8398 - DNA, 320 bp, Homo sapiens
gtacggctgcgagaagacgacagaagggggttaaacactgcagtgctgcattggcaaaacaggtattgcccaaattctggagcccagctccaaccctatgagtttgttgccacttaagacaaatcttctcagatgggaaaagaactttctgtggaggagcgatgccatcacctagggctagaaaaataaacaagaaagagtcagaaaccaagctttgcatactgaagctaaataaatagtaacacctggtcaaacctcaatctttacaagatccgaaatctcatgaccagcctacctgaaatacagggggaagagggaca

SEQ ID NO: 8399 - DNA, 356 bp, Homo sapiens
caccaggcctgcagcttgttctctgaggtgtcacccccttattcttttttttttgaaacaaagtctcactctgttgcccaggctggattgcatgggtgtgatctctgctcactgcaacctccgcttcccgggttcaagcaattctcctgcctcattctcccgattagctgggactacaggcttgccccaccacacccggttaattttgtatttttagtaaaaacagggttttaccatattacccaggctggtcttgaactcctgactttgtgatccgcctgcctcagcctcccaaagtgctgggattacaggcgtgagccaccacccccagcccatacaccccctcattcttgact

SEQ ID NO: 8400 - DNA, 435 bp, Homo sapiens
gaaactgggtgctgatgttttgagaagggaacccttgagtggtctcaggttttatttaaatttttaactgacaagtattgagctgctttcctggtatttggcacagacagttcatgtctctgagctttgtttttccgtgactctgtccctctcagagacatttgacaagcgttatcagcattttccgctttttatctaatggctttttgggtctgtctgcatgatgataacattcaaaagaatctacacatggtcaggtgtgatagttcatgcctgtaatcccagcactttggaaggccgaggcaggtggatcacttgaggtcaggagtttgagaccagcctggccaacatggcaaaacctcatctctactaaaaagacaaaaattagctaggtcagacgtggtggctcatgtctgtaatcccagcactttggga

SEQ ID NO: 8401 - DNA, 452 bp, Homo sapiens
tctagtggaaaaatgagataacgacaagaatggatgaatagttaataaaagcggagggatggaagctcaaagaaaggctcaaaggaagtgatagaagcaaaaaaaaaaacccactgtacataaatgaaaaatgtctttggtttccagcttcatcattctcagcaaactatcacaaggacaaaaaaaccaaacaccgcatgttctcactcataggggggaattaaacaatgaaaacacatggacacaggaaggggaacatcatacaccggggcctgttgtggggtggaaggaggggggagggatagcattaggaaatatacctattgttaaatgaaaagttaatgggtgcagcacaccaacatggcacatgtatacatatgtaaccgacctgcacgttgtgcacatgtaccctaaaacttaaagtataataaaaaaagtctttgatgggctca

SEQ ID NO: 8402 - DNA, 527 bp, Homo sapiens
tttcttctatcaaggaattgccttagcctaaaggcaaagcaattagctgtatgccaaagcccgggcaatccaggccacatctcccatatctagcctcatgtcccactttctttctgacttctaattctctttccatttcatcaggactgggatccctgttctaaagaaggtaagatataagttaaggcaaacacatctacggagatctggccatatatggtacaaagtggctaattgggacttgtgtctccaattccaacatacctctaaatctctagaaagagagagaaaagaggccgagcgtggtggctcacacctgtaatcccagcactttgggaggccaaggcgggcagatcacgaggtcaggagatcgaggccatcctggctaacacggtgaaaccccgtctctactaaaaatacaaaaaattagccaggcgaggtggcggccacctgtagtcccagctactcaggaggctgaggcaggagaatggcgtgaacctgggaggtggagcttgcagtgagccgag

SEQ ID NO: 8403 - DNA, 549 bp, Homo sapiens
tgacaggaattgataagggcacattatgtaaaatctggagggcaagcctttcccttttaggtcaacactcacccgcaagctaaaaaggctaatcaacagaagcattttctgtgttcattccagagaatttcccaggggcacaataaatctagcctgcctgtttacaggaacattgttatttaacaagctagtttccaagcttaagagttttcggtttcatcaaatctaacccagcttgctaaatgcctgacattcattattgtctgctccggttcctctgtgtattataagataattttgcatacttaatataaagatagtttttacccacaggactaaccttaaatttattagaaaactattctaaactcttggatccctttctcttttttttcttaaccatttacctatgattccatcctgtctttaacctgcccactagtacttctagctagctagtttatctgatttacacattcagtaatttatttgttcatccatctaatgttattttgagcctctgctctgggctatataaatgtgatatta

SEQ ID NO: 8404 - DNA, 571 bp, Homo sapiens
gtatccatgtaataggatgttttctgtcaccttgaatggtttttgccctaatactttttcttaaattaatagagtccaacctttaattttacttattttctttttacatattttcccattcttatgccttaaaacatctttgccaatttgttttagatatgttttagggagtagcaaataatttgtattttttattattaatcatttcaatgcatcctaattttctttccattttaatagaagtaaaatactgatataagttgttatcattgatatgattcatattatttatttgttttttcatcattttattttgcttacctgctgtgttttacatttcttgtaatatgattgttttgtttgagttttttggggggttattggtttcctatttgttttccgtataaataagtgatttatacactagctacatagaaataggacattctcttttagtttcataagctttgtttattattatttatcctagttactttcccatacatttactgttgacttttccatgccctgagatacattgtaaagaattatagtgtatatatttaaccta

SEQ ID NO: 8405 - DNA, 550 bp, Homo sapiens
  misc_feature 491: n = A,T,C or G
gaatcttttcggattctcttccatgctgtggcaggtgagcctcatccaatttgtgaaagcctgaatagaacaaaagtctgaccctccgctgagtaagagagaattcttcctgcctgaatgccttcacactgagatatgggtttttgtcctgttttcagagtagaaccaaaacattggctcttcctggaccttcaacctaccagcttttgaactgaacctacaccattggctctcctggttctcatgccttcaaattcagactggtgagtagcccccatcttaaggtcatctcggggcccctccctgaatcacttcactagcacaaactcagatgtgctcaaaaagggctcattataaataggcaaagatactcctatcattaggagattctaagggtttttggagccctgtctcaggaaccagggcaaagactcaatatatgtcttatataccacagggaatattaacaaaactaaaatctagttcttaanaaaacgttaagtcggccggcaacagtggctcattgcctgtaatcccagaactttgggag

SEQ ID NO: 8406 - DNA, 635 bp, Homo sapiens
cacagttccgtgtggctggggaggcctcataatcatggcaggaggcaaggaggagcaagtcacatcttacatggatgacagcaggcaaagaaagagcttgtgcggggaaactccccttataaaatcatcagatttcgtgagacttattcactatcatgagaacaacatgggaaagacctgcccccatgattcaattacctcccaccaggtccttcctgcaacaagtgggaatttaagatgagatccgggtggggacacagccaaactgcatcaccatttcacccacgttttatgtgttggtgctagtgggagtactaaaaaactgttcccagatcaataaactgggaaacaaaagtgagaagtggtagaaagctgtgaagaaggcccagaacagcccaccctgatatgccaggctgttcttttggaagaaagcagtttgtacacaagagaggtgatgctgagaaagtgaaaaacctgaaggttttaagagccgaaaaagtgctaatgtgaaaacacgccacatggttttatgtaggggcccctttactttaatgctttttccaacaggaaaatttgacttaagttatttgagtgcagaattacacaagaacttcaagaaaagttataaaatgtaa

SEQ ID NO: 8407 - DNA, 653 bp, Homo sapiens
cactaaagctcccagctctacctcatcccaatttcctcaaaatgctccaagtaaagctatgcctttggaaaacaccccatgaattcactgattcagttttatgcagctatccaaacactgagcttaattttgtttactttaagaagagggaaaatagcctccaaaggtagtaaatcaagtagaattatttcagttatcaagtccttctctgtgaaactcaaagtcagcagttgaaatgatcaacctcttaaaaataattaaaagcagacatctggaaaatactagtaactgcagcactcacagcgccagaaacatattccaggaataaccaaggcttcattttttcaaaaaaattatatttttattttattttaaacagaagcttatcacccatgaacataaaacacgaatgtctaataaaatttacttttaaaaaatttcagcaagttaatgtcaacacatgttattaatttttgctaggaagccattcttaatggggagtctagaagcatggccaaccagagtttaatgagctggtggctgttcaatagcacatgcatcacaatgagaccagatggaccattaaatttcatcctccacattcttttttggaatgtgaaaatattgtcccctatatctctggcacacctcta

SEQ ID NO: 8408 - DNA, 363 bp, Homo sapiens
  misc_feature 265, 266: n = A,T,C or G
gtttctaaaattaaaagatgtaagtggtattttaatataaagagctatttcaaatatttaactttgtagatggaaaaggaagtgtattaatttaaagattcactgctgtttaaaatattccccttattttctttcaataaaaactaaaaagtagaggggaaagaaaggcactaagagagcaacgtagacagtgaaaatgagtcactagggaataaagaggtaaggatgccttatcttctttggctcatgaattacccttacctannatggtaaaggagatttgattatatgaatattgaattattacatatgccctgaaattatgtacatctaatatgtatcaataaaaataaataaatggga

SEQ ID NO: 8409 - DNA, 563 bp, Homo sapiens
ccatctgtgtgacctcgttccggccatgaaacccctctgagcctcagatttctcatttgttgtgtggaaatggtgataatgtctgttctacctgccccataaggttgctgtgaagatgatgtaatataatgtatgtgaaagatttaatttaataatactaaatagagcattataatattttctgatattaatccattaagataactatttactagctgtctatttggctaactgataataatccttttgagctagtataggcaataatatgcatggtacctaatctcctgttcttctcttgtcaagcctgatccaaatttttgatgtatcttggcagaactgagccagtcttccaaagaactaaaataataataatgaaaagaacatatttagcaataatatttttgagataacatttttcttctttggctgtacttgctaaaacaacttacccaattttctggaactgtccttctaagtagttccaaacatatcttattttctgcactttgatgcatctcacctgcaaaagaaaagtactaagaaaacctctagtttgagga

SEQ ID NO: 8410 - DNA, 515 bp, Homo sapiens
ttccgaaaaatatagtttcactttctatattatccaaaactattccaattagtaacttgtactttaaaaaagacaactgttttataaaatacactaaagagatttaagagaatttaaaggtcaaagttacataattacattctgctcttcattcagtgctctgaatcataaaggcatattctcatctctttttttactcaccattctcaatctttaaaaaaaaagaacatttggctgggcatggtggctcatgcctgtaatcccagcattttgggaggccaaagagggtggattaccagaggtcaggagttcaagaccagcctggccaacatggtgaaacccagtctctactaaaaatacaaaaattagccaggcgtggtggtgggtgcctgtaatcccagctacttgggagggtgaggcaggagaattgcttgaacctggaaggtggaggttgcagtaagccaagatcgtgccactgcactccagcctgggtgacaagagtgagattccatctc

SEQ ID NO: 8411 - DNA, 547 bp, Homo sapiens
taacatcttcagatgcccagaaaaaggagcagagaatttacattgtagtgaagtgaggatagtggttttttctaacagtttattatataaattttcaaatatgcaaaaaagcagaataattttacagtgtacaaccatatgcccatcaccttgtttctacaatcaacggtgtacttgctttaccacgtatctttcaagatgatatttgaaattaatgttttattatgggcattgccaatgtatgtgaaaatagagggaataatataatgagccctcatatattcatcatctagtttcaacagttattaattatggctaatattatttcctataaccatctgtctcttgtcacattcttcactagattatttaaaagcaaatggaattttgttgagtggatttgttagaagcaaaggaatacagcataatcacaggccctggagcaagagttgtttcgtgatcaaacatggaaacccaagttggcagagaaggacatggggccaggaggggactgataagctagaataaaatggaaggatcaaggggc

SEQ ID NO: 8412 - DNA, 533 bp, Homo sapiens
ctcccctcattttaaaaatggagaggtaatcgtgcctctcatgagcgaatagttttagtatgcttagaacactgtcctgtacatagtaagcattcaacatatgttggctaatactactgaagccaattgtaacagtagtattagaagccgtaataatattaccccagtcaaatatgtccataattggcaatagggaaagaattgctgccactcagcagtatttggagtattgaatgtcattgtttactttttctggaaggagcgtgacctaagacactgatctaaactgaatgtgcatggctaatggtgtggatagacagagattttaagtgggcaaaagtgaaggttgttttgacaagaagtttcaggaaacagtgatgtggatgaatttcccagaacggtcccagaatatgagaataatgtcccacgtgaatgctaatcgaaattcccactcttcagaggaggctatcagcaatcaggtacacatcaaccatatggctgtcatgtagtctcttcgtatcaccccacttact

SEQ ID NO: 8413 - DNA, 610 bp, Homo sapiens
ctatattttcatcttttaattagtatttatttattattattattgtgacaagatctctctgttgcctaggctggagggcagtgccacaatctcagcttactgcaacctctacctcccactgatccctccacctcagtctccagaagagctgggactacaagcccacgccacttggcctggctaattgtgttttcagtagagatgggttttcaccatgttactcaggctgatggcaacgatcctgggctcacgcaatctccttgcttcggcttccccaaatttaccatgcagcaaagcggttgctctgttttcattaagattaatacaaactagaattaaatgcaaaatctcctattttgttatacaacttctttaaggaaatcacaggttccgtggtacagaaattgtttttaccatttaagctagagtactatggtgctgaaagaaagacatacgtctcaggcttatgtaatttcagcagaaattttctttaaacaaaatatttattttatcttctcatttctacacataaacagaatattcatgttgtagcttgcataactatgtattgttggaagtaaagcacaaaaacatttagggctcatggctt

SEQ ID NO: 8414 - DNA, 597 bp, Homo sapiens
gttacttttcaattcctaggaaattgaattctcttctacttattttcagatcccaactcaagtaacactttctcacagaagctatcccttactctccagaatagatcaggcacctgctctacacttccacagctccctgcatttttcctccactgcacataataatttgtagttatgtttagtagtgtgattatttgtttaatgtttgtctctgtcactacactgttagttccatgagggcaggaatcatttgtccaccatagtatccaatctggcacagtacagcaacaaaagaagtatttgctgaatgaataaaatgagtgtgtgtggctggttgggggtgggtgaatattaatgtgaacataactcctcaaagaaagtaaagaattgaaaaaggagaaggaaaagagaaaacattttattatgaatatttcaaaattgcaggaaacacactgcaaatccccggggagccacttcctatttcaatcaaacccttattcaacattcttggttcctttttgttttaattgagatataatacttagatctcaagtattccattgacgggcgcggtggctcacgcctgtaatcccagca

SEQ ID NO: 8415 - DNA, 555 bp, Homo sapiens
gttcggaggactcattgcgctgagcccataaagaatcctgagaagttctatccagagaaaccagttcattttgtccagtgtttcccaaacttatttcctcatggagccctcctccctttttccatggaatatctattaacctcctgcagggtgagattccaaggtgtgacttgggcaaacactatccgtaacttccatagattcactctcagtccccttcagggggggtttcagagcaattaaatgcctactgtgtgtgaggcccacagcaagtggctaggaatacatcaataaatcagacacaccccagcttgggaggaacctgcaggctgagcgacagccacaccttactgcttgagtctgacctgggcccaccaaggctgtataaccttgaccaagtcactcttctcctctagtcttcaattcctccaactgtaaaatgagagaatgcaatgccacaatccctaaagacctggccagccggagcaccaaatcccttaggctgccatgattggttccagagtgggtgcatgaaccaagctgagccaatgagcg

SEQ ID NO: 8416 - DNA, 573 bp, Homo sapiens
gagaaagaaaggaggagaataagcatctgacagccactgagccggggctgccaccaaaggggccttgaagagaggtagagggcatggacgctctgaatgcagatagaaaaaagaaacagacaagaaagagaaggtggtagaaaaggtgagaaaagcaaagtaagagaggtgattaagagggtccaacatcactaagttgagaaaaatgcaagtttccaggaagaggggcagccgacagtgtcagaatatgtgagggactgggaagctgtgaaatcatcatatttcagaacgtgaggtcagtaattctgagggtaaaaataaaagctgcaatggaatgcaagatgaggcacacaggcaagtgtagagggataaaaaaggactttgctaagaagaaacaaatgcagggcctcctggagatagtgagctacaaaagatgcaagaaaaagaaggtgtttgctaaaagaagacagtagggtaaagaggtttcttcccacaataaaaaaaactagcatccacagaaatggaaaagtggctgggcgcagtggctcacacctgtaatcccagcactttcgg

SEQ ID NO: 8417 - DNA, 604 bp, Homo sapiens
aagtatttaagatatgtaggctgggcgcagtgtcttatgcctataatcccagcactttgggaggccgaggtgggtagatcacttgaggtcaggagttcgagaccagcctggccaacatggtgaaaccttgtctctactaaaaatacaaaaattagctgggtgtagtggtgcatgattgtaatcccagctactgggtagcctgaggcaggagaatcgcttgaacctgggaggtggaggttgccgtgagccaagatctcgccactgcactccagcctgggtgacagagggagactctgtctcaaaaaaagaaaaacaaacacaaaaaaaggatttaagatacgtaaatcagagtagccctgagctaacatcgctttaaacaggttttatataaattcttccttgtaactaatacttgaaactttggaaaaagacttcttatctataaatttgaggaaagaatgaagtcatccttatttggttaaatgtagtttaatttggttaaatgtagtatattcttcattggaagaatggattttgtctcctttattcttactgatttaagccatttaggtctgaagtcatcactacatgatgaaatacttaa

SEQ ID NO: 8418 - DNA, 582 bp, Homo sapiens
gtatgagccactgcacctggtcccaatttaaagctttttaacaagagtttttcagaggggaagggatagcaaagagtctacctaacctgtctaagaatcaaaagctttattgcctgaagcaatttatagaaaaagtgtttccaagtctgggaagaaaaaaaataatgaaccttcagtcattctttcagccactgttgtagtagcaaattgtgtccaataaaacaaaatccctgccttcaaaaagagggtcacctaataaattatatgaaatattcagagttcagcaaggcctcaaaaaagtatgaaaccaattgtacaaaagaggtggaaagttaacaaaaaaaagacataacaactgactctcagaagacaatcagaagtgtaccaggtaaaggcaggagatggtgaagggattaatattccaggtaagtaaagaatgtacaaacgcaaagaaatatcaagcagcatagtctgaatagcaaatcaaaaaataacaacaggttcaacttctgatagtgatagagtaacttatatctggctaacatttctgcatataacaacaataaatcttacataaaatac

SEQ ID NO: 8419 - DNA, 211 bp, Homo sapiens
cacaggtcttttgactttcagtctagggctcgactcgcttgctccacaagctactcaataaacattattgagcacatactttggtctggatatggtgccaggtgctagggccaagatgaataagtcctcttgtattgttcatagattgcacacagtctaaagcctatttgttgttgttttttttttggagatggagtctggatcagtcacc

SEQ ID NO: 8420 - DNA, 369 bp, Homo sapiens
gattcaagtgatctcctgcctcagcctcccgagtagctgggactacaagcgtgtgccgccatgcccagctgattttttgtattttagtagagatggggtttcactgtgttagccaagatggtctcgatttcctgacctcgtgatccacccgacttggcttcccaaagtgctgggattaccaggtgtgagccactgcgcccagcctcttacaaaatctatgttgcccaagctagtctcaaactcttggactcaagcaatcctcccgcctcagcttcccaagtagctaggattataggaaagtgtcaccacacctggctgttaaaaaaactattaaaaactttaaaaaaggggctgggcacggtggctcat

SEQ ID NO: 8421 - DNA, 456 bp, Homo sapiens
cgaagtgctgtgattacaggcgtgagccacagagcctggcctaatactactcaatttttatcaaacactctggcgctagtagacaatctcctttagggaaagaactgctttcaggaaaatattttaataagttacctgtaataaaagtgagaggcctttaaggaaggaaaaaaagaagatttatgctgcctctttatgggaaaacaagagggatttgtcacttattttttcctactgatggggagtggggctaaggaggaaagagagacaagagccagtgagctggtctgagttggggactgcgggaagtcatggtgggtgagtgataatattttaagcacagggacactcagagtttaatctgaagttccattgctgtgatgtaatccactctcttccttcccacatgtcatcagtgattatgacaatataaacatcagcagaaatcttggggac

SEQ ID NO: 8422 - DNA, 66 bp, Homo sapiens
tgcctcttgtccttgtaacatggcacaggttacttcaactctgtaatgcctcagtttcctcatctg

SEQ ID NO: 8423 - DNA, 623 bp, Homo sapiens
agttgttcgaatctaaatgtaccatttaagtcatgggtgatccctagaaacccattttcactgggtgcttctcaagactatttgggaaaagaacaggacagtgactcaaaaccagagactgtattcccaagcgccccatgcctcctgtcaaacagaaatgaaaccaaactagccacagccaactgggggggctcttccctgcctcagtttccttgcctgttgaaggcacacacaaacatgtatgtggtgtggaacaaaatgaaataggaagctgtggtgaaaattaaaagagctatgcagatgtaaaatgcagccactgtgagtattcgaggtaaggaattatacctacaaaagacgctcacggccgggcacagtggatctcacctgtaatcccagcactttgggaggccgaggcaggtggatcaccagaggtcaagagttcaagaccagcctgaccaatatagtgaaaccccgtctctactaaaactacaaaaattagctgggcgtggtggtacgtgcctgtaataccagctactcgggaggctaagacaggagaatcacttgaacccaggaggtggaggttgcagtgagcagagatcatgccactatactccagcctgggt

SEQ ID NO: 8424 - DNA, 609 bp, Homo sapiens
cggttgcgacatagacgacagacagggatgctcggggctgccttggcctaggcggtgagtcctgaggagaggttctggaatgcatctggggcggcctttgtgacagtccaggagcaggggcaggtggcaggggcgttggtggcagagatcatcctgacgacgctgctggccctggctgtatgcatgggtgccatcaatgagaagacaaagggccctctggccccgttctccatcggctttgccgtcaccgtggatatcctggctgggggccctgtgtctggaggctgcatgaatcccgcccgtgcttttggacctgcggtggtggccaaccactggaacttccactggatctactggctgggcccactcctggctggcctgcttgttggactgctcattaggtgcttcattggagatgggaagacccgcctcatcctgaagcctcggtgaagcagagctcgtgggattcctgctgctccaggtgtcctcagctcacctgtcccagactcaggacaggggagttcctgcatttcctgccagggcagaggcccagaggagcgaccccctgcttccactgcttgggcctgctttctcagatagactgactgc

SEQ ID NO: 8425 - DNA, 561 bp, Homo sapiens
ggatactaagtcttccctgtatggtggttttgaatatctaatgagatcaaatacgatatgataagggcctgtcaaaagccatgcccttacaatttataatgggatctttaaattgacaatttcttctcctcctgcttattagcatacgaaagagaagttatttattttgagtcagtacaatgtatcagacagacattataggtttaagaatcagacaaactggaagatgctttcaagcaagtttattatttcattcatctattcattaaaaaatattgaaaaccatctctgcctcttactagctgagtgagcttaggtaaattactaatgttcttcagctttagtttactcatctataaaattaaaataatagtacctaaatagtaaggtggttgtgaaaatggaataaaacacacagcctgcagcacattatcggtggtaggtatattatgctagatgattattttaataaatgaattagtgagtagccacttagcatgggttttttaaagcttggttttcttgcaatatggattagaataatgatattaaaatattcac

SEQ ID NO: 8426 - DNA, 612 bp, Homo sapiens
aagaaagagcattaaactagaaacgaaaaggctgaacaccattcctggtttaggtggacacacaagtggcctcaggcaaatcactggacttcttcgggccttagcttaccttgctgactgcatcttggctaaaactaaatgggaattattctaacaacccttcaagttgatgctattattaacccaattttacaaagtactttctccaaagtcacaaacaagaagtggagccaggtatgcagatctgacctctgggctcggttctcaatccttcgagttaccatctccaagtcccctgtggttctggttgtgaccatctctgcattcattcaaataggaaggggctgggactgccagcatctgcgggcatctaattagtacccaagtgtcacaggagaccctgctaaatggtatgagagagctgcatcctcctcagttgcctagagtaacagtacaaaatcctaaagccttttccatagctatccccaaattacgtctgggtcctgttctgataaggtgtttgggaataaagcagcagcacagtgacctttaacatagacccatttcgggccaggtgcggtggctcacgcctgtaatcccagcactttggga

SEQ ID NO: 8427 - DNA, 522 bp, Homo sapiens
ctaagacgactgaagggcgcaagattgaaacacctgaactgggctttaacaccccaatgtctacactctaccaacaactatttcttgccctcactgacaacccgccgctgtcatgcttgtaagcacaacgctccgttccaaactggagaagcggcgagagagcgggcaaagactggaaacagaaatgcaatcataccattgtagactgaatgctgctcgatgtgatcatgatcaaagtcactcatcaaaaagagaccaagagcttgctttccagggcacagtagataaatgtcgtcacttacaggaaaatttgaattctcatgttctgattctttctctgcaactttctaaagctgagagtaagtccagagtcctcaaaactgagctccattacacaggagagactctgaaagaaaaggctttggtttttgaacacgtgcaaagtgagctaaagcaaaaacagagtcaaatgaaggacattgaaaaaatgtacaaaagtggatacaatacaatggaaaaatg

SEQ ID NO: 8428 - DNA, 510 bp, Homo sapiens
cagaagggcactctgaaatgcagattctgaaatgagttggtgcagtaagggatgagcaaaccatgttcttatactgcccccttccggcaaacggctggaagagacagcctgcatattttgtgttgaagaaactagttcaatttcatttaaaataaaacttcttttgtaatctctttgccccagccctgctgataggcagctgtaggtaatttctcttgttgcttgaaaatgttgcacaatatgaaaaaaacaataatgttaaagacaagacatctttggtgctctagaagggcaagaagtagggaaaaattactcagctgtatttgtatcaagcaggcacatggaagctgggaaaaaaacagaactccctccttggtttttgagaattgatggtgtgaaatttcctcagatgccaaaatcagctaaagcacaggaagattataaatataaggtaaacagaaggaataccgatcctagctttctttcttagtaagacagaaataaagaaag

SEQ ID NO: 8429 - DNA, 89 bp, Homo sapiens
tcagatctttagtctcccggacaagaatgaattctatggggatcggcacatataaagtcaatagcatgagcctgtgcttaagcttatgc

SEQ ID NO: 8430 - DNA, 440 bp, Homo sapiens
atgcctggctaattttttatttttagtagagatggggtttcaccatgttggccaggctggtctcgaactcctgacctcaagtgatctgcccaccccagcctcccaaactgctgagatcacaggtgtgagccatcgtgcctggcctgtttaatgaatttctgactggaggcttaatttttttgtttttttcacagggtctctttgagaggatgacagtgggaagcgcctactgtggctgttgcggctgcaggcctggctccttccactctcgggctgcccttcacggtgccaggtttgtggcagagcctgagccgccatcatggtgaaattctgctattgccgccatggacagagaaattaaaccgtggggttctgcttactaggaaactggagtaacacctcatctcaaaaaaaaaaaaaaaaaaaaaacggggggcagg

SEQ ID NO: 8431 - DNA, 512 bp, Homo sapiens
cccaggttcaagtgattctcctgcctcagccttccaagtagctgggattacaggtgtgcaccaccacgcctggctaattccatgcctggctctcttactgtaaatgagaataagaaagaatatactctgctgcaaagtcttagtataatagcatgtctcaaaatagaaaattgggcagagtgttcatagggtttcagagactcagctggatgttaaaatcacccagggtctaggctgggtgcaatggctcatgcctgtaatcccagcactttgggaggccgaggcgggtggatcacaaggtcaggagatgaagaccatcctggctaacaccgtgaaaccccatctctactaaaaatacaaaaaattagccgggtgtggtggcgggtgcctgtagtctcagctactcgggaggctgaggcaggagaatggtgtgaacccaggaggcggagcttgcaatgagccaagatcacaccactgcactccagcctgggtgacacagtgacactggtctc

SEQ ID NO: 8432 - DNA, 539 bp, Homo sapiens
ctgttcaatctagtgtgattctattgtcatcagagaacacactcagccagccccggtggctcatgcttgtaatcccagcactttgggaggctgaggtgcatggatcccttgagatcaggagttcgagaccagcctggccaacacggtgaaaccctgtctctactaaaaatacaaaaattagcctagtgtggtagcggacatctgtaatcctagcttctcaggaggttgagccaggagaatcggttgaatccaggaggcagagactgcagtcagctgagatcacaccactgcactccagcctgggtgacagaacaagactccatctcaaaacaaacaaataaacaaaacaaaacaacaacaacaaaataggaacagaccctgtactgattcaactaatacatttgttaaggtttgtttcattccccaaatatgatttatcttcatatatgtcgtgtggcaatttcaaaacagtgtattctgctcttttggtgtgttctataaatgcttactagatcctcatggttgataattttttcttt

SEQ ID NO: 8433 - DNA, 551 bp, Homo sapiens
ggcacgagaggtgttgaaattacagaagggaccatttctggcaacacagcagaccagatatcctataaaagtcttccattacagaacacctacacatcaggagctcaaaaacagatatattctttaaatgtctagccaacattttggaaaagtgtgggaaatccctcagggccaaaaccagagggagttggacaccagagtgataagcagacactgaaggcaaggccaacctcagggcttggctcaatattctagaactttacccttgttctcaagtctccgtgtggacaggggatgagggttacctggtttctgctcctttgactatggcatagactctgtagatgtctgtaattgaccgggaggtatgtagatgactgtatcaagttatcctcctgaccgggcgcagtggttcatgcctgtaatcccagcactttgggaggtcaagacaaggaaggaggtgagctgacagatgtgctggaagagcacaaggaacccaccagtcaggcatgatctcggagagggcgcttgtttgggggttactcagtgag

SEQ ID NO: 8434 - DNA, 300 bp, Homo sapiens
ctgccttccaacaaaatcgtcaagcgggcagaggagttggtggggcaggagttgccttattcgctgaccagtgacaactgcgagcacttcgtgaaccatctgcgctatggcgtctcccgcagtgaccaggtgcatcttcagcctgcatccccttcccaggagccaggccactccctcagctgccagaggctgggtccctgctggggccagggtgggatggaaatagacatgagcaagacaaaatagcagatatgaaactgttgtccttgagggtgtcacatttggggtggggacaagggt

SEQ ID NO: 8435 - DNA, 300 bp, Homo sapiens
gacaagcgctggagccgcagccctcagactggcacgggaacgccagcgttgggtgttcagattccacgcgtatgtctgggctcactcacagcatggccgagtgtctgcagtgctggtcctgacccttccagagcagcagtggacagatgagataagactgtttcagaaacaaagatggccacagccttcctaacaagcaggtcatctggccatgtctgtattgtaactggtaaaaggcttcaagtcagattgatgatcaagataagtcaaaaccccagcccaagattgggaaagcaggtg

SEQ ID NO: 8436 - DNA, 329 bp, Homo sapiens
ggcacgaggtcaccaacttgaaaccagcaaccatcaaggtctatgactactacctaccagatgaacaggcaacaattcagtattctgatccctgtgaatgaggataggagctggaaactcaattagtcctctgtgacattactggagggtggaacattcttctgtcgcttgaagcagaactcattcaatcaaataatttaatttctctgactagtatatgggtaacaaatgaatatgtctgaacctcagctataatactttctactacctttgcaaggagatgggataggaacaatcactcagaggaggcgttgcatggacagggtcat

SEQ ID NO: 8437 - DNA, 257 bp, Homo sapiens
cgcttggggtgagtctcatcttcaccctttcaccaactgtcctggtaacaatctcccttccatttccttgttcttacagcataccccatagaatcaagcctcgttattgccagggctgaactgacttttttgtttttgtttttgatttaagcagtaccattgtgcaccttgggaaaattcctgtgttgatctaattttaccatattcttcactccactgaccactccaattaggatactcctggcactcttggtttt

SEQ ID NO: 8438 - DNA, 328 bp, Homo sapiens
tcagtgctggcatgttgacctggtgttgtcagtgagtctgtggatccagggtcagtgctggtatgtttagctgacattggcagtgagtccatggatccaggctcagtgctggtatgttgacctggtgttgtcagtgagtctgtggatccaggctcagtgctggtatgttgacctagcattggcactgagtctgtggattcaggctcagtgctggtatgttgacctgacattagcagtgagtctgtggatccaggctcagtttcacagaggttgtataaacatggtctcaggtgggttcttgacacctgggttcaagcacaaaagtact

SEQ ID NO: 8439 - DNA, 222 bp, Homo sapiens
tcctattttacgtggttgttgagaggatccgatggaatgactagctgaaagtgtttgtaaaagtcaggataagtaaagcaatgctgcaggaacaaacaatccccaaatttcagcagcttactacaaaaaaatatgtatttctcactcatgttcatgtccaatgtgtgttagcaaggagatactgtctctcacagtcatgcaagaccccttgctggggaagct

SEQ ID NO: 8440 - DNA, 515 bp, Homo sapiens
ggcacgagaaaagaaaacgagaccaagtaataaagcagaaggaagaagaagcacagaagaagaaatctgacttggaaatagagctattaaaacggcagcagaagttggagcagcttgaacttgagaagcagaaattgcaagaagagcaagaaaatgcccccgagtttgtgaaggtgaaaggcaatctcaggagaacaggccaagaagtcgcccaagcccaggagtcctaggctgaggctgcaccaagacctcgtgtgtcaccccacagagctgtctgtgggtgccttctcaatctcagggcaaaagcccctggagaatattccagccagcagagaattttgacttgcagtaggatttggtttgattttcctacgatctgggtggatgccttgcctgtgacagttgcagttcctattcgccaaatgaagggcagtgccccgcacgtaagttggaatgatggacctgtgttcagagacttaacagaaccaacaagcaaaacaagtgagaacaggaaa

SEQ ID NO: 8441 - DNA, 439 bp, Homo sapiens
ggcacgagatttccctttgccctgccactttcaccatagggccttcttacctggcagaggagtgccttagataccagaagattggcagggaagaagggcagccacttcctggttaccatggagaagcttgtcatgctccaagcctgtgcttacttgtccagtagcaacaatgggaaactgtattatttggggtaggggtagaaccctgagggcataaagctaagaattccaggctgcatctggcagaatcggtttggcaggggttcagctgctccctgggaggccttggcatagccaggctgctccagcactgtgagctgggagtctcctcttgcagaagatgggtgtgaacctgacacgcagcaacaaggagacggtgaagcacagcgacgtcctgtttctggctgtgaagccacatatcatccccttcatcctggat

SEQ ID NO: 8442 - DNA, 243 bp, Homo sapiens
gcagctatagcactaggcagccttgcatcctgggtgttgaaagtgcaggccattatcctcccctctgacctccaagatgttaggtggcctttctgtgcctcagttttatcatctgtaaattgggtatgattgtactagtgcctagtacataaggagtgctgcaaagattacatgagtgtctttaaagtccttacaacagtatctcacacatagtaagcatggcatgtggtagttactatcatt

SEQ ID NO: 8443 - DNA, 142 bp, Homo sapiens
tgcactccagcctacatgacagagtgagaccctgtctcaaaataataatactaatgaactgagactcagaaaagatgttagctcagggttacaaagctcacactggacagggcagcattggaaaccaaaattggtctgactc

SEQ ID NO: 8444 - DNA, 211 bp, Homo sapiens
ggcacgaggcagaggcagggctagaatgttggacttcagatctcttacttctgtgtgctagtgcaccattcttagtccagcacagacaattctcaaacagattagcaaaccaccctcttgaaattgcaagaattgttaccatgtgatcaaggcatcataattaatgcaaaccctagtttctagttgggaaagagattaagatggagacttt

SEQ ID NO: 8445 - DNA, 300 bp, Homo sapiens
gcttcagatggtcctcatatcttttgatccatcagcgaatccacagtggagaaaaaccatacagatgtgaggagtgtgggaagggctacattagtaagtcaggtcttaacttgcaccagagggtccatacgggagagagaccttataattgtaaggaatgtgggaagagctttagccgggcttcaagtattttgaatcataagaaactccactgccggaaaaaacccttcaaatgtgaggattgtggaaagaggcttgtacaccggtctttctgtaaagaccaacaaggagaacacaatg

SEQ ID NO: 8446 - DNA, 480 bp, Homo sapiens
ggcacgagcccagccataatggagcctgaaatcaggaattcatgtttcaaggttacatgtacaaatgtatgccctctcagaacaatggccattttgagaaagccagtgagagacagccagaccaggtcctctggcctagcacccaccagtgcctgccagctcagcccaagtctcctcacctaggatagcttgatggaataacaatgtattttaattttctgtagacctaaaactgctcttaaaaagtctattttaaaaatccatcattaaaacacagactttctccataataagaagttggaggggctgggcacggtggctcgcacctgtaatcccagtactttgggaggccgaggcagatggatcacgaggtcaggagctcgagaccatcctggccaacatggtgaaaccccgtctctactaaaaatacaaaaattagctgggtatggtggcgcacgcctatagtcccagctatttggg

SEQ ID NO: 8447 - DNA, 71 bp, Homo sapiens
actccatctcaagaaaaaaataaataacataataattcgagcatgtgatgactgactctagtcattatgga

SEQ ID NO: 8448 - DNA, 584 bp, Homo sapiens
ggcacgagcttccttgtataatactgatcattctattttagcggtaagaacccaagaaggagtatggatacctgtaaagctttctggtccttgggaagcctctccttctgtgcatattattactgaaattcttcaaaagattctgagatgctctcagtgtttcattgctactttaattttaatcattatgggattgattgctgtcacagctactgccgcggcagctggagttgctttgcatttcacagtacaaacagcagactatgtaaataattggcagaaaaattctactttgctgtggaattcccaaactaatatggaccagaaactagctaatcaaatcaattatctccaacaaactgtaatgtggctaggagattgagtagttagtctagaatatagaatgcagttacaatgtgattggaatacttctgatttttgcattactcctcatctgtataatgaaagacagcatgagtgggaaagagttaagaaacatttgaaaggtcatactggaaatttactttagatattatgcaactgaaggaacaaatatttcaatcttctctggcacatctgacact

SEQ ID NO: 8449 - DNA, 186 bp, Homo sapiens
gccattgtggctgtgcgagctcagcctcctggaaacccgccctgagcttggttaacagcattcactccaggtttagcccagctccaggttatcgcaggcaggactcccgagaacaggttcatgtttgctttttgggaggtgctgcgctaaagtggaaaaccaccctgggccgagtgggacctcccc

SEQ ID NO: 8450 - DNA, 531 bp, Homo sapiens
ggcacgagaatacacaatttacatgtcagaggatggtagaggaattgtcacttatgcttcagtctgacttagtgaagcagtggggccgagaaagcaatcatatacgcatttgtctcacatgagcagaggaacagagggatgactttaagttctgtctgttttttgtccacaaggaattttcttgtgggcaaattgtgaggtctttgtagctatcttattttaggaataaaatgggaggcaggtttgcttgatgtagttcccagcttgacctcccttttccttagtgatttttggttcccaagatttattttcttttcacagaataaattgtctttcagacccagagagcatcacagtcacattcagaaaggtgtccaaatgtaaatcacactttcacatagaattacagctatattaacaaattttttcttccattgtcttcatttgtaatatataaaaaacttaagcttttaaaaaactaaagttgaattatggtcttaaaaatgatggtcaatcttatcttcactggca

SEQ ID NO: 8451 - DNA, 466 bp, Homo sapiens
ggcacgaggactggagaagtcagaagtagaaaagcagattgctaggagagacaggatgacagattttggtcagaaaatgggatattggagtttaaagtatcaaatacagaatagttccagatgttcagagatccagcatgggattaggtactgaaatggattagaactaaaagtcactagaatttagaaattgagaaccatgagagtggatgcaatgacttgttgcttgattgaaaaataaattaataataataaaggaccatgagactagcctgttataggggttatctccatgaacattgaattttcccaggatcatagcaggaattgggtagagaaaaagattatgagaaggtgccagagtcttcagtgaatgtcaggaaattaccaggaagtcagcatatgacagagaaaaggacagtatgttatctgcatcaaaggaaaatgtgcttttgttgaaaagtac

SEQ ID NO: 8452 - DNA, 344 bp, Homo sapiens
gtcaagctggccctggatgtggagatcgccacctaccgcaagctgctgtagggcgaggagtgcaggctgaatggcgaatgcgtaggacaagtcaacatctatggagagcagtccaccgtcttcagtggctatggcggtgccagcggagtaggcagcggcttaggcctgggcggtggaagcagttactcctatggcagtggtcttggcgttggatgcggctctagtaccagcagcggcagagccactgggggtggccttagctctgtaggaggcggcagttccaccatcaagtacaccaccacctccttctccagcaggaagagctacaagcactgaagtgctga

SEQ ID NO: 8453 - DNA, 401 bp, Homo sapiens
ggcacgaggaggaagaggcctgctccacttgtctgggaacctgggcaggaggcacagaggaagccaaggcctggagctgcaggtcccccggcatctctctctgtcccggcagcccaggatggcctggtgcccccacctgctgcagcaggagccccaaggagtgctagctgagggtggttgctggggtggtcctcatggacagtgaggtgtgcaagggtgcactgagggtggtgggaggggatcacctgggttccaggccatccttgctgagcatctttgagcctgccttccggtgggagcagaaaaggccagaccctgctgagttagaggctgctgggatccactgtttacacacagcgggaaggctgctgggaacaggtggcagagaagtgccatgtttg

SEQ ID NO: 8454 - DNA, 374 bp, Homo sapiens
ggcacgaggccggcctccccatccaatcatgtgtcaagtttgcctcctttcatagcaccgcctggccgtgttttggataatgccatgaattctaatgtgacagtagtctctagggtaaaccatgttttttctcagggtgtgcaggtaaacccagggctcattccaggtcaatcaacagttaaccacagtctggggacaggaaaacctgcaactcaaactgggcctcaaacaagtcagtctggtaccagtagcatgtctggaccccaacagctaatgattcctctctcaaggatgaggttttgaagattatgccagtgcagaagcagacccgtgccggccagcgcaccaggttcaaggcatttgttgctatcggg

SEQ ID NO: 8455 - DNA, 568 bp, Homo sapiens
cacgaggcaacatttgtctacaactctactgtaaaattggaaatgcttttccacagaaaaacctctcaaaatgctgaatgcaaaagttgggatcacagaaacattgtgcctatttttggtctgctggaaactgtatttttacaaggtaatccctgttttcaatatagttcctgtcttgccactggcggttttcttgtagcatttttctagttctgagattgctactacccaaagtattcatttctttcttactggggtgtcctctgtcttcacagcctgcttctggattgtaggttttttcctttctttctgttgagatatttatggcatttgatagagtcaaaccagatgtattgcagccggacatacttatgtggcttcagatgtgtaaaataagtaacttcctatctttgtctgtctagctcaagagttgactgtggacgaggaatgcctgtattgattcattaatgtaataactatttactgactgcctaccatgtacaaccagaaacacagttcctaacctcatgaacttaccatgtaacatgggaagacaagcactaagttc

SEQ ID NO: 8456 - DNA, 603 bp, Homo sapiens
gccctaaaagagatgaacaataccgtatcatgtggtatgaattagaaacccttgtcagagcccatatcaacaactcagagaaacatcaaagagtcttggaatgtctgatggcatgcaggagcaaacccccagaagaggaagaacgaaagaaatcaggaagaaagagggaagacaaagaggacaagtcagagaaagcagtgaaagattatgaacaggaaaagtcttggcaagactcagagagattaaaaggaatcttagaacgtggaaaagaagaattggctgaagctgagattataaaagattcgcctgattccccagaacctccaaacaaaaaaccccttgttgaaatggatgaaactccacaagtggaaaaatcaaaagggccagtgtcgttattatccttgtggagtaatagaatcaatactgccaattccagaaaacatcaggaatttgctggacgtttgaactctgttaataacagagctgaactatatcaacatcttaaagaggaaaatgggatggagacaacagaaaatggaaaagccagccggcagtgaagagtgacttgaagaactaaatttagcatattgcaaaaatattttg

SEQ ID NO: 8457 - DNA, 227 bp, Homo sapiens
aactgcttttgtttgtagaattgattttggaaaagtcttaaaatattcatgaagtttttttttaaaaaagctggtattaaaccttgaaaaagttaactgaaatttggaagggtgatttctgaattagctagggaggaataatgaaaaaatattataaactatatcagctaaatcactggggtcttggctttatgtattttcaagcttaaaggaaatgtcaagctggg

SEQ ID NO: 8458 - DNA, 236 bp, Homo sapiens
tatgagtgagaaagcttaccagtgcagcgaatgtgggaaagccttccgagggcactcggacgttttctaggcatcagagtcaccacagcagtgagaggccttatatgtgtaatgaatgtggaaaagccttcagccagaactcgagccttaaaaagcaccaaaagtctcacatgagtgagaagccctatgaatgcaatgaatgtgggaaggcttttaggcggagctcaaacctcatc

SEQ ID NO: 8459 - DNA, 589 bp, Homo sapiens
tcgcggccgctgctttagaacccccatgaagggggacagttaattgtctttccttgagttttcagtcaattcatgacactgtgcaaataggagaaataattatagttttgccaagtggcagaatatgtttgatttaatcttttatgacttataactgtacttagttgtgaagagtccattaatgttaattttgttatgccatgcatttgagagttatgcatagatttccttgtattttctccatattctatgtaaaatagctgtaactgggaacaatcattttttccttatttttgaagccaaaacaaaatatttcaaagtaaataatttcagctgtgtgagctgcaagtaggccaaagaaaacaagacagtttgttcttaaagttaaactaatggggaaaaaaaacaggacagggaggtatctcaagttcatttgagccatttttaaaattttggtagctggtttctgtttttcttctttttaaaatagtaacaacttaggattttgtgtgccaccagcttccattccatttcataaaagcttaatctagcaagaattggtgagccctagtagaagttagaaagaaat

SEQ ID NO: 8460 - DNA, 370 bp, Homo sapiens
attcggcacgagtgatgccttagtcacttggccacacagttttgtggtttacgagtcatgggaattgcttgtcttactctgactgctaaagttctgtcctattgtcttttcatgtaatagcaacatgactctgatgacaaagcccaactaattacacaacttaatttaatagtttaaagcgcaaagggcattccctgagcagtaaaatcttttgtttggaaattttaaaacaaattatattttactttatgttttatatttacgtaataagtatttacaagaacacaattttctcaagatttaaactgctcattgttccataaataggacacacatttagaaagaggatttttttttaaaggaatatttt

SEQ ID NO: 8461 - DNA, 705 bp, Homo sapiens
acttttctctagcatcgtaggaggaagaaaacaaacacatcagatattttcagcactaaaagagatggttttccccacatatatgtaaaagaaatttgcaagactactgggtatcagaatggcaaagcaacttaaccttccagaaaatacagatgattggacaaaagaggatgtaaatcagtggttagaaagtcataagattgaccaaaaacacagggaaattttgactgaacaagacgtgaatggagcagtcttgaagtggttaaaaaaagaacatcttgttgatatgggcatcacacatggaccagctattcaaatagaagaactattcaaagaattgcggaaaacagccattgaagattcgattcagacatctaagatgggaaagcccagtaaaaatgctcctaaagaccaaactgtgtctcaaaaggaacgtagagaaacttcaaagcaaaaacaaaagggtaaagagaacccagatatggctaatccgtctgcaatgagtacaactgctaaaggttctaagtcactaaaagttgagctcatagaagataaaatagattatacaaaggaaaggcaaccatccatagacctgacatgtgtatcatatccatttgatgaattcagtaatccatatcgttacaagttggattttagtctacagcctgaaacaggaccaggcaatctcattgatccgatacatga

SEQ ID NO: 8462 - DNA, 300 bp, Homo sapiens
  misc_feature 288: n = A,T,C or G
gctgcccaacacgctgtttggggatgtggccatggtggtggaattcttgagctgttattctgggctacttttaccagatgctcagtatcctattactgctgtgtcccttatggaagccttgagtgcagataagggtggctttttataccttaacagggtgttggtcatcctcttacagaccctcctacaagatgagatagcagaagactatggtgaatagggaatgaagctgtcagaaatccccttgactctgcattctgtttcagagctggtgcggctctgcttgcncagatctgatgt

SEQ ID NO: 8463 - DNA, 300 bp, Homo sapiens
gcataagcaaaagtttcatggcaggagggagaaattagctatggccagagtatagagaataagggaagtatgatttgtgaggaggctgtagaagaattaaggtcaggagcacacaggatgatgtaggcccagtgaagtgcgttggtctttattttgaaatcagtaggaagtgtcctggttttcaaaggcactctgcatgagagattaggttggagtaggagcttacagtgtagtccaggagagaacaatggcccctggcatgaggcaatagacatggtgagaggtgaatggattatttga

SEQ ID NO: 8464 - DNA, 422 bp, Homo sapiens
acttctccctcagcccaatcccactgtcatcccctgctgtccacagatgctgatctcaaggacacacccagtaaacattctcagcactacgctgtctcaggttctgcttcctggagaacccaaattgtgtcatcaggaatcaatttggcattatcccttgggtatttaatcgatacccagtacaaaaaaaggacacaatgcttctgtcatttttttaactcattgatgaaccacagcagttttctcaaggcaagatagacaggggcaagactagcatctaagaggataaactctggcaggagggtttctgtaaagagacctaaaacccctcatagttcaggcaaataaacagtcaccataaggagccaagaatagaaatatatctaataagctatattcgccagggatgacaagtatggggc

SEQ ID NO: 8465 - DNA, 384 bp, Homo sapiens
ttatctctttctgttggctctcgaaagcctagagcaaaatgtgtggcccatctgtacagaatcttattgcttgcatttttagaagtaacctcaaggttcattttaactttcttatatcatttttcccattgtactcatttccttacctacttaaaaaaatgaaaagcaacttgtttttctcttcccaaatataaaatatatttgctatatgaaatgtgttaaatacatataagagaaaagaagaaagtgaaatgatctgtccttttcactgaccacatttagttcttgatagtttggcattttccaatgcatacatatacattttaaaaagtggcttattcggccaggcgtggtggctcatgcctataatcccagcactttggg

SEQ ID NO: 8466 - DNA, 338 bp, Homo sapiens
gacagaagggggtctcgaactcccgacctcaggtgatccacccgcctcggcctcccaaagtgctgggattataggtgtgggccaccatgcctggccaacgcaaggtaaacttttaacgtggaatagaaaaaataattttgttaaatccctgggatggaaataacatagcgaccaaaagagtacatctttctctcacatggcaaagttttcttcttgatgctacagtataaaagtaaaaagcacggtttcagtcttccaccagatgtttaaccccaatccccactgttgtttttcacaaagcttctgggatcacctgttccacttaattctcactgctg

SEQ ID NO: 8467 - DNA, 485 bp, Homo sapiens
tgaacctgaaatcccaggtgggcgtcggggactagtagggtggggaagccttggctccagccttcagggcagtgggtgcctttgggaaccaagtttaggcatggcccagaacacagtatccaagtcggctgtgctgaccttttcatttcacttcatttcattatgttcttctatgtttattttcacagagtctcatccaagaaaaacaaatgtttaccttgctacctttatcctcttccaaataaaaatagctttattgtgtcacatgggggatacgtagatatgcttttagatttttagattaactatctgtcaaatagaatcatgtcagtgaaagaactggccctgccgatgccagggtctggaagtatttaagaggtggcagcccatcggcatccttctagtatttatctttcattcctgaaattagaacgagggctgtgctgcagaactcgctgggccacatctagccctttggtggtgaa

SEQ ID NO: 8468 - DNA, 147 bp, Homo sapiens
gctggagtgcaatggtgcgatctcagctcactgcaacgtctgcctcccaggttcaagcgattctggggaggggaggaggagggaagcaaggagagaggaacgcagggagcagaacctgacctggtcacgggggtctgggaaagacag

SEQ ID NO: 8469 - DNA, 678 bp, Homo sapiens
tgctgtcggacatcacagcccctatgaagaaagtagccacaatctcaaataacaaaagggaatgttctaaaactttttcttccttaaaaatggagaaaattgcacttgtgcttgctgtgtggtatataaaccaggattagtcccagggtcgtgaggtttctggtgaaaaggttaaatcgtagaagctagtatattttttatatttttgtaacaattgcttttttcatgggggaggcggggttagtatttatagtcctaacaagtccagtaattttttataaatcttcagattataaacagcccctaaaaactttacaacgtttacacagttttttaaaaagagactgtatacacttgatttgctttcaaaataaataaggtcagctagtctaggaggttaacgtcgggtaggaatgctgatcatgataggtttggttttctacagattctgttccggtgcctttcctatccaggcaccacctgagaaagttgtcatttgaggtcgcacttggaagttacatctgtgaagtttctgtcattcgtccagatctgtgtgtgtagcatgtgctgaggaagcacgtgctgggctgtgcctcagacagtgcatcaccgggcacccagaggcttgcctggctattcctgttctggtgtgtgtggagtgttggggaggaacagatg

SEQ ID NO: 8470 - DNA, 168 bp, Homo sapiens
gaagaaggtggggaggaagaggaggaggaagaagaaggtgatggtgaggaagaggatgggagatgaagatgaggaagctgagtccgctacgggcaagcgggcagctgaagatgatgaggatgacgatgtcgataccaacaagcagaagaccgacgaggatgactagac

SEQ ID NO: 8471 - DNA, 370 bp, Homo sapiens
atacacttcgtcatttttttttctctgacagactcagcaagaccaattatattatctaagaactaaccaaggaggtgtatagtttagaagagtcaagaaaaacaggtaaaatatagcaaatatgtaaaacaaaagaaaagccactaaaatgcaaatttctgcctaagtattatatgttatatgctagagaacacagataatcatttgaccaagtaggaaggaaaacaagaaaatgaaaaaagtggaaagaagagaaagtttgtaaatgaaaaaagtttcaaatgctgagtttctaaagaactgagaaaaaaaattagaaacagtgattactaaagaggataaaattttttataaaccatgacattttgca

SEQ ID NO: 8472 - DNA, 402 bp, Homo sapiens
tgaatattttgatcaatgaagtcatacacttaacaatagctatcaatattgaggagctataaataaattctaattttcacaaaactcagtaaggtatgtaatacaacctccgctttacaatgagaaaaataagtcttactgattcgttgatttaatccatatcagagttaataacctctttttcattaaaattggtcctttaaaaacacacctgcagctgggcacggtggctcacacctgtaatcccagcactttgggaggccgagacgggcggatcacctgaggtcaggagttcgagaccagcctgaccaacatggtgaaaccccgtctctactaaaaaaaatacaaaaattagccaagcatggtggcgcatgcctgtactcccagctacttgggaggctg

SEQ ID NO: 8473 - DNA, 300 bp, Homo sapiens
aattccgttgctgtcgagcaaataccaaggcctaaaaaagaatgaattatttgctgtttgggaaatggaagcccacgctgagtgctgaagcacagggactctgcgcaggaagaggaggggaagcaagaaatgaatttgggtccttgtgatggcagtggctgctgccatcacgctgtgtggctagggctgcacacttcatggagccggtggaagccccgtccctcatgagttgggactggagccgcaaaccgctgctgcagacccaggccttctgctctatggagcaggcaggagccccac

SEQ ID NO: 8474 - DNA, 358 bp, Homo sapiens
ccaggattctgccaggcaggttggcctcagaagccacacttcttatcccaataataaaagtgaacaagaacaggatgaagttagagtgagagagcgagagtggtaacactcatgcaatcagagaacaagagaaagctcaatggaaacatgtattcactgacaggattaaaacacaaaacaacaaaaagagagacggccgggcgcggtggctcacgcctgtggtcccagcgctttgggaggccaaggcaggcagatcccctgagctcaggagtttgagaccagcctgggcaacatggtgaagccctgactctactagagatacaaagattagctgggcatggtggggcatgcttgtact

SEQ ID NO: 8475 - DNA, 305 bp, Homo sapiens
tacggctccaaaaaacaacaaaagggtccggttgcaaaaaaacaacaaaagggtccggttgcaaaaaaacaacaaaagggtccggttgcaaaaaaacaacaaaagggtccggttgcaaaaaaacaacaaaagggttcttttttcaaaaaaccacacaaggttacgcctgcatgcagaccactgaggggtccctctgtgacaaaaccatcaacctttacggctgccccaataccaccaatgggtacgtctgcgccaaaactacagacggggacggtgtgagacctcaacagaagggtatgattttt

SEQ ID NO: 8476 - DNA, 176 bp, Homo sapiens
tgggaacaatccaaagagtctaagtttcttttccatccagcgtgagtttcctatttagtgaagtaaagctcaacttttatcaatagtttcattctcttgtggtatgtaaaacctacacacactcagaggcacccagaggaaactacactctgaggtattagtaaattctctgcaag

SEQ ID NO: 8477 - DNA, 508 bp, Homo sapiens
ataatcaagttatagctttacattgattgatatattcatagtgagaagagcatcttcattgacgttcttgattttaagaatcctagagaatcgtattttttaatactgaaaaatgattgtttactagcaattgttcagtatgaagtacaactagtttttttaaatgttatattgaaaaatgtttgatcttgtatatttggttttcaaatctgtttcctatacaataattttatattctaaatgtggaaaaatttgtattattttaaaagtagttgaaaatggtataatacaaaggcagtttaccaaatattctaggccacatacatttctatgaagtgtcgtatgcaacctttgaaatgtctgtggagagaacgtcatatggatgatattaatgctttgattaatgtagagcctttctgtgaaaacctatggccagttcaagtacccaagcctttctccttatcactaccactttttgaaattagaggtggaatgcttgaattctaat

SEQ ID NO: 8478 - DNA, 80 bp, Homo sapiens
ggacccagatatatacatttattcattcaatagaaattcattcttataatggccactgatacctatatcctaaatatttc

SEQ ID NO: 8479 - DNA, 335 bp, Homo sapiens
ctaacggtggagcttcaggtctgcatttttctttctctttttttagtgggcacagctatgatatcaaaaggtaggcctggaaccaagctgatgggagagggaagacctgaactggtcagtataagaaggaaatgagaaatgaacaggaatgaaatggggcgcgagtggtcagagagcaaagaaggaagtgtgggcagtgagtgcctgatggctgcggagtttctgtttcaaacgataaaaaaaaattttagaaatggacacaacattggccgggcacggtggctcacacctgtaatcccagcactttgggaggctgaggcgggtggatcacctga

SEQ ID NO: 8480 - DNA, 397 bp, Homo sapiens
tgcctggccccctctctgtactgtgtccacatccatcatttcccccaggctttattgagcacctgctgtgtgcgtccatctctgtttcccagagcttagacttcaaggtataggaattgctttgttttcatttttttttataatcctccaagatcttccagtctacttgaagaaacaaaagccacatcctgttttttatcctgtctttttgtggcttgctcatggcatgaattttctagctgtcaacaaagggaggggcgcttttgggctggaggagtcaagaggccttcaggaaaaaggagggcttttgatacattttctttctttccttcctttctttccttccttcctttctttcttttctttcttctttcttctttctttctttttttttttt

SEQ ID NO: 8481 - DNA, 598 bp, Homo sapiens
  misc_feature 535: n = A,T,C or G
tcaagagaaaaaaaaactagtttcttgcaagcattccaaggaggtccatcttgaagcccaacctgacagaatgtgaccagtagacttggccaagcccttccttatggccccaggaaactcccaagctatggcaccacaggaagcctatgcaagctgaggacccaagacaagttaaaaacaggttcaacggaaaaggctgagaatcactggcccattctgtacccatgcctttaaaaataatacccagctgcgcacggtggctcacgcctgtaatcctaacactttgggaggtcaaggcaggtggattacttgaggtcaggagatcgagaccagcctggccaacatggtgaaacccccatctctactaaaaatacaaaaaaattagctgggagtggtggcgcatgcctgtaatcccagctacctactcaagaggctgaggcaggagaatggcttgacccgggagggggaggttgcagtgagctgagatcgtcccactgcactccagcctgggcaacagagcaagactctgtctcanacataaataaagtttaaaaaaataaggcgcggtggctcaggcctgtaatcccagcactttggg

SEQ ID NO: 8482 - DNA, 622 bp, Homo sapiens
gtttttccctcaagaaaaagaaaaaaataaaacaaagcaaaaacctctgcctgagaaccatttaaaccatttgacaaatatttggttaaaacccccacctctgtcaaaaaggcaacagtactgtttattatccaggctggagtacttctgagaatgaaatggggtggtcttgatagttaagctgttttgggcaaatcagggcatttggtaatcctagtcataaagtatttctacatataatcatgctttccataacttttaaactgagccagtggtcacaaactcatttgtatcaaggggctaggaggcaacacaagagtttttaaatttttttttaattttttggagatggaatctcgctctgttgcccaggctggagtgcagtggggtgatcttggctcattgcaacctctgcctccccggttcaagtgattctcctgcctcagcctcctgagtagctgggattacaggcacctgccaccacctggctaattttttgtatttttagtagagacggggttttgccatgttggccaggctggtcttgaactcctgacctctagtgatccacccaccctggcctcccagagagctgggattacaggtgtgagccaccatgcct

SEQ ID NO: 8483 - DNA, 374 bp, Homo sapiens
ttgttatcaacaaacaggctagtagagtataaaaaataaaataaaggaaatgtagctggccgtggtggcatgtgcctgtaataccagctactccggaggctgatgcaggagaatcgcttgaacccaggaggtgaaggttgcagtcagccgagatctcaccactgcactccagcctggatggcaagagcgaaactccttcttgaaataataaataaaataaaggaattggggccgggcgtggtggctcacgcctgtaattccagcacttttggtagccgaggtgggcggatcacttgaggtcagaagtttgagaccagtctggccaacatggtgaaaccccgtctctactaaaaataaacaattagtcaggcatg

SEQ ID NO: 8484 - DNA, 377 bp, Homo sapiens
tctgtatatgtgttcaactctctggatgttaacaccttgctggctggccaccaagtgaagataaactggcctgggtcacaagtcttttttctgtgtctagttgcccaaggtggacacatctctgtcatgtctcaggaccagtaaactcaagctatgcttggaaggacagaattgatcaagatggaatgactcctgagaggagacagtagtgatatttctgctccactgctatttatttttctggcttcaaggttcagattcaaccatggcaggagagaaagtccttagcagtttcttattttatattttttttgttcctatgtacccctcattaataaaataatcagccaggcatggtggctcacgcctgtaatccc

SEQ ID NO: 8485 - DNA, 602 bp, Homo sapiens
gtagggacaagttagtgtggcccatatccccattgctgtagcagaaattttggcatctgtggcaggaaaagagaaagataaattttgatctttgtggaggagctcactgtccttgaatctcacctgttataaagaacataaatgagtggacattttctgcatgcctggatctttctacctgtgtttgtggtggtagcaggtgaagaagattgtgctgattcctttaaaggcatattcccaagatgcaggtgtgacttgtccagagaatatcacctgagaataaatcctagagaaggacgatgaagagaaaaatggctttttctcaggtgactgtgtctcagaccaggagcagtgttcacttctgcctcctggaatgccatatgtttagaacttacaaacctgtacttcttgactttatgctgtttctccctataagtttgtttaaacactttttcttctcatgatagtcaaacaactctgaaaaaatattttctatacactagagtcttctcgacattctcttcatcttggcttcttctctgctatgcagaattctcatcattaatttatgactcataatattaaaaatattccctttggct

SEQ ID NO: 8486 - DNA, 518 bp, Homo sapiens
ttatactcaaaagctgagttaactaattcaggaatataagtgatcaggtgtttccaggatttagtaacttagtatgttatatctagtaggtgtaactgtggcctacagtaggcactgttatattttttaaaatgaactcatccgagtctgttgcactggatgttctgtggtgaaaattatttgggttagagagcttttggcaacacaaaccatgctacttctgagtctctgaatgttgggattggaagtgtatggaaaacttgagtaagttcctggctctgccactaaatagatgagtgaacttgaacaacttatttaaactctctgagctcctgtttacttatctgtaaaatgaagatatttagagttaaaaacctaggatatttagacttaaatttagacttaaattggctgctgctttggtttcttgaaagaaatactttggtccttggcctccaaagcctctgcttagctgctttaccgattctatgtggtatgtcctcctttttaggttcttt

SEQ ID NO: 8487 - DNA, 361 bp, Homo sapiens
gaatatggagattggcagtggcagcgagaggttttggggtacagctccgcacactgattattgagtcagcagttaatggaatctgccaacacaaaactgaaatgagattccatgtaaagcctacacaatagaaaaatgaatgtttaatgagcatgaattgtatcataccatgctgtttctaaaagtctccaagcttagaggaaccttagagaggatcttaatgagctataataatagcttccattcgcaaactggtatgtataagtctaacatgtccacattagatcgctgctccctccaacaaacatggggaggctaagcagtttcctctcactctactaactgcaaagacagttcacct

SEQ ID NO: 8488 - DNA, 636 bp, Homo sapiens
gttggatattcctgtttcatttaaaaaatgaaaatgaaaagtttatcagctaaagattatagttaaaatcagcaggttctatatagcaagtctaagtattctaatggcgcttatattaatacccagacagaaatataagacacaaagcaagcctactaagcaaagcatctgactagataaagtagaaaaatttggcaggttccaaccctgaggtgtcagagtttattgctaataactcaagttgatttcttggctaaacagagggctttaaacaaagaaattttttggttctaattaaacaggaaccctaaactgttaacagtattcatactttattaatacaataattactaaaacatatcttagtaactagtattattgataactactgaacatgtgtcgaatgggaagaggagatcatcaccacatattctttaaatgtcagccgctttcataaaagaaagggttgatgttgttttctgtcaacagaatcaaatgaatcaattctggaaagtcttcctttcctctttggaatttatcttcattcatagaaactgtattcataggtcttaaattctttcttcttagactatagtactattacttggaatgattgagccactagactaaacacct

SEQ ID NO: 8489 - DNA, 225 bp, Homo sapiens
ttccagttcctgcttcataacagatgctcaacagatgtttattgattatgaaaaggatccctgaaaagctttctcctggaattagactctcagccctaaaatagagcaagcctgcagaaacgagaactggaggcttgaaagtcctccataactgggttgaagagaaaccattttcctgtaatcttttttttttttttttttttttaaaaaagaattttttttttt

SEQ ID NO: 8490 - DNA, 559 bp, Homo sapiens
ggaggatacagaataaaaactaacagatttcagcaatgaattacaaaaatgaaaattatttcagtagtaaagaccgaactaaaagaaattatgaaacatttagggatgaaaaagtttctaaaatgaaaaacacactggaagagtttaacatcatattagacactcaagaagaagaaaaacacatagcaaattttaagtcatagtttttgaaacattccaaatgaagtacacagatgggaagtgactcagtgagtttggggaaattatcaagcagccccagaaaaacagaagagaacacagggaactagaaacaatgtatttctaaatttagtaactgcaactcttgatataagaagttcagtgaaaccaaagccaaagtaagattacaaaattacattcagaggtatcataataaaatggttaaaagggattgataggctgggtcgggtggctcatgcctataatcccagtactttgggaggccgaggagggcggaccaccagaggtaggagttcgataccagcctggccaacatggcgaaacccgtctctactaaaaa

SEQ ID NO: 8491 - DNA, 436 bp, Homo sapiens
ttctttttaggtgtattataatcatttgcttacatcagtttcctttacaaaatttaggacagaaatctagtctgattcattctgatactactagagcatagtagaaagtagaatcttattaaacttctgttgatttgattaaaagggtacataacgaagtgaaggcagaaataaagatgttctttgaaaccaatgagaacaaagacacaacataccagaatctctgggacacattcaaagcagtgtgtagaggaaaatttatagcactaaatgcccacaagagaaagcaggaaagatccaaaattgacaccctaacatcacaattaaaagaactagaaaagcaagagcaaacacattcaaaaactagcagaaggcaagaaataactaaaatcagagcagaactgaaggaaaaaacccttcaaaaaattaatgaatc

SEQ ID NO: 8492 - DNA, 394 bp, Homo sapiens
ctcactataacctcaaactcctgggttcaggcaatccctctgccccaacctcctgagtagctatgactacagctgcacaccaccatcctcagctatttttttttattttttgtagaagcagattctcactatgttgcccaggctagtcttgaactcctggcctcaagtgatcctcccacctcagcctcccaaagtgctgacattacaggtgtgagccttcacgcccagtctaatttgctgattttaatgaacagcagctggttctattaggttggtgcaaaagtaattgcagtttttgcaattataattatcactgtgacagataattccatttcctaaatgagttggagatgggattagaaataaatacactttctttgaatcctcttatatt

SEQ ID NO: 8493 - DNA, 144 bp, Homo sapiens
gtgggaggatcacttgagctcacagaccagtctgggcaacacagtgagaccttgtctctctatattttttttaaagtagaagaaaaaaaaaagaagtaaactaagcttctagggcctttttgtttgtttggtttttttatcact

SEQ ID NO: 8494 - DNA, 467 bp, Homo sapiens
gctggagggggtcactgggacttatacagcacagtgggtctgataggtatccacacgaatgtattaactatttttttgttttttgttttctattttttgagatggagtctcactctgtcaccagactgcagtgcagtggcatgatcttagctcactgcaacctctacctcctgggttcaagcaattctccggcctcagcttcctgagtagctgggattacaggcttgcgtcaccacgcccagctaatttttgtatttttagtagagacgggttttcaccatgttggctaggatggtctctatctcttgaccttgtttgtgatccacccacctcggcctcccaaagtactgggattacagacgtgaaccaccgcgccccggccgaatgtattaacttttagcatattgtattagttgggaatgttcactttgttgctataacaaaaacaaaaatatcaatgagtaata

SEQ ID NO: 8495 - DNA, 537 bp, Homo sapiens
gtgggccggaggtcaccgagatctctcctcactgggggacggaataggcctctccctgcttgctgctgttctttggccttgtcccctgcctcctttcctggaccacctacaaggacctagagggaacagtactgggggcaggagctgggaaaggcctgctgtggttcactgctagtaagaaatagagactcagagaaatttcctgaaacacagcagactcttggcgcagccctttgagcagatgaaggaggacaagaagaagaacatccctcagctccagctgcatgccagaaacttcactcacattatctcatttcatctgcacagcagctcagcccagagtggagaggagtaaattggcccagaaagatcaagtaacttccttggagcttgtcagcgttgagtggaaacttggactctgatgtcgaactccaaaccccatgcttattctgtaaagcctgaaaagtgtcttggaattgctttagaagtaggagaagaggggaaccctgtgacattacactgtcttccagcataaca

SEQ ID NO: 8496 - DNA, 412 bp, Homo sapiens
  misc_feature 316: n = A,T,C or G
ggcacgagatcatctagaatcccagcagtttccttaagttgcctactgtcaattttccatttctctcgtccaaattcacatggagacatcatttttacacacttgtaatcaattgtaggcggagtctggggtcctagcacttcccctaacatcatctcatgatacttagacttttaaagaacccttgagtaggccctgtgataaaggatgttagtgaaaaaaataatgagaaacagggacttggcttagagaaagaagcctgcgtcagatcagtaggcccccctggggctgtggaagcatgcagaaggtcccttangaagtgatgttggaaatggccttgggccagccacgttatttctctggacctcaggtcacccatctctgaaatgggagcattgaactggctgatccc

SEQ ID NO: 8497 - DNA, 467 bp, Homo sapiens
atcttcagatgtctataattggaagcctatatagaaatggttgatgagcctatcggttgaaccactgcagagaatagagtgatggtcttagggcatcctgtactttgcatgctcctcctggaagtaaagagtaagacagagaatagtaataatcacccattccagaactggttgcacaacatcacaaaagcttgtccagacttattagcaagttaataaaaaactagacttctttctaagtacttataatttaggctgtggggtagttctgttatgatacatttgttttaaaatattctgcttctttttaaagtgagttgtatgtgtctttgttgtagggacgtgcaatttttgccagtggcagtccttttgatccagtcactcttccaaatggacagaccctatatcctggccaaggcaacaattcctatgtgttccctggagttgctcttggtgttgtggcgtgt

SEQ ID NO: 8498 - DNA, 500 bp, Homo sapiens
cctggcctcagtcatcaggccaggagaggtactggacgccgcgcacgcactcgtctgccagcgaggcccaaaggggaagcctagcggagctcagtgtggcagctgctggcctctgggccggttgtgcatctaatcatccaaaaaattcagctcaaaacctgactaaagatagtactttaaaacatgaaggcttctattcagagaacttaactgaatctagaaaattcctgaaaagtagggaaaaacagtccagcctgaccgaaataaaaggatctgtttatgaaacaacatacagtcctcctgaatgtccattctgtggaaaaatagaggagcacagtgaagatatggaaactcatgtgaaaacaaagcatgccaatcttttagacattccattggaagactgtgatcaaccactctatgattgtcctatgtgtgggctcatatgtacaaattaccatattcttcaggaacatgttgacttgcatttggaagaaaacagc

SEQ ID NO: 8499 - DNA, 405 bp, Homo sapiens
ttactttcaggtattggcaaaaatcacagctggagtgcagattaagcatggtaggagggtggtgattggagaaggaatggaggggaaaaaggaaaaactacaaatcatgttaaaactgtcctcattgagttttacaagtaatatactggtcttatataccctttcctcctaccgtgggaaaatatcactaacttgtaataggattaaatgaggcaatacgtaagctttttagacattttctttatagagaacattattagaagttgttggcctggcgcagtggctcgtgcctgtaatcccagcactttgggaggctgaggcaggcagatcacctgaggtcaggagttcaagaacagcctggccaacatggtgaaaccccttctttactaaaaacacaaaaaaatt

SEQ ID NO: 8500 - DNA, 381 bp, Homo sapiens
catagaagggaagagatggaaatacacagagctagagggtaacacattgatgctacagacagaacacctaacatacttctggagttctgtaagattagaggagagaaaatagagcaagagaaatgttgcaaggatttttccaaaaggtataaaatgtatccctgaatatatttttagtaatctcaaacttcaggcatgataactaaaaccaaattaacataaaataatacaggacgcaaaagaccaatagaaaatctgaaaagtagctagaggtagaagatagagtatgttgaaaagaactgtattctaaatacaacctgattttaacagaaaacatggaagcaggaattcaatggattaatgggaatcatgtcttcaatg

SEQ ID NO: 8501 - DNA, 482 bp, Homo sapiens
accaattggactaacagctgtcctctgtattaaggccatctttagcttgtcttgcaaatactttccttgttcactaatcccttctccccaccctgcttcctttagacccatgttaatctattacctgggagcagctctagattcttgagttggtaatgactaatttctccgttgctctcatcctgttgagtttaataggctctcttttttcttactgatgttttcatgatgagatttctaataagttatttgggagctatcagaatagaaactaataaatattatctatctattagctgtcagaataaaagcttactgagggtcctgaactgtgaggccactgaaggcaggggtttgggtctgatttatctgtgtttgcctagagctttaacagagcctgacacttgtaactcttaaaaatatgctttaaaataaatctaaactcaggcatggtggctcatgccagtgatcccaacactttg

SEQ ID NO: 8502 - DNA, 343 bp, Homo sapiens
agctacatgggaggctgaggcaggagaatcacttgaacctgggaggtggaggttgcagtgagccaagattgcgccactgcactgcagcctgggcaacggacagtgactccatgtcaaaaaaaaaaaattaattaattgcctctggcttaaacgtaaaagcatttcttggaccagcataaatgcataaaatctgtttttgttccagggggttgttaacaggactcatttttttggtctttgataggatcccggctactcaacaaaaatgaaggaggaatctgtaaaaaaacaccagtatccaaatggggaagtttggaaaaaactccttcctgctcaaaaaaat

SEQ ID NO: 8503 - DNA, 300 bp, Homo sapiens
  misc_feature 34, 38, 40, 42, 47, 49, 57, 64, 66, 69, 80, 86, 87, 92, 105,106, 119, 125, 127, 133, 134, 137, 144, 153, 156, 173, 175,176, 178, 180, 181, 185, 189, 190, 197, 208, 214, 218, 220,224, 227, 229, 232, 235, 241, 249, 257, 262, 263: n = A,T,C or G
  misc_feature 264, 283: n = A,T,C or G
agcacaagagatgtaaaaaaaaaaaaaaaccccncccncngnggaangncccttttnaggtttngnttngtttttttttnggtttnnttttntgtttttttaatnntggggataacccntgatgncnggctanngtncatatcnggtcttttnagntagtgggctcttttaananntntnngctnaaannttaactnataaaaggttngagccncgtnancatncgncnaanggnacccangcataganaaaagganattcnnnccctgtgtatgaatgagcnggtcagattcaaggcag

SEQ ID NO: 8504 - DNA, 402 bp, Homo sapiens
taatgggacccagcatccctgccaaaactcgggaggtgctcgtcagccacctggcatcttacaacacatgggctttacaaggcatgtatggagtttcttgtgggcttggcaggtggctgtgaaggccatcagtgtctgaagcctgtacttgcccctccccaggtcctgtgagtggagaggcacagagtgttctgggctagctgagtgtggaggctgggtggctctgatgctagccaatcactctacgctctaggctcacacctttccaccttcgacttcgccagcagaagtcttgagttcaatctcattgccctggcttgggtcacatgtccatccatgaaccaatcactagactgggtgcggaaagctctgatttgccaagttcgggtcatgtgtctcact

SEQ ID NO: 8505 - DNA, 606 bp, Homo sapiens
  misc_feature 468: n = A,T,C or G
ggcacgaggccactgccgtctccgccgccactgggcccccagagccccagccccagagcctaggaacctggggcccgctcctcccccctccaggccatgaggattctgcagttaatcctgcttgctctggcaacagggcttgtagggggagagaccaggatcatcaaggggttcgagtgcaagcctcactcccagccctggcaggcagccctgttcgagaagacgcggctactctgtggggcgacgctcatcgcccccagatggctcctgacagcagcccactgcctcaagccccgctacatagttcacctggggcagcacaacctccagaaggaggagggctgtgagcagacccggacagccactgagtccttcccccaccccggcttcaacaacagcctccccaacaaagaccaccgcaatgacatcatgctggtgaagatggcatcgccagtctccatcacctgngctgtgcgacccctcaccctctcctcacgctgtgtcactgctggcaccagctgcctcatttccggctggggcagcacgtccagcccccagttacgcctgcctcacaccttgcgatgcgccaacatcaccatcattgag

SEQ ID NO: 8506 - DNA, 526 bp, Homo sapiens
cgttgctgtctgcaacagccacaggcagactgaggtggcaataggaaatctgccgagatgttcagtcaggtgcccaggaccccagcctcaggctgctactacctaaattccatgacacctgagggccaggagatgtacttgcgatttgatcagactacaagacgctctccttacaggatgagccggattctagcacgccatcagctagtgactaaaattcaacaaggtgagtggccggcagtggaaggctgttgctcattctgatttatgttggctctatttcatgctaacccagttttttttgtttgtttgtttccactttataacatatggatttctatgccacactacccgtaactttgaaaaataactttaagctgcagttttcagcaaacaagacagtccttagctgccacatagctcaacataaagtgcacaaaaaacttcacggtgggacagtgaatcataaattcccaaactgacgtgtgtctactgaacagatgagaactgttactcagtgtgtatc

SEQ ID NO: 8507 - DNA, 501 bp, Homo sapiens
taaatatcagtacaataaagaaagctagaaacataagtctaataatattggttggaagctattttaatgactatttaaatattttaaaggtgaatagtcaatgaaccaaacacttttgtaaggccactaagatgcatgtgtaatgtgtaatgcctccttttataaggagtcaatctgtaacatcacctgggctatttgacagcttcaaagtgaacgtgagaaggagagaaacagtgagagagatatatataaaaccagtaaaataaacataaagaatgaaggaaatatccaggcgccatggttcacacctgtaatcccagcactttgagaggccgaggcaggtggatcacctgaggtcaggagttcgagaaccagcctgtccaacatggtgaaacccactctctactaaatatacaaaaattagcctggcatggtggcatgcacttgtaatcccagctactcgggaggctgaggtgggagaattgcttgaacgtgggggct

SEQ ID NO: 8508 - DNA, 630 bp, Homo sapiens
aggctggagaatgccaccttctgaaatcaaacctagtaaaagtcaacacattataacaactatggtcataataactacaatttattgatcccttacaatgacaggctctgaagtaagcactttataccctttatcagataatgcttaaaacagctgtgtataatagtcacctatacatctgtatcaaaatatggaagctcctagggttgcaaaggtttcatctggggccaccagcctgtaagtatcataacaaaagttcaaatcaagtttctctactgtctgagctattgtctactaggctacatactaagctttgtctcttttagaggaaaactacagaaaaataaaccatcagataaaatcatttgtaaatatgtcactgatgttgacttgaaaaatatgtacttagaaatctaagagaccagggtataacctcaggtagacatgataggatcacatttgatagatatataacttcatttcaatgccttgggcatgaccaagttgtgcaattagtaaccagcaagaggtggagttgacttgaaagtccttgctggccgggcgcggtggttcacgcctgtaatcccaacactttgggaggctgaggcgggtggatcatgaggtcaggag

SEQ ID NO: 8509 - DNA, 590 bp, Homo sapiens
gtatacaaaagtcttttgtgtatttggtttgctaaaatcacctatgctgcatttgatttttgtacttcttacatttcttttaatctagaataatagagtctcattccattgcccaggctggtgtagtggtgcgatcaagcatcatagctcattgtagctttgatctcctggactttagcaatcctcccgcctcagcctcctgagtagctgggactacacacacgagccaccacacccaacctcctcccttttcttcttcatgccattgaggtgttgactaacgtatggtctctattagacaaacttacttatatccactaacttcgaggaatgactaatgggtggggatttcaggacaatcagaagtcagcaagaatgggaagacaaggctgggcatagtggctcatgcctgtaatcccagcactttgggaggctgaggcgggcagatcgcttgacatcaggagtttgagaccagcctggccaacatggtgaaaccccatctctactaaaaatgtaaaaattagctgggcatggtggcgcaggcctatattctcagctacttgggaggctgaggcaagagaattgcttga

SEQ ID NO: 8510 - DNA, 593 bp, Homo sapiens
atgcagccttccttcctgtctttggtgataaaaatatttttttttaagtattataaacactactattgttagcatgttctatactatttgacaaaatgttcttgttttcttcaagtggaggtttttcctagtgagagctatgtttggtcatgttcctctctcaggtgcctcagcaacctgaactcctccttcaagatgcattctatgtggcttggcaaaatagaattagcatagaatttgaaattctcaatttaaatttcacctgtgcaagtttctaactgtgtttaaacatgttatatgcactttgtaaatctgtttcttcatgaataaagtatagataataacaaaaaacaaatctcaagggatagtatctataggatcagatgagataataaattttagaaagtgataagcacggccgggcatggtggctcacgcctgtaatcccagcactttgggaggctgaggcgggcggatcacgaggtcaggagatggagaccatcctggctaacacggtgaaaccctgtctctactaaaaatacaaaaaattagccaggtgcagtggcgggcatctgtagtccctgctactcggg

SEQ ID NO: 8511 - DNA, 626 bp, Homo sapiens
tacttcttccttctagtctaccctgcacagccctcagagcttgaagaagcactgtgacacctgccgctgtttgcccttaggaaagatgccaagtttagaattggttttcgggtggtttcagcaaaacaatagcccacactgcctcctaagaagaatgactatgccaactacaaagagcactggagaaaaggacaattgttttatgtttccagtattcaaaaacttagcaaatggctgggcatggtggctcacacctgtaatcccagcactttgagaggccaagtaggatggatcacttgatgtcaggagtccgagaccagcctggtcaacatggtgaaaccctgtctctgctaaaaatacaaaaattagccaggcatggtgtaatcccagctactcaggtggccgaggcaggtgaatcgcttgaacctgggagacagagtatgcagtgagccaagatcaagccactgcactccaaatggcagcatagcaggaaggtttagagtatggatcctggggccaggctgctatatttaaatcccagccctggctgggcatggtggcttatgcttgtaatcccagcactttgggaggctgagacggatggatcacaaggtcaagagttcaag

SEQ ID NO: 8512 - DNA, 577 bp, Homo sapiens
gaacccagcatctaggaaaactcagcaggcttttagtgacttttccattcagcctcaatgcagaagaaaggcagtcttttgctcagaggcacaagaaagtgaagcatcaaggaaggaattctgaagaagtttttacaactttacatgcagctgggttttgtcagataaagaaggaagagaacactgcaggtgtaaagacaagatgaagaaagcaagaaggcgtggcgaacctatctggtacgaagtaagtagggcagtttaattaaagtgccagggaaaggtgcagaaaaagaaatccctattctggggcaagatttctcagtaggtcactcacatctcagttcatccagaacagtctcattttgtctctatcaacctggcacaatgattaatatctcctctttccgctcttgaaagtaactgggtttgggcaatatagtcattccactcaataggcaattcgagcatacagttagggcattaaaaaaatgcactcttggctgggcgtggtggctcacacctgtaatcccagcactttgggaggccgaagcaggcggatcacaaggtcaggagttca

SEQ ID NO: 8513 - DNA, 384 bp, Homo sapiens
atataccttaaagtagccactaaaataacaaaaccacgagttatacctaagaagctgacaaaggagataaagtggaattatatatatatgaaaaaaatttcatccaaagaaggcagaaaaagggaatatagaatagacaaaaagaacttggatccagatcaaacacatttaataaaaaagagaaatgaaaccatgtcaagccacctagttatattggggatgaacttagtcctgtttggtaataatggtagagtagttaatttttgccatcacaataaattaagtgaaaaagctgaagaacaatgttgacatcagcagtatttttgggactaacaaaggaaagttaaactataaacctaacactaaaagttaattgaagatatc

SEQ ID NO: 8514 - DNA, 344 bp, Homo sapiens
  misc_feature 142: n = A,T,C or G
cagtacaacagtaaaaaataatacaaattaaaaaaacccaatattgtataacaactatttacatagtattaggtattataagtaatctagagatgatttaaagtatttgggaggaggctgggtgtggtggctcatgcctgtnatcccagtactttgggaggccgaggagggaggatcacctgaggtcaggagttcaagaccagcctgggcaatatggtgcccaaccccgtctctactaaaaataaaaatataaaaattagctgggcgtggtggcacatgcctgtaatcccagctactcgggaggccaaggcaggagaattgcttaagtttgggtggtggaggtt

SEQ ID NO: 8515 - DNA, 604 bp, Homo sapiens
aaagataaatagtaccatgttaaggttgaataatttttttaatttacaaggaatctttaaaatcaggaataaatatttaattttattaattacttatcatcatctattaagctgatctaatgggtattttttctctcttggcctattggtggaataaattaccttactagatttcctaggttaaatcttatttggacatagattattgttctttcttttttttatttgtataaatgtatggaataccagtgtaattttgttacatggatatattgcatagtggtgaagtcagggcttttagtgtatccatcactggaataatatacattgtacccgttaagtaaattctcatcatccactcccctttcatcccctactcttctgagtctccagagtctattattccatactctatgtccatgtgtttatgttatgtagctccagtttataagtgagaatatgcagtacttgtctttttgtgtctaagttgtttcacttaagatattggactctagttacattcacgttgctacaaaagacatgatttcattcttttttatgactgaatagtattccatgttctatctatctatccatctcacat

SEQ ID NO: 8516 - DNA, 367 bp, Homo sapiens
cagagggatctagaatatctgccaaccacgttaccagcttccctcatgaattcaaacatcatctcccgcttctatgccttggtttcagcagaagcagcgctagtgctaactcttataggagagaatcccattccctggcctatagaagtcctttccctcaaagcccagtcaaccaccctcctcatttaaggattctagttttttcaagcattatagtctccagtcacctacataatatccctctgattggatggatctctgaggctgagaccactatattttccacaccatttttgagccccacccacctacctagcaagcaggtgttctagctgagccggagtaggaaaggcatggaagggagaag

SEQ ID NO: 8517 - DNA, 568 bp, Homo sapiens
gggagaacttgagaaataaagaaaacttcaaatgcttttaccaactagtagcatgcacttcttcatgaacactcagattaaaacttgattcacattctgagagtgactcaggagaggttgacaaagatctctctgttatttcgcagagttaaactctatgacactgcacaatccaatagactggccattagatatgagctaaaggagaaggacacatcacttagagagtttgttgttgtttttaaattgtgtcttgtgtgtataaattttctaagtttcaggaaacttattctgagtgtctttgagattgcaatctaaaaattatatactgcagtgaggccatggaaattgatatttcaccagccaggatcactaacaactgttgggccttcagctggctggaaggataaggtaataaagaggatagataaaagtggggctagccaggcgcagtggctcacgcctgtactcccagcactttgggagtccaaggtgggtggatcacttgaggtcaggagttcgagaccagcctgaccaacatggtgaaaccttgtctctgctaaaaata

SEQ ID NO: 8518 - DNA, 298 bp, Homo sapiens
actttttgatatcttacagtagatttttttagggagtagtgagcacatgaaactaaactttgactttagagaatatcagcacacaatgttcacatggtaatttcactctcaggaatttattctaagaaatagtgaaagatgcatagtgaatgtttgagagagacagaaagcaaaatattaaaaatatataataggtgaacggtaaagtaagttatgggtacttgtaaaagaaatattatgcagccattagaagtcagatttttgaaaaatatttaatgaaatgagactactgagtttt

SEQ ID NO: 8519 - DNA, 540 bp, Homo sapiens
tacctggtggggatgtatatcctggaggcagtctctccccctgtcacactctgaggacttacaatttttcacctggctcacagtgggtgtaggctgcagcctgctgcttctttcaaagggtctatggtttctgtttttctgttcagttcctgcattgcttcttagaaaaaagttcacagtatgaatttctactcaccattttgtctttccaagtgggagagtcatgctgacactgtttccaatccaccatcttgggaagaaaaacaaaacaaaatgtgatttttcttagcctatccacatggtagtttagattgattgattttcaaatatttaaacagccatgcatgcctgtaataaaccctacttgtaatcatttattactttatttaaatgtgatctcttttctttgaaatatatttaaaatagtctttgctaaatctattgtttgggattactcaaagatgatttctgttgacttgtttcctaagtaaagaacacactgctggccaggtgcagtggctcatgcctataatcccagca

SEQ ID NO: 8520 - DNA, 507 bp, Homo sapiens
aaagtcatcagattctttaccaatctggtttttttttccccctaaaacagggtctggctctgtcacccaggctggagtgcagtggcatgatctcggctcactgtaacctccgcctcccgggttcaagggatcctctcacctcaatctcccatgtagctgggaccacaggcacatgccgccacacccagctagtttttgtaaaaatagtgtttcaccatgttgcccaggctggtctcgaactcccaagctcaagcgatatgcctgccttggcctcccaaaatgctggggattacaggtgtgagccaccatgcctggtcaccaatctctttttatataaataaggctatctctggtcagcaccaataatagttttccagagataaccacatcctcatagctggcacttgtgaatacgttagattgcaatggtaaaaggggcttttgcagatgggactacattagggatcatgagtcaggagatgatcctggattatccaggcgggcccg

SEQ ID NO: 8521 - DNA, 339 bp, Homo sapiens
ggggtataaataaaacaaatacatttgaatacagttgaatatacaatatacaaaattttcttccaagtataaaacgaaaataaaatacactactttctttaatagaatagaacattgtaataatgttccattgcatttgaccctcacataaatgctatgaggtagcattaagagataagatttgaggctgggcatggtggctcatgcctgtaattccagcactttgggaggtcgaggtgggcagatcattaggtcaggagtttgagaccagcctgaccaatacggtgaaatcccgtctctactaaaattacaaaaagtagtcgggcatggtggcatgta

SEQ ID NO: 8522 - DNA, 472 bp, Homo sapiens
acaggatgtcaggacaagtgtatgctcccaaattgttgaaggaaatgttaatttctagagccttttaggaaaccaatctattaaaaccaaaaacatcttgtaactcagtaacttcatcactggggatttgtcccataatattaaaattccagtacacaagtacattttcaatgatatttactgcaacatttttcatggtagcaaaaaatggaaacaaagagaatatctaacaatagggaaaaggttatgtaattattgtgattcacaaatagaggattatgcagccattgaaaagaataaattacagctatactagttgatatgcagggattcctgcaaaggtattgagaaaagcaagttgcttaagtgtttatattatgatcatattatgatcctatttatataaaacaatgatgaaaatctctgttatatatatacacctacatgtatgcacatctgcaaaaatatgaaa

SEQ ID NO: 8523 - DNA, 449 bp, Homo sapiens
agggatcccagctccttgggaggctgaggcaggagaatcgcttgaacctgggtagcagaggttgcagtgagccgagatcacgccactgcactccagcctgggcgacagagtgacactacatctaaaaaaagaaaagaaaaagaaaaaagaaaacatttagctccaactggctgctaattggtcatatgtcaaacaacaaaaaagtatcttgttttgtttttaggtaaaagagatcaaacaatgtaaaagatttgatgcataatgtcattcttctagtcttaatacttcacctacaaataagcttatgacacctccccaccttctgttttaatcctgttctcgatactccttagaattcactcacttctcacgcctgtaatcccagcactttgggaggccgaggcgggctgatcacgaggtcaggagatccaggccatcctggctaacat

SEQ ID NO: 8524 - DNA, 536 bp, Homo sapiens
gttattggaaaagaaaatctatttgatttacataatgataaaacagtaaagaatgctgtgttcctctagttccctcatattgaggtatctaaaacccaaataaaaaatacatgaaaagcattttctcatcttttttaccttttaatcatttccctttagaacacctgtcatttctgtcaaaagatttttcataaacttagaattttattgcattattattttgagctttaagatggcaaattagaaatggcatatcttctttaaattattatcaaagcaaaagttcctacatatcagtaaggtaatgaataagaattatgttttttcctcatgatctccctattgtgcctattattatacagaacaaaaacaacaatgaaggctgggcgtggtggctcacgcttataatcccagcactttgggaggccaaggtgggcagatcgcttgaggtcaggagttcaagaccagcctggccaacaggtggtgagacccagtctctactaaaaatacaaaaaattagccgggcatggtggcgt

SEQ ID NO: 8525 - DNA, 472 bp, Homo sapiens
ggagtattgctgattgtgttaatttttatgcttatattccctaatatatatatgtatatatatatgtgcacatacatatttaaattatttccttgattaatcaaacattactaggattccataatatgaacgtattaatcctacttcacaaatagaacaaagtaagaggataataaagcaaaacagaagtttttcaaaacttcacaaatttaagataatttgatattgttagtgaataagacaagcacctaataaagatgtattaaatgtccaatatgtacttaatacaaaactatatgattctaatattataaaataagtaacttcaaataactcttcaagagctaatagcttatttattaaaataatattaaaatggataatactggccgggcacggtggctcaagcctgtaatcccagcactttgggaggctgaggcaggcagatcacaaggtcaggagatcgaggtca

SEQ ID NO: 8526 - DNA, 588 bp, Homo sapiens
gactccccaaacacagtttttccaccaacaaaaggttttcagtcctttaaattcatctaaggacataaactatgcagagcagtcaggatagaagccatgtgagccacaaacaacaaagcacaaattgcctccagtgggcatagagtttcagtgacttcatgttggctaaatataggcgaacacatggtgtgttgtgagtgccagggagaaccatgatgcaattatcccctccccttgatggaatagagaggaccagggtcagagggaagaatgagattacctaataaatggtcacgtcacggtcctcaactccactcccatccaagggttgcgcgcgcacacacacacacacacacacacacacccccaatacatgacaaagcaaacattatcacacagctttagaacaacatatttatcttctgattgtagttaaggataaattgctttaatattaaatttaattgttgtgattttctttttactccttattacataaaaaattcatattcaccatagaaaatttagaaatcagaataactattaatttttattgagcgttaatatatggcaggtattccctgtaat

SEQ ID NO: 8527 - DNA, 597 bp, Homo sapiens
tggtgtgcagagtgcagcggcacgatcttggctcactgcaagctgcaagctccgtctcctgggttcacaccattctcctgcctcagcctcccgagtagctgggactacaggcacccaccaccacgcccggataatttttgtatttttagtagagacggggtttcaccgtgttagccaggatggtcatgatctcctgacctcgtgatctgcccgcctcggcctcccaaagtgctgggattacaggcgtgagccaccgtgcccggctgccacaaaaaactcttaacagagaggctgcactaagggcttggccagctgaccccttcactgttctggtaaacagtcctgtgtcctggaagagtctcttccccatgaggcacgggtgcttccaaataccttgtgtctgacctgcttggccagctcatggtgaaaggtgcgggatgcagggaggaagtggggttttgattttgatatgtatttgggagtggggatttaccttgtgctcaacaccatggataacttaacctcctgaaaaatttaggcttaaaaaaaagtggaccaggcctggtggctcacacctgtaatctcagcactttggga

SEQ ID NO: 8528 - DNA, 485 bp, Homo sapiens
gtttcgccatgttggccaggctggtctgaaactcctggcctcaaatgatccggctgcctcggcctcccaaagtgctaaaattataggcttgagccactgcgcctggcctcatacaattttttactcaaactatttagtgttgtaaaactatattcctaaaatactgtcagatttcaataaacactggggcacactgttatcaccatttacacgaatctaacgcttaaccattgcaatgaatggttcattcaatcctggctcccaaatggacagaaataactccccccgaacctttccttgagaatgaaacttctataaggtgtgttcattgctagctacggtgaagttcattttagaatcacaagcccttggaacttcatgttaagagttctgcattcttggccgggcatggtggctcacgcctgtaatcccaggactttgaaaggccgaggcgggtagatcacgaggtcatgagatcgagacca

SEQ ID NO: 8529 - DNA, 422 bp, Homo sapiens
gaaataccaaaggccaattagcttacaaagagattttttacctcagtaataagaaaaaaaaaattaaaacagcgatgagatagatggcaaaaatcaaaatgattaataggagtctaagaaacactatacagaattataccaggcccagcatggtggctcacacctgtaatcccagcactttgggaggccgaggcaggtggatcacgaggtcagaagtacgagaccagcctggccaacatagtgaaacccagtctctactaaaaatacaaaaattagccggagtggtggcgcacacctatagtcccagctactcgggaggctgaggcagggagaattgcttgaacccaggaggcggaggttgcagtgagccgagatcgcgccactgtactccagcctgggtgacagagcgggactcttgtctc

SEQ ID NO: 8530 - DNA, 559 bp, Homo sapiens
ttctttccaactctcattccatagctttccctttttctgcaaactttctctgtaacaaatctggtatgagttattttgtagcatcctcaccgttactgaaggccactttgtctctggcctataataagcataggcttcaaccagaaatggcaagagtgagacctaccattcactaggtgtctactccaaataggtagtagtgcttagtgtgctgagtgctttacatgcagtatctgccactccacattgttttgaagtgtccagtgatttttgtgcactatcatgcatcccattcatccaggggaagcgaaatatatcatcagtactttagagatgatggatctgtatctctcattctgtttaagaatcccaaatcactaattaagattcccagactacttatgcccctctaggctctttcagaatgaggtgtctttagatcaggatgtatgttcattcaaatgcttaacctacccattcaccccttgggcttggttggagttggagcagcctttcaggctttcttattaagaaatttctttttcatggctcacgcctg

SEQ ID NO: 8531 - DNA, 99 bp, Homo sapiens
aaatatgcctctctactgttaatgatggcatgatttgaaaagcttaatttttttctttatgtatgtctacatctcttatattttaaaatgatgaacatg

SEQ ID NO: 8532 - DNA, 478 bp, Homo sapiens
tatttagagacggagtctcgctctgttgcccaggctggcgtgcagttcacgatctcagctcactgcaacctccacctcccaggttcaagcaattttcctgcctcagcctcctaagtagctgggattacaggtgcccaccaccacgtctggctaatttttgtaacgacaaaaatcacatgtaaccacacccaattacagcaaatgactgcaagaaactgtatcaaatttttttcttgttaatgtgtgctgcagacaatcttcagagaagtgacttatttctattggacttttcctggctaacattcctaagacagtgccatagctctacgtacctagatcaaagttgttggaattgaacaggaattctggtaaataaaagaactctgggataagttcttttacatctgccatattgtgctttgacgctgaataccaggcctcgcgcacactgtgaaacatccggtcagccaggtcaaag

SEQ ID NO: 8533 - DNA, 402 bp, Homo sapiens
aaattgtggttacactaatacaatttagaggagatcatcagtttgtcacaggttctcaagacatgaaaatccaccagagaggctctattagactcaatgcatcatttcacggaaggacatgtagagatccttcacgagaaaatcacttctttccttctttccttcctcttttcttttcttttcttcttttcttcttcctttctttctctttctttctttctttccttctttctttctttccttctttctttcttgacagagtctcactctatcgcccaggcttggtgtgcaatggtgctacctcggctcactacaacctctgccgcccaggttcaagcaattctcctgcctcagcctcccgagtagctgggattacaggcgcctgccaccacgcccagctac

SEQ ID NO: 8534 - DNA, 307 bp, Homo sapiens
ctttgctaaatgtttgcaatttctaagtaaaccttttatctcctaaaatgagtgttaagtgtgattttgtttttacttttggtgctttaaacttgagtctagtctaccaagctttccattttatttgctttgatggtggtaggggggtggaggtgtgaactgttgtctaaatgaaaccaataattttatgacctacatttgtagaaagaataaaaatgccactatgtctagaacataaaagaaatgtcaaaaacaaattagagatatcgccacagttgtttttaaattgtattaacagtgactaatt

SEQ ID NO: 8535 - DNA, 535 bp, Homo sapiens
agtcaataaatggaaaacaaatgagtttctgaagtgtcttcatcaaataatagaattatggccagtagtaaaaaaaagaaaaaagagttatggccagtaattacaatataatttataaagtttctagtcactccttcactgatagaatacagtaatatgtaagcacgaatgtgtttattaatagcctgttgatataatttatgaaaaaagtacagagtttacaacttttttttgaaattggctcctgagtaataaaaagtttcttgacattgattatctaatgagagctaagtatgtgaattatctaacagagttcaatattatttgggaataggttttagagcccttttaagttgaaaattgagaatgatcaaaacattcctaattctcttaaatcaccagtaaaatacgtatcactttatgcatagccttacaccttaatatgcatctaaagctgggcgcggtggcacatgcctgtaatcctagcactttgggaggctgaggcaggtagatcacctaagggcaggagtttgag

SEQ ID NO: 8536 - DNA, 78 bp, Homo sapiens
gaacagggcacgtgctttttccatcactatcccatgctccatggtggctgaatatatgacaagtgcttgtcatccctg

SEQ ID NO: 8537 - DNA, 437 bp, Homo sapiens
ggagctggcagggcatggtggctcacacctataatcccaggactttgggaggccaaggcgggaggatcacttgaggtcaggagttcgagaccagcctgaccaacatggagaaaccccgtctctactaaaaatacaaaattagccaggcacagtggcgcatgcctgtaatcccagctactcgggaggctgaggcaggagaatgaaccctggaggtggaggttgtgatgagccgagattgtgccattgcactccagcctgggcagcaagagcaaaagctgcttttttagtttatcttacctgcctgatctctatggggttagagtctgtgtgtactagtgcacataataaactcaaaagcaaagatggctagaaaatgatggttattatgtattggctgacttatttgacactcttaattatttgtcctgtggggtcat

SEQ ID NO: 8538 - DNA, 125 bp, Homo sapiens
gttcatccatgttactgaaaacggtatgattatctctttttttaatttttaaaattttctgattgagtaatatgtatttgtattttatgttattcgttcttgaaacaatggctcactctgtcacc

SEQ ID NO: 8539 - DNA, 291 bp, Homo sapiens
gagttttattctctcggacaagatgaaccaggaggactctagacatggatcagcaggcacactgatgatgggaatgtgttactgaaaacaaagagaagtaaataaaaatctacgcacggagcagtgatatctcagggtcccttttcctattcatgaactctgatagatctggcctgtgccccttccccacaccaattaagaaattgctgaatttccctctgacagaggaaaaaaaccaacttacccatggaacaaaagcccatgaaaaaaagacttaaagatttttaccac

SEQ ID NO: 8540 - DNA, 454 bp, Homo sapiens
ctgagctccctttgctggcctaggaaaagctagctggccaaaatggtctcagttttcaatgggatgcagttggacaagagaggatgcatcagacaagatcagtttgaccttggctgcaagaaggagcagaaggcaaatgctatcttccccagtgaaaaacatcactagccatccagggaggaaatctggttttctcaactggagaagatagctacagttcaaaagtttagagtcttcttcgtgaatacagttcctggcatcagttgagggatcagcgtagataagtggaagttcccacttatagcatgtttgatttctttcccccaatgcagtttattacctctaagtttatcctgtagctcaactcggactaataaagttttctctagtacagaaggtccatagaggatctactttattagtttaagtgggttttaattagtcaattagagaa

SEQ ID NO: 8541 - DNA, 482 bp, Homo sapiens
ttaggactgccccccaacctccttattcttggagcctgggcacacgcacagctgggtggcccttcagctgatactgccttaactgctttaactctgcctgctgtgctgtccaggcttctgcaaatagcccaggtgtggccatcctccagaggcctccaacattaactgtgaagggcccggaataaaacctagtattagtaggccaggcgcagtggctcacgcctgtaatcccagtactttgggaggccgaggcgggagaatcacctgaggtcgggagttcaagaccagcctgaccaacatggagaaaccccgtctctactaaaaatacaaaattagccgggcgtggtggcgcatacctgtaatcccagatactggggaggctgaggcaggagaatcgcttgaacttgggaggcggaggttgcggtgagccgagatggtgccactgcactgcagcccagggaacaagagcgaaactctatctc

SEQ ID NO: 8542 - DNA, 543 bp, Homo sapiens
cagcctgggcgacagagcgagactctgtctcaaaaaaataaataaataaaaataaataaataaaaacaatgtggttgaaactcaaggactgagtcttataagctctggagttgccagtgcacataccttttgtccattgcttataaaggttgccagattttagccgggtgtagtggctcacagctgtaatcccagcactcatccacaggctgaggcatgcggatcacaaggtcaggagttcgagactagcctggccaacatagcgaaaccccatctgtactaaaaatacaaaaattagccaggcatggcagcgcgtgcctataatcccagttactcgggaggctgagggagaatcgcttaaacccgggaggcggaggttgcagtgagccaagattgcgcaattgcactccagcctgggcaacaagagcgaaactctatctcacagacacacacacaaaattacaaaagcagaagctgcagggcctcttgaggcccaggctgagaactcccacagtgctactggtcaaagcaagtcacatgatc

SEQ ID NO: 8543 - DNA, 545 bp, Homo sapiens
tgtcaataccatcaatttactttgatttggttttttttttcttttcatgactagtgggtttgtacttggccaaaatgctctcttgagttgcagtcaaggccactggatttacatgtgctatctatgttagaagtatcacatgtgatcatgaagcagagagcaaggggcattatttaccatgcataccagacaaagcatcatttcttgttcactgtaagacagtaacgggaaaggtatgacctgtgaacactgcttataaagtcaattctttatatcatgattagcataatcacatttctcccctttcagaactcatttatctgctaatatatatctatacagacatacgataaatacagaaagactggatagactatctcaaagaatatagaactactgataaacaatacattgcaaagcaagtatgcaaatattttaaaaagtaactgtgtgtctataggatgctaaaaagaagcttctgagaaaaaaagagaaatattttagcaaccaagctaaattttagcacagaatttttcaagttacaa

SEQ ID NO: 8544 - DNA, 493 bp, Homo sapiens
gctgtcgcttcaattaaggaaagaagcagccccataagcatttttgtttgtccgtaattggccctattgcagaaagaaagaaagaaagttgccctcaaatgcgtgagacagcatggcaggctagggtgtaacagatgagttctgagcagggaaggtgaatgaagcaagtggatccttggaaagataaggtaaagaaaggatgttagttggaaactagcaatcaggaaggtcagctgctgcctggtctaggtagagtggcagggcagaggagggcttggctggatatggtaactactgctccatggatgggtagtgacagtccttgactcacgcttcagtccttttctccccaggcctaggacaccttttctctgtgctacttgattcatctctatgttggatttatttttgagaatccagaaaacctttaggctgactttattttaaaattgagaggagggcatagaaaacttcctttcttgtcattagcaat

SEQ ID NO: 8545 - DNA, 498 bp, Homo sapiens
gctatttaatgaatgttcactccatgtcaggcatgtggcatgttttcatctctaccagtaacgctgaactttcttcttgtgtgcatcagcctgttgttttcttttgtaaatgttctgttcgtgtccattatcaacttttctactagggtgtgactgtttctatgatatatttataacgatgtgtgtgtgtgtgtgtgtgtatacgatatttggggtaaatacttttcccagcttctttgacttttaattttgcttatactttattggaaatacagaacctttattttattattattattatactttaagttctgggatacatgggcagaacgtgcaggtttgttacataggtataaacgtgccatggtggtttgctgcacccatcaaaccaccatctacattaggtatttctcctaatgctatccctcccatagtccgccacccaccaacaggccctggtgtgtgatgttctgctccctgtgtccatgtgttctcatg

SEQ ID NO: 8546 - DNA, 552 bp, Homo sapiens
gaaagtatgcttgggagaggccaagtgagtggggaatcagcccaaagccaggcgtccagggtctccctcacctgaagctgactttttccccaccttggacagagggcgggagatgccatccccactgaacccagtgctttcaccagccatattagctcccactcaccccccgtcgtggaagcctcggccgtcacacctgcagggccggggcgtgcatggcctcagggatggcctgttcagctgctgggtgactcgggtccaggtgcctcaccacctgctgagctctgtgtgatttctggacacttctgctcgttgcctttgggctcagtgaagagtctggagtttatctggagtgaggtggccggttcttggtgggatctgagcaggtggaggcaatgcccagagctgtggcagccaccttgcagccgtgaagcaccagtgggaatgacagtcaagagaaccacggagatgccagcccctggacccacagcagcagcacctgcttccagactcagagtgtgagaaaaaaataaactcctatttgtttatggc

SEQ ID NO: 8547 - DNA, 420 bp, Homo sapiens
atgatggctgggggaatcgtcatgactgccaatctcaacatcaattataaaagacctatccctctttgttctgttgttatgataaatagccaacttgataaagttgaaggaaggaaattttttgtttcctgtaatgttcagagtgttgatgagaagaccctatactcagaggcgacaagcttatttataaagctgaatcctgctaaaagtctgacataaagagctgctggtgaactccatctcattctcgcccctccagaagaagcagttgtcccccaaatactctgctccctcactgctgaatccctgtagggagaagcctgccaacagtgaccttccgaaacagccttctgaatacaaagaggattcagtttccatcttctcaacttgttaacacagaaacacttcctgcgagcatat

SEQ ID NO: 8548 - DNA, 370 bp, Homo sapiens
ctgtggatggagttgagagataccacctcagaataaagagctaagaatcacagctattcaaagatggattagactgctttgggacagtgagttcttatcaccaggaagtattcaagcataggttagcaattgctgggtggatattgtagagaggatttgagatttagtttgcaattcaatcacctatctttaacatcctttccacgccgtagattttatggccttctttcattaaatgaaggctagaagggacattgaaataatttggtactttcctttgcctccagagagaagagaaaaaatatgatttctcctataaaatagcaattgaggtgtgagcctaatagtcttttttttttttttttaaaac

SEQ ID NO: 8549 - DNA, 631 bp, Homo sapiens
accccaaccctctctcatgttcagtctgtctaatacatgccagagatttttttttcaaaaagtgctttatccctacaatgtactgacagttcttacagttgagatttgttcttttcagctattgcttgtgaaaaaaagcaagactatgtcactctatagaaggctgttaaagtgactcaggcaggaattaattattctgtacctaaggggttacttgtttaatgggatggcattgactttttgaaaatcaagtggactgagtcattgataaaacatttctaagagtggggctagagaacatattttacatctgacatcctttggcctaacaacatctattattatagtgctcagcagtgtgggcattgaagaggcgcagaatgctttgaaagaaactaatcagaatcttggaacatcatgatcatgccattcttaagtaaatcaactattttcaacactgaagaaaaatgaaacattatttagaaaacaatgagattacaagttccaaactcagccaggaatgtggctcacacctgtaatcccagcactttgggacacctaggtgggagcatcgcttgaagccaggagttcaagaccagcttgggcaacgtagtgagacccctatctctac

SEQ ID NO: 8550 - DNA, 236 bp, Homo sapiens
ttttaaaatattattaaaggaggtttgaaagtattgacatttaaaaagtcaacacttagattaaatttagctggtagttttaatttgggttttagttaagagtgtgaggacatcaggaaaactgtttactactttggttttagcagctcagttttactattccataatgtgttatttttaaagttctctttttaagatcacagtgatatcctatcttcaaattttttaaatatgtt

SEQ ID NO: 8551 - DNA, 507 bp, Homo sapiens
accagatacacatttaaaagagaaaaaaggaacagaaacaagtcatttgagagtggagacttataagaaggagtacatttgagttgaatacacaaatctttacttctctaccaattcctattcccaaaatgaacatattactggggaaagttagttgagaatcagagcatatgttattggggaaaggatatgtttattgacacataatctgtaccaggtatgcattaaaatatatttgttaatttaatatttaaacctgagagataggtattgtttcccagatgaggacaatgaggcaaagaaatatcaagtaacttgccaaaggttacaagatattcattccatggatgcacaaagaagtgcatctagttccacagctgattatggttgtcttgcttttcttcccattgcaccagcttgtcctccaaaatcatgaatgatacacatgaagataactttttttaaaaaaaagcagaaatacacaatgatctcccttgtaagctccta

SEQ ID NO: 8552 - DNA, 624 bp, Homo sapiens
caatttctgagtctctttctatttaatgccaccaatttctgaggaactagagtgcagagtggattgcttttcagctttttctattaggattcagatagctttttaattgctgctaatatatttgtcattcatattgcttttttgttttcaaaattcagttaatattttttcttctcattcattttgactttgtaggttcatgccatttgtaaaaccctctttgttgtctttttattggaattttgagagggagttaaatgtctgtttttaatctaccatctttaaaccaaaattccagctatttaatttcagcatgaagaattgcattaaaaacagagcagtgaatcattttatgaataataatgctggattttatttttaaaaattatcctagcctaaaatgtttaggatcatcatagcattaagagagatttatatttggtaagaaatcaaaaacatcgtcagttttcatgcttaaagtatttaggatcataatagcattaagaaagatttatatttggtaaaaaatcaaaaacatggtcagttttctagtggaaatttttcatggcactataaatctttagtaacaagattttctatgtttagtctttgtatatctttttt

SEQ ID NO: 8553 - DNA, 318 bp, Homo sapiens
attgccaacagaatactaacatttttctctttactccttttcctccaggtcctcatagataatttattgagcaatctgataactaaatttgagttatgaaactaatgcttaagagtattttctatttcatttcttccagatatgttggtaagacccgttcatatttgtttccaagtcataaagaccaaatcatgtttacagggtcataaaggagataacttcattttgagaatattttcagttgtgtgtactctctgaaaagaagattaattctatgtgatagggaccagtgtaatttttaaacactaattgggcttg

SEQ ID NO: 8554 - DNA, 455 bp, Homo sapiens
gtcaagtacttaagaaagaggaagatactcatccagaaaataagaggagcagggccaagagaagtgacagctgtgccccctcctgactgtaggagaacagaggctgtgtaggggaaggagggacctagcaacagaagatcatctgacagatctgagcacttagaaaagttgttaggaggccaggtgtggtggctcatgcctgtaatcccagcactttgggaggctgaggcgggtggatcacctgaggtcaggagtttgagaccagcctgggcaacatggagaaaccccacctctactaaaaatgcaaaaatcagtcgggcatggtagtgcatgcctgtaatcccagctacttgggaggctgaggcaggagaattgtttgaacccgggaggggaggctgcagggagctgagatcacgccactgcactccagcctgggtgacagagtgagactctgt

SEQ ID NO: 8555 - DNA, 256 bp, Homo sapiens
ggcacgaggcttcatccagccaaagaggtcgttgtggttctggaaactttggtggtggtcgtggaggtggtttcggtgggaatgacaacttcggtcgtggaggaaacttcagtggtcgtggtggctttggtggcagccgtggtggtggtggatatggtggcagtggggatggctataatggatttggtaatgatggaagcaattttggaggtggtggaagctacaatgattttgggaattacaacaatcagtcttc

SEQ ID NO: 8556 - DNA, 316 bp, Homo sapiens
cagatgccagtcacaagtcccaggcctctcatacttctgaccgactggctacaaatcaggggttcccactacctcctcagattagataatttgctggataaaactcaggaaaacattattattaagggcacaactcagcaacagcccagtagaagaggtgcacggagcaagcacggggggacgtggagtttctgtgccctcctagggtggcctcctgcccagctcacccttgtgtgtgcaaggtccccgaatcttgtagttagagtttctgtagaactcaatctctaatcctttccttttctcttcatttctcttc

SEQ ID NO: 8557 - DNA, 490 bp, Homo sapiens
gctgagcgccgtcctcaaggatctctaccacctgctgaagcacgtagtgtgtctggagcccgatgacgtggccaagctccatgcccagttggccctagaagagctggatgacatcatgaaaaacttcctgttccctccacagaagctggagaagaagatcatggtcctgccgtagacctggctccaaggacgtggaggaggcaggcagggccaggcacccagagccgtgcccaggtcttccagcaggtggccctgctgcctcttgagtgctggcagcatggctgaccctcggggtggttttatggtgcaggtcacttgggtcttcagggtcccttccgagggcatgtgttcagcactcccgcgttcagcctgaggggtgtacagttaagagaagacagttacagatctcattaatctacatttttcactgtcctctagcattgaaagaaagatgtctacctggtgaaagtatattttaacatgactgatg

SEQ ID NO: 8558 - DNA, 459 bp, Homo sapiens
aatgaccatggcacaaatttatttaaagctgaaatacttcacttctattaaagcagttggctgggtatattgtttttgctgaaattattactctaggaggtaaatctaggctttatttactactttgggaaagtacatttaaaggccatgaatcagaaactaggttacaaacgttaagactcaaaggatctgtatactgaggcctatatttccatgaagtggttctctactctcagcaaatctagtattgctgaatgttgtagcattataagcaggaaaatcatcttactgcacataatctatccccacagaaacctatgacatttaggtattatgcaggcatgtgtcttcagttggctgtctccttattttaaccatgtgtccctataaatacttcagatccaaaaggttttttccacacttcgttataaaaaagtactaactagcacatatctgcat

SEQ ID NO: 8559 - DNA, 269 bp, Homo sapiens
ggcacgaggttggccttttgtatacagatgtttacatgcaggaagtgcctgtgatgaattttggtttggtcacatgagttttatatgcatgcgcatttttggatgccaaacacatatgcagatgaaactaagaagccatatgctgagatcgctggcgatgaattgaaactagcctaactggctgcactgctggagtcatttgctcaaactactgcaaacttttgtttggtctactgaaaacattaatcggaaaggtacagagttaattt

SEQ ID NO: 8560 - DNA, 300 bp, Homo sapiens
gatgcacgggcactttggaggaccgagcggccactctgagtaagatcatccaggtggcggtggaactgaaggattccatgggggacctctattccttctcagctctcatgaaagccctggaaatgccacagatcacaaggttagaaaagacgtggactgctctgcggcaccagtacacccaaactgccattctctatgagaaacagctgaagcccttcagcaaactcctgcatgaaggcagagagtccacatgtgttcccccaaacaatgtatcagtcccactgctgatgccgcttgtga

SEQ ID NO: 8561 - DNA, 271 bp, Homo sapiens
tgggcaagttaaatagtcctaattgtccctgagttgttagagaatgtttgtgaaccactcagcacagaccttgacagataggtttttgttttttgcttttttgaagtacatgatatagacaggaacacagatttttaaatggtagctgttactaagtgtgggagagagctttgactctggcagtttgggatggcctttcaaaattgacaagtgtggttgtaagggttagagagtaaattggtgatgaatgatacactactctttggagaat

SEQ ID NO: 8562 - DNA, 377 bp, Homo sapiens
aaaaaataaaaacacattataaagggggcaatccagatggccagtaaaccattgtaatagccagaaattggaaacatatattcattgacaacatttaagattataatatagtcatataatagtcctgatataacaatggaaataaattacagctacacacaacataatggataagtcttaaaaagccacatgtacagaatacataccatgtgattctacttctgtgaagtcaagaacagacaaaactgaaatactcatgtaaggatgcacactaaggtagtaaaactataaagcagagcaagagagttattactataaaagctctgtcgagggacaggagttgcaattaggaatatacagggaattctgtggtgctg

SEQ ID NO: 8563 - DNA, 264 bp, Homo sapiens
  misc_feature 236, 237, 239, 245, 246, 248, 251, 254, 255, 257, 259, 262: n = A,T,C or G
ctgcactgtgaacctgggcactccgcgccgatgccaccggcctgtgggtctctgaagggaccccccccaatcggactgccaaattctccggtttgccccgggatattatagaaaattatttgtatgaataatgaaaataaaacacacctcgtggcaaaaaaaaaaaaaaaaaaaaaaaaaaaaaaaaaaaaaaaaaaaaaaaaaaaaaaaaaaaaaaattaaatataatttaatannanaaaaannanaanaanntntntanat

SEQ ID NO: 8564 - DNA, 523 bp, Homo sapiens
cctgacgcccaccttctatggtgccatcaagaacctcggcaccaaccaatgcctggatgtgggtgagaacaaccgcggggggaagcccctcatcatgtactcctgccacggccttggcggcaaccagtactttgagtacacaactcagagggaccttcgccacaacatcgcaaagcagctgtgtctacatgtcagcaagggtgctctgggccttgggagctgtcacttcactggcaagaatagccaggtccccaaggacgaggaatgggaattggcccaggatcagctcatcaggaactcaggatctggtacctgcctgacatcccaggacaaaaagccagccatggccccctgcaatcccagtgacccccatcagttgtggctctttgtctaggacccagatcatccccagagagagcccccacaagctcctcaggaaacaggattgctgatgtctgggaacctgatcaccagcttctctggaggccgtaaagatggatttctaaacccactgggtggcaag

SEQ ID NO: 8565 - DNA, 234 bp, Homo sapiens
atatccacgtctcagtcggtggatgggtaatgggatgcccgcttcccctactccagatgattgatgaagaaatggaggtgtatggagatgaggtgacttgcccaggatcagagctttaagtgacagaggcaatattggaactgaggtttccctcattcaaaagccagtggtgcttgtttgcactgccacactggagcagactaactgagaccgctcttgatgggtccttttcta

SEQ ID NO: 8566 - DNA, 300 bp, Homo sapiens
gggacccagtggacttcttcctgctggtggtggtagtagggatggtactcatgggcattttcttcagcactctgtttgtcttcatggactcaggcacctgggcctcctccatcttcttccacctcatgacctgtgtgctgagccttggtgtggtcctaccctggctgcaccggctcatccgcaggaatcccctgctctggcttcttcagtttctcttccagacagacacccgcatctacctcctagcctattggtctctgctggccaccttggcctgcctggtggtgctgtccataatgc

SEQ ID NO: 8567 - DNA, 573 bp, Homo sapiens
agcatctttcaggtcatccggagctgcaatcgaagtctggagacagacgaggaggacagccccagtgaaggaaacagctccaggaaaagctccttgaaggataaaagccgatggcagtttataattggagatttgttggattcagacaatgacatctttgagcaatccaaagaatacgactctcatggttcagaggactcacagaaggccttcgaccatgggacggagctcatcccttggtacgtgctgtccatccaagccgatgtgcaccagttcctgctgcagggggccacggtcatccactacgaccaggacacacacctctctgcccgctgcttcctccagcttcagcccgacaatagcaccttgacctgggtaaagcccacaactgcctccccagccagcagtaaagcaaaacttggtgtacttaataacacagctgagcctggaaaattcccactactgggtaatgctggattaagtagcctgacggaaggggtcttggatctttttgcagtgaaggctgtatacatgggccaccctggcattgatatacacactgtgtgtgttcag

SEQ ID NO: 8568 - DNA, 420 bp, Homo sapiens
tctctagtttgagacaaagagaagcgaagtaacaaaaggccacataagtgataaatagtggacctggagtttaaacctgggatccccacctaaatcagaaatacaaaatcaaccacttttttgatgatccagggtctatgtatatttattacatgtatgtatatatgtatatatatatgcatgtgtatatatgtacatacatacatatagatgtgcttgtactagtgtttttcccaccagatagttagcctttcttctccccttgctcacttttttttttttttttttgagatgaagtctcactcttgtcccccaggctagagtggaatggcacgatctcggctcactgtaacctccgcctcctgggttcaagtgattctcctgcctcagcctcccgagtagctgggattacaggtacct

SEQ ID NO: 8569 - DNA, 495 bp, Homo sapiens
gagatgcctacagctgagagtgaagcaaaagtaaaaaccaaagttcgctgggaagaattgcttaagacccacagtgatctaatgcgtgaaaagaaaaaactgaagaaaaaacttgtcaggtctgaagaaaacatctcacctgacactattagaagcaatcttcactatatgaaagaaactacaagtgatgatcccgacactattagaagcaatcttccccatattaaagaaactacaagtgatgatgtaagtgctgctaacactaacaacctgaagaagagcacgagagtcactaaaaacaaattgaggaacacacagttagcaactgaaaatcctaatggtgatgctagtgtagaggaagacaaacaaggaaagccaaataaaaaggtgataaagacggtgccccagttgactacacaagacctgaaaccggaaactcctgagaataaggttgattctacacaccagaaaacacatacaaagccacagccaggc

SEQ ID NO: 8570 - DNA, 472 bp, Homo sapiens
ggcacgagactggttaaatagcccttgatgacttttcatgtggcatgagagggatatgcttataaagcttaattctgatattatcctcttactacctacagtatgttttgcaaaaatcagtccacttagcaaactaatctttgtaaagcagtcagtttcagaagatactttttatcaaaaaagatggcaggtttaacattataccttttggtttttgcccaacatttgatttaatctaaagcaagaatataaaataattttaagaagcatataatttcttttgataaaaagtaacaaaaatttaatgcagatcaaagaccaaggcttgtaaccaaaacaagcaaaaagaaactttagctgtttaactatcacctctctaatttaaaatgcatgaaaattaatactttgtttttgtttttttttggaaacagtctcactctgtcacccaggctggaggtcgcagtgagctgag

SEQ ID NO: 8571 - DNA, 577 bp, Homo sapiens
aaagttgagtatttatatgtgccagtgtgtatcatgctgaatactttatctggatggtgttatattatccctcctatagactattgagttgagtactgttattagatccattttacaaatgaggaaactatggagagattaagtaatttgcccaagatcccataataagaaggcaagtgtcgaatgccaggcattctaacttcagagtccatagtcttaacccttgtgctattctcttccacaaatacacccagcaggtaaaagactgagaaaaataaatatcaaaaagtaccttttgaaattgactacatgaagttacgaaaacctgagttgttttgtgaaagcggtgagtacaaagcagtattttggagagggttgtgcagggaatcggagatgaagctgtgtgctgaaaaggagagaagaaattagaggaagggaatggtggccttacagagaaacagacttgaagtgatgtgaagtgtttgcgctgggtgaatgctggcaggaataagtgagcagggagcgagtgaacaggataagagagatcacttcggagtaaagccttgaaaagggagtg

SEQ ID NO: 8572 - DNA, 563 bp, Homo sapiens
ggcacgagagtaaattcagtgtttctgttgccgaagagtgtttattggttctttcactttcatttcatagggccctttcttctactggcattctcactttgaattactaagaagtttcttctaatatccctctatctcctttttctttctagttttagataaagctgtcaaaagaacagttatcatagaaatagaaacatttaaattaccggcacgatagcttatttcttgctgcaaccattcagaatatctatttgtcactgccttgggtgctttgaagtgaaactgtgcttagatataaaaagtttaaaactcactttgattacatgttaagctcacagtttttacactgcagttcctgaatttagttccatcaaaactgtatgactaggccacatgtgatggctcatgcctgtaatcccagcactttgggaggccaaggcgggcggatcacctgaggtcaggagtttgagaccagcctggccaacatggtgaaaccctgtctctactaaaaatagaaaaattagctggatgtggtggtgcgtgcatgtagtcccagctac

SEQ ID NO: 8573 - DNA, 300 bp, Homo sapiens
cgccgcacagctgctgaatgccttgggactagctggtgattacctcgcccagggcctgaagctcagccctggccaggtccagaccttcctgctgtggggagcaggggccctggtcgtctactggctgctgtctctgctcctcggcttggtcttggccttgctggggcggatcctgtggggcctgaagcttgtcatcttcctggccggcttcgtggccctgatgaggtcggtgcccgacccttccacccgggccctgctactcctggccttgctgatcctctacgccctgctgagccggct

SEQ ID NO: 8574 - DNA, 509 bp, Homo sapiens
gcatattttttctttagaacaactagaatatagccgggaaggattagtgtgggaagatattgactggatagacaatggagaatgcctggacttgattgagaagaaacttggcctcctagcccttatcaatgaagaaagccattttcctcaagccacagacagcaccttattggagaagctacacagtcagcatgcgaataaccacttttatgtgaagcccagagttgcagttaacaattttggagtgaagcactatgctggagaggtgcaatatgatgtccgaggtatcttggagaagaacagagatacatttcgagatgaccttctcaatttgctaagagaaagccgatttgactttatctacgatctttttgaacatgtttcaagccgcaacaaccaggataccttgaaatgtggaagcaaacatcggcggcctacagtcagctcacagttcaaggactcactgcattccttaatggcaacgctaagctcctctaatcctttctttg

SEQ ID NO: 8575 - DNA, 352 bp, Homo sapiens
gcttatcctagagaataactctgtatgaataaaattgcttaattgagtctcttactaaataagtaactagtgccatgcttttgtgagctcttggtatggcccatattaccttgttttttgtttttgttattgttggtttgtgatagacttgctctgtcgcccaggctgcagtacaatggcacaatctcagctcactgcaacctcttgctcctgggttcaagcaattctcctgtctcagcctcctgggtagctgggactacaggtgcatgccaccatgcctggctaacttttgtatttttaatagagacaggggtttcacacgtttgtcaggctgggctcggacttctaactg

SEQ ID NO: 8576 - DNA, 177 bp, Homo sapiens
gtaaatacatttttcttttttatgtaattaattaaatcagggatatagatttgatctgtaatttgggtataattctaatctttgctgaaatcacatctcaagtataatgaggcaactttatgcaaatgtacttgttgtgacaacaataacattttccttttttttttttttttaaaa

SEQ ID NO: 8577 - DNA, 392 bp, Homo sapiens
  misc_feature 326: n = A,T,C or G
cgaattcggcacgaggctcatcctgcatcgctcggtgtctgggctgaagcagacactgctggcggagtccgaggctctgaccagctacagccaccgggtgttctcggcctgggacttcggtctctgcgggacgtccacgtgcggctgcgccagcgcatcatcttgtacgaattaaaggtggagctggaggagacagtggtgcggcgccaggctgcggtgcggacgctgggccagcaagccagggtttggttggtgcgggtgctgctcaacctgctggtggtcgcgctcctgggggcagccttctatggcgtctactgggctacggngtgcaccgtggagctgcaggagatgccccttgtccaggagttgccactgctgaagcttggggtgaa

SEQ ID NO: 8578 - DNA, 390 bp, Homo sapiens
ggcacgaggcggggcacagtggctcagtcctgtaatcccagcaccttgggaaggccaaggtgggaagatcacttgaggctaggagtttgagacaagcctggccaacatagcaagaccccatctctacaaaaataaaaattttaaaaagggctggggcatttgagctgggtcccaacagtagacaagtagaaaaggcatggagagggcataccaggtgggaggagctgtgtgcaaaggcctggagatggaaaagcatgctggccaccagcttctgacaagcagtttagtatgaacggtatgcagggaaagaaggaaggagggcagaagggtgcgcacgaacacccgttagtgtccttaaatgaccagcatgggaacctggtctctttcctg

SEQ ID NO: 8579 - DNA, 573 bp, Homo sapiens
tgatactgagaaacaagtaatgaagcttaaaagtgctgcttgtgctctgtgccaaaggcagcagagcacttgtctctggtctccatatacacttgacatatttaccttcagtattctgagtaagattttgattcatttcacacggaataacactcacctaccatgcttaaattaccgtacatattgtgagactttattgatcataaataagttactctcaaccttgagatctggcttcaattttctgtattctcattctttctcctttatatcagaagcttcataatagacaatgggggcaaatatggtgtggagaaataatcagtttatatttagatatttttaatgtagttatcacttcctaaaaagctaggaaaaagctgaaatagatgaaatagccacgcaccttcgtttctagcctcctttaggtatctgcccaaatatattctatactatgtcttttctgaccatagtattaaaaattcaattttgggccaggcacggtggctcacgcctgtaatcccagcactttgggaggtcgaggtgggcggatcacgacgtcaggagattgag

SEQ ID NO: 8580 - DNA, 491 bp, Homo sapiens
ggcacgagaagcccgccacccactgtgggactttctggtgggctcctcagctcccaccccaggctggggcccagattgtgaggtctgtgtgcatgtgtgtgtgtatgtgtgtgtgcatgcgtgtgtgtgttgtggggatctggcctggcccttggggatggggctgctggggactgccccccttcccgccgtggccaggcgctctgtgtgctgtgtgtgccccaggctctgttgaccccgtccaggaactaacttacccagcttggtctctcctgagtcctccaccctggcctgggattggccagggagcagggcgggcattgggaccagtgtggagcctgagggtgcctgccctgctctggagggagggccaggagctgccacacccccaagtcctctcagggcccaccctcctttttcagcctctgcataaggcccctgggtacactgcagaagccccatccttcccgcctccgggcataaggcccctg

SEQ ID NO: 8581 - DNA, 386 bp, Homo sapiens
ggcacgagattggggactgacatcttaagctctcacctggctgcagtaggaaaggccaaactgacgacaaaaaaaaaattctttataaagatgatatggtaacatgtatctttgccctgggtctgggtgggtccagtcagtctcaaatttacaagcatttaggaccctaggtaaaagctgctagtattcttttaaaagttatatttatgacttgcaatgataaaaaactccttccaattaaatggcattttataatattatgggggaacttcacagggttaaaaataccctcatacgttattgcatttgatcttcacaaaaagtgcattttaaccagtactctgggtgcaataaataatatgtaaaaatttaagtcctccaattcc

SEQ ID NO: 8582 - DNA, 528 bp, Homo sapiens
gttcacgccattctcctgcctcagcctcctgaatagctgggactacaggcgcctgccaccacgcccggctaatttttgtatttttagtagagacggggtttcaccatgttagccaggatggtctcgatctcctgacctcatgatccgcccgactcagcctcccaaagtgctgtgattacaggcgtgagccaccatgcccggcctatcttcactttattaaaaaaggaaacgagtgaggattacagccccaaatggacattttttcctgggtgctatgaaaaggaacaatggaaaggaaagggaatatttgtcttcttttgttttattgggtcgtgtttgtttgtttgtttgtttgtttgtttgtttgacagggtctcgctctgtcgcccaggctagagtgcagtggtgccatcatagctcactgcagcctccacctcctgggctcaagcgatcctccagcctcagcctcttgagtagctgggactacaggcacatgccacaacacccggctaatttttcctttttttt

SEQ ID NO: 8583 - DNA, 450 bp, Homo sapiens
gaattgtcctaaattatctaatccgctagtaccagaagaggaatttctgggttattgtggtaaagtttcatgtgatgaaccatccttgaattctctcagaataaacaccacatggtcataacatgttaattttattatttttttgtgtgtgtgagacggagtttcactcttgttgcccaggctggagtgcaatggtgcaatctcagctcactacagcctccacctcctgggttcaagtgattctcctgcctcagcctcctgagtagttgagactacaagtctgtgccaccacacttggctaatttttgtattattagtagagacggggttttaccatattggccaggctggtcttgaactcctgatcttgtgatctgcccgccttggcctcccaaagccgggattaacaggtgtgagccaccatgcccggctagcctaattttttttttt

SEQ ID NO: 8584 - DNA, 539 bp, Homo sapiens
gaaagcccatttcaagctttgtgctgcctcttgatctacctctttgtccaggtggatacgctttgcctggaggatttgcatgcgtttattgcgcaggccttgtgcctccaaggaaaatccacctcgcagcttgtaaatctacagcctgattacatcaaccccagagccgtgcagctgggctcccttctcgtccgcggcctcaccactctggttttagtcaacagcgcatgtggcttcccctggaagacgagtgatttcatgccctggaatgtatttgacgggaagctttttcatcagaagtacttgcaatctgaaaagggttatgctgtggaggttcttttagaacaaaatagatctcggctcaccaaattccacaacctgaaggcagtcgtctgcaaggcctgcatgaaggagaacagacgcatcactggccgagcccactggggctcacaccacgcagggaggtggggaagacagggctccagctaccacaggacgggctctgggtatagccgttccagtcagggacagccgtggag

SEQ ID NO: 8585 - DNA, 604 bp, Homo sapiens
aatactcccatcagttaactgtctcaggtatcaaaatatcccttcctgtatgtatcaaaactcatgctgaacaatgagttctgggttgcaaaagaggatttatttgttgcacctatccataagtctttgtccacaagttaaacaaaaacatacataagtgcagcgtgtgctctttttaagtacattagtagacatactactgagaggccacactgcacggggttaggtaagtggactctggagccagattgctagttcaaagatgtgcccttccatttactaagtgactttaggcaaactccttctcttggtgtctcagtatcctcagctgtgaaatggggatgacattaagaccgatttcggccgggcatggtggctcaagcctgtagtcccagcactttgggaggccgaggcgggtggatcacgaggtcgggagattgagaccatcctgccgaacacggtgaaaccctgtctctactaaaaaacaagaacttagccgggcgtggtggcgggcacctgtagtcccaactacttgggaggctgaggcaggagaatgacgtgaacccgggaggcggagcttgcagtgagccgagatcacgccact

SEQ ID NO: 8586 - DNA, 395 bp, Homo sapiens
ttttattctttatattagatattaactcacaatcagtgctgctgctttgtaagtttctacttcctctgtgaaatgtgcaatatcagcaatgtatgtacactgaaaagagggagtttttaatttattgaaatatggtagcaggctgggcgcggtgggtcatgcctgtaatcccagcactttgggaggccgaggcgggtggatcatgaggtcaggagctcgagaacagcctgatcaacatggtgaaaccccatctctactaaaaatacaaaaattagctgggtgtggtggcacgtgcctgtagtcccagctactcaggaggctgaggcaggggaatcgcttgaacatggaaggtggaggttgcagtgagctgagatcacgccactgcactccaggct

SEQ ID NO: 8587 - DNA, 511 bp, Homo sapiens
cgagattttgccatgtggcagttggtttgtggagttgggcaggtgtgaaagggtaaaactccacttctgaatgctgcttctgccccctgggacccagcacattgttagaccatcttcttgactgaaaattctctcctgatgctgagccctgcaccaccaccttccttttcctaactatgaattgatggcaaagtccactcaaaacaaccagttaagtgctcacgagagagtagtcaagcacctccagaaagaaaccgggtttttgttcacatagcaggaagtgactccctgggtggtaatttatcttggaaacacaggtagattggcagataaacgggaacatgtaggtaccgcgatgttggtgcatgtccattactttgggataggctttctcagtctttcctcaaatgatagttgagccagttttccagtggcaattctgagtgacttgcgcttgtcttatggtgtggtcaagggacattcagaactacggaaaacttttactgaaaca

SEQ ID NO: 8588 - DNA, 613 bp, Homo sapiens
gtgcaaaaaccagatagccaggattatagcctgtgcttgattttaaggtcttgtttctttggatgttgttgattatgataactctgttgtaaaaaaataatgaatacgttttaggctatttgcagaaaggcgagagaattaattttgaatctgtgagtgataacagtgggttatcaagaaaaaaatctggagcaagtcctactaggcttctaagaagtaattcactcatatgctatgttaaaatttttctgttcttatctttctttctttacctttcctttgttctttaccatgtgctcccaattctctattctctctcttagcagtaactttatgcacctgccattttttttttgtacccattgcttccttgtattctccatccatcaatcaataagccttgggcttccaggactctgcttctttggatctaagcctggcctgctctctctgttatttgtggtgcatccaacctctaattttaactttgcttggccctatcatgtaaaaatgactatttagaacaaatcattttagcctactcaaactataggattagcacatattgaaaataggtctgtattaggacaatataaaatcattctggcttgag

SEQ ID NO: 8589 - DNA, 617 bp, Homo sapiens
tgtcagttgatggcagaaatgttcattgttaaagagccatttctttggcttattaattggtcctctgttagccagtcaacaatactgtacccagcacagatatccttgagaaatgaaggagaaataaagtctttcctagataagcaaaaactgatggaatttatcatcactagactgaccctacaataaatgcttaagagagtcctacatctggaagcaaaagggctatattcaccatcatgaaaacccaaaagtataaaactcattggtaaagcagacacacaaataagaaagagaatggaaccacatgttatcattacagaaaaccaccaaactgcaaagataaacaaaggaaagaaagaaagaaaggaaggaagaaaggaaggaagaaaaaggattatttaaaattatcagaaaacaattaaaatgacaggaataagacctcacctatcaataacaacttttttaaatggcttaaatttcccagttaaaagatatagactggctgaatggattttaaaagtgacctaactctatgctacctacaagaaactaatttcacctgtggagacacacatagacagaaactgaagggatgaaaaaagatattgcatgca

SEQ ID NO: 8590 - DNA, 333 bp, Homo sapiens
gagcttggccttctcagacttccactgggagaactcagggtccaattaaactccagaaccaggtgagctgcaccttctcaggtatcaaaacacagggcccgccaggcacggtggctcacacctgtaatcccgtaagtttgggaggccgaggcaggtggatcacctgaggtcaggagttcgagaccagcctggccaacatggtgaaaccgcttctctattaaaaatacaaaaaattggcctggcatggtggctcatgcctgtaatcccagcactttgggaggccgaggcgggcggatcacctgaggtcaggagttcgagaccagcctcaacatg

SEQ ID NO: 8591 - DNA, 206 bp, Homo sapiens
agacgacagaagggtacggctgcgagaagacgacagaagggtacggctgcgagaagacgacagaagggtacggctgcgagaagacgacagaagggtacggctgcgagaagacgacagaagggtacggctgcgagaagacgacagaagggtacggctgcgagaagacgacagaagggtacggctgcgagaagacgacagaagggtac

SEQ ID NO: 8592 - DNA, 331 bp, Homo sapiens
gctggtaatttttgtatttttagtagagactgggtttcaccatgttggccaggctggtcttgaactccaggcctcgagtaatccacccaccttggcctcccaaagtgttgcgattagaggcatgagccaccgtgctcaggcttcccacaataatttttactttgacacatacagacttcaatatcacattcgtatgcaccacgctatatgggagaatatctgtcaagactcatgagttgttatgtatagagtgcttaaattgtggacatataaaataatatttctatccagatgcagtggctcacgcctgtaatcccagcactttgggagg

SEQ ID NO: 8593 - DNA, 265 bp, Homo sapiens
gaatgaaaacttagtctaatattagaaaatcagaaaatatagtttaccacattaaaaattaatggaaagaattatacaattacctcaacagatgcagaaaaagtatttgataaatctcataacagcaacttttagcaaactagaacttcttaacctagtagagaatatctataaaaatttgaccccagcaatcccattacttgttatatacccaaaggaatataaatcattctattacaaagataatgcacacatatgttcattc

SEQ ID NO: 8594 - DNA, 142 bp, Homo sapiens
aacataaccattcttaatttaactatttatattatcctaactactaccgcattcctactactcaacttaaactccagcaccacgaccctactactatctcgcacctgaaacaagctaacatgactaacacccttaattccat

SEQ ID NO: 8595 - DNA, 278 bp, Homo sapiens
tcttacaataatcctgtaagggaacatatacctctttttataaatgaggaaattggggcttagctaagttaacttgcacaaggtcacccatgtagccaagaagcgttacctagcttacattattaactcatgccacttttattttttgagacggagtctcaccctgtcgcccaggctggagtgcaatggtgcgatctcagctcactgcaacctccgccttcggggttcaagcgagtcttgtgccttggccttctgagtagctgggattacaggcgtgc

SEQ ID NO: 8596 - DNA, 191 bp, Homo sapiens
acgacagaagggtacggctgcgagaagacgacagaagggtacggctgcgagaagacgacagaagggtacggctgcgagaagacgacagaagggtacggctgcgagaagacgacagaagggtacggctgcgagaagacgacagaagggtacggctgcgagaagacgacagaagggtacggctgcgagaagac

SEQ ID NO: 8597 - DNA, 538 bp, Homo sapiens
ccgttgctgtcggtttggtcttaggctaaaatccatgttttacggagaattcaagaaatttttaaacttcaggtagaactgtgttttttacaaatgtatagaaagcatagtgcctaatgcatggtagaaacatttctttaaggatgaccggatgttgccgtatgtatttatggcacaagcaggtgttgtctaagcagtttctctgtttgcttgtcatagcagcatttggaaactcaaacatgctttcatttacataaatagtttatgaagctttgacaacaaatgtaaacagacacgaaattataaatctgctaaatatgtattaagggtattaattattgaaagtccctttccccaaaactcaactcctatggcaattatgaactccattttaccaagaacatttaagtgcctcagcatctgtatgatatagtggagcaggtgctgacataggtaccagctgacatgatgtgtcactagctctgtgggatgattgccacatacatggaacacctgggagtgctggaaatgtactggg

SEQ ID NO: 8598 - DNA, 300 bp, Homo sapiens
aattccgttgctgtcggtttagcactcacatatttttgttcaatctttacttctcacacaaacagaaaaaggaaattatatattctgtatcaacaaagatttaacaaaacatccatacactacaactgtctacttactaaaattaagaattagtatattatcttttttcttcttatattaaaactatcttttcatacactattttaagtttatgaactgaaagtcttttagagataatttacttcaatgaactattattatttatattttataagcaaattgtcacaacttggtattagc

SEQ ID NO: 8599 - DNA, 277 bp, Homo sapiens
gcagttccaagtaggtaatccttctgagaagtcccacctttctgagcggctgtgtttgaagaaagctagtgggaaaagttccaggattacatgtcaggaaactacaagaggtagaaacatttgttgatttaccagtgtttttaacttcctgctgggctgaaaactgcttgtttcgtggaaaagcaaaacttgacagcaaacatctaaaatgaagagctcccaaacttttgaggaacaaacggaatgcattgtgaacactctactcatggacttcttg

SEQ ID NO: 8600 - DNA, 542 bp, Homo sapiens
  misc_feature 465: n = A,T,C or G
tcacttttaattaagcaagaaaacttattttaattaatgagctcaagcttacagaaagagtgtgagtttttttctacaacttccaatcattcaccagcagattgatatagtctggttttatttctgatctccatggcctagttctacccaagacatacacctgcatctctggaattctaggtctgatttcaggttatttttgtaaatgttgatgaaaatcaaatgtacttgagttgaaaataaaactcatatttttccattcaaaaagtatttattgaactccctactcaatgctatgtactacatgagagactgggaatataaatgtaatatagatatcaatgatgtatgcaagatgcttaagttctgctggggtgggacacagatgaggagagggttaatcatacctacttaagaaaggaaaccgggctgagcagaaaatgaagttaatcatcatcctcattnttctaaatgcacattatattaggcatgccattattttaaaacaaccatgccattattttaaaatctccatggtagag

SEQ ID NO: 8601 - DNA, 601 bp, Homo sapiens
gcatgccacatggtactataccgttgcttaacacgggctgaaatataggctttaagatttctagtgatccaaacaaagtgtgaaacaatatcccttacaagattttatgtctctggatttaaaacaaaccagcaagtggagcatgaatagatagaccattagaacggatacagagtccagaagtgaactgctcaataaatgactgtgtagccacctggacaaaaaaattaatttggatctatacctcaccctatatattaaatcgattccaaatggatcaacttttaattccataagacttaaagtctaaatgtccatcaatagagaattggtaaattatggtatggatatacctgcaataatatgttaagggggttgaaaaaacagcaaggagctctctatgtgttactataaacatgccccccggatacattaagtaaaaaacacaaggtggagtaaatatgtatggcatgccggcatttttctaaacaaggaacacaaagggcatatcttggctcatatatacataaacattttgaagaatgagcaggaaacagtggtcacctatttgtgacactaggacaggtgtgagggacatctt

SEQ ID NO: 8602 - DNA, 578 bp, Homo sapiens
ttaacacagtgaaaccccgtgtctactaaaaatacaaaaaattagccaggtgtggtggtgggcgcctgtagtcccagctacttgggaggctgaggcaggagaatggcgtgaacctgggaggcggagcttgcagtgagccgagattgcgccactgcactccagcctgggtgacagagcaagagtccgtctcaaaacaaaacaaaacaaaaaagaaaaaagaaaccaccaccaaccaaccaaacaaaacccaaaaaacccaaagtaacggaggtggccgagggagctggggatggggagggagtccaaacacctgggagctagaagtttctgaaaactgtaagtcttttggtgtcactaaaagatacaggatgaatgagcggggattaactgaagaagatagggttgatttataaagtttgaattcgaggccaggcacagtggctcatgcctgtaatcccagcactttagaaggccgaggtgggcgaatcatctgaatcacctgagatcaggagttcgagactacacctggccaacatggtgaaaccctatctctacaaaaaaaaaaaaaaaaaaaaaaa

SEQ ID NO: 8603 - DNA, 436 bp, Homo sapiens
tgctgcattagcacccaaccgccagctagacccagtagagtaaagtgagggataaaacggaaggtgtgcaagaagcatcggggtcgtaggttgtctaatcttttgctttcaggaaaaaaaaaggcatcagaaatagctgaatttccacagggaaaacaatggagctggaccctaccccacacgatatacaaaaaccaacctgcacggatcagagccccaaacatgaaaccagaaccgaaaagcttccagaagaaaatgtgtcagaatgtctttgctaccttcagataggcagagatttcctggaggaatgcaaaaagcactaatcccagaagaaaagaaaatgacaaatttggcttcatcaaaataaaatatgaatgttcataaaaagacactccctgggctgggcgcagtggctcacgtctgtaatcccagtagt

SEQ ID NO: 8604 - DNA, 441 bp, Homo sapiens
atccacccgcctcagcctcccaaagtgctgggattacaggcttgagccactgcgcctggccgccacaggcccactcttaaaaagataatgcataatataagattttgtttttcttttcttttgtttctttctgctctgacaggtaactttgattgtcattgacagttttaagaattcagtaccaaccactgaaagggtatgaatatccttgcttaaagaaagttaaaaagaccaggtgtagtggctcacgcctgtaatctcagtactttgggaggctgaggcaggtggatcacttgaggtcaggagtttgagaccagccaggccaacatgatgaaaccccatctgtactaaaaatacaaaaaattagccgggcgtggtggtgggtgcctgtaattccagctacttgggaggctgaggtaggagaatctcttgaacatggga

SEQ ID NO: 8605 - DNA, 331 bp, Homo sapiens
tactatattataagagtagacaaaaagagacaaaaatctctgctctcaaagagcttaaatgctggtgggagctaagaagcagataaaaaaaggcgaaataatggttacttcaatttagcatataccaagtgctaggtggtctcctgagtatctactaggtattacttaatttaatcctcccaacaactccatgaggaaagtattactattgtgcatatggggaaactgagacacagagagattaagttacctgctgaagatcatgcagctcctgaaggcagaaccaagatccaaacctgatggtcttggtacaaagtccatggtctaatta

SEQ ID NO: 8606 - DNA, 53 bp, Homo sapiens
gggaaaccgatacctactgcatccccatggaatgtacacaggtactgccctgg

SEQ ID NO: 8607 - DNA, 591 bp, Homo sapiens
gtgctagcccagggttgggctacggaagcactctgttacctgctgctgtttctcagaagtgagccctttggcatggagagctggaggaagaggacgaatgctcaaggtctcagggctggagaggaaatcatgatcatggggtggcaaaggacctcaaggcactgccagacactctgggctcttggagaactgttcagagttggcgataactttctgtaatcctaggcatctcttctcttgtcacatttcattgagatatctgtctatcctatttaacccaagcctgattttggataggatccagaaatctaggtgaatttcaggggcctggttgcttcctcatctagcttggtggtaagaagctcagcccctctctgtgggccatgtggagagtacagaaaataaaactgtatcagggccgggcgcgatggcccatgcctgtaatcccagcactttgagaggctgaggtgggctgatcacttgaggccaggagttcaagaccagcctggccaacatggtgaaacctcctctctactaaaaatacaaaaaatagctgggtatgggggcgggcacctataatcccagctactc

SEQ ID NO: 8608 - DNA, 445 bp, Homo sapiens
gtttacatataaatctccaccccacctaaaaccattaaatccttgaaatgaaatacctttagcacttaacatatgcctgtcatctgggagttggtgagcctgtgggatgaatgaatgtattctataaaattgcaacacttacaatagttaggcttatctaaaaaaataaaataaaaaccaagacttttctagcattccaattcctaagtcttcattctgtctcttttggaatggacttctccagtgactttttctttctctaatcatgcaaatgacaactttgtagcatcttatttaatctatttatttatctttatatagatagtggaccagatttctgtgttctacaattccaggagagtataatgggaaataatattacatagatgaaaagagacaattacttgggaatgttccaagagaagatggaattaagctccctcag

SEQ ID NO: 8609 - DNA, 554 bp, Homo sapiens
gagaaaaacaaaacctggtctgttctaggacctgtgtttccttaaagttttaacacaagcgactccagtttggtttggtttggtcttttgaggcctagtgcataagctcaatccaaaacaatggcctcccacaattttgttttttaaaaaattccctttttggtcagtttctcacttagatgagagtatgaccaaaacttagggccttagcgacgctctcagttaccatcattttgggtttctggtctcagcctgtcattcatcagtggccttatagtcacacatttctttcagctcttgtcattccagttgaagagaaaccatttgacattctagagatggctgcatgcaagcatttaaaacctctgggagggccgggcacggtggcttacgcctgtaatcccagcactttgaggctgaggtgggcggatcacgaggtcaggagatcgagaccatcctggctaacatggtgaaaccccgtctctactgaaaatacaaaaaaaactagccagtcatggtggcaggtgcctatagtcccagcacttgggaggctg

SEQ ID NO: 8610 - DNA, 117 bp, Homo sapiens
tgagcttttcattacattgttgaaagatgaagaacgaaagctacttgttgatcagatgaggaagagatcccctagagtaaatctgtgcattaaacctgtaacttcattttatgatat

SEQ ID NO: 8611 - DNA, 266 bp, Homo sapiens
acagggtctgttgggtgactgactgattgaatgagcaagacttctagttatacatagactgaaaacttccacttatctctgcttcttttcaaaatcccactaaaatatgaataaatgcatgttttaaagacaaaaggaggccgggcgcagtggctaacacctgtaatcccagcgctttgtgaggccgaggcgggcggatcacctgaggtcgggagttcatgaccagcctgtccaacatggagaaaccccgtctctactaaaaatac

SEQ ID NO: 8612 - DNA, 440 bp, Homo sapiens
gaagacgacagaagggtacggctgcgagaagacgacagaagggtacggctgcgagaagacgacagaaggggtggatcaaagatttaaatataaaatgacaaaacttctaggagaaaacatacaagaaaatcccgatggcactggcagatatctcttagatgacagcaaaagcacaatttataaaagaacaaatggataaattgaaccacatcaaaatttaaaacttctgtatttcggccgggcgcagtggctcacgcctgtaatcccagcactttgagaggctgaggcaggcagatcacgaggtcaagagatcaagactatcctggacaacatggtgaaactccatctgtactaaaaatacaaaaattagctggtcgtggtggcacgtacctgtactcccagctactcaggaggctgaggcaggagagtcgcttgaaccc

SEQ ID NO: 8613 - DNA, 68 bp, Homo sapiens
ggactggagaagtcccaccttcttcttgactacttctgccaaatgtctgtggggtctccaagataacc

SEQ ID NO: 8614 - DNA, 586 bp, Homo sapiens
agaaggggcctggcattgtgttgagcactcttgggaatttgaggcaactctattacccttccttggcctcaagaagcttagctatccccaaaataagaggaggcaaggaagaattaggagagttaagagtccttgtgaagcacttaaagactaaaaagctaccatgagtctataaaggcagattctctgaggaccacaggtatataagaagaaaaggaagtcttgattcagtaccagcagaggatctggttcggaagatgaagtgtgtttgagacgttaattaacaggaaccagagtcccagctgactctcgagcccaccctcatttctagtcccggctttttccactaacctgccctgctttttaaatgaatacccaagacagtctcatagcagtgatattctttccgtcaccctttggggaatggggagagacatggacccttgctccaaagccatgatgcctaaactcctgcctttcccaactaacaaggagcacaactataacctcaggaaatttaagttttaaaaagaaatcagatcgggctgggtgcggtggctcatgcctgtaaccccagaactttgag

SEQ ID NO: 8615 - DNA, 483 bp, Homo sapiens
gtaggggggataactaaacctaacagagaattaggaagctgttctgaagtgagatcaaaaggcctcagtgggtaactcaataaaccagaaaggagtctaaattaacctcttaagttaacttagtttctctttgttactctttgcacttaagttactcttaagttactctttgcacaaaaatgcatcttcccctttcaccttaaccatcctaagagctaatgaaaaacgacctttggccaaaaggtccaggatgtgctccttattctggaaatgcaatagcgtctcacctcaccaccctgtccagtagttgtggcttgttacatgaaaattaacctgtcccttagaattcacatcatgcggctgggcacagtggctcatgcctgtaatcccagcactttgggaggccgaggcgggctgatcacgaggtcaggagatcgatactatcctggctaacacggtgaaaccccatctctactaaaaata

SEQ ID NO: 8616 - DNA, 536 bp, Homo sapiens
attccttatcaatccatcatagtgaatttcagagtggcccctcaataaacacatgttgaaatgtttgctaagagagccttgtggctacttccaaatttttcttctgtaacctgaaagcccaggacaacaatttctatggcagtgctacattgggtaattatttcttcctttctttttaagcatgctaggaacttactctgatgaatttgggaacctagattttgagcgatcccagcatggttctggaatgagcaacaggtcaacagcgaaaagatttatttctgctctcaacaacgttgctgaaagaacttataataatatatttcaatttcatcaacttcggcagattgccaaagaactaaacattcaggtatgttaaactagttaatctcttttgtaataatttcaggaggtccttgttaatatatagtagaacagaaacagtttttacttatttaaaattcatacctgcttcttctcaaaggttttcagcatcttgatagtcagagggaaacattgtagtaagacagtctcta

SEQ ID NO: 8617 - DNA, 404 bp, Homo sapiens
gaactgcaggactcaggtccacttgcccagcagctggcagggaagggccatgaggcagtagagtccctacaggccaagaaactgagcagaacccatgcctccagctcaccagctgcattgaagcccccagctggcagggagactgctgtgaatggacagggtgagctcatccccttgaagaacattgagggagaattgtcaagtgctattcacatgaccaaggatgccaccaaggaggctctacatgccaccatggacctcaccaaggaagctgtgtccctgactaaggatgccttcagtttgggcagagatcgaatgacctccaccatgcacaagatgttgtccctgcccccagccaaagtctggtccagaatctgttccaccaggatctctttcaaatgtct

SEQ ID NO: 8618 - DNA, 259 bp, Homo sapiens
aactcccctgcggcccgcactggggtggtcaaggagggggaccagattgtgggtgccaccatctactttgacaacctgcagtcgggtgaggtgacccagctgctgaacaccatggggcaccacacggtgggcctgaagctgcaccgcaagggggaccgctctcccgagcctggccagacctggacccgtgaagtcttcagctcctgcagctctgaagtggttctgaacacaccacagccatcagcactggaatgcaaag

SEQ ID NO: 8619 - DNA, 362 bp, Homo sapiens
agcccctgagctctgggaaagcctttctgatgatctcaagcttgcagattctgtccctgttctgaccgggggtcacagcctattggtagaacaggacctcctgctaagatgctggaaggaccctttgggggagctgaggcctgtctcccctctccccaggcgcaggtgcacaggcgtgtgggctgtctgcaagcacagatcctgcctcacagcaccattaccacaataactgaatctgtgtttcctggctgctgataattgtgctagagatttggggcatggttatggggtgaaggttagaaatgagcaattagccctcaaatgttaaactaataagggaaataaatgatcaagcaaagtct

SEQ ID NO: 8620 - DNA, 220 bp, Homo sapiens
ggcacgaggtgagacaccgtctcaaaaaaaaacaaaaacaaaacaggtcaaaaatcagttgcacaagttgtatgaaaccaggtattctgcagctctgtctcttgtttattaagatatgcacagtttctgaatcaacaaatatatctgtgattcttttatactactacataaaagaacaggagtaattcttgccttataaattaaatgtcaaacatttcct

SEQ ID NO: 8621 - DNA, 257 bp, Homo sapiens
ggcacgagtgcacgcctgtgatcccagctacttgagaggctgaggcaggagaatcacttgaactcgggaggtggaagttgcagtgagctgagatcgtgccactgcacgatccgcctgagcgacagaatgagattccatctcaaaaaaaaaagtacataatacctactttaaagattgtcatggaaatataaagtatgtggtccttactaatgctaaataatgctttgctttcttttatttgcatcttaccctcttcc

SEQ ID NO: 8622 - DNA, 636 bp, Homo sapiens
tgaacctctgatcattcctattggcccctgggtgagaggcgggaggcatggggggactgaagtttccagttggccagtgagcgaagaaggcgttggctgtaggccactatgatttgctaggagaaatttgaatgggtatgccagggcaattttcacttgcgagcaaataaccagggctctatccgctcctgcagagaagcgttggaggtctcttttctttcttgattgtccctaggagcaatctactgatatccttgcccagaaaaacagatgttttccgattcaaaatcagaaattgagtgcctgctgtctaccctacctcgtgccaactcaatgaaagtagagaagtaaaatcttaccgatttcaaacatacgcagtcttaactgatttcattatggaacctcataggaatacagatttattgtagcagcataaacttttcaataggcttctgtgggtgcgcctttgttcaaaaagagcccttgtgtgtatttgtgtatatatacacgtttacaaacaccaatcacaggaggaatgtaaatattccactcaacactttacgaacagactaaggtacttttaaaaaattacaatgttaggctgggcactgtggctcacgcctgtaatcctagcat

SEQ ID NO: 8623 - DNA, 102 bp, Homo sapiens
ccgcctttccaacctcataggctctatctcctcccaaaccctgtagcccttccagttgctggtcactgacttccattaattggcccggtggccttgcctgcc

SEQ ID NO: 8624 - DNA, 629 bp, Homo sapiens
atcaaatttcgatttaagaaactccaaaaataacaaaaattggaaacagcctataacattttaggaaatcaagaaatatatttaattgtaacacccactttcatattccacaagagaaaaataaagcaaagcctgatcaagacgtgcctttaacacaactcaatcacctttgagccttcattctttaccagtctctctattctctgtgcctattttctactctccctgagcagaaatttaagtgtcacattttgccaaggcctccattacatgagtaatgagtgcttacatatattgatatcccctgattttctgttggtgaagtttccaggaacattcattctcttgggaggagtagagactcaggtaaaagtcatgtctcttcatcttccacccttcagagattactggtggccagaacacctatgtgggagagtgggtatgggaagtggggtgtgtggataaagaaactctgttcgggagaggctcccagggatctgtgagtcagaggagtcacctatctttagggttgcacaaatctagcaccttctatgaaaactgcattcacccagaatgtgaaaagaaaaaagggatggctgagaacttttaaaattcagcaacagacacct

SEQ ID NO: 8625 - DNA, 646 bp, Homo sapiens
ttcagtgcctctggccatttttaaaaggtaataaatacatggagttgatggctatagtgacttatttattcttttctctttgctttgaagtcaagaaatatttgtgctccctttttcacatgactcccctctgcccaccctgtttccacatagtctgttattaaaacaagttggaatcacaaaataaaaacctcaacagttgtctctcgactttcaactccatgattaaaaggagactgaaattatagtttagaggagtatccaaagtatgtacacgtgacatagttagttcagatgttgtgcagagtgcagcaaagtgtagctccaaagaagacagaataagtaaatgttaagtaaattagtttaatccaagcagataagaaaaagacatgtacttaatttatattgaagaaacagtcacttggtaggaggggaaaagggggtttagagtataactatagaagattggtttctgggcacggtggctcacgcttgtaatcccagcactttgggaggctgaggtgcatggatcaccttaggtcaggagttcgagaccaacttggtcaacacggtgaaaccttatctctactaaaaatacaaaaattagctgggcatggtggcaggtgcctgtaatcccagctgcttg

SEQ ID NO: 8626 - DNA, 571 bp, Homo sapiens
taggcacacaagactgcccgatgagtgtcaattgccatccttgttaactggacgcctattactaggccaggtccaggcttaggtgtatcccacacgaagccaaaccggtgaccaccgcccacatggagaaagcaagtgattggctgcgggtcttctgtgtgttcctcctcccacaggaagctactttcgcctaaacaaggacacttgccatccctggctgaccatttctgaagacggacttacggctgtacgaagtgaaaggagaacccccgccagggagctgtcacccagcgacactcacttcaccaggtactttgtcaaccgctcacaagggcgttctgtgaacttcccgaaggtgcactgttattcaggtcaaatccgaatatggcacggaggcagcctcgagggaaaaggaatcctacaaatgagtgaggagggaggagcctaatggggaggggacccagaggagtgtgggcaagaggggtcaggcaggtgcaggcagaagagccccctgggacggtgaggtcaggagagggcgcggtcccctgggagggcatggtccctgggtcct

SEQ ID NO: 8627 - DNA, 487 bp, Homo sapiens
tacggctgcgagaagacgacagaagggtacggctgcgagaagacgacagaagggtacggctgcgagaagacgacagaaggggggagagcatcaggaagaatagctaatgggtgacagacttaatacctaggggatgggttgatctgtgcagccaacaaacatgacacacatttacctatgtaacaaacctgcatatcctgcatatgtaccctgggacataaaataaaagttgatggaaaaaaaaataaaagaaattctataatgtttctatggtgtatggttaaggaaggcaagtaagactcaaattacaagaattaaatggaaagaatacaacataaacacccttttatcaagtgagcatctacatattatttgtctagaactatggtatgagcttaaggctggacgtggtggctcacgcctgtaatcccagcactttgggaggccaaggcaggcagatcacctgaggtcaggagttcaggaccag

SEQ ID NO: 8628 - DNA, 565 bp, Homo sapiens
cggctcactgcaagctccgcctcccgggttcacgccattctcccgcctcagcctctcaagtagctgggattacacgcgcctgccaccacgcccggctaattttatttttgtgtttttagtagagatggggtttcaccatgttagccaggatggtctcgatctcctgaccttgtgatccgcccgcctcggcctcccaaagtgctgggattacaggcttgagccactgtacctggcctgtgtgatgtattttagaggcagtgtagtagcatcctattgatgctgatgcattcttagacctttgattctcaggttcttagacctttgattctcaggttcttagacctttgattaaatgcattctaaaacattttaaatagtatgatcaaagtacaaatagacaattaggcatctctgaaagctgcgtttctgtgtattcaaattattggaaaaagaactaaacattcttggacaatttttctgtcgttttaaaatccgtgggatacatccattaccttaactatcctttcatactcagtaataatattacatcctgaatttaactccg

SEQ ID NO: 8629 - DNA, 586 bp, Homo sapiens
gtatctaatttacttcaggcataacatttaaattctgacatatgtgtcaatctaaaattaattctgacatatgtgtcaatctaaaattacagacaaatttgaaatagaaaatagaaaaatgaatagagtgacattagtttgacggaaaaataaaaggtgacctattttcttaacccgacagcaagaaaatttgtcaggaattcctgacaaaaatgcctttatgagagagccaagcatcatgtctcacacctgtaatgacagctatatggtacactgaggttggagaatttcttcaggccaaaatttcaagaccagcttggggtatatagcaagtcctcatctccaaaataagtgcctttaagagagctttaaaggccgagtgtggtggctcacgcctgtaattccagcactttgggaggctgagacaggtgggtcacctgaggtcaggagttcgagaccagcctggccaacatggtgaaacactttccctactaaaaatacaaaaattagccaggcgtggtggcgcatgcctgtaatcccagctactcgggaggctgagacagcagaattgatcgaacccagctgg

SEQ ID NO: 8630 - DNA, 539 bp, Homo sapiens
agacccagcaaaattgctatatgaataaaatatgtatacaaactaatctttttaaaaaacttttcccaaggctgtatatgaatataaaaacccagatttgaattatacatgcaaactgtaaaagcagagacacatgctccctattaagtctgtgttttaaaatatccagttaccaatcaagaaaccccagtagattccaaagaagcatatgtaagaaaccatgacaaggtaaaagattattatctggcaagtagtgcctagaatcaggtctgagggggccagaagggactatgaatcacaaggtgagaaaagataatttgcagcaaattggtaagatatgtgggaggagctaaagtagttgggtctgccgggtgaggtggctcacacctgtaatcccagcactttgggaggccaaggcaggtgggtcacctgcggtcaggagttctagaccagcctgaccaacatgccaaaaccccgtctctactaaaaatacaaaattagccgggcgtggtggtacatgcctgtaatcccagctactc

SEQ ID NO: 8631 - DNA, 653 bp, Homo sapiens
aaaactggacttcctaacacaggcctatgtgccacatcaccaaaggcttccaatgcaggggtccagatggcccactcttcaccatgacgaagcccgaggccatggaagacatcatcaaaccactgcccacgtgtgcccatcaggtctcactccagatgcctcgcacctaaaagcagggatgccactgtgctctggccagagttgatgctgggggagaagagctagtaccagcctaaggagggaggccaaggttctcaggagtgcagtgctctgaggagggctgggtgccaggcaccacctctgcttgtaccttattacctgctttctcacctgcaataagagtggcccatacaccctaaaaggttttcatttcggccgggcgcggtggctcacgcctgtaatcctagcactttgggaggccgaggcgggcggatcacgaggtcaggagatcgagaccatcctgactaacacagtgaaactacgtctctactaaaaatataaaaaattagccaggcgtgttggcagacgcctgtagtcccagctacttgggaggctgaggcaggagaatggcgtgaacccgggaggcagagcttgcagtgagcaagatcgtgccactgcactccagcctgggcaacatagtgagactctgtctc

SEQ ID NO: 8632 - DNA, 558 bp, Homo sapiens
ggctggagggcaatggcgctatctcagctcactgcaacctccacctcctaggttcaagcgattctcctgtctcagcctcccaagtaggtgggatgacaggcacacgccaccacgctctgctaattttgtgtatttttcattgagatggggtttcactgtgttccccaggctgatctggaactcctgagctcaggtgatgcacccgcctcagcctcaaagtgctaggattacaggtgtgagccatcgcacctggcccacttttcttttacaatatggaattgatgaaatggtttcaggttcaggtacgattatgtgaatacctactgatcatgtaattaactaatactctcactgaaaatttaaattcaactggcaatatactataaagaaattcaggccaggcgcagtggctgacacctataatcccagcactttgggagcccaaggcaggaggatcacttatgccaggaactcaagaccaccctgggcaacatggcgagaccccggtttctacaaaaaaacaaaacaacaacaacaacaaaaacactagctgggcat

SEQ ID NO: 8633 - DNA, 572 bp, Homo sapiens
cattataagtaaaactataacataacataaatattaaaaagttaacacactgttcatattttggtttattaccctccagtcatttttctatgcatattgtcactagattgaggtaatactatatagagacttttgggtccatgttttgaatatcatattatgagcatttcctctgccattaaaattcttcatggcagacctgatttttaatgctgcataacattccacttttcctatgatccataatcattttcctattgttctgtttttagggtgtttctcatttggttataaataacttaatgaacattctttcatgtgaatgtttttaccatatttcatgttattcttaatataattttttaaaaatagaattactgaattaaagaatataaaaatgtaaggctcttacttttttgtgctgtaaactcaaaatcgaggtaaactatactaatttaaaatttcacaaatagacatgaaagtccatttgctgcacatcaacagtgaatattaccatccaaaaatattaactatcaggcaagatctgttctaaatggatttaaagcataacg

SEQ ID NO: 8634 - DNA, 412 bp, Homo sapiens
tggagctggttcctctcgtctttatgacccgtgaaaagcgcaccaacacgaagacacgcgtgaaaggaccccatctcctaaccagactgacaagcaagggattttttccactcaccgtcagtgggatggttctaagcaccgaggccaacccatttcacacgattatttcacaaaaagaaactttctgtgggacgtgcctgggcgactgaaaagacagccagcaaaactgagaaccttgttcgcaaatccgtaccctctcccaaggcagcctcagaggcccgagggctgaggatccagacccgaaagccactgtaccttctgtaggatcaggctcaaggactaagggggtaaaaggtgccctttcccttcctaagcagaaaattctgtaacccaaccttatgtgtgatcattt

SEQ ID NO: 8635 - DNA, 594 bp, Homo sapiens
tgttggccagtctggtctcaaactactgacctcaagtgatccgcccacctcagcctcccaaagtgccatgattatacacgtgagccaccacaccaggcctttgtctgattttagacagccactttctcactttgtaagaaacttgtaacagtggcagaaatgtcactgtagctgtgatctgtctgttcactgaacagatttcacctaggataacattctgaggcttttctctgggcacacatttagttgttacaccacattatttagctgttttatgagcttaagaacagtagttacaagcaaggtgaatccgcattgctgcactcaaagctttcagataggtgtgtgccacactaatataaacggttgctgtacacgtacagagaaacttctctagtaacgaactgtagaaatgatccctggaagtacagtcttcctgcctgtgggctttgtctaggtgctgctcttaaatacgtgtcttacaggtaaacaatctgactgtacattaagggcacgtaagtgacctgtaaagagagttttcactctaggccagtgcggtggctcgcacctgtagtcccagcactttgggagggc

SEQ ID NO: 8636 - DNA, 417 bp, Homo sapiens
aaaaatccaggtatcaatcagagatgttgattgacacgtggtgaattcattactaggttactaggaagagaaagtgtgagagtgcagctaggacaagagtctgataggacaagattactggtaaaagtgatagttcctattctcacatacacacacacacacacacacacacacacgtacccacgtgcatacataggtgtacaggtttaatcaaaataaacttctttaagtgataattttgttgtttcaaagagctcatattggagataaaaatgatagctctaactttttttgttgatatatgcttatacttgccttattattagaatactgagtctcagcaaaagcaaaatcaaaaacaaaacaaagagaatattgattccatgttatctttggaagaatcctaagctactgtgt

SEQ ID NO: 8637 - DNA, 538 bp, Homo sapiens
atagtgagaccccatctctacaaaaaattagctgggtgtggtggtgtgcgcctgtagtcctagctactcggggagactgaggcgggaggatcactgaagctcaggaattggaggctgcagtgagctatgactgcaccattgcactccagtgcagcctggtgacagggcaagcaagacgctgtctctaaaaaagaagacaacattcctaccatcatgcttgtctaatttttaaatttttataaagataggatctcactatgttgcctgggttggtcttgaacggctaggctcaagtgatcctctcgcctcagcctcccaaagtggtaggattacagatgagagccattttacctggcccttatctctttcaaatttagttattctcatatctctgccaatgtcttccagatagataaattctatttactgccttacgtttgcttgttatattcttctgtcctcattttccttaccttgtatggtaaattaaaaagaaaaatgagggcttgggcgtggtggctcacgcctgtaatcctag

SEQ ID NO: 8638 - DNA, 602 bp, Homo sapiens
gaggcactaggttcagtgtacagaactgatattaataaacttccttatccagaacttgtgcaatagccgagcatagtggctcacgcctgtaattccaacactttgggaggccacggcaggcagattgcttgagcccaggagttcgagaccagcctgggcaacatggtgaaggcccatctctacagaactacaaaaattagccaggagtggtggtgcacgcctgtggtcccagctactaaggaggctgaggtgggaggatctcttcagtctaggaagtcgaggctgcagtgagccatgattgcaacactgcactccagcctgggcaaaagagtgagaccctgtctccaataaaaaaaaacaaaacaaaaaagagaacctgtgcattttaacattatctccaactatggaattcattcaatcaccaacttttattaaccatcaagcagggagggaagatatgaacagaaatacagtcagggctttacgacagggatacatctgggaaatgcatcattaggcagttttgttgtgtgaacatgatagagtgcactcacagaatcctagatggtacagcctacagcctacaacacaaacaggctacg

SEQ ID NO: 8639 - DNA, 662 bp, Homo sapiens
ggacatggacaccctacaggggccattgaaaaggcagacaaaccagcaaaaagtcaatccttgaaagataaagttgtgctaagattaatagctgctttatatttacgtatgtatgtatgtatgtatgtatgtatgcatgcatgtattttgagtacattccctaacctcagaagtaggtatcagagtaaagagttttggattggccaggcacggtggctcactcctgtaatcccagcactttgggaggccgaggcaggtggatcacttgaggtcaggagttcgagaccagcgtggccaacatggtgaaaccctgtctctaataaaaatacaaaaattagccaggtgtggtggcacgcgcctgtagccccagctactctggcggctgaggcaggagaatcgcttgaacctgggaggtggaggctgcagtgagctgagatcgcaccactgcattccagcctgggcaacaaaagtgaaactccatctcaaataaagcaaaacagttttggattgatagagcagctggagaaataggggaaccttcagggtgggtatatccaaaaatctcagtataagctctccagttccttggctgactgctaagctccatgggcacaaaaggagaccaggctagaaaagcagcaactggaagttataaaaactga

SEQ ID NO: 8640 - DNA, 520 bp, Homo sapiens
aactgtgctggactcacctgaaagcatggcatcttcaacctaaagtacagcggaaatttgtctcaatgagataaatattctgctactgtatataatagacagctagtaagtataacttttttttctttgagacggagtcttgctctgtcacccaggctggaatgcagtggcataataatctcagcttactgcaacctctgccctcttggttcaacctattctcctgcctcagcctcccgagtagctgagactacagttgggtaccacctggccaggctgatttttgtatttttagtagagatagggtttcatcatgttgtccagtctggtcttgaactcctgacctcaagcaatccgcccaccttagcctcccaaagtgctggaaatacagaagtgagccaccgcgcctggcctaataagtatagatagtatttcacttttatattcctagagcccagcaaaatgcttggtaatttgtaggtgaagaaaaatgtttaacttaatagaaatctaaaatttt

SEQ ID NO: 8641 - DNA, 480 bp, Homo sapiens
acagttggagaatatttgtcagaaatggggaggttgttgtaattgagttgccagaattacagagtttccattttcagatatcacagttgaatcacctctgtagattgttataaagagaggcattttaagatagtattttatttgctaggttgtgtctcagtctaagaattgggaaaagaagagctataggtttctctttcctagtctggatttcagtaaacacaagcctacctctgcttctttggttcacagcagtgtggatcatgaaatgaactgtttacccacattcatcaatattggtattttacaaatctacttggagcatttaatttcatctcaaagattgtgatccactttagataagcacaaatacagtattaggaaaagtaaatatgcaatcttactaaaatttcaacttgttaagctgtatatcttaaaagaaattatttggggctgggcatggtggctcacacctgtaat

SEQ ID NO: 8642 - DNA, 629 bp, Homo sapiens
  misc_feature 519: n = A,T,C or G
tgttcataaattgataaaataaaaacatatattttataaatatatttcagactgttttaataaacataattaaaagatatcccagctgaagtaagctgtatatctaattagtaatacatacaaatcccttgtagacaagttttctattctccagctgtctgtgagattagaatgtgtgcagatagctgaagaatgaatagtgctttttgtgtttcttaggcattacagacgagaaggatttactcgactttgaattcattatatcattactatttcctccagttttataatgtcaattccaaattattcaaaggtttgtgaaattgctgttctttgagcattgaaaatatgaactaagactaacattaatccattgttcaatcttaatgcctttaacaaagatcggtctcttgtaaaatgtaaaaaaattaagtctgagtctgtaggtaagattgaggccacttagtccagtatattttaactttagcattctctttcttcagagctctgccaacattntatttgatttttactttaaaatgcatctcggccgggcgcggtggctcacgcctgtaatcccagcactttgggaggccgaggcgggcggatcacgaggtcaggagatcgag

SEQ ID NO: 8643 - DNA, 252 bp, Homo sapiens
gagtgagaacatgcagtgtttggttttctgttcctgtgttagtttgctgtgatgatggtttccattacatattaattataaaattcatctggaaaagtaaaaagaagattttataaaatttttgaaaaagattcagggttccatcaggacacagaaacaaaacaataatttaaacaatgaaagtttaatattaagaattattaggccagacacagtggcttctgcctgtaatctcagtactttgggaggctg

SEQ ID NO: 8644 - DNA, 548 bp, Homo sapiens
atctaaagtagcacctgcacccactccaactttgtatcacctcatctggctttacttttcttcacagcacttattcctacccaacattatattcttgtctgcaatttttttgtatttttattatctgtcttccctactggtgtataagctggatgacagcagtgattttgtctatttagttctctctagaacaatgctatctagaataagtgttcaataaatatttaacataaaatttatgtttcacttttagaaacctcaaactatagatttcaaaagtagtaaccattcctaaagtatctaatttgattagtcttaatttaaaaaaattgtttgggccaggcacagtggctgacgactgtaatcccagcactttgggaggctgaggcaggcggatcacaaggtcaggagtttgagaccagcctagccaacatggtaaaaccccatctctactaaaaatacaaaaataaataagccaggcatggtggtgtgcacctgtaatcccagctactcaggaggctgaggcaggaaaattgcttgaatctgga

SEQ ID NO: 8645 - DNA, 581 bp, Homo sapiens
tggagtaaaagcaagggcacccaagacggcagggaattaaaaggaagaactcttaattagaaaatagaaaatgcctcctgggtggtgttagtaataggtaaatttaagctgagatgaggttagagaggacagaaatggaacagatgaaaccacataagacagaaaagtagtggggcatgttgcagcaaattgactccacatgggctgtgtacagaggaggaaactaggttggggccagatcctggacacccttgaattacagcatgagaaagaaagttgtaccttaattcagactgcctgggaggcttatcagggggtggaatggtagggattgggagggagggcgtgcaagggcatctattgaacagagtgggaagattgaagtggtgctgatatataaactggattcgaatgaggggaggctgggagtagatggatccaggcaattatgttaataacagtctaggaccgtggtctttaaactttattactgcatacctactaaaataattttgaaaactctgtatcatgtattttaaagttgacattcaaaattttctccataaaatttccatatttgc

SEQ ID NO: 8646 - DNA, 573 bp, Homo sapiens
agcctaaactaaggtagtggcaatgggtgtagaaaggaggtaagaaattcaaagagtgctatggaatatatacatattaatgttgctgatcactttttttgtacgctctggggatgtgacaaatatgggttagggggatctcagtctgtactttgatttaggcaactgaatatacataaccttagtagtaccattcactgagttttgttttgtgctctttttgggaggagatggggaagaaaaataatccatatgaagatatgttgcgtttcaatgcctatgagatactaagaagtaggtattcagtagaaagttgaaaacttgggtctgctacttagaaataaggcctgttttaaactagatatgtgtcagatgatttagagaaacacaaggaaaaagtcaagaaaagatagcatcaaaatttaaggcagcagttgggacacaaagggagataaagtgaataggcttataaggaactgtcagaaggaggaaaaaacaagataacgtggaacaacaggatgaaaatagaagacacacgtatagtgattattatgtggcaggcactattctaaa

SEQ ID NO: 8647 - DNA, 494 bp, Homo sapiens
ttctcaaataaacattcagttttttctgttattgggggaaaacctttaaaattgtatctcacataacaaaattaaaatttatttgcctgattcaataattacttcatgaaatgcattcaataaaatcatcttatacactgaaaaaagaaaggcctcttctatactttgaatgaataaactggccacggcaatcagaaatagtaaaaacaggccaggcatggtggctcacgcctgtaatcccagcactttgggaggccaaagcaggcagatcacgaggtcaggagatggagaccagcatcctagctaacatggtgaaaccccgtctctactaaaaatacaaaaaattagccgggcatggtaggggacgcctgtagtcccagctactcgggaggctaaggtaggagaatgacatgaacccaggaggcggagcttgcagtgaggcaagatcgcgccactgcactccagcctgggcaacagagtgagactctgttaca

SEQ ID NO: 8648 - DNA, 620 bp, Homo sapiens
tgtattctaagaaaggcaatcactgattttgttaaaatttaaatacatttttgaagcaaacagaaattaataagtaaaaaagcttaaataatatgaaaaacttttgaaatttaagaactgaaatatactgaactttgtaaaatattcaggaaataaggacatttatatcattatgggctttgtagacataatgaaaatgagaatactacatgtgaaatttaaggtcagagtcaaaaccttaccattccactctgcccaaattctactaaagagaaaataatatctttaaatgtttcattactacaaaagatagtaaatatattaataagcattttattctagttggaaaaaatgtataccttaaatgcctccccaaatagattaaataagtataacaactaaaaatgataaattagaaaataaaaagatcagatatgatcatcaaataaaattttgaaaatagattaccaaaggggtaaacttttaacaaatctaaccaagaaaaatgaagagaaaaagtaataaacagagtgaaataaaattagaaagactcttccacaagggaatttttaaagtgtatcagaaaaaataaaaaataaaatttctcacaattagctcaa

SEQ ID NO: 8649 - DNA, 522 bp, Homo sapiens
cacatgtaccctaaaacttaaagtataataataataaaattaaaaaaaaaggaaaaaaaagaggcaactgtttctaagagttttgaaaagtgtgtattcatcaatctacactaattctggagatcccttcgcacaggtttcactaaaacaaaaactataactgcaatataaaagctgctacaggtaacagtgctctcccaagttatttaggtaaaggctttataagctttagttattctttctatagaaaagaactgttcactttattataacaacagtcaaagtgatttacatgtccatgacaacttaaggttatcatttaaaaatgccttttacttatgttatcactcacgcagtgcattcttctcaaaaatggaagacatggccaggcatggtggctcactcctgtaatcccagcacgttgggaggcctaggtgggtggatcacctgaggtcaggagtttgagaccagcctggccaacattgtgaaacccagtctctactcaaaatacaaaaaaaattt

SEQ ID NO: 8650 - DNA, 184 bp, Homo sapiens
ggagcctgatcacagctatatctttaatgtgtggagtgatatttctaattgggcatgcacatcggactcttttacatttatactgcatatatattattaggtcctgactggctacttgtcacgttgttttggcgagcattatttactattctatctgtgggaacacactacccagcatgtctga

SEQ ID NO: 8651 - DNA, 413 bp, Homo sapiens
gattcacgtctccttccaaaatggaaggatattcggaggctcggtattgccaagtgagggaagatttggaggtggtttactttgctggggctgccataacaaagtacgcgagactgggtagctcaaacaccaaggttggtttctcctgaagcctctctccttggcttgtagatgacatcttctccccatgtccccatgtggtcttccccctgtgattctgtgtcctaatcccctacttgtaaggacaccagtcatactggctgaggacccacccaccctaattgtctccctttaacttaattatctctgtagaaaacctgaggtcctgggggttaggacttctacttttgaatttgggaggggcacaacatagcccataacagagagcatcttcagagtccgtgctcctgcag

SEQ ID NO: 8652 - DNA, 392 bp, Homo sapiens
ggatgggaaagatgccttcaaaatcgaatgcatgggaagaaacttccatgaaaattgctacaggtgtgaggactgcaggatcctcctgtctgtcgagcccacggaccaaggctgctaccccctgaacaaccatctcttctgcaagccatgccatgtgaagcggagtgctgcggggtgctgctgagagtgcccgctgggcagtgaacagaccactagccccggctggggcccttccctgacttggtttcccttcctaacctgctcttgcacactttccttctgagcctccatggagaccagcctgcaagccggcccaacctgtccaggatacagtggggctgagcacccccaggccttccactcctctaccctctgggcaccaaaaggctcct

SEQ ID NO: 8653 - DNA, 107 bp, Homo sapiens
ctgaggtaggagaatcgcttgaacctacatccttgtagcctatgacggatttccttaagctgaataatattccattgtatatatgatggatgatcttgctacatcat

SEQ ID NO: 8654 - DNA, 339 bp, Homo sapiens
actggtatgctacttcctccagaaaaacacccttaatatccgttttggcctcttttaaaattcctcttctccatgttcctgtagtactccagtttacctgtgtctgacactgaagacgctgtgctttactgtacatttgggagtctcccctcccactggagactgggctccctaagggcgggtctgtcctgagtatctctgtggtgtcccctctggtgcagtgtctagcattggtcaacagatgttcatggcaccgaactgataaattgatgtgtgtgtacgtgtcacgtgttcctggcaaaggattaagttgctagccaggcacagtgcctcacgcct

SEQ ID NO: 8655 - DNA, 482 bp, Homo sapiens
cagcaatatgtacttttgtttgtttatttgagacagagtcttgctctgtccccaggctggagtgcagtggcacaatctcggctcactgcaacctctaccttctgggttcaaacaattcttctgcctgcctcctaagtagctgggactgcaggtgcatgcaagcatgccagctaatttttgtatttttagtagaggtggggtttaaccatgttgcccaggctgatctggaactcctgagctcaggtgatctgcccacctcagcctcccaaagtgctgggattataggcgtgagccactgtgcctggccagcatatctacttttgaagttcagccccaggctgcagacctggctgggtccaggcttcaaatgatgtcaccagggccaggctctcttcgtccctctggctggcttcatgggtgggagcggccaccaggagggctaggctgccttctttccaagtttaaaagtgaactcaaaagct

SEQ ID NO: 8656 - DNA, 56 bp, Homo sapiens
gcagcttccgggaaaccaaagtctttgggttccggggggagtatggttgcaaagcc

SEQ ID NO: 8657 - DNA, 581 bp, Homo sapiens
agccatggccgctgggtgggctccaggggaggggagctcctctgaaccaaccatcctgtccccactatacacacatgcacacagggggctgttcaagactgaccgggtgctggggacagcccagctgaagctggatgcactggagatagcatgtgaggtccgggagatccttgaggtgagaggtggacattcatccgcgtgctccggtatggccatgctactcgttaacattattaaaacacttcctgccttgagccctctatgagcctgtctgttgacccagcccctcccctcagagcctcagacctccctactgcccagccctaaatacttgcagtaccccactccattatgatcaactggtatctcagccataccatgggctcatattttagaaaccactcttggccaggcatggtggctcatgcctgtaatcccagcactttgggaggctgaggcgggcagatcacgaggtcaggagatcgagaccatcctggctaacatggtgaaaccctgtttctactaaaatacaaaaaaattagccaggcatggtggcgggcgcctgtagtcccagctactcg

SEQ ID NO: 8658 - DNA, 448 bp, Homo sapiens
caaatatcctcagtaaagtactggcaaacaaaattcaacagcacattaaaagatttatatgccgtgatcaagagaaatttatccctgggttacaacagtggttcagcatatataaatcagttaatgtgatatatcacattcacagattaaaagcaaaaaacacatatatacctcaatagatacagaaaaatattttttaaactcaacatccattaatgataaataatatttaacaaaataggtataaaaaacttacctcaatactaacataataattaatagacaaagaagcctgaaaactttttctcaaggacccagtagaaaacaaggatttcggccgggcacggtggctcacacctgtaaccccagcactttgggaggccgaggtgggtggatcacgaggtcaggagatggagaccatcctggctaacatggtgaaaccccatct

SEQ ID NO: 8659 - DNA, 588 bp, Homo sapiens
atcccttgagcccaggggttcaagactagcctgggcaacaaaacaagactccgtctctacaaaaaaaattttttttaatttaaaaattagctgggcatggtggtgcatgtctgtggtcccagctacctgggaggctaaagcaggagaatcacctgagcccaggagttcaaggctgcactgagccatgattatgccactgtactccagcctgggtagcagagtgagacactgtctcaaaaaagaaaacaaaagaaggaaaggaaagagaaaggagaagggaagggaaaatggaaggagagagaaaagaagggcagggcagggaaggggaaagaagggcagggcagggcagggcccagccagggtagatagtagtattgtgacttagagcatacaaccattatccaggcctcagggtacatttataacagtaacagtcaatctaatactgtatatggtattagttacccaggagcctgacatcaagtcagcagtcctccaactggtgggacaggcagacttgcagagagcactatgaaggacagcaggctccaattcaatagaatagaccaaaagagaacagtaagggag

SEQ ID NO: 8660 - DNA, 603 bp, Homo sapiens
tacatataaaatgcctcacaaatcttgggttaagaacttctcctctaaaaagagtaggaagtcgaaattgaaaacaggagcctatttactcaatcatttggcttgaagttgaggcaaatgccttatatataggattgtcgctgaggtctccatcttcccaagcaaaggtgccctctgcactcttcttgccaaccaaaccaaaccaaaccaaacaaaaacaaaaaactcaagaaacaagcacaagcactccaattcttgtgcccacatcacagtacattcaaccttaacaccttagaggtttacttatccttatccttaaatgttttctttcttgtaggccactaaggttgggtatgcttctagtaatgggaatacatggggctgagcctctacttgcctgcctcagagcacatattggaaatttcctagtaccaaaatctgatccctagtttaggaagaagtcaagagaccatgttggaagataaaaataaacgtatataaaccagaacaagattggaggggagaggaggcaactgggagacagaacaacttgtgaagagacaaatacattacagaaattcataaagtgtgaaagtaatacat

SEQ ID NO: 8661 - DNA, 381 bp, Homo sapiens
tctattctttttcatgtttccatgttcctttctctttttcttgaaagattagacctagaatctatcataaccaactaatgcatactctatataaatttgttgatcaaataaaatgttagagctatttaaatttatcataacagctttattaaaaaacttttactgggcttagttcaagaaccagctttgctctaacaatcctggggccccatgttatttagttgccacatggcctcacattcaaagaaatacaatctaaaagctaaaagtaattttaacaggaattctgttctttcagcatctctgaaatagcttataagcgatttatttttcaactcacatcaatatttatcaaagtactctttttttttaaataaaaag

SEQ ID NO: 8662 - DNA, 445 bp, Homo sapiens
aattcggcacgaggcttcctgctctttgtattttggctaaaggcggtgaagtgagaggcggagggggatttaaaaccagcagaaaaaggcttcttgttgggctgatggtgtttgtgcgagaagctgaggtgggcagggaggagagcctaggagagcggtagggctcatgggcaggccgttggtgtacgccttggccctgcctgtccccagtcccaccactgtggactccaggccatcctcagtccaggtggtcactgtggcctgggccacatgctggcgatgacggggatggccttccacatgcctgttctctggaagaggggctcgcgttgtgcccaactggggacgtcctgcccccaaccccccaaaacgctgctttcttctgccctcaagaggccctcagaagagaggaggctgagtgaggggcatgagataaaccccgaaa

SEQ ID NO: 8663 - DNA, 179 bp, Homo sapiens
atgaagtcagagctaagaaatgctagtggggatagggggtgagatagagttgggaaatgtttcagagctacaggtgacagttgttggtgtccagttggatatgtaccatgaagggaagaagcagtcagagtgggcaccaagctttctagcctggaggactgaatggttctgtgcacatt

SEQ ID NO: 8664 - DNA, 490 bp, Homo sapiens
ggcacgaggcactgtcatgtctctagctgggaaatacacattgaacaactggttggcaacggtaacgttgggccaggcgggcatgcacgcaacatactaccacaaagccagtgaccagctgcaggtgggtgtggagtttgaggccagcacaaggatgcaggacaccagcgtctccttcgggtaccagctggacctgcccaaggccaacctcctcttcaaaggctctgtggatagcaactggatcgtgggtgccacgctggagaagaagctcccacccctgcccctgacactggcccttggggccttcctgaatcaccgcaagaacaagtttcagtgtggctttggcctcaccatcggctgagccctcctggcccccgccttccacgcccttccgattccacctccacctccacctccccctgccacagaggggagacctgagcccccctcccttccctccccccttgggggtcggggggggacattggaa

SEQ ID NO: 8665 - DNA, 166 bp, Homo sapiens
cgagccacaagctgcactgtgaacctgggcactccgcgccgatgccaccggcctgtgggtctctgaagggaccccccccaatcggactgccaaattctccggtttgccccgggatattatagaaaattatttgtatgaataatgaaaataaaacacacctcgtggc

SEQ ID NO: 8666 - DNA, 445 bp, Homo sapiens
ggcacgaggcatatgcttgtctcaaagattaagccatgcatgtctaagtacgcagggcctgagtctctgccctcgtgggcgttgagtgacactgattctcgcgtgtctccggcctctccggcagggagtcctagcgcagactttgcggatcatggagagtctctgggagacaggcacctgcggacgctgcagataagttacgacgcactgaaagatgaaaattctaagctgagaagaaagctgaatgaggttcagagcttatctgaagctcaaacagaaatggtgaggacgcttgagcggaagttataagcaaaaatgatcaaggaggaaagcgactaccacgacctggagtcggtggttcagcacgtggagcagaacctggagctgatgaccaaacgggctgtaaaggcagaaaaccacgtcgtgaaactaaaacaggaaatca

SEQ ID NO: 8667 - DNA, 228 bp, Homo sapiens
acagaataagactccatctcaagaaaaaaaaaggttaaagttcctgacttaatgaggaaataaaaaaattatatgctgaagttgctaaaatctagcttgtgtttgtgaaattgtgaagaaagaaaaagaaattcatagtagttttatggtcacacttctgcaaaaattgcagccacagtgcatgataagtgcatagttaaaatggaaaaggcattttttgagtggaaa

SEQ ID NO: 8668 - DNA, 141 bp, Homo sapiens
ggcacgaggttttttttttttttttttcaagccccagccccctttttttttatttaaaaaacccaaaccaccccccgggccccaaaaaaggaaacctggttggggccgtgaaaaaggggccaccagggggcccgggggggg

SEQ ID NO: 8669 - DNA, 544 bp, Homo sapiens
ggcacgagcctagttatgctataatcaagcaggaaatgtttatggaatggaaagattaaggaaaaggtatgttcttattttagcaataaaacgaataccagaagctttaacattcaccagtacaaataaatagtttcaatggaataggtcgaaagtaaagggacatcactagagtaaatgctagaccttccctctccttttatttttagcaacagcaaagcagaaactaagatctacaagtgatcaaagagggtgatccattcagtttctgtgtagacaggaataataataataccttttacatattggtacagtttgtaaaaacactttcacttactcatttaatcttcatagcaacttgatgaggtagaatactataggaagcagtattagctcaggttggtacgtaaattactgtgtttaaatttcaataaaacagctatggaatccaagacattcttggcgcctaataaactgtattctttgccaacagtgaaagtgcttctctgttgcttggtaagttttttccccttagaatactaat

SEQ ID NO: 8670 - DNA, 300 bp, Homo sapiens
ctatgatcaggactgactaggtagttggcatggcccatagagaacaaggaaagatgggctggtggattggcccacctgggagccacatggggcaaggggagccctcaccctcagccagccagacgagtgggatttcccccagcacagcatacccccttcacaaagggacaactaaagtgcttcattaagcaagtcctggatcctgtgccccccaactgggtgagacaccccaatgggtcaccagacaccttatacaagagcatttctactggcatcaggtgggtgcccctcaaggacaga

SEQ ID NO: 8671 - DNA, 393 bp, Homo sapiens
gggagtcaggcctgggcaggaccctgctgactcgtggcgcgggagctgggagccaggctctccgggcctttctctggcttccttggcttgcctggtgggggaaggggaggaggggaagaaggaaagggaagagtcttccaaggccagaaggagggggacaaccccccaagaccatccctgaagacgagcatccccctcctctccctgttagaaatgttagtgccccgcactgtgccccaagttctaggccccccagaaagctgtcagagccggccgccttctcccctctcccagggatgctctttgtaaatatcggatgggtgtgggagtgaggggttacctccctcgccccaaggttccagaggccctaggcgggatgggctcgctgaacct

SEQ ID NO: 8672 - DNA, 476 bp, Homo sapiens
ggcacgagctcatcacactgttgtatacttcgtagctattacttctttaatccccaaggacttgtttaacaaagtgttcttcagtttctacttcctagttcctttgtggaactggtaaaaatttaaaatatcttaacataatattttatttcaaatgataaacagtaaggtaaaatgtggtttttcttggacaacttatggtagaatgatgtctagaatatttagttatgtcatttaatactttttttctttacaatttaaaaaaaaatttattttattttagattcagggggtacacgtgcaggtttgttacatggctagattatgtaatgccgaggtttggcctgctagcgcagccatcatccaaagtgaccctagtacccaataggtagttttcaacctgtgtgcctcctcttctaccttctcttttggaatctctagtctattacttccatctttatgttcacatgtactca

SEQ ID NO: 8673 - DNA, 181 bp, Homo sapiens
ggcacgagctgggggtcctgcagtgcccgccttcttagctcagggcctttgcataggctgttcctctgcctgggtgcttttcctgctacttcccgtggctgcatttgcttaacttactcttctgatttcagtctcaatgctgcttccttaggggtaagccttctctgaccctacattctgt

SEQ ID NO: 8674 - DNA, 300 bp, Homo sapiens
tctgtcaagtgtcctcatggtattctctctgttcctctcctcaggccatgggtgtatatggagccctcaccaaagccccagtgccagggactccagactcactctccagtgggagcagcagagatgtccagggtacagatgcaagtcttgatgaggaacttgatcgagtcaagatgagttagtggagctgggcttggccagggagtctggggacaaggaagcagattttcctgattctggctctagcttccctgccaagattttggtttttatttttttatttgaactttagtcgtgtaa

SEQ ID NO: 8675 - DNA, 62 bp, Homo sapiens
ggcacgagggggcttcttagggccaatcttaccacaatgctcacgtggacacgcaggggctt

SEQ ID NO: 8676 - DNA, 300 bp, Homo sapiens
ccttgggccagaccctttcccctggggtgctgatttcacacctgtaaaatgaagaagtttgacttgcacagtgcttttcttagactgtggtaaggggtggatgtgggggtagtgccaagaccaagtgaaagaggcttctggacctccatccttgcttcagccagagcagcgtgggttcatttcatttttggattttggtttgtgggaagaaagggttctcttgccggtgtgtgtgtttctgataaacaaagaagtgtggaagtggctgaatgagatgacccaaggactctttctgggaag

SEQ ID NO: 8677 - DNA, 174 bp, Homo sapiens
cccaagccaagcatcgcatcccctgtgatttgcacgtatacatccagatggcctaaagtaactgaagatccacaaaagaagtaaaaatagccttaactgatgacattccaccactgtgatttgttcctgccccaccctaactgatcaatgtactttgtaatctcccccaccctt

SEQ ID NO: 8678 - DNA, 489 bp, Homo sapiens
acacctaacagtcgcggagccggccgcgtcgtgagggggtcggcacggggagtcgggcggtcttgtgcatcttggctacctgtgggtcgaagatgtcggacatcggagactggttcaggagcatcccggcgatcacgcgctattggttcgccgccaccgtcgccgtgcccttggtcggcaaactcggcctcatcagcccggcctacctcttcctctggcccgaagccttcctttatcgctttcagatttggaggccaatcactgccaccttttatttccctgtgggtccaggaactggatttctttatttggtcaatttatatttcttatatcagtattctacgcgacttgaaacaggagcttttgatgggaggccagcagactatttattcatgctcctctttaactggatttgcatcgtgattactggcttagcaatggatatgcagctgctgatgattcctctgatcatgtcagtactttatgtct

SEQ ID NO: 8679 - DNA, 669 bp, Homo sapiens
ggcacttgagataagcctcataggaggagagaagcttctccctgtgtggaaggaggcagcacacaggccacagagaggcgcagaagggacaactgaggccaagagaggcggaaggtccccagacgggttttctaaaatatctttctctgaatagcatttttacttaaatttgatatgcaaatgcagataattggtattcatgtaaatatttactgcttaaaacagaaagttacttgtaataggccaggcacagtggctcacgcctgtaatcccagcactttgggaggctgaggcaggcagatcacgaggtcaaaagatcgagaccatcctggccaacatggtgaaaccttgtctctactaaaaatacaacaattagctgcctcaggaggctgaggcaggagaatcacttgaaccagggaggcagaggttgcagtgagccgagatcgcaccactgcactccagcctggtgacagagcaagactccatctcgaaaaaagagaaagttacttataatagaaagcctgttcaaatgtggcaagtgcaacgtattcttttggaggctctaaacccaagcctgcaggtccctgatacgtcttctttgccatctagtggtagccattagaactgcatgtgtgggcccggcgccgtggctcacgcctgtaattcccg

SEQ ID NO: 8680 - DNA, 197 bp, Homo sapiens
tgggacccttcacggatgacatctgccaacgctgtggggactctcatcaaaactgctccttcctttccacgggtctgcttcttctgacctcatcttatgtttgctttttcttttcttccttggctatttttctacgatcctctaataaccaagtccttgcaacttttggctcatatgggatacacagacaacttttt

SEQ ID NO: 8681 - DNA, 153 bp, Homo sapiens
gttgttagatgtcagctaaaataaagactatttgaaacatgtacagatatgcagcaaatatcacacttgatgttgtaggactaaaagcttttcctttgggatccagaataagtcaaggctgcttgctgtcactactctgttcagcactgtatt

SEQ ID NO: 8682 - DNA, 461 bp, Homo sapiens
atgtgagtgtgtgtgtgtgtatagcatcaagtatagccacaaggtagtagccttagtcactaaattgtttgctattgctggctgtattcatcacgggagtccatgttgactcagatatgtaggacagcaagaattcccacgtcttctgagctcaccttacagagctaagagatatggcagccttaatgaaaggggggagcctttactcacataaaccctgtgaattctactgtaaattttcctacatccaaatggaatgtattttggatgttgaggattgttgagggggcggggtctgtttttaaacaagtgagaaattgatatatatttacacgctatcatattgtacagaaactggccattgatcagtagaaatctcaccaaatacagagaaagtcttgattcaaaacttaaaatagcagggagaccaatgtttaaaacatgttgagttaaaaaagaaa

SEQ ID NO: 8683 - DNA, 348 bp, Homo sapiens
gccccttcggattctttctataagcaaattgcgccttggacataggctttgaatgctttgagagaacctctcttcataagtggaaataaaatcatgatttaattgtatcaaacgcattatggataatctatgggatttaatgaatcaataggtgaggctgagttggtaagaagtgaacgttacttctgcatttaaaaaaatacatttaactcaataggaagtaacagatgagtaattggaaaacattttaaacttgatcataaagaaataaaaattggccatgtgcagtggctcatgtctgtaatcccagcactttgggaggtaaggcgggcagatcatttgagttta

SEQ ID NO: 8684 - DNA, 331 bp, Homo sapiens
ggctagattttcagatgtgggattatgggttcagatatggtttacacatttttatagttcttaatacagatggccaaattgctttctgaaagagaagcttttcttaagtatttttctccaacttgtatcttaaacatcctgaacatgcttagcaccactgtcttgatatatctgcggaaagccacgtctccacttttcagtgtgtcgggccctgggagaggcaggcatcctgcgctggctccttggagctgggtttaaaaatgtctcctctggctgggcgcggtggctcacacctgtaatcccagtacttttgggaggccgaggtgggcgg

SEQ ID NO: 8685 - DNA, 130 bp, Homo sapiens
tgaaggtttaaatccaaggtcatggcaaaacatctgaagttcatcgccaggactgtgatggtacaggaagggaacgtggaaagcgcatacaggaccctaaacagaatcctcactatggatgggctcattg

SEQ ID NO: 8686 - DNA, 529 bp, Homo sapiens
ccgttgctgtcgctgacggcgcttttgtctccgggtccagaggcctttcagaaggagaaggcagctctgtttctctgcagaggagtagggtcctttcagccatgaagcatgtgttgaacctctacctgttaggtgtggtactgaccctactctccatcttcgttagagtgatggagtccctagagggcttactagagagcccatcgcctgggacctcctggaccaccagaagccaactagccaacacagagcccaccaagggccttccagaccatccatccagaagcatgtgataagacctccttccatactggccatattttggaacactgacctagacatgtccagatgggagtcccattcctagcagacaagctgagcaccgttgtaaccagagaactattactaggccttgaagaacctgtctaactggatgctcattgcctgggcaaggcctgtttaggccggttgcggtggctcatgcctgtaatcctagcactttgggaggctgaggtgggtggatcacctg

SEQ ID NO: 8687 - DNA, 366 bp, Homo sapiens
taagtgaccatttcttcactcctggttttccaattgttttgacactgacattcaattaggaggactaaatacacagtggtgatgatggtggtgattatatcattttatgatcaacaccttcttcactgtttgcttctcccaatattacttatgagacaggaacttactttttcttatggccctcaacaccccccagttgctcctagaaccctatctcttttctgatcccattacacaattttgaggttttcgttcccccccttatactttgttttcctgcgatttttgagggacctggggttttttctacctctcctttttctcttaaattttttctttctaacttagacctcccttccctttttg

SEQ ID NO: 8688 - DNA, 91 bp, Homo sapiens
tgctgtcggaagctagatggactaggagagacttgattttggtgctaaagttccccagttcatatgtgacatctttttaaaaaaaataaca

SEQ ID NO: 8689 - DNA, 380 bp, Homo sapiens
aaggacaaggtttgggcatggcagcagagctgaatgaaagcttgccatcatggtgtactggaaaggtacagatacatggtgaatgccactgttctggactttgtgttcattggtaataaatgaaggagctcaacttgtttttgcaagagggacatttgcaataattaatctagggacagagagatactgtaaagatcaatgattaggatttgggatccggcctcagataaaccagggctcaaaactctcttcttcctcttaataagtgagtgagtgagtgacttttggaagtcacctccctaaataccagttcttcatctattaatgggcatgttaacagtacagtcctgaagggctaatggaaagaaaatacatttaaa

SEQ ID NO: 8690 - DNA, 360 bp, Homo sapiens
agaagttgagtggttgggacagtggtccccttcgtggtggaaagaacactgcctcagataatgtgtggctttcctctggtcagaggcccaaatgagtggacaagtactgtgatttctcaagcccctatgcagtgttagatgccactatgaaatacgagccattgaaagaaatctcttcaacttattattttttatcacgaacgtacatatcagttatttatgagatttttttttttaaatatttcattttttttcacgactttttctgccattgaattaccctttttctcatgcactgggggtcaaaaaatacatgccataataagatggcagttaaacttcatcagtattttttttttt

SEQ ID NO: 8691 - DNA, 209 bp, Homo sapiens
tgatgccaatatatttgcgacttcccacttgcaatatcattatcaacaggtagagaaagacataatggtttcaatctccttgctgacaaacacttctctacacttgttaaatcacagatttagctaaaaaaaaatgaaaggaatattccccgttggctgtgaatttataaaaattgctttctttggcagacagtcctgtttcctgtctc

SEQ ID NO: 8692 - DNA, 315 bp, Homo sapiens
  misc_feature 41, 48, 50, 51, 52, 55, 69: n = A,T,C or G
ggcacccaccaccacacctgactaatttttgtatttttagnagagacngnnnttnaccattttggccangctgggctggaactcctgacctcacgggagccacctgcctcaatctcccaaggcgctgacactccccgcgccacccactgcgccccgcggaccacccctcctcactgggagcgcgcccacccggggggccgccaccacctttcgccccccacccccacggaatggggagtaaagcgggcccccccgcccccccaccccgcgaattatcctggagctcacagagcgcacccgcccgccccccccccc

SEQ ID NO: 8693 - DNA, 390 bp, Homo sapiens
ggctccagtgttaatattatattcagtagcagccttagaagagtggtctaagacttgaacctggagcaattttatagcacagaatcctacgaagataggactgtgaacatttgttttctttttcgtgtgtgtcaaactaactggtttttgctttaccaataaaatgtcctcggcagagtaaattttaaacgtgaaaattatagatcttgatattgaatccatcagtgattcaagagatacacctatttgcctaaaacaacctaagatgtattggttatggaatcatgtgttggataggttcttaagacctgtttcctcaaatcttgacacagttttcaagggtggcttattgacttgcacggttgggcagataatccagatttacctaag

SEQ ID NO: 8694 - DNA, 470 bp, Homo sapiens
attttctttactcctgtatctgatgtctgggctgcgatgactcaaaggctgatttcagctgagactgtagaccacgtgcctacttgtggcctccccttttgccttgggtttctcacagaatgtggctggttctggagaatgagacttccaatgaaatcaggtggaaatgacatctcgccgctttcagcatgctctattggttggaacagttatggacttagctagattcaaaggaagggaacaaagaccccctcctctcagagagtggggcataatgagagaatttagggccatgttatccaaccaccacaaatgccttctgaatttgaggttctgcctcaaaagttcatagttcctttgactgaaggacttctatatatccaagcatcgtcagccccaggtatattgttccatgtaagtgaccaggactaccttagtatttcgtatagggaaagtgacctgaataaatt

SEQ ID NO: 8695 - DNA, 79 bp, Homo sapiens
cgattctcctgcctcagcctcccaagtagctgggactatttttgtatttttgtatttttctaattttgtatttttagta

SEQ ID NO: 8696 - DNA, 357 bp, Homo sapiens
ggaaaggaggtagaaggatgagaccctaacacctggtttctccttccacttcaggcatttgtcagattcttggactgcattgagtaggggaataagaagttgggcagaaatcccctaacatatgtcctggtttctcagggctaaagaggaaaacactgaatttcaaggcccaaccaagtcaagggcccccttagtaaatacactacactttgggctgggtgacctcaaggtccacacctaaggtaacatcaaggcgatccagaagtagatcttaaatgtagctcaatcttggctgggcatggcggttcacgcctgtaatctcagcactttgggaagccgaggcgtgtggatcccttg

SEQ ID NO: 8697 - DNA, 202 bp, Homo sapiens
acagaagggggcccactgaaagttattacaaaaaattgtgcagagtaaatcaactaatcccagtgaatcaactaatccaaggctgtgatcattttaataactctccacaaaggctcagaaaatttctccacccatgaatttcttctacacagctgtgattataatgtgatacaaaagcaacatccttcagctagtgcagttg

SEQ ID NO: 8698 - DNA, 654 bp, Homo sapiens
ttagtagagacgggatttcacttgttagccaggatggttttgatctcctgacctcgtgacccacccgtctcagcctcccaaagtgctgggattacaggtgtgagccgccatagccagcccatacatctctctttaaagaaactccttagactcctgtgggcaatctggaaggcttagagaagattgtttctgtgaagctgaaggtagattccatgcaggaactctgtgaatttatagaaatcatgtaaaacctgattttccccaccccctatcatccccaaatgtgccaatggacagacccagcctcaagattccaggttttcagtctctttgatcacttgctcctaaatgaaatccagcaagagagaggaagaattttacttgctgttctgacatttcaccatcttcctcagatttagtttgctctgctatgcgggagtcaacagaaaatggcacacaaatatccatcgactctttctaaaatatgttaaagttgatgtgtacaatagctcccaggtcacacagtctattaatacaccacacagatctgaaaatatgcccatgaacctacagtttcagatagagaaacaccagcctagagtcttactactgagcatttttaaggctacacatggtcattgctgaaagagagag

SEQ ID NO: 8699 - DNA, 91 bp, Homo sapiens
gagctaaaacaaaatcaccaaaaaaatctcataatgttttaagaaaagtttatgaatttgtgttgggctacgggttgtacaagcttgcttt

SEQ ID NO: 8700 - DNA, 255 bp, Homo sapiens
gggatcgcgtctgcaactcttattgctttggcgtttacctattggggatttaaaaaaaaaattgttcatttttataaaaaagacatgggctggctgggcacggtggctcaggcctgtaatcccaatactttgggaggctgaggtgggcggatcacctgaggtaaggatttcgagaccagcctgatcaacatggagaaaccctgtctctaccaaaaatacaaagttagccaggcgtggtggctcatgccagtaatc

SEQ ID NO: 8701 - DNA, 620 bp, Homo sapiens
atctttcattacatattcttccgtagtcatatgttcataaagggtagagtgcatgcacaaaacacctgcacttttaaaattctttctctcctcttttgttaagtatatttatttgaacttgcttaagttaaatacatgcatgagacaatatcaacatatgctaaaattatttatcacagctaaagacatctcaccgaattccactcatctgatttaactgtttatgctatcttaaagtttcctgtatttctcgttctgttactttgctaatttcgtatactcaaccctgatttggaacatagacatctacctttaaaattcaattaagatttttggtaacttcttaagtttttttaactgtggtaaaatatacataaaatgtaaccatgaccacgtgcggtggctcacgcctatagtcccagcactttgggaggctgaggcaggaagatcacttgaggtcaggagtttgagaccagcctggccaacatggtgaaaccccatctctgctaaaaatacaaaaattagctgggcgtggtggtgggtgcctataatcccagctactcaggaggctaaggcaggagaactgcttgaatctgggaggcggaggctgcagtgagctg

SEQ ID NO: 8702 - DNA, 501 bp, Homo sapiens
attttaacatggaggaccgatccatatattgaaatccaattcttctactctttaaactcagctcaagcttcattccttctattaagtctgtaacccaaatgaatcagaccttttgctgcatcctcattgtacctgtgtgcacagaccacaactgcaccacctatatactacatacttgaggcatacatttatcatcactcctctgggtttcttccttatgagactgtaataatgtaggggaaaggcagacctggcccctgtctttatacccccagaacctagcacagaggctggtaggagtaaatgataagaaaattatactcaaggacgggtgcggtggctcatgcctataaacctaggactttgggaggccgaggtgggcagatcacctgaggtcgggagttccagaccagactgaccaacatggagaaagcccatctctactaaaaatacaaaattagccaggcatgggtggtgcacgcctgtaatcccagctactcg

SEQ ID NO: 8703 - DNA, 459 bp, Homo sapiens
aatattttgttaaaaatgcccccacatttattattgaagtatattcaaaatatattcaagatttgatacattggtttagccattcagctgatgttgagattgcagcaacctcagcccacaaaaacacaaacctgaggtggagtgtattcatccatttttgtactgctttgaagaaatacctgagactgggtaatttataaagaaaaagaggtttaagggactcgcagttccacatggctgggaggcgagggaggagcaagggcacatcttacatggctgaaggcaagagagtgtgtgtaggggaacggccctttataaaaccatcagatctcatgagacttattcactatcactagaacagcgccaaaaaacctgcccccgtgattcagttaccttccatcaggtacctcccatgacacatgggaattatgggagctacagttaagatgagatttggct

SEQ ID NO: 8704 - DNA, 311 bp, Homo sapiens
tccagagtttggcccactcttcccctggggaaaactgtcattgtcttggctgggcatggtggctcatgcctgtaatcctaccactttgggagttcaaggtatgtggatcactttaggtcacgattttgagaccagcctggccaacatggtgaaacctcatctcactaaaaatacaaaaattatcctggcgtggtggcacatacctgcaatcccagctactcaagaggctgaggcaggataatcacttgaacccaggaggcacatgctgcagtgagccaagattgcaccactgcactccagtctgggcgaca

SEQ ID NO: 8705 - DNA, 271 bp, Homo sapiens
caagggtacagtgaactaaagatcatgccagccactgaactccagcctgggcaacagagcaagaccctgttttagggggaaaaaaaaatctatcttagctcctatgtgccataaatgttacaacactcatagtctggaggaatcacaaagtctttaagaaaatggagacaggacctatagtgatcactactcacaaatcactagaatcacatgctgaaacactgctgcagaatatcaatgtgtggtctgttcccactggccattaacccaa

SEQ ID NO: 8706 - DNA, 118 bp, Homo sapiens
atggactgtgccagtcttgtccactcctgtgtccccaggtcctgtcacaaggcctggcatgtggtagatttaaagtggttgcaagaagccgggcgcggtggctcacgcctgtaatccc

SEQ ID NO: 8707 - DNA, 469 bp, Homo sapiens
caatggtgagataccagcccctagaggagaagactccaaagtgcctctgtccctcacccatcaggtgccctgaacaagattaaagctattgcccggaagaccaaagaggtgattgaccgggtccgcaagttctttcggtcaatcatggatggtgtgaaacacataggtaagcacattagcatgtctatcccggggactcaaaatgcacccagtcctggccgggtgcggtggctcatgcctgtaatcccagcactttgcgaggccgaggtgggagaatcacttgagcccaggagtttgagaccagccttggcaacatggcgagaccctgtctctataaaaaataaaaaaatagaaaataaataaaactagccagatgtaatgacacatgtctgtagtcccagctactggggaggctatggtggaaggatctcttgaacccaggggtttgaggctgcagtgagctatgatc

SEQ ID NO: 8708 - DNA, 506 bp, Homo sapiens
gaaggtaaaagtagttgcatgggcatctacttttttaaaaaagttcagtgtggcttccaaaacacactgaataagcacacatgccttagttgtaggaaataaaaactaactctggcaatcttattttaaaaatttaaaaagtgattttatttaaaagatattagagatcatataatgtgtgagagccctgcgagtatacagaaaaggattctgtaaggtctgaagggtcagacaacagaaaccgtagcaagtatattacagaacaataacaagaagttttgtgtgtgacttatagcggtcatgcatctgacctctaactatttccaagatttgcgtcccatcttttggaataaaagtctcctaatctttgagaggctgaagggggtggatcatttgaggtcaggagtttaagacgagcctggcgaacatggtgaaaacctgtctctactaaaaatacaaaaaaatgagctgggcgtggtggtgcactcctgtaaacccagctactc

SEQ ID NO: 8709 - DNA, 477 bp, Homo sapiens
taatcccagcactttgggaggccaaggcgggcggatcacgaggtcaggagattgagaccatcctgcctaacacggtgaaaccccgtctctactaaaaaaatacaaaacattagcctgacgcggtggcgggtgcctgtagtcccagctactcggggggctgaggcaggagaatggcgtgaacccaggaggaggagcttgcagtgagccgagatagcgccagcgcactccggcctgggcgaaagagtgagactccgtctcaaaaaaacacaaacaagaaaagaagctagttagctctgtcataactgccagtgattcatagtcccacatgtttcagagcaggcaggttgtacagaaagccaactaaggatgatcaaaaactttcagatgatcttgactgttcagttgaggtttgaaattaaaaatctatatgagcacctgactgtataattatgtaattttttttttccagtaatataa

SEQ ID NO: 8710 - DNA, 144 bp, Homo sapiens
ggattttgatagggattatattgaatctgtagatcaatttgggagaattgccatcttaatgatattaagtcttccaatttatgaacttaggatgtctttctatttacttaggtcttctttaatttctttttttttttttaaaaa

SEQ ID NO: 8711 - DNA, 590 bp, Homo sapiens
agacagcccagatatctattaccgtaagtctgcaaatatattgtacctagagttaaaatgcaatctcatgctctataagctttattgcatataaggaaaatgcctaagaaaaggccagtacctgaagaaagagctatgggaagggtcagctaaccagaaggcacctttttttctgacacagtgagaccatctaagaactgcaatgaatcagggaaatgaggctctaaggtaaaaccaggaaggccaggcagtctgcaaataaggggaagggaactatcagcatgaagctgtgattcagacaccagacaaacagtcagaaagtagagaatacagggcaagccaaggtcaagacagtgatgcatgaaaagccaggtccaggtcagaagaacagatctaacagtgagacattggagacttggtctcacccattcatcagaacctaacacagactacctccaacagagagctttggaattcttcccactgaagacaactgagacaacccgaaaagtggcccaaaaatgtaactgatatgtaggcagctatctcaatcacatgctgatccttcccacatttatggcaaataccat

SEQ ID NO: 8712 - DNA, 389 bp, Homo sapiens
aattttatatttaatatagataataaattgactaccccaaatggtggaatgcaaggatagcatattacaaggaaaatgttacaaacaactaacattaactagacaaaggatgaaataatcatttcaaaaaaggttgaggaggctatcagtaaaattcagtatctattactgataaaaatgttggaggaaaaagtgtatcagaaaatataatcatgggccagtcgcggtggctcacgcctgtaatcctagcactttgggaggccgaggtaggtgggtcacctgaggtcaggagtttgagaccagcctggccaacgtagtgaaaccttgtctctactaaaaatgcaaaaatttgcgcgtggtggcacgcgcgcctgtaatcccaactactc

SEQ ID NO: 8713 - DNA, 568 bp, Homo sapiens
tagctttgttttgaaagaaggtctgatggtgaaattaaataacaagttaggatcaaggagaccatttgagagagaaaaggatctaaattctagttctagaatggaatcccagacataacatataactgaccccaattattctttagctaaaaggtatccttttctacaacaggattgcagtcattcttttccaattgactcagcaatatataacctctttttattatttaactttattttcatagctctgacataagctaaactccatttaatccaaaaggatttttaaagtgtctatactggaaaagactacaatggaaaaggactgactttgtacctagagcaggccaggatgaaaacataccctaggaccagaacagcaaggagggatgggtttcaatggatggtgctctgaaaacagcctcttgaaatttagatgctggcccttgaactaattgtatgggtggagcacgttagctgcttcagaataaaaaccaattatattaacaaccaccctcattatgcaggacataatcaccatgaccatgtcaatatgtgtgtggaatat

SEQ ID NO: 8714 - DNA, 285 bp, Homo sapiens
ctgctcgggaggctgaaacagtgagacaggagtatcgattgaaccagggagttggaggttgcagtgagccaagatcacaccactacactccagcctgatgacagagcgagactccacctcaaaaaaaaattaataataatcaaaatgggtttattgaagtaataaaaatatattttagcattagaaactctagattaaggaagaaaaatcacatgctcttttaaatatatttacataaataattgaataaaatccaacatgccatatccactttcacacagaatg

SEQ ID NO: 8715 - DNA, 188 bp, Homo sapiens
gatttgagagatgcttgacttctttgctcaattattttatagaatgcagggtttttgcattttcccactttgtttcagtgctttccatggttaatgttggtttccttctcaggtcaaaataagagatcgcatctagaaatgataatcctcctccagtcgaggcagattttcttagaagcttcctagta

SEQ ID NO: 8716 - DNA, 149 bp, Homo sapiens
ggcacgaggagaaactgcattttgggggggtttgaaatccaaagaatgcagtttgtaggcagtcgagatccttgaaaaatcaagatggattttaataatgtattaagaataaattggatttgaatcaacacaggaaacagggattttac

SEQ ID NO: 8717 - DNA, 516 bp, Homo sapiens
ctttaaagccacagagatcatagagccttccaagcaggataagccactcatagaaaaattagcggagatttatgtcaactcctccttctacaaagagacaaaagctgaattacatcaactttccgggggtagagaagaagctcttcatacatgaatacatcagcggatactacagagtgtcatcttatttccttggaaaactgttatctgatttattacccatgaggatgttaccaagtattatatttacctgtatagtgtacttcatgttaggattgaagccaaaggcagatgccttcttcgttatgatgtttacccttatgatggtggcttattcagccagttccatggcactggccatagcagcaggtcagagtgtggtttctgtagcaacacttctcatgaccatctgttttgtgtttatgatgattttttcaggtctgttggtcaatctcacaaccattgcatcttggctgtcatggcttcagtacttcagcattccacgatatggattta

SEQ ID NO: 8718 - DNA, 407 bp, Homo sapiens
ggcacgagaattcataaaaggagttagttgcagtcatgtgtggccttgtctagaagcaaaaattataatatcaaaagctctacgtatgaattgggccttaatgtctttgtactcatttattcttttattgaaaaaaagctctaaatgcctattttgtgtcacataattgagatttgctttgaaatgtctgattctttactatagtactatctgagttgttcacagtggtatggtgatccatactctgaactgttccattatctggaattaaaggcatataataaaaagaaatagactgtatttagtttattctagtgtaataaattgaaaagtaaatagatgattagaagcaagtgttccaaataaaaatttatcagcagtataacaattctatcattcattccaac

SEQ ID NO: 8719 - DNA, 381 bp, Homo sapiens
ggcacgaggagagtctcactctgttgctcaggttggagtgcaggcatgtgatcatagctcaccgaagcctcaacctcctgagctcaagtgatcctcttgccttaacctcccaagtagctaggaccacaggtgggcatgaccacacctggctaagttttaaaatttttctgtagaggtggtgtctcactatgttggccagactggtctcaaatgcctgggctcaagcagtcctcctgcctcaacctcccaaagtgctgtatgattgttttaaataggaaaaaatttagaattttataatatcaaggcacttaatttttagttagtgatataccatccaaaaggcatctgaggctgggcacgttggttcatgcctataatccc

SEQ ID NO: 8720 - DNA, 537 bp, Homo sapiens
tcccatgaaatatcccctttattccatctcaaatccttacctatcaactccttgcccagagaacctggaataacatatttacttctagtccttttcaatgcattttccccttgggagaggtgagggggtggtgtgtgtgtgtacatgaaagaaaatcagacagattgaccatctttgacggtaactcaaagggataaatagatatagttaaccgataaaaaaacaacaggtgaaaccatgatatttcatgtcttgaccagattataagcactcttaggataaaagcaaggtgataacccactttgttcatggtgtattgaagtatctttcttagtggacactcccatttcaccccctctcatcacctgttctgaaatacatgctgggaagttgacaaacaagattctggtaaatttggagaagacagcggttcaaataaaggagaaaatttctctgtatttctgggaaaactgaaaatattcagtagataagcaaaatgttcaatttcatgttgctcttatagttataggtattcta

SEQ ID NO: 8721 - DNA, 452 bp, Homo sapiens
gtgagcctagggacccatttctcctcctttgacagggacatcagtggagccttctcagacccacaggggtccttggtgaattttgtcatggttatttaaggaaccttgcctagaagtcccaacttgcagttccccatcgacgggaaggcttggactccaagatgattataaaggaatatcggattcctctgccaatgaccgtggaggagtaccgcatcgcccagctgtacatgatacagaagaagagccgtaacgagacatatggcgaaggcagcggcgtggagatcctggagaaccggccgtacacagatggcccaggcggctctgggcagtacacacacaaggtgtatcatgtgggcatgcacattcccagctggttccgctccatcctgcccaaggcagccctgcgggtggtggaggagtcttggaatgcctacccctacacccgaacc

SEQ ID NO: 8722 - DNA, 332 bp, Homo sapiens
tatctggagagatcataaaatacattacagttagagtcaacaatcaccacttgaagaaatggcttcaacacaaagcctgataaaatttacatctggtaaatgtctatttaagctactgcgaaacacatatacttaaaaaaaaaaggccttttcattgcctcaatgtcttgaaggctggagattgtaaagcacttccctaaagttcctatgagcaggatgaggctatttgcctttatagagctatagaactaataagcaatcaaaggggattttgaaaaaagcctataacttccaaagtgataaactgtggaaatattcattggacctgtccc

SEQ ID NO: 8723 - DNA, 405 bp, Homo sapiens; identical to SEQ ID NO: 2928

SEQ ID NO: 8724 - DNA, 389 bp, Homo sapiens; identical to SEQ ID NO: 398

SEQ ID NO: 8725 - DNA, 304 bp, Homo sapiens
acttaagtagggaaatcacaaaataagtgccaatgaacaataaatgttcaacctcactacagttaaaatgtatattaaagcaagagttgagatgacacttttccttataaaacagacagggattcagggacattgggactctaatgctgctggtaagacatgaataaatacataccatctctggcaatcaataccagaagctttaagcattgccttttgactttgaaattgtacctggaaatgtatgtttcagtaaccatcatgaatgtacacaaaatcctgaaactcttaaaactgatgtcac

SEQ ID NO: 8726 - DNA, 459 bp, Homo sapiens
ggcacgagggaggatgttggcaagcaggtgtggcggggcgccctgctcctggcagactacatcctgttccgacaggacctcttccgaggatgtacagcgctggagctcggggccggcacggggctcgctagcatcatcgcagccaccatggcacggaccgtttattgtacagatgtcggtgcagatctcttgtccatgtgccagcgaaacattgccctcaacagccacctggctgccactggaggtggtatagttagggtcaaagaactggactggctgaaggacgacctctgcacagatcccaaggtccccttcagttggtcacaagaggaaatttctgacctgtacgatcacaccaccatcctgtttgcagccgaagtgttttacgacgacgacttgactgatgctgtgtttaaaacgctctcccgactcgcccacagattgaaaaatgcctgcaca

SEQ ID NO: 8727 - DNA, 596 bp, Homo sapiens
agtattagagtaacaaataatgaataaacatagtggttactctatagactgatatcttcaattactgttcctgctttttgtaagcttttaaatggttcccattcactgaacacttatgtatccagtaaagtagataacataggtgctttatatacttcatatttgttagtccttaaatctgttgcagatattaatagtcctcttttttcagatgtgtaaaactgagtttcagtgtaaactgaatctctgagagattaagtcattttctcaaggttcagaacagtaagtggcagagtaagtgcaggattgaggctagggtctttctactccaaagcctaaccctgtccgtcccagagtgatacaatattataacctacgccctgatatttaacaaaattaaagcattcttgggaatacttctagttttcatagaaagatcctcaatcaagatcattctggaatgtgcagaagataaaaagaaatgggatggcaaaacgcagagaaagcaaggcaaatgaaagctacaaacctctcccttagataaatgtacacatgagccgggagcggtggctcacacctgtaaccccagcacttcg

SEQ ID NO: 8728 - DNA, 409 bp, Homo sapiens
attattaaagctagttctgctactctagaatggcacttttacatgatggcttttccaatatttgcaactgtggtaatcttaacttttctcttctccagatgaaattttgtctgttccattcagagcttcctctcgtgttttaattccaggcttcttccacattctggtcacctccttgtgaaaacattctgattcagtttatccttccagaactgaaaacacactactaattctgtagcccgagctaagtataaagggacacagcaagggtttcctcactttgcgtaatagtggaggactgaaaaatgactgtgaaacctgaaataatgcaaagtgatcctagtgggaaaaatgatgatcattctgagacctttataaactgctttttttttttttttttttgaaaagg

SEQ ID NO: 8729 - DNA, 568 bp, Homo sapiens
tggtggcgcatgcctgtaatcccagctactcaggaggctgagacaggagaatcacttgaacctgggaggcagaggttgcagtgagccgagattgcgccactgcactccagcctgggtgacagagcaaaaactccgcctcaaaacaaaacaaacaatagaaaaaagtaacaaaaccaaactgtggttcccagatcaatgtaattgataaatccctagctagactaacaagagagagagaatacaaattatcagttaataccagcagtgataaagaaaggatatcactagggtgggcatagtggctcacgcctgtaatcccagcactttgggaggccgaggcaggtgaatcacttgagatcaggggttgtagaccagcctggtcaacatggggaaaccccatctctactaaaaatagtaaattagctggacatggtggcgtgtgactataatccctgttacttgggaggctaaggcaggagaatcacttggacctgggagatggaggtggcaataagccaagatcatgccactgcactccagcctggatgacaaagcaagactccattgc

SEQ ID NO: 8730 - DNA, 587 bp, Homo sapiens
  misc_feature 68: n = A,T,C or G
tcatgggcaggagccactgcgcccagccattctagctcgtgttttgctgagcatcgtcgcatgtcttntggggtacacacacaggagtgaggtagtggagcaccggctaggcgcatttttagcgttaatcgatattgccaattcatttccccagtttacgtgcccaccagcgttgtagacaagttccagtttctccacatcctgaccaacgcttattagaataaacttttgaactgtttttgcttttagttcttccgttggtgacctccccacttgcagatcagcagatcaaatccccatgctgttgacaacacgctgggagcaaagagccaggtggagcttctaacgaagtcagatcttctgatattttaaaagctgagataaaattcacaggccataaaattaacccttggtcgggcgtggtggctacgcctgtaatcctagcacttcaggaggccaaggtgggcagatcacttgaggccaggagttcaagaccagcctggacaacatgacgaaactctatctctattaaaaatacaaaaattagccggggcgtggtggcacatgcctgtaatcccagctactca

SEQ ID NO: 8731 - DNA, 551 bp, Homo sapiens
agacgacagaagggtcggcctcccaaagtactgggattacaggcatgagccaccgctcccggtcagcagtttttattctgttgaccatttcttccttcctgaagctcttctcattaggactatagattaccattcatatattcaacatctgaaataaagatgcttatactaactgagctctgtgtgtgtcagctctgtgacaaattctttacatgtattatttcatcctcccatccatttgatgagataggacaataatcactctaatttaaagaaaccaggcttagtagtttgctgaagatcatgcagtcaaggaaatggtagagaaaggggttcatgtccacatgtgttagttatcaaagcttgtgtccttaaacagtgcatgtaataccacctcctcatgccaggtatcatgttggggcctggaagtaaggaggtgaaaacacctcagatacagaggggaaaacacttagtactcagggaactatgatacagtggaaaaaccaactaagcagatagaatgtgatgatttcaataaagaaggtataatt

SEQ ID NO: 8732 - DNA, 501 bp, Homo sapiens
  misc_feature 312: n = A,T,C or G
ctgtcagcaacatattactattacaaactctgtaaacatgcttctgaacaaaatggtgtattcacaaaaaattttaattacttaagtcataaaaaatcagtctagcatcaactcttctgaaagtttggttctatattaaaacataaaaattagctgaagagacatcttgctaagcttctcagtcactgaagagcaagtcaagaagtccacaatattcttaccaatatataaacactggaaaatgttccttctaagcatgataaggatgtgaacaacagcacctctctaatgactaaaacttctgttcctcanaaaatacatcattagccaacaactttctggcagaagttgcctttaattggcatttgtacataaccaagtgttagtctgtatttacaccgtaagttaatttggacaaaattaaaagctaattgatcacatatctcaacctcagtcataaatagtgtgggcccaaatatcagtctccccatggatttatgc

SEQ ID NO: 8733 - DNA, 611 bp, Homo sapiens
atatgaggaaactaggcttggaaaaatatagtaatttgcagaaagtcttacaattagttagtgcagctttaattggaaagtttatgcttctttttaccaccatggtatactttccactgtgggcagttgtcttatcagggagggaatgcagttgtttttgctctccttttttaaagcactgaaatgttagaggttactttgataattggattggttagctaattagaatatagagttttttgtttgtttctatttaaagagacagggtctcactttagttgtcccggctgaagtgcattggtgccatcatggctcactgcaccttcagcctcctggcctgaagagctcctcctgcctcagcttcccaaagtgttggcattacaagcatgagccagcgtgcctggcaggaatgtagttctttttttctttttttttcttttttgagatggagttttgctctgtcgcccaggctggagtgcagtggcgtgatctcggctcactgcaaccgctgcctgtagggttcaaataattctactgtctcagcctcccgagtagctggcactgcaggcacccgccaccatgcccggctaatttttgtatttttttttagt

SEQ ID NO: 8734 - DNA, 584 bp, Homo sapiens
agtataaaaaattcttttattctgaattataaattctgactataaaatacatacgttttgagataaattgtgcatataagcttttagccgaagatgagtgtgttttaaagatgatatgtagctgggtgcagtggttcatgcctataatcccagtgctttgagagtccaaggtgggaggactgcttaaggcccagagttcaacactagtctgggcaacccatctctagtgagacccccatctctactaaaaaataaaaaaatatggtggggcatggtggcatgtacctgtagtcccagctactccagaggctgaggtgggaagatcacttgaactcaagagtttgaggctgcagtgagctatgctcataccactgtactttagcctgggtgacagaacaagactctatctctaaaaaaactcaaaaacatatatatatgcattttatatttacctagttggttgtatgagtctaaaatcttaatcactcaaaaacatattaccgccgggcgtggtggctcacgcctgtaatcccaacactttgggaggccgaggcgggtggatcacttgaggtcaggagtttgag

SEQ ID NO: 8735 - DNA, 311 bp, Homo sapiens
cttcctcaacctgctatgaatatggctattaaattaagaacttaatagatctcttgctcctttttgatctcaaagtgtcttttggagctaaatttgcaaagaaaaggccctcattaaaaaaactaagtaaatttaaggccaggcacagtggctcacgcctgtagtcccaacactttgggaggccaaggcgggcagatcacttgaggcgaagggtttgagaccagcctggtcaacatggagaaatcctgtctctactaaaagtacaataattagccagacatcgtggtgtgtgcctgtagccccaactactc

SEQ ID NO: 8736 - DNA, 528 bp, Homo sapiens
atcttgcatatgttactctttttctaaaataaaaaataaattcaacattggttgtcaagtgtcttcattaatcatgaatgccccaatgcagtgtaatatagaaagcatggttttcttttttttaagaatgaaatgtaatctttaggggtgacatttaaaatatgtttctttttagcaaaagtcttatgatctttctttgacatattctcacctggataaatttaattttaaattaggaatggtaaaaattgaaaatctttttatttaatatgtaatatcttaatcatgaagataaagtttaataggactgcatgtttatgtttgtattaatggtaggacatggagatgtatcaatcaaaccaataaaactccagtacacataatataaatgtcatcttgctttggtgggtgagtagcattgtgaacaggatttcttgtcaagttggtgctgttattgaggatatgagaagcaaagttcttgagtaggtaatattcatgcaaaattttctgtttctaaatatcttctaa

SEQ ID NO: 8737 - DNA, 235 bp, Homo sapiens
tatttttgttaactattaagcattattgagcacttatgttgccaaccactacaatgaggatttccatatacataatcactgagtcctcataataatactagaaggtacaaacagttattacgcccattttaaagataatggatgttaatcggcatgaccaatatcacacctaagaagcacaaagacttgagcccagatcaatctgtctcctggcttatcatgatattaactaatg

SEQ ID NO: 8738 - DNA, 172 bp, Homo sapiens
gagggttgtgctctccaaatatggccccactgagacacgcctccctcagcagactttcctgcagacgggtgtactgacagacggatgttcagacacgtagacattcagagagacacacagatgttcaaacaagtgcattctggctgggtgggtggctcacacctgtaatccc

SEQ ID NO: 8739 - DNA, 549 bp, Homo sapiens
gtgatagaaatatatattgagaagataaagagaagaaaatacgttgattcaaatggaggctagtgtaaaggagctataacctcatttaataataataattcataagtcaagaagcagcaataaaatcatgttatttagaaacatggagataaatactagaagaaattgctaaaagatttaaagtagttgccctggagaacagaaatggaggttggattgaacagaaccagaacttctatttttcagggttgtagtgtagttttcactttttaaactatgagtgtgtttctttgataaaatagaaaaaatatataggttctaaagagttaaatgaagctggatgtgatagtgtgtgcctgtaatcctatctacttgggaggctaagacaggaggatcgcttgagcccaggaatttgagaccagtctgggcaacacaaagagacctcgtctcaaaaaattaaaaataaggccaggcgcagtggctcacacctgtaatcccagcattttgggaggctgaggtgggtggatcacctgaggtcaggagtttgag

SEQ ID NO: 8740 - DNA, 382 bp, Homo sapiens
actccagacacatcttcaattgctgctggaagattaagggaagctagcaccctgaaaaaatgagatactatgttatattgaagtctaaaacaatttaactcatcaatatttattttatttaatttaatcttctataaccaaatcaacagcaatggagttagcacccagaaaaactggataagccctatcaatgaaaaacaaagcaaagattaacagaaaaacaaaaaaatcagtgattgatacaattaaaccaaaatcattaaaaaattaagttcacaattcagaattaaaagccaaaaaataggctggtgcagtggctcacacctgtaatcccagcacttgggaggccaaggcgggcggatcacctgaggtcaggaattcg

SEQ ID NO: 8741 - DNA, 657 bp, Homo sapiens
agacagcgtctggctctgttgcggaggctggagtacagtggctcaatctcagctcactgcaacctccgcctcccaggttcaaacgagtctcctgcctcaacctcccatgtagctgggattacaggcgtgtgccaccacgcccagctaatttttttgtatttttagaagagacaggggtttgccatgttggccaagctggtctcaaattcctggcctcaagtgatctgcctgcttcggcctcgcaaagtgcttgcaattacaggtgtgagccactgcgccaggcccaatgacaagtttttatatctgaaaatccctagggatcaagggaaaaatttatacaaataatgtgagcattctgtaaagcagcacgttataaaatgagtaactaccatgaaaaaccaccatgtaatctaggaatgaaaaaactaacaatcttcatatattcaagaaaaacaagataaaatggaagagaaggcaccatttatgatagcaaaaaaaaatcaaatacataaagttaacaagaaatctacctgcagaaacaccacaatattcctaaaagacacaaaatagacttgaactaatggagagataaaccatgttctttgatgggaagactcagtattatacagataatgatgctcattaaattaattttta

SEQ ID NO: 8742 - DNA, 429 bp, Homo sapiens
acttctagaatgatggaggtgataattctgcctaactccacattggtagaaccacatctgggatatcatgttagtgcccggtgacagattagtgcaaacagaggaacatgactggattgctaaagagctcaacattctgccacaagagggacaaaaaaagtaaattggaatatataacttgaataagaaaatactcacggaggctgggtgcaatggctaatgcctgtaatcccagcactttgggaggctgaggcaggtggatcatttgaggtcaggagtttgagaccagcttggccaacatggtgaaacccggtcctactaaaaatacaaaaattagccaggcatggcaatgcatgcctgtaatcccagctactctggaggctgaggcacgagaatcgcttgaacctgggaggcaggggttgcagtaag

SEQ ID NO: 8743 - DNA, 441 bp, Homo sapiens
gagagatcattcatttaaaaaaatttttaaattggcataatttttggcatataacccaggagcatttcaaagaattgctatcacaaaactccttttatctatgtatttatgttaacaggtgttctcagcacatacatctacttgaaagtgtaagattaactctgccacactttgctcatgcatatataaaccaaatgggaaaatccccatccattttagtaagagttatatttccaataaaattttgtaaataattaataattacttaaaagttacatatgggccaggcacagtggctcacacctgtaatcccagcacttttcgaggctgaagcagaggattgcttgagaccaggagttcaagaccagcctgggcaacatgataagacccccatctgaacaaaaaataaaaaaaactacctgggcatggtggcacacacct

SEQ ID NO: 8744 - DNA, 497 bp, Homo sapiens
  misc_feature 397: n = A,T,C or G
atttacctgtcatgggtttgttcttcctacaaattttaagtcatacttatgagcttcatattaattccaatattgtaatgagttgaaaatgatgcagagaagttatttctacctgacttgaccttttggacccaccctaaattctgtttaataaacattaaccaaatgcactgagtgctggacatggtgactcatgcctgtaatcccagcactttgggagaccgaggcaaggaggatcacttgagcccaggagttcaagaccagcctgggcaacaaagtgaactccatctctacaaaaaattttacaaattaactaggcatggtggcacatgcttgtagtcccagctactgggtaggctgaggcaggaggacaggttaagcctgggaggttaaggantgcagtgagccgtgtttgcaccactgcactctagcctgggtgacagaatgagaccctgtctcaaacaaacaaacataaaaacaaacaaaaaccaaatgta

SEQ ID NO: 8745 - DNA, 406 bp, Homo sapiens
ggtgggtggaggtggggtataggttggcaattatggatactgagtgccttgtttgaagaaaatcccccaacccctccaagcctgaaaactttaagtcatgaagaaagtagtagagaattggccgggcgtggtgcacagtggctcatgcctgtaatcccagcattctgggaggccgaggtgggaggatcacttgaggtcaggagttcgagaacagcctggccaacatggcaaaaccctatctttactaaaaatacaaaaattagccgggcatggtggtggcgtctgtagtcccagctactcaggaggctgaggtgggaggattacttgaacctgggaggcggaggttgcagtgaaccaagattgtgccactgcactccagcctgggtgacagagttagaccccctct

SEQ ID NO: 8746 - DNA, 443 bp, Homo sapiens
cagaatagatgatgttcatttatataacattctagaaaatgcaaactaatatatagggacaaaagctaatcagtggttgtctgaacccaggagtggagggaaagatgaaaaagggcatgagaaaacattttggtttgatagtaaaggtggtttcatgaatgtacacatctgccaaacctttaaatggatacagttagttgtatttacagtatactttaataagttaaattatcagcataaaatttttaaaaatcagtaactggtcagctgggtgtggtggctcatgcctgtaatcccagcactttgggaggccgaggtgagtggatcacgaggtcaggagatcgagactgtcctggctaacatagtgaaaccccgtctctactaaaaatacaaaaacaaaattagccgggcgtggtggcatgcgcctgtagtctcagctactc

SEQ ID NO: 8747 - DNA, 567 bp, Homo sapiens
gaggggatgcaaaagatgagtccgtgctggtcccatttcaaagaactcaaaatatggtggagacaagcacgtatacaaaaccagaacacagtataatgaataccacaggagtatacccgcaaaagttatatgggtgaagaaagaaggattaattagttctgccagagaaggactaattcagggaaggctttggagaacagggcacacatgatcggagactttactggttcagtcagctatataagtgataaggataacatgaagagaggtgccaagggcaagaaagtataagatatgtgtagaggctgggtgcagtggctcatgcctgtaatcccagcactttgggaggctgaggcgggcggatcacgtgaggtcaggggttcaagaccagcctggccaacataatgaaaccccatctctactaaaaatacaaaaattaggcgggcatggtggcgggcacctttagtcccagctacttgggaggctgaggcaggagaattgcttgaacccaggaggtggaggttgcagtgagccaagattgcaccactgcactccagcctggttgac

SEQ ID NO: 8748 - DNA, 512 bp, Homo sapiens
  misc_feature 455: n = A,T,C or G
aagtgacatgatctcggctcactgcaacctctgcctcccaggttcaagcaattctcctgcctcagcctcccgagtagctgggattacagctgcttgccactgcgctcagctaacttatgtatttttagtagggatggggttttcccatgttggccaggctggtctcgaactcttgacctcaggtgatctgcctgccttggcctcccaaagtgctggtattacagtcgtgagccaccgcacccagccaacactgggaatttctgttcaagatatgctgtgaatatcatgctgtgaagcataatattgattctatacattgtcagttagatgactgttggatgctagagaggcaaatggtcttataataatatttaataaaatataattattgaaagtgtttaaaatcagctttattagtgacttgcatttaaatttggtattttatttaacaattntaaaagatatatttaatgatatctatttattatattttcttgaacagtttgtgtctc

SEQ ID NO: 8749 - DNA, 433 bp, Homo sapiens
aattttacagccagaatcagtttgattatttaacaccaaatagtgacctccgtataaattatatatttaaatcaattggtattaaaccaaaagatccaatttttaaaataaatttgatgtcctaaaattaagagactgacatcaattttatcatgaaaaattccattataatccctactacttgagaaattagctgctcaatattgacatggacactgagaagaaaaatacattttggcataaaattaggaagaataaaattattattatgggaggcttcatattcaaaaacaactaaagcattttaaaatataccatttacaataacaaaaagagagttaactgctcggatcccattgaagttcatgaagttgatatactgtagcaatcaaaattctcaagattaatatttcatgacagaatacctggattt

SEQ ID NO: 8750 - DNA, 101 bp, Homo sapiens
gcactcagtaaatgttcagcaaatgggtgaatggatgataaaattgatagtttaagtagttttttttaagttgtttttctttttccttcgtggaaaaccgc

SEQ ID NO: 8751 - DNA, 355 bp, Homo sapiens
aggatggccgggtgtggtggctcatgcttgtaatcccacctcagtcttctgagtagctaggactatgggtgcacaccactatgcttggctaatttttgtgtatttttgtggagatggggtctctctatgtagtccaggctggtctcaaacacctgggctcaagccatcctcctacctcggcctcctaaagtgctgggattataggtgtgccccaccacacctggccctcccttatatttttaagcaaagtttctagagataatggaggatttaaaattttagcttttctttaatcctgttcctttcttggcaagtggtacaaagaatagtataaaaagtaaggatctggcctggt

SEQ ID NO: 8752 - DNA, 565 bp, Homo sapiens
atgtggtgcccaagtattaaagtatctactatccctactttttcgtccttcatgagcagcccgagtgtactaaacacattactgttacttttgtcatacaaagtttcaaacaccagtgagaatagtggaatgaaccacccttgtgctcctctagctttaacaatgtatacctgtctacttcctctcccaaataattttgaaggaaatcctagacattttatctgtagatgcactatatagctctttaaagacatctaaactctctttaaatctagagtctctttgtccccttgcagtgtgtttattggagaagttaagtcattttcctggagagtttcccagtcttgattttgctgattgcaatctcatggcgtcattaagtgtattctcctgtatgctgcatttcctgtaaattaatagacctagagaaagcgggtgtgtgtgtgtgtgtgtgtgtgtgtgtgtgtgtgtgagaagggtctcactgtatcacccaggttagagttgcagtgttacaatcagctcacgcaacttctgtctcctgggctccagcgatcgtcccacc

SEQ ID NO: 8753 - DNA, 613 bp, Homo sapiens
  misc_feature 458: n = A,T,C or G
tacggctgctgctgaagactcagcacatgtgtgaaataaagtatacctgaacatagcccagagaagcagcactgtggtttctgtgggagcagcttcagatgcgctcacacagtgggatactgtacaatgcttaaaacagttaggtggagccatatgtgtttcaacacaagtaatgagagctatcgagatggagacagacagacagatatgttacaagtttaaattcctggctctatagaatttctcaaagaggttccctacagcaccccaaagagactcatcaagattgtgtctttaaaaatacccagtcccggccaggtgtggtggctcatacctgtaatcccagcactttgggaggccaaggcgggtggatggcttgaggtcaggagttcgagaccagcctggccaacatggcagaatcccatctctactaaaaatataaataattagccaggtantggtggttcatacctgtaatgccaggaactgagaggctgaggcacaagaattgcttgaaccgaggaggcggaggttgcagtgagctgagattgcgccactgcactccagcctgggtgatggagtaagactgtctctaaaaaaaaaaaaaaaaaaa

SEQ ID NO: 8754 - DNA, 259 bp, Homo sapiens
tgcttagactatgcttgctcaatgtttatttttaggaaacaatcaaatccccttgtggttattaaattaatttagtatcaggccgggcgccagtgacctcaggagtttgagaccagcctggccaacatggtgaaaaccctgtctctacaaaaatcccagctacttgggaggctgagacacaagaatcgcttgaacccagaaggcataggttgtagtgagctgaaatggcaccattgcactccagtttgggtgacagagc

SEQ ID NO: 8755 - DNA, 414 bp, Homo sapiens
gtagctgggattacaggtgcacaccaccacatccggctaattttggtaattttagtagagacggggtttcaccatgtcggtcaggctggtcttgaactcctgacctcaggtaatccgcctgcctgggcctcccaaagtgctgggattacaggcgtgagccatggtgccgggcgttgggactgagctcttaactcagggagtctttgttaattcattagcatcagaattgaactgaacagtaggatgcccggctggtgtcagagaattgattggtatagcaaaaagccccacaaatttggtgtcagaagtgaaggattgagtggtgtgagtacagagagaaaaacgattggtctttcctgtattcactgatccatgtaacaatacagaaaagtattttgattgattctaccattt

SEQ ID NO: 8756 - DNA, 430 bp, Homo sapiens
cagaagggaaaacagaccacacccaacacaatcaactgacctctaacaaagcaccagaagcaatttaatgaagaatggatagtctttttcaacaaatggtgctggtataacagaaggtccacatgcaaaaaaaggaatctagacacagaccttacacctttcacatagggctcacagacctaaacataaagtgcaaaactatacaactcctagaagataacatttggtaaccttgagtttagctctatctttttagatacactaccaaaaggacaatccatgaaagaaaaaactggtaagttaaacttcattaaagttaaaaactgctctgcaaaaaccactgttaatatgattcaagaacatgattttttaaaaatacactgttaaaagaatgaacaggccgggtacggtggctcacgcctgtaatcct

SEQ ID NO: 8757 - DNA, 137 bp, Homo sapiens
gagcatgtctttcttatctccatatgctttgtataggcctggcacacactcaacaaacatggggagtgataccttctaagagaattataactagaatccttaaaaggtaaacaaaacatattaaaaaatggaaccca

SEQ ID NO: 8758 - DNA, 544 bp, Homo sapiens
gacagaaggggactaacggcattttcattcgtgaacagttcagattaactcataaacaacagaaacattttcacagccagacaatggcactctgtccgctgtcaatatttctcatgttttggaagaagcctgaccaaccaggatgacctcttgccatagcagtgtggctattcaggctagttccaggacgcagtgcttgtcccaatgtaattacatatgctgcttgacattagggagccactggagaagtttattaaaagtaatttccggctggccacagtggctcacacctgtaaccccagcactttgggaggccgaggcaggaggatcatgaggtcaggagtttgagaccagcctggccaacatagtgaaaccccatctctactaaaaaaatacaaaaaaattagctgggcatggtggcagacacctgtaatcccagctacttgggaggctgaggcaggagaatcacttgaacccaggaaaccgaggttgcagtgagccgagatcacgccattgcactctagcctgggcgacagtgtgagac

SEQ ID NO: 8759 - DNA, 500 bp, Homo sapiens
  misc_feature 343: n = A,T,C or G
ctataaattgtgtataacagtaccctttctaatactgtcatgatgcttctaagctgagaggatggacaaaatgaatgtggtaaataacgcatgaatatattatataaaaattaattttaaaacatatactttttccgtaactaatcaataaatgaatctgcatttcccatagcaattatatccgttgagaatagatttagctgcaagttgtagaaaatccaaaataagagtgccataatagaagttggtttctcccttctagggagatagttccgaggtaaatagtccagggctgttttagcaccccatggtgcaagggactttggctttttccatgtagctntactctgtgtggcctctgtattatgacccaagacaatagcacctatgttcaaacagcagaattgatgaagggatgaaaagaagaggcaaattgtgtgtgccacttgtctcttaagaatgttttccagctgggtgcagtggctcacgcctgtaatcct

SEQ ID NO: 8760 - DNA, 302 bp, Homo sapiens
aatcctatcttgcttgtcaggaagattgcctgctgtgtcctcagcctcctacggtcctaaatgcaattgggaaatggctggcaggttctagcagggaactggcatgatcttttgatctatgcttttaccacttttcttttgagacgaagtcttactttattgcccaggatggaggacagtggcgcgatcttggctcactgcaacctctgcctcctgggttcaagtgattctcccacctccgccctccgagcagctgggattacaggcacatgagaccatgcctggctaatttttgcattttt

SEQ ID NO: 8761 - DNA, 407 bp, Homo sapiens
caaaaatcaaaagatgccttaattcccccatgggtgggccccatgctcttgaagtaagtgctgtgctacttgaagcagtagtaggaagaacccatttacaccatctccccactacaacttttatgccttcagaaagtgttaaaaaactgttacaaatagccatgttgtgtcttggaaaataagttctccagaaaacacctctctgagctaggcaatgtgtgtttctttctgtggttggcagaaataagcccaaatacagattctgatgcttaggaggaagaatgtggtagaaacataacagatttgcaaagtctatcttgtagcatgatttacacttcctcacaagcatgcttcctctgaccttagcctctcagaatgtggggatgataaagggatgcctcatcagc

SEQ ID NO: 8762 - DNA, 283 bp, Homo sapiens
aagacgacagaagggcttgctatgttgctcaagctggtcttgaacttcttaagggatccttaagggattctctggccttggcctcccaaagtgctgggattacacgtgtgagccaccgcacctggcctctcttcctcttgatagtgttatttatccctaggaattgggaggaaacctagctttctaggacccactgagcggatctttgtgccctgaagagcacctttaaatgttagattccagccgggcgtggtggctcacgcctgtaatcccagcactttgg

SEQ ID NO: 8763 - DNA, 492 bp, Homo sapiens
aaacggctaagcctgaatgatggggtgtgccccggatgcctcagacaacagataaagctactccagccaggaagacacagaagtggaagacggagataaaactgcatgaaacgaagggataaaggaagagcaggatttctaaatgaagataccggttcctaaaggatgcaacctgagagaagcataatgaccatatcagcctatttataagcaggcagttaactcattcatcactctgtagctgacgcctgtgcccccagctgcactcacatggcgtggtgagctttcacctgagtgcggcagttacggccccagtagcagtcaggacgggatgttacggccactggaaaaagagaaggggtacgcatctatgagatgtattgcacgcacccactcagctacctgaatcccagcagagacccaacgacagacgctgcggtggaaacgcacggcctctggtccctccataactagtttcctcggaccgttctg

SEQ ID NO: 8764 - DNA, 239 bp, Homo sapiens
gcccaatatagtgatccagattgagatcctcttctttttgtatgtgtctggattttgtttgctagggttttcaggatttttgtgtatatatgcatgagatactcatctgtagttttcttgtgatgtctttgtttggttttggtatcagggtaatactcgcctcaaagaatgagttgggaaatgtttccttctcttctgttttttggaagagtttgtgaagaattgatcattctttaaat

SEQ ID NO: 8765 - DNA, 499 bp, Homo sapiens
caggtaagcctacaggctaaggcagaaaagtataaagataagaagaacctagatccatcatgccatagttgatctgttgaattaccactgctgaatctgttctacctccaaacattttgttatataagatgatgaatctcatgttgtataaccctcttgtagttagattttctgttatcctaggccaaaaatatcataaagaatggcacagacatttagagaaatgagttgaggacagaccatgaggtcccagggagagagaaagagataaagagagtaatgtagactttttaattttttatgaggtaagctatacttttttatttttgattactcattaaggaattttcctgtaccctctaaaatgtatccctatttatttgtattagtaaacagttttcaggttcttgtatccaaatgatctctaaaaaagacaacatatattatcacattcaatccccatgacaataactctgtaagttaaacatttctttttgct

SEQ ID NO: 8766 - DNA, 640 bp, Homo sapiens
ttatattattgtttaaacatagttttgaaaatatatactaaaaaactgataagcacttcttatgataaactagggtctgtgcttcaaagaacaatatttgtcatttttcagtatattaaaaaaaggtgccttaggctttaaagatgttagaaagaggaatcagacacacatgcacacacacacgagttattgcaacaagatggaaataagagtatatcctatttctcagtctcattctattacagcacatcatttaagcagtttggtaatatgatatcctgagtgtgaaggcaaggtagattcattcctctagatgtttacttctttgattttaaaaactgaaatatttactcctctcatatcaatatcagaaaataccactggccttgaaatcaactttaattcttcagataaatatattgagaaatatctttactatttctgcttcacaaaattccagttcagcaccagtaaagacatataattttataaaccaaggaagacaaagagaatagcagagagcatgacaacagatgggagatgtcagtgaaattatagaagagtaaattagtttagagtgttaactgatttagacgagcagtgaacactgaaatctaagtgttaaaagaaaagccacacc

SEQ ID NO: 8767 - DNA, 552 bp, Homo sapiens
accctctctcatgttcagtctgtctaatacatgccagagatttttttttcaaaaagtgctttatccctacaatgtactgacagttcttacagttgagatttgttcttttcagctattgcttgtgaaaaaaagcaagactatgtcactctatagaaggctgttaaagtgactcaggcaggaattaattattctgtacctaaggggttacttgtttaatgggatggcattgactttttgaaaatcaagtggactgagtcattgataaaacatttctaagagtggggctagagaacatattttacatctgacatcctttggcctaacaacatctattattatagtgctcagcagtgtgggcattgaagaggcgcagaatgctttgaaagaaactaatcagaatcttggaacatcatgatcatgccattcttaagtaaatcaactattttcaacactgaagaaaaatgaaacattatttagaaaacaatgagattacaagttccaaactcagccaggaatgtggctcacacctgtaatcccagcactttgggacac

SEQ ID NO: 8768 - DNA, 438 bp, Homo sapiens
gcacgactgaatcctcagagtcggctggcttttgagctctcacgattggggaggagggggcgtgtctggttcgcagctccagaggattgcgttccttcccccatacctgtcccccacagtcacgctctgccctgacgtgcagcatttgacaagttaccccctcgccacatactacttccacccacgtccgagttaactttgttcttaaccttcttgagactaccctcggcctccaggtctttttttcccagttcatttttgcccataagattgagtttcgagtttcagatatcatgcagaaagtttacctttaagactgagcacccatctgatactcttcctcccgaaaaagttcatgctcacgagagagtttgtgggaaaagtgaaagccagtacacgcaggaaactatggctgagcacggggctcacttcacagct

SEQ ID NO: 8769 - DNA, 316 bp, Homo sapiens
actgcaaactccgtctcccaggttcacaccattctcctgcctcagcctcccgagtagctgggactacaggcacctgccaccacgcccggctaatttttttttttttggtatttttagtaaaaacggggtttcatcatgttacccaggatggggtcaatctcctgacctcgtgatccgcccatcttggcctcccaatgtgctgggattacaggcatgagccaccacgcctagccatccccatctatttttcactaatattcaagctagagttgctggctaaaatgatggagcatcaaaatttgtgaactctgggaat

SEQ ID NO: 8770 - DNA, 403 bp, Homo sapiens
  misc_feature 344: n = A,T,C or G
taaatcttaaatctaaataaaggtgctctttttgtttgacttacagcagtgttttaagtcatgtatgagttcgctgttcagaatatcattgttccgcattaaagtatgggacagaaacacagtatgagacagttttagaaatattgctattaatagcaataaacaaatcttcacaaatatcacagaacagtgtaaataacttccctctgataagacatagactaattgtgaattcaactctctaaatgcttggcctcagtttaaaaaatgaatgtagcacattttttcacatagatcatggtatcagaataacaagaatgtttgaatgtctacagtctgcattntatccatcaagaaaacagtagattttgaaatgctctattcagctatgtgtaaacttaat

SEQ ID NO: 8771 - DNA, 432 bp, Homo sapiens
aaaatattattatgttagttttagcgtggaaattggaggctgaaagcatgggattttttaccaaggaagaatggttaaagggaatgacttcattacagtgtgactgcacagaaaagttacaaaacaaatttgactttttgcgctcacagttgaatgatatttcgtcatttaagaatatctacagatatgcctttgattttgcaagggataaagatcagagaagccttgatattgatactgctaaatctatgttagctcttctgcttgggaggacatggccactgttttcagtattttaccagtacctggagcaatcaaagtatcgtgttatgaacaaagatcaatggtacaatgtattagaattcagcagaacagtccatgctgatcttagtaactatgatgaagatggtgcttggcctgttcttcttgatg

SEQ ID NO: 8772 - DNA, 471 bp, Homo sapiens
ggcaataaaatgtgaaacccaacttcttgggcaagtcaaattctggaatcacatccacctaaattaaaatgactagctcgtattttccccatcttcaagtttcacatcctggtcatcaaaagactcgacagcaagacttagaatgaaaaagggtacttgtttatattaatattttttacttgaacacgtgtagcttgcagcaggttcttgatgaatgtgctttgtgtccaaaatgcctccccattgtacacaggtgtacatcatgcatgcaccaacacctaaaactcaaaactaaatggctattttgtaaggttaatacttgcagttaaacagcatgtttgacttgattccatcatggtgctcttaaattacatgtcagtgcatcacatatatcatgatctaatgcagatgactaggctttttccaaaaggaagacagaccctcagacaccaaaagccaatctaaacaact

SEQ ID NO: 8773 - DNA, 474 bp, Homo sapiens
aaagcccaagttcagctaaggtcttgtaggtaaccaagccctggctctttccactgctgctcactgccgggtgccctgagcacaagagcagtccccgtcattactcccaggcccactgttatgggcacgtctgctttccacagactgcctgtatccaagggtagagcccctcttcctcctcttgcatccaggtatcctgaagtttccacagctcctgtaaacttggaaacaaggaacccagcccctcgggtgccccaaagccatcagtttctcccttgctgcagtcacccaggaatccacctgtaaggaatatgacttctgtgtgctctcacagctgtgtacatcgatcaggtcaaggacaatagtcaatctactgacaccactttataaagcttgctacagtttaagattatcatgctgagaccagcctgaccaacatggagaaaccccgtctctacttataacacaaaattt

SEQ ID NO: 8774 - DNA, 600 bp, Homo sapiens
gaataatttatggacactgctggacctcagtctcctcatctgaaagatgagtggttggagaagtttaatggttttcaaatgctttttttttcagtcttcaaataagtgtttacgtagaagcaccatatctgaacaggtgacagtggaccagtctgaatgaaatgagggttggcaggcctgagctccaaaaccttctgattgcccaagccctccttgtcttgcttggattatctccacacaaatggagaaactggacaaggtggtcatggaggtccctgaaagctcaaagactttctcattccaggattccccatgttcatatgccagcatggcatgggggtgctctgtagtcaagcagggtcctttggggggcttagggatggagccaggaaatggctctgggactcagcgggtgtccagagtctcatcagcagggtttctttactttcactgagtggctggtgcctgcacactgagttttgcaggcttactctcacagagtgagcttcctgcaggccccccactgcaacccctttccttcctggagctgtgtgctgactggtgcgtgagcacccccagccctctccccatgctgctgat

SEQ ID NO: 8775 - DNA, 443 bp, Homo sapiens
aagaaatgatttttaaagaagacttaattaccactctatgtgtttttaatgctggctgaaaatacacaagaagacaagctaaagtgacatgtgacaagttctcatttagtctgtcagccatgatagcatattcagaaagataaacaataaaaaaaaaggatcaagagataaaggtagatcctcccatgacctcaaaataattatagtatttgctggtgaggccaaagtttctgtacacagatacctgacatagacagctctatggaattcaagggaaaattaggggaggggacaggtgacaagctcagtctgtggtattaatcgagtagtattctgactgagccccatctgaatttttatttacccattctaatatttcctggaaactaaggctttttacttctctctcagtctactcaaaatgaactactccccaccccaag

SEQ ID NO: 8776 - DNA, 397 bp, Homo sapiens
  misc_feature 150: n = A,T,C or G
ggcacgaggtcttcactctgcgacaacaagcttcttgaaggcaaagaccatattttaagtatcttttgtgtcctagatgcactgagtaaaataccagggatgccgtagatcataaatatgttataatatttaaaaatagactctaaaatntatatttacagaaacattgcaaagatactgcagagtttctgcctatcctacactgtttcccatattattaacgtcttacatccctgtgatcatttgtctgtattaataaaccagtattgatacattatcacagagaccatactttatcaggtttccacaggatttttccttaatgttctttcactatcccacgatcccatgcacaataccacattacatttagtaattatgtctccttagctcctct

SEQ ID NO: 8777 - DNA, 396 bp, Homo sapiens
  misc_feature 263: n = A,T,C or G
aaattatcaaaatggatattaggttggctactagcagtcttggcctcatgctttcagtaaatagtgtgcacttcagatcatgtggcattggagaaaggaagaacatgttaataatataacatggttaggtcatggagtcttgattattgtttcctaatggtactgtttgacttcataggctacaagacaaatttcttcaagtgtaaatttttcgattgaagaagacataaagcctttgagaatttactgtatactcagcactntgccgggtgtaggataaggatacaaaatcatgaaagcctaatttctttccccagagacttatgaatgtggctgaaaagaaaaagtacaacacatgcaaaataattatgaaataatgatgtatgacaggaatgc

SEQ ID NO: 8778 - DNA, 413 bp, Homo sapiens
ggcacgagggaaggactacggtttccgcaggtaagaggcagttgggggccatgggcccagtataggaggctgagctccttccactcctcagaacctccactctatggatctggacctctggaattcagctttctccctgggcactgacttcaggaacacggcgaaaattgaccttacacaatcccagcgccctcctcacaggagcctttcactttacagtggcaaggggctggttctggagaactggctgatgctctgaatttcttcatataccccacatttgactttggcttacactgtacaataggagatgttgctacaggtccctgagatgcactcacattaagcgtatcaagcattgccaatgggaaagtcaaagataatctattttttttccctttgcccctacccca

SEQ ID NO: 8779 - DNA, 578 bp, Homo sapiens
ggcacgagggcctttttccttgttttcttcttagtgacagcattttttggaactggaaatatagcttctattaacagctttgatcttgcctctgtctattgctttctgactgtgttcagtccttttatgatgggagccctgatgatgtggaagattttaatcccctttgttcttgttatgtgtgcttttgaagcagttcagttgactactcagttatcgtcaaaaagcctttttctcattgttctcgtcatatcagacattatggctttgcattttttcttcttggtcaaggattatggcagctggcttgatattgggacaagcatcagccactatgtgattgtcatgtccatgaccatctttttggtgttcctcaatggcctggcccagctgctcacaacgaagaaactcagactatgtggcaaacccaaaagtcacttcatgtgaggttgctgaagcaccattcagcatctggatcctgattctccttttaagctaaaatctcatcaaggcttcaataagaagatggatatggatatatagtatattctactcctgtaaggaaaatggtatttgga

SEQ ID NO: 8780 - DNA, 299 bp, Homo sapiens
gcacgcccccttttctccgccacttcaccagtttctgaaatccaacctcccagacttcacaggaagatagatattcttgagataatgaaaagtgatatcttcgcataccataggagaaaaggctgaggtatatatgatttttaactgtattaggggtgtatgaaccagtttaaaaacgaggttttatttactgtagagatgaatgcaaatcagaaccaatgatcccttggcctacttagttaaaaccagttcatacatcccttagggtttttattattattattattattattacagtt

SEQ ID NO: 8781 - DNA, 511 bp, Homo sapiens
ggcacgagatcagatggggttgtttttattggtatccagttatgtttgcttgtctttccagatgggcccagttattagccatacatagtacattgatacacctccaccagcgggtgaggaaatgatggaaaaaggagtaagaagtggccattcgttttaatcattcctcctggatttgtcctcagtccccaactgccaagtaggatgtgtccatgtataaatgtgtggggcatgactaaagtaccacgtagctgttctttatatttatttacctagaaagatctggcaaagaactcaaagaaaattgtaccatttaatcagtaaatgtgtcccctggtgctagcatggtgttatagaaagtggacaggctttagagttaagtgaatctgggttcatatgttagtgttgctattcattagctctatactgatgaacaaattgcttacactatctaattttgtggtttttttttccatctaaaatagggataataatatctacctcataggat

SEQ ID NO: 8782 - DNA, 524 bp, Homo sapiens
cgcactgtggagtccctgcaagtcagcaggaccagggctgtcttcctgcaccatctggatttggttagctctctctgggcagtggggccgagtctcatttcctccaacaataatgttatataggcaatgatcctgggctgccctaacataattgaaaattatgtgtattgtaggcttggagtgctgaaatgtgggctcataaaaatatgtggtgcacgtagcctatggagattggatgtggcacacaatgaagctttatgtaaagtaagaactataagtctccatgttaatattgtattatgagtatgacagttcttgggtgggtcctcagggcaggtctgtcaccttcaacaaagcccgagtttcctaattctacagagctggtatttggatgtaatcaaatcggttttgcaggtggccaaagatgaaaacttgtccaccaatccagctctccccactgagggatagcatgggatgtagatgggtttgactccatttggcatttttgttcacgggtttttatg

SEQ ID NO: 8783 - DNA, 553 bp, Homo sapiens
  misc_feature 51: n = A,T,C or G
ggcacgaggctggaggctgtcagaaggatgctgggggtgaagacaccctgnggtcctgacaaccattgggagtgtctggtgctcctgggtgagagagagggccagttggaaaagcctgcaggcccagccctggggcagaactgagtgtggcgggtgctgggcacaggatattcccccaggggcttagcttcatgcattcaggcttaccttgaggctccaagcttattggtggcataagctctgcagatccctcacctgccatcagcctcatctgaatctttgtctttcctcagataagcccttaggcaccagcttagacacctccaagaaccaggccccgctgatgcaagatggcagatctgatacccattagagccccgagaattcctcttctggatcccagtttgcagcaaaccccacaccccagctcacacagcaaaaacaatggacaggcccagagggtgaagcaaacagtgtcccttctggctgtgttggagcctccccagtaaccacctatttattttacctctttcccaaacctggagcatttatg

SEQ ID NO: 8784 - DNA, 318 bp, Homo sapiens
atcatagtctaaaactatcacgtctgagttgccttaggatgacagtgctgacacccagtaggaagtatcccatttttatcaggaaagtcagtcacgcgtagggatggtgaggagacgcgtatggatggtgaggaggggagaggagggagacctgctggtgcccttgcaccagggtgaggcctgactcacgctgcttccccccacaggccctgctttgcttgcctgctttttccagaatcgattttgcaagcttcaagattctgttcccctcttcgcacaagtgaggaaggcaaatactcagggtttgaagggagacct

SEQ ID NO: 8785 - DNA, 300 bp, Homo sapiens
cacaggcccttttgtgatgcgttccacgtgtaggagatgtggtggccgcggctccatcatcatatcgccctgtgtggtctgcaggggagcaggacaagccaagcagaaaaagcgagtgatgatccctgtgcctgcaggagtcgaggatggccagaccgtgaggatgcctgtgggaaaaagggaaattttcattacgttcagggtgcagaaaagccctgtgttccggagggacggcgcagacatccactccgacctctttatttctatagcccaaggctctctgactgactccgtcccaga

SEQ ID NO: 8786 - DNA, 490 bp, Homo sapiens
gaacagtgtgtaaggaacttgtgcacatcactgactggtaccccactctcatttcactggctgaaggacagattgatgaggacattcaactagatggctatgatatctgggagaccataagtgagggtcttcgctcaccccgagtagatattttgcataacattgaccccatatacaccaaggcaaaaaatggctcctgggcagcaggctatgggatctggaacactgcaatccagtcagccatcagagtgcagcactggaaattgcttacaggaaatcctggctacagcgactgggtcccccctcagtctttcagcaacctgggaccgaaccggtggcacaatgaacggatcaccttgtcaactggcaaaagtgtatggcttttcaacatcacagccgacccatatgagagggtggacctatctaacaggtatccaggaatcgtgaagaagctcctacggaggctctcacagttcaacaaaactgcagt

SEQ ID NO: 8787 - DNA, 583 bp, Homo sapiens
gtaaattgatgcgatccctaaaaagggcagcattgcagcgcccaggcataagacgtgtgattgaagatccggaagataaagaaagtagactaatcatgttggatccctataaaatatttactcatgattcctttgagaaagcagaactcagtgttttagagcagcttaatgtcagtccacagatctctaaatacaatttggaactaacatatgaacactttaagtcagaagaaatcttgagagctgtgcttcctgaaggtcaagatgtaacttcagggtttagcaggattggacatattgcacacctaaaccttcgagatcatcagctgcctttcaaacatttaattggccaggttatgattgacaaaaatccaggaatcacctcagcagtaaataaaataaataatattgacaatatgtaccgaaatttccaaatggaagtgctatctggagagcagaacatgatgacaaaggttcgagaaaacaactacacctatgaatttgatttttcaaaagtctattggaatcctcgtctgtctacagaacacagccgtatcacagaacttctcaaacctggggatgt

SEQ ID NO: 8788 - DNA, 435 bp, Homo sapiens
ggcacgaggagtatttgctggtgcattggagagtttcacgtaattcttgtgcagattcagcaagagagtttgccggcatgctttgcacagcccctggtacccagtaaggcgattattagcattggtgcttgctggaatcagatattccagaatattctgtcacagctcatcgatgccctcttcttttctgtgggtaaactgaggcagaaactcaggctgggtggaactctgcagcctcagctggagacctcgtctggccaaggactgtggggacacaggccctctaggctgccacctcatggtcccagcagagggcaccagaactgcacagaaagtctcactacccaagtgtctgagccaggccagactgtgctagccagacctgcccggggttcattcactgacctatattgagcacctactgtatgcccagcc

SEQ ID NO: 8789 - DNA, 528 bp, Homo sapiens
ggcacgaggtcagaatggggaaagtggcaggatgcaggcaaacatgttcttaatttagagacagatgaaggctcaggactttcctaggcagataaaagaagaaagaagctgctttttgaaaagagggatcaagattaggacaaaaagggagattcagccatcagcagaacccaaatgagagcctacaaagagacactgtctactcagagtacatcttcagacatccagggtcccaagctactgtgtttactgttagcccttagccattgttaagtcttactgctttataactcttctttaagaatatattaatagtaaaattacttactcctatatatacaacgaatccttaattatcaaaaacatttatagtcatcacctcatgattcagtttgcccttctctagtccaaatgaattgaagtaggaattcataggaccgttcctagtgaagaaagattttagtgctatttaaagaaagtaaaaagtatattctcctctgatagaaattttcattctgataatatttt

SEQ ID NO: 8790 - DNA, 541 bp, Homo sapiens
aatatccagaatctacaatgaactcaaacaaatttacaagaaaaaaacaaacaaccccatcaaaaagtgggcgaaggacacgaacagacacttctcaaaagaagacatttatgcagccaaaaaacacatgaaaaaatgctcatcatcactggccatcagagaaatgcaaatcaaaaccacaatgagataccatctcacaccagttagaatggcaatcatagagcttttcatttatctgagtgttttcctctgcttgtcgggacttgtgctttcacgagctcctgctctcatatcaggggagtgaataattgaatttggatagttttttggtttttagttggaacactccttttcctgtggaacgtctatagaaaaaatgagtcaaacagagaatatgcaggggaggcaactctgaatgcttccatggctacatacatacctgttttctttgatttgctaaaccctaagttaaaaggaaagtactgtctaaaatagggagaaattccctatatttataccatcatttgagtatttacaatgg

SEQ ID NO: 8791 - DNA, 315 bp, Homo sapiens
gaaatgtcaaacacggacacctaggcagcatttacaagcaagagttcactgctttttcgatgtatatcttaagcgcccccagtgaatgaacagcatataactccacataaaaatcattaaatgtaattgacttccagagcaggcagttctgctgtatgcctctggagaaggctggctgaattggaattggtctgtaccttctgtctatcatgtacatgaggttcttgggcaaagagaactttccacaaaatatagtccaaaaattatagatcatcagacaaccaatagcatattgatgagatatctccaagatct

SEQ ID NO: 8792 - DNA, 535 bp, Homo sapiens
ggcacgagcttgcttgaaatacagaatgtccagatctactgagtcagaatttacattttcaaaagcttcctacgtgactcatgcatattaaagtttgggaagcactgacttagattaccttttgagaattccagatgggtcagaaaccagacagaaatactcagtagtgagaagctatggtgtatcagaagctgttaggcatttcatggtttggtagtgagcaagacagatagttttcctgtattcagcgacttagtctagagagagacaggatggaattaagtgtttaggtgctagccaaaagtaaagattcgtagaaaacaagggttcatatcccagtcatcaaagtgataaattttccctgcttaacatttagattaaaaagtaataattaggccaggtgtggtggctcacacctgtaatcccagcacttttggaggctgaggtggacagatcacttgagctcaggaattcgagaccagcctgggcaacatggtgaaaccccatctctacaaaaaataccaaagtcgggcac

SEQ ID NO: 8793 - DNA, 165 bp, Homo sapiens
ggcacgagaatgaaggttggggagaaaagaaagcaatttaggagactctatagggaggaaaggatgagatgcatttcagaaacaaaatattaacgtaaacagaaaaaagagaaagcaatcatgacaaagcctaagagggctagtggaatgctagaatgaactcat

SEQ ID NO: 8794 - DNA, 300 bp, Homo sapiens
cttttttatagtgatcacttttgaattgtgttcagatatgcagtttcaggtgtaatcatcagagctggttagtcaggcattccagatagtggttcttttcagaacctttttaaaagggttggttaactacctcagtagcagaggattgaactataccctgtctgtactgtacatagaaaatctttgtagataaaagcaaggcttgttaaatatgatatgagggtaagattttaatataccaaatgtaacattcttagttgcctttagtttcagaggcttgtaagacttcctcatgaccat

SEQ ID NO: 8795 - DNA, 144 bp, Homo sapiens
aactgggattggtaatagtacagggctgttaggatgattgcatgagatgaaatacatttagcacttggtaagcactctataaatatggcaatatgatagtccctgactcatcttcctctctgttgccctttaaacaggtgagca

SEQ ID NO: 8796 - DNA, 81 bp, Homo sapiens
tttcttactcattaggctctagtctcacttcttattttttaaattgtgagtaattttcatgcttggtagttgatttctttt

SEQ ID NO: 8797 - DNA, 455 bp, Homo sapiens
ggcacgaggaccaaggagatgtgagtgaaaatgatgcaggctgcttccaggtgtgaccagtaagatacttcccacataatcttcctactctttcttccctgtttggcatcccatgtgctaagaatgggaaccctgaggtcctatatgtggaaccataaggtaaatgtctttgggctctgaatctcacacagggctcactgagaataagaaacatccttcttgggctttgtatgaataagaaaatactagcaaatttttaagaaggaagtaattccagtatttcacaaacccttccaaagaatagtaaaaacaaagagctttcctttcctcgttatctaaaattagcctaactttgatagcacaaccagctaggagagttgcaaagataataatcagaagccagtctcactgaacataaatgtgaaagtcttcagcacaatattagtctacttcgt

SEQ ID NO: 8798 - DNA, 335 bp, Homo sapiens
ggcacgagcactcttttatattagggacttgagcatctggagagtgtggtatctgagggagttcctggaactaatgtgcagatgccaagggacaactgtactattgtacttggaagtactcatggggtcatattgcattgtttctttgagtcctaattctgccaacatggcctggtgcttgcattaatcagctttctaatctctgagtaacaaggcacagtaacaaggagcagtaacaaggcacagggctggcacctgagagtggaggtacccaggaggcagacaccataaggcgggaaatggacatatgtacagaatcatggctgcatgtcctg

SEQ ID NO: 8799 - DNA, 92 bp, Homo sapiens
gtcccggagacccagccgcctgacagtgaagtatgaccggggccagctccagcgctggctggagatggagcaatgggtggatgctcaagttc

SEQ ID NO: 8800 - DNA, 351 bp, Homo sapiens
caagatcaagatttttttcctaaagagccatttgtcttattttagcttcaagccaagccagggcatctgagaaataccaagcctccgttgtgatgtgtcgccatgaaaatgttggctgccctctggatgcaagtctgcttgtgctgtgctgtggctcagagttaaatttagataaaaatcagttaggagctaaaaatattcccagctttcctgacaggttgtatccatcatcatgggaggaaaaacaaggaactggctgcctggcgacagggagcgggccaggctgagtgtgaggtcaggcctcggctggaatctcacggactttgaaggacagagacgttttctgagatg

SEQ ID NO: 8801 - DNA, 236 bp, Homo sapiens
  misc_feature 110: n = A,T,C or G
catcttcttcatccccctcctgcctttggggtgcaagtttcctgaaggacttgagtgagatgtcaccaagcaacaggctgtcaggctcttggcagcaagtactggcccancgactcgcggcagaatctctccttggggcgtctgtccttatcaggggtggatgctgtcagacttgctaatggtggaatttctggcatgtggcagggccaagtgcagtggctcacacctataatccc

SEQ ID NO: 8802 - DNA, 332 bp, Homo sapiens
gtcactttgaagatgcatggcctgaactcgactgcttgtgtttgtttacatatcaggcatacccaggcatctcctgcagccagaggttccattgctgtctttgctcagtcctcttttaaaatatgaattagtggacaggcacggtgcctcacacctgtaatcccagcgctttgggaggtcgaggcaggtggatcacgaggtcaggagatcaagaccatcctggctaccactgaaaccccatctctactacaaaaaaattagccgggcgtggtggcgggcacctgcagtcccagctactcgggaggctgaggcaggagaatggtgggaacccg

SEQ ID NO: 8803 - DNA, 387 bp, Homo sapiens
  misc_feature 387: n = A,T,C or G
ggcacgagaaggatctgtctgtgtgtcatggagcacctggagtgttctgtctggaatgctggctgggagccttctcctggcatttgaacgaggggcagctgtgtcctctgtttgccgtgtaaagaaaagaggacagagctcagaggagatgaaccccagcagaaaggggtgcttgaccagcaggagagaagataaccaagagggtctgtgggtgtctcttctgagctacaccagtttccaggttacctgggaccatggataactctcagatcagcaacttgtcagttgatttccaagctgctgttggctggactcagactcagcagggagcacctgggcgagccctgtgctgcgggctggactccggcccatctcgctgattactcn

SEQ ID NO: 8804 - DNA, 422 bp, Homo sapiens
gccaacatcacatcattgactcttcctgagcttatgaacaaataaaaccgcaggtctccttcacaagaagctgactgctaaatatggtctgccctggtctgtgatttttaaatgagaatctatagttctggcctgaatttctatatttctcatgaaaggtttgtgattatcaaacacaccatagtatgaaatcatcagaatatttaaaatgaagccctatgcaagtatgaaataccttatcatttaaatatatagactgtacactgacaggatgtctctggcattaaatgtcttttatgattatcgttacatgttttattgttattgttacatgttttaatgggttttttttttaactttttaaaaaatatgccttttaaagtatgttaaggctggctgcagtggctcatgcctgtaatccc

SEQ ID NO: 8805 - DNA, 465 bp, Homo sapiens
caagaacctgggtgccgagagggcaagggcttggatgctgctgtggggcctgcgcaaagtctgctctcatcagaaaggagcgaccagctgtttccagcatttgttccctccagttccagcactcacctgctcacacgctccctctcgcgaagagtggccagcagcgggctgagtgaaatgcgccactccagttcccacctacaaagcatgtcaaggtcaagggaacaatcccgtctcaatttgttgcagtagatattgctcttggttttgagtatcggtatgaaggaatggacttaaacagaggaatgtgttttcttccgttgctatttgtgttcttattgatgctcaagtggtcacattttcagcaagaggcagccttagcaatgtaacatgaatgatggctttgatttacgtagtgatgaaagtgatgtgtggttgtgtagacatcatctatgatgatctcat

SEQ ID NO: 8806 - DNA, 174 bp, Homo sapiens
ggcacctactccattggcaccgtgggcacccaagatgttgactgtgacttcatcgacttcacttatgtgcgtgtctcttctgaagaactggataatgccctgcgcaaggctgttggggagttcaacgatgcactgcgcaactctggtggcgatgggctggggcagatgtccttg

SEQ ID NO: 8807 - DNA, 399 bp, Homo sapiens
  misc_feature 399: n = A,T,C or G
tatctgctgtaatatttttatctgaggtagggataaaaacatcccatttctggactttacttggagaaccagctagaggtgaatatacgacccttcatgacctggactgaaaacattttcaagttctctatttcggtcaatacagcccctttaataattccccaaagcatctcccctttccacctgtgctacgactctcttgcacacgttttgtattcccacagatcacaaaatcacaaagcaccggagctggaagaatcttaagagataatccaaggccaggagcggtggctcacgcctgtaatcccaccactttgggaggccaaggcgggtgggattacctgaggtcaggagttcaagaccagcctggccaacatggtgaaaacccgtctctactan

SEQ ID NO: 8808 - DNA, 470 bp, Homo sapiens
gatccagaatacatttccaacaagagcactggccaagtcagcttcttctgagagagtctctagaagacatgatactacactcagctttgggtctctgcctcttactcgtcacagtttcttccaaccttgccattgcaataaaaaaggaaaagaggcctcctcagacactctcaagaggatggggagatgacatcacttgggtacaaacttatgaagaaggtctcttttatgctcaaaaaagtaagaagccattaatggttattcatcacctggaggattgtcaatactctcaagcactaaagaaagtatttgcccaaaatgaagaaatacaagaaatggctcagaataagttcatcatgctaaaccttatgcatgaaaccactgataagaatttatcacctgatgggcaatatgtgcctagaatcatgtttgtagacccttctttaacagttagagctgacatagctgga

SEQ ID NO: 8809 - DNA, 400 bp, Homo sapiens
cctccaccccatgtcattgagagcaaagcccaaagcccttaccgtggccaacaagactccatgtgttttcactctgcctagcccacctctttgccctcatctactactttctccaggctctctcatctccagcctctggtctctctgcagctccccagaccttccaggaatgtccctactctggggcctttgccctggctgcccgctttgctgaaagcatccttctgcagacatccacacacatgccccctcaactcctcccggaacatccacacacatgcccctcacctcctcctggtacatccacatgtgtacccctcactttctccctcacctcctcccagtacatccacacacatgcccctcaccttctcccggtacgtgcacacacgtgcccctc

SEQ ID NO: 8810 - DNA, 396 bp, Homo sapiens
gttggaagatcctgtggttcattcctttcaggcagaggcaaccactgcgagttccctaccactttgccaatcatgtctaaacagatggatggtgggcacagatgggtcctccatgctggcaatgcgttacaggttttatgataatagaactatgacagtcttcaagtcaattaaaatccacccaccaatcttaggcatcataatgtgccccaggctttattttaatagtgatcttgatcctgttgtgggactaatacatatctatatttaagttttaaagcatgtttactttcaaattagctttccacagggatttcttgaaatgcttttgttattaaactcaaaaggcagtgattaggatgaaataattgtacgtaatttattttagtactgaca

SEQ ID NO: 8811 - DNA, 475 bp, Homo sapiens
ggccctgtcctcctcattcctggtgttatcctatctcttgacccgttggtgtggcagcgtgggcttcatcttggccaactgctttaacatgggcattcggatcacgcagagcctttgcttcatccaccgctactaccgaaggagcccccacaggcccctggctggcctgcacctatcgccagtcctgctcgggacatttgccctcagtggtggggttactgctgtttcggaggtattcctctgctgtgagcagggctggccagccagactggcacacattgctgtgggggccttctgtctgggagcaactctcgggacagcattcctcacagagaccaagctgatccatttcctcaggactcagttaggtgtgcccagacgcactgacaaaatgacatgacttcagggaagcctggacacccgaggcacctggaccagctatgggtagttctgtgggtggaacacattctgtgta

SEQ ID NO: 8812 - DNA, 451 bp, Homo sapiens
gtgaaacaaaagtgtgtgaagagttgtaactgtgtgactgagcttgatggccaagttgaaaatcttcatttggatctgtgctgccttgctggtaaccaggaagaccttagtaaggactctctaggtcctaccaaatcaagcaaaattgaaggagctggtaccagtatctcagagcctccgtctcctatcagtccgtatgcttcagaaagctgtggaacgctacctcttcctttgagaccttgtggagaagggtctgaaatggtaggcaaagagaatagttccccagagaataaaaactggttgttggccatggcagccaaacggaaggctgagaatccatctccacgaagtccgtcatcccagacacccaattccaggagacagagcggaaagacattgccaagcccggtcaccatcacgcccagctccatgaggaaaatctgcacatact

SEQ ID NO: 8813 - DNA, 561 bp, Homo sapiens
ctcatctttctcttatgagagaatgttaaatgggttttttgctcctgtcctggaattcaagctaagacctgaaatgctaaatgtaatcagacaaccatcctttctagcctcttggttcatataagaagagggaaaaagatcagtcctgatgacaggctagttcctcctttcctgtttgaagtcagagaatgaggagaaaggaatggagatagaaaagcagagagaaagactgacatttcatgattagccagggcaatttcttttttgttttattttataatggctgctcagtaaggatagcctcagcttactgatgttgttagaaagtgacaattcttgccttgcagaaggattactctgcattgatctggcactttggcctcagtttgaaatagaatttgcctgcagctacattagcataataaaacacagcaaattcacagtctctttctggcacttttcctgcagtatttgtagaatactagaaactattttttacacattagttatacttgcctaaaaatcttcagaccatcatcaatctacagagatctgagagaa

SEQ ID NO: 8814 - DNA, 499 bp, Homo sapiens
gtgcggctatggagacccaggggcagcccaagtccttttgaaccaagcagggaggggttttcagggtctttccagtgacccaagggaggaagggctgcgctgagatgtgccactttcaggcagagagagagagaaagatctgggggtgaggggtactagacctctggatcgggtgtcatcggctcgctccttggcatagtttcagacccgattttctggctgactttcagaactacagtattgctcaaactctgctgtgctcagagcctcgtaggagaactggtgagaatgcagatgcccaggccctaaccctggagattctaattcacaaggctagggaggtggcctaggtacctgcattttaaaaatacccgccttccccttcctagagatactaatgcaggtggtcctgggaaaacactcttggaaaaacacgtgatgtggaagatagaccctgtggcctctgttcccttgatctagcacattcctggtcatgtca

SEQ ID NO: 8815 - DNA, 362 bp, Homo sapiens
tgtggtacattcagacattgaaatattacccactgctaaaaagaaatgtgctattaagctatgaaaagaacatggagaaaaatgcattttactaagtgagagaagccaatctgaaaaggctacatagtatatgattccaagtacagttgactcttgaacaatacaggtttgaactgcatagatctacttatacagggattttttttcagtacatacagttggccctctgtgtctgtgggttctgcctctgcaatgaaacatggatagaaaattcagtattagcctgggcaacaaaatgagaacctgtctctacaaaaaatttaaaaatttagctgggcgcagtggctcacacctgtaatcgc

SEQ ID NO: 8816 - DNA, 548 bp, Homo sapiens
taatgtaggccagggtcagaatttgaactgttgaaagagggcaactttgaagaaatttttaagggataaaattgatcacaatttcttgaacaatggatactttttatagaactgaaaaccaaagaactcccagcttccactaagaggactacacaaatctgggggcatacgctaggaaaataaatgggatagagaaaaattacgaaggcactagaaatggaacgtctgggacagtaaagaggtccatattaaaaagtaagttgaaggccgagtgcggtggctcatgcctgtaatcccagcactttgggaggccgaggcgggtggatcacgaggtcaggagatagagaccaacctggctaacacggtgaaaacctgtctctactaaaaatacaaaaaaattagcagggcctggtggcacacacctgtagtcccagctactcggcaggttgaggcaggcgaatcacttgaacccgggaggcagaggttgcagtgagctgagattgctccactgcactccagcctgggaaacagagctagattctgtctcc

SEQ ID NO: 8817 - DNA, 402 bp, Homo sapiens
gaagacgacagaagggtacggctgcgagaagacgacagaagggtacgggtgggagaagacgacagaagggtacggccgcgagaagacgacagaagggtacggctgcgagaagacgacagaagggtacggctgcgagaagacgacagaagggcacgcctgtaatccccgcactttgggaggctgaggtgggcggatcacttgaggtcaggagtttgagaccagcctggctaacatggtgaaacccgcatctccactaaaaatacaaaattagctgggtgttgtggtgggtgcctgtaatcccagctactcgggaggctgaggcaggggaatcctttgaacccgcgaggtggagtttgcagtgagccaagatcgcgccattacactccagcctgggcaacaaga

SEQ ID NO: 8818 - DNA, 618 bp, Homo sapiens
gatttgtaaacttctctcctccctccagctgcggccccagcctaactgatagttacttgattcagtgtgctagacacttaaatagcatctatgtctctttcaagggaatttgtcaaataatgctgtttagctaattgttgcaagcaattgcatattaacagctgtgattttgttggacagcaagtattatggccaaagccagtttcttggcatttcaaaaataatgcaataaaaactagttgaggttagctgaggctggaaatgcctttttcatggtaaatgattcacttctatatttttctttctttttctttttttttctttggttttcatcctggattcatcccctgatcttaaatcaaaacgtcagatcaatgaactatgaactaaagtatttttcttaagcctattgagtgatttattttttaaaaaatgtttaaatgcatatgcttttctttcagcacaaacaacagcaaaaacttttgtaataactaacttacctttgcatgtatgaagaactgagtcatttatttccctaacttactcctctttcaagtaacaggtggcagatcataaaatgaattctttattgtatctacacactccacattctttact

SEQ ID NO: 8819 - DNA, 540 bp, Homo sapiens
gctctctttccggtgtggagtctggagacgacgtgcagaaatggcacctcgaaaggggaaggaaaagaaggaagaacaggtcatcagcctcggacctcaggtggctgaaggagagaatgtatttggtgtctgccatatctttgcatccttcaatgacacttttgtccatgtcactgatctttctggcaaagaaaccatctgccgtgtgactggtgggatgaaggtaaaggcagaccgagatgaatcctcaccatatgctgctatgttggctgcccaggatgtggcccagaggtgcaaggagctgggtatcaccgccctacacatcaaactccgggccacaggaggaaataggaccaagacccctggacctggggcccagtcggccctcagagcccttgcccgctcgggtatgaagatcgggcggattgaggatgtcacccccatcccctctgacagcactcgcaggaaggggggtcgccgtggtcgccgtctgtgaacaagattcctcaaaatattttctgttaataaattgccttcata

SEQ ID NO: 8820 - DNA, 569 bp, Homo sapiens
aggagcacccggcacaatttcaactccatggcgttcccgctgctgggattctacctgcccctggccgtggtggtcttctgctccctgaaggtggtgactgccctggcccagaggccacccaccgacgtggggcaggcagaggccacccgcaaggctgcccgcatggtctgggccaacctcctggtgttcgtggtctgcttcctgcccctgcacgtggggctgacagtgcgcctcgcagtgggctggaacgcctgtgccctcctggagacgatccgtcgcgccctgtacataaccagcaagctctcagatgccaactgctgcctggacgccatctgctactactacatggccaaggagttccaggaggcgtctgcactggccgtggctcccagtgctaaggcccacaaaagccaggactctctgtgcgtgaccctcgcctaagaggcgtgctgtgggcgctgtgggccaggtctcgggggctccgggaggtgctgcctgccaggggaagctggaaccagtagcaaggagcccgagatcagccctgaactcactgtgtattctcttggagc

SEQ ID NO: 8821 - DNA, 195 bp, Homo sapiens
tacggctgcgagaagacgacagaagggtacggctgcgagaagacgacagaagggtacggctgcgagaagacgacagaagggtacggctgcgagaagacgacagaagggtacggctgcgagaagacgacagaagggtacggctgcgagaagacgacagaagggtacggctgcgagaagacgacagaagggtacggc

SEQ ID NO: 8822 - DNA, 131 bp, Homo sapiens
gggctgactctcttttcggacttagcccgcctgcacccaggtgaaataaacagccttgttgctcacacaaagcctatttggtggtctcctcacatggacgtgcatgacattgggtgctgaaacccgggaca

SEQ ID NO: 8823 - DNA, 154 bp, Homo sapiens
  misc_feature 28, 30, 31, 32, 34, 40: n = A,T,C or G
gattcttgtccccccagctggagaatantnnngnaatttntttagaaaggaaagtttgtttttcacagcgatggggtaatgcagcctaagccttctgactgtctgcgaatgcttgtgcctgccgccgcgctggccttattgttcgctattcagg

SEQ ID NO: 8824 - DNA, 367 bp, Homo sapiens
cggcaagaagaagtgacaatgaagtcttttcttgcggacactccctcctgtctcctattttctgtaaataattttctccttttttctctcttgatgctcaccaccaccttttgcccccttctgttctgactttataagagacaggatttggattcttcagaaattacagaataattcatttttccttaaccagttgtgcaaggacagcaacaaccaatctaatgatgagaatgtacttatattttgttttgctattaacctacttacggggttagggatttgcgggggggcttgtgtgttttgttggcttgtttgccatgaaggtagatgtgggtggggagaagacacaaggcagtttgttctggct

SEQ ID NO: 8825 - DNA, 211 bp, Homo sapiens
cccccagtggagaagtgagtgggggtctccagctaggaaggaaagggtgggaggtggagagcagccccagggggcagtcactaagccccatgcagggcagaatgccaggaacacaggctccacggggcccagacaccatccctcgccaagcaagacacaggctgtgctgcagccatctccacggggcctggggtttcctgggggctctgtg

SEQ ID NO: 8826 - DNA, 142 bp, Homo sapiens
aaatgttatactttatggatataaaggtgataaagattggaaataggtcttctaaatatgtaaaatgaaagcaacagcaacaacacacacaattatcgtattctttgggagtaacaaatactggttttcattttaaaactaa

SEQ ID NO: 8827 - DNA, 150 bp, Homo sapiens
gccttttcctccctgtcgccaccgaggtcgcacgcgtgagacttctccgccgcctccgccgcagacgccgccgcgatgcgctacgtcgcctcctacctgctggctgccctagggggcaactcctcccccagcgccaaggacatcaagaag

SEQ ID NO: 8828 - DNA, 467 bp, Homo sapiens
tccgttgctgtcgggactacaggtgcccgccaccacacccggctaatctttgtattacaggatagagttcttggaagcctggcgtggagggagggagagcaggtagcacagttacagaaggatcttcgggatatggaaatgcggtatttgtggacactcattcatctaacacacatttgttgagctcctaatgtgtatagaactgaagggatggagtcatgggcagtggaaaagctgaaattgtgtaaaagagagagaaggatcagtggctatggtctcgaagatgacgtggaagtgtcagccatgacgggtggggagtggcctgctgctcctcctgggaagagaagaaggtgaagactcagggcgcgtctgcagggagacagtgggagctgtggggtcgtggatgacgctgatcctgtcattagcatctgagcgaggtcacaggcatgtggggcctcgttaacaat

SEQ ID NO: 8829 - DNA, 425 bp, Homo sapiens
gttagtagagaaatagacaagagcacaggtaattacaatacagcatgacaagtgttatgataggtcaaataaagggcactattggaactgttctcaataaaaatgcaacataactgctgtctgagtgatttattgctcttgattataaaatatgcttgcaagatagaagctaactcctactcatccttcaaaaggcagctcaaattgtcatgtacccacatcctccagtgaattttcctttccaccccactaccctgccccttacacttgagattaggatccttttcatgtgtgtccatcaaactttatctatttgtattacagtacttctcacatgcattccaatgatctattcaaatgtctgtcactctgctatactctaaactcttggagggcaaggactccatcttatttgtttttgcaat

SEQ ID NO: 8830 - DNA, 215 bp, Homo sapiens
gagtctccggcgggttgttgcctgggctggacgtggttttgtctgctgcgcccgctcttcgcgctctcgtttcattttctgcagcgcgccagcaggatggcccacaagcagatctactactcggacaagtacttcgacgaacactacgagtaccggcatgttatgttacccagagaactttccaaacaagtacctaaaactcatctgatgtctga

SEQ ID NO: 8831 - DNA, 379 bp, Homo sapiens
aatcactgtcttaatctttctccttccaatccttcctgcctgtcctgcctgagtaacttttcaaaacttccagttaatcaataaaggcttctcattgcctttcttcaggttggctttcacattctgccccaggccactctcttgcccttgttttcttcaatttcttccatgcctatattagtccatttgtactgccataaagaaatacctgaggctgggtaatttataaagaaaagagatttatttgtctcatggttccgcaggctgtacaagaagcatggcattggcatttgcttctggtaaagacctcaggaagtttccaatcatgtcagaaggtggagggggtacaggcacatcacatggctagaatgggactcaa

SEQ ID NO: 8832 - DNA, 534 bp, Homo sapiens
ccgttgctgtcgctctccgcagtgagaacctgccttggctcccctcccctcaaggagttcatagccgtgggagggagggagacaagaactgttggagacaagaactgttagagaccagagagcaagggcgtgatgtggtctgcagggaggaggctgtctgaggcagaaccgggtcagggaggccatggtgcgggtaccctccaggcacggcatttggcctgacttttgaggggtgcccagggttggctacatggcggggcggaggtatctttagtgggggaacagcgttgtgccaccaggaggggtctctgtctcccaggtagaggaattctccatggtgagaggtggtggtgggggatggtctagctgtccactcttgccccctttcggatttggaaggaagccccatgctgggtccacactggtatggcgtattaattaggcagctgctttgtctgggagggggctttgtgtcgagtctccctgaatgagcagggctggcgacagttgtcaaaacacatggtgcttggtcag

SEQ ID NO: 8833 - DNA, 619 bp, Homo sapiens
  misc_feature 301, 382, 387, 412, 492, 524, 606, 619: n = A,T,C or G
actgtaagatacagaattgccgctgggcatggtggctcacgcctgtaatcccagtactttgggaggctgaggcgggcggatcacgaggtcagttcaagaccagcctgaccaacatggtgaaaccccgtctctactaaagatacaaaaaagttagctgggcatggtggcacgtgcctgtaattcgagctactcaggaggctgaggcaggataattgcttgacctcgggaggcagaggttgcagtgagcagagatcgcaccactgcactccagcctggatgacagagcgagactccgtctcanaacaaaacaaaacaaaaacagaattgccttctcagtaaaggaggaaataacatttataataactatcactttagtgatagntattntaaatctttgaaaaatggacacttncaaattaccgtgctcattataaattgagaaatacggttctattaataatattctgctaggccaggcagggtggctcacancctgtatcccagcacttgggagggcgaggtangcaaatgacttgaggtcagggagtcgagaccagtctggcccacatcatgaaacccctactaaaatacaaaaaatagctgggngggggggcatgcn

SEQ ID NO: 8834 - DNA, 159 bp, Homo sapiens
atgccattttcagcctcagcacgcctgcacccaggcgctcattaaaacagcatgttgctccccactgcctcgtgttgtctgttggcgcgctgtcggggttcgaaccgatacaagaaccttccacctacctggtgctttggcctcatctataagcttttc

SEQ ID NO: 8835 - DNA, 341 bp, Homo sapiens
agttaaattacacaactctgcagatgtttaaccaccgtaagacaatatactactttttgtgcgtgtgtgtatgtgaaacagagtctcagtctgtctcccaggctggagtatagtggcacgatctcggctcactgcaacctctgccttctgggttcaagcaattctcctgcctcagcctcccgtgtagctgggactgcaggtgtgtgccaccatgcccagctaatttttttttgtatttttagtaaaaacaggttttcaccatggtggccaggctgatctcgaactcttgacctcaggcaatttgcctgccttggcctcccaaagtgctgggattacaggcg

SEQ ID NO: 8836 - DNA, 354 bp, Homo sapiens
caatgctaagtgctaaggatgtgaagataaatctctgctctactgaatttcagtctagtgggagagagagagacaagtaaatagtctatttctttactatatgttaagttatccaatagaggtagataccaagttttgtgggagcacaaacttcactgttgtcagtgaaggattcctagaggaagtgtatcctggggtgagtcctgaggaataagtaagagtagcaagttaggattattcatagaattttactccatcttctgtgaagatggagaatacataccaaattgtggaggcaaaagaaagcatggcatggtctgaggaaaataggataattagggtagaagcaggtaa

SEQ ID NO: 8837 - DNA, 538 bp, Homo sapiens
tcgtggcagagacgcctagaggctggcgcccagggcaggcaggacccaggtgcctcccattcttgtgcttggctgcccttggtgacagctccaggcagtggctcttgaggaaagaggggtgggaaaaggggaaccctcctgcccaaatcaggctctttaaggaggcttctggaagtctccactacttccagtggtgtagccatgaccagctgtccatgtctcagcctgtttgcctcccaaataaaacaggggccttggctgggcacggtggctcatgcctgtaatcccagcactttgggaggttgagacaggtagatcatttgaggtcaggagttcgagaccagcctggcccacatggtgaaaccctgtctctactaaaaatacaaaaattagccaggccataatggtgtgcacctgtaatctcagctacttgggaggctgaggcaggagaatctcttgagcctgggaggcagaggttgcggtgagccgagatcatgccactgcactccagtctgggcgagagagtgagaccctgtct

SEQ ID NO: 8838 - DNA, 457 bp, Homo sapiens
ttgtaaaagagttcttgagatacagcactgaatgtaaaggaaaatattggagcattcaactacatttgagaaataacttctgtttattaaaagatactataagaatgaaagcacaagccctaatgaatattcttgtttgatactaaaccaaagcttgagaagtggtagtttcgcaagtttttcaagtggtttggtgcaatctgaagactgcaatcccatcaatgaactttatatctttaccctttaaaattataatttatgggccgggcgcagtggtttacgcctgtaatcccagcacttcgggaggctgaagcgggtggatcacgaggtcaggagctcaagaccagcatggccaagattgtgaaaccccgtctctactaaaaatacaaaaatcagccgggcatggtagcaggcacctgcagtcccatctacgggggaggccgagacagagaatcgc

SEQ ID NO: 8839 - DNA, 574 bp, Homo sapiens
ggaattaaatatctgtgaaggagcaaaattacagtaataattgcttctggccttaatgttgggctaggatagcttgttggataagtcaggaatgcctataaaaataccagttcttggctgggtgtagtggcttacacctataatcccagcgctttgagaggaggccaagctgggaaaattatttgagcccaggagttcaagaccagcctgagcaacatagtgagaccctgtctctaaaaataaaaataaaaacattagccaggcatggtggctcattcctgtagtcacagctactcaagaggctcaggcaggaggatcacttgagcccaggaagttgaggctacagtgtgctgtgattgcaccactgcattccagcctgggcaacagagcgagatcctgtctctaaaaataaaaataaaaaaagtagccaggcatggtggctcatgcttgtagtcacagctactcaagaggctgaggcaggaagatcacttgagcccaggaagttgaggctgcagtgtgccgtgatcactccactgccttccagcctgggcaacagagcaagaacctgtctcta

SEQ ID NO: 8840 - DNA, 320 bp, Homo sapiens
actgtggatctgtccccaggtttggctgggggtttggtttttagtagagatgaagtctcactatgttctcaaactcctgggctcaagtgatcctcccaccttggccccctaaagtgctaggattataggtgtgagccactgcatttgggcgccgtgaaaagctttgagaaggctaacggaaaagcaagggagagccctgggcacacagccccctcgaggaggcaggtagggccccacctcacggtgtgggtcacagagctttactccctgcatttccagccatgtgggtttgggggccatccacccatcagatactggtt

SEQ ID NO: 8841 - DNA, 572 bp, Homo sapiens
tatggtatgggagaaagagagagaaagagggcaacacgcgcacacacacacacacacacacacacacacacaaacacacacacacacccccctgcatgtaacccagctgaaaaagatctgaatcagccagtggttatgagagggacgaagattggggtatgggggtgtcacaggggacttttttttctttttctctcacatctctgctgggaggaacttttgccttttctttagttgtgtcttctattttgttttctcaggaactggctcagcacagtattttcttaagataggttcttgctttgtcaccgaggctggagtgcagtggtgcaaccatagctcactgcagcctcaatcttgtgggctccagtgatcctcccacctcagactcctgagtagctgggcatggtggcttacacttgtaatcccagcacattgggaggctgagatgggtggatcacttgaggtcaggagtttgagaccagcctagtcaacatggcgaaacccagtctctaccaaaaatacaaaaattagcccagcgtggtggcagatgcctgtaatcccagctactt

SEQ ID NO: 8842 - DNA, 437 bp, Homo sapiens
gctgggcagggttaaagtaaggtaaaatagagatcaggcctgcagaatccctgcgaagacaaaaccacttagtgaactcaacctttcttgatttgcaaacctaaggaaaacttaacttgagctaactcttacaaatgcctgtattacagaaaaacagagcttaagctcaaccaatcagaggtagccaacaaactttcataattaggaaccttcataggagatcaatcaaataaggcaattgtgtaattatatccaatcaaatgtttgctttgctttacctctgtttctgtcttataaaggcctccccatagattcccttggtggagttcctgaaccacttctggtttaaagctgtcaagtccatgaaatgttgtttgctcaaataaactctattaaaatgtttattgtgctcccatttacctctttagcagcagtaa

SEQ ID NO: 8843 - DNA, 571 bp, Homo sapiens
gattcaagtgattctcctgtctcagcctgttgaatggctgggattacaggcacgtgccaccatgcccagctaatttttgtatttttagtagagacagggtttcaccatgttggccaggctggtctcgaactcctcacctcgtgatctgcccatctcggccccccaagtagctgggattacaggcaccggctatcacacccagctaatttttgtgtttttagtagagacggagtttcaatatgttgaccaagctgttctcgaactcctaacctcaagtaatccacctgcctgggcctcccaaagtgctaggattgtaggtttgagccactgcactcagcttcattctagcttttaatataaaagatatttttcaaaagtaccattagtgactcttttaagtaatgggaggaataaggtcattagaaaccatttaccaaccaaaatatttgtgataggctttgttttgagccctttgaaccctaaatgaagttctctatactatctaggggtgaaaaaagttgtttttaaattctgcttcatttctaataaattagaaaattcaaagcaaaaa

SEQ ID NO: 8844 - DNA, 351 bp, Homo sapiens
tcagcatacaaccctagatgatcttgtcgtgaagatgaaggagatcacagacaacatcttgccagggtctgagttttaatgctggcgttttagatatcctgttgggctacaaaaacatgtcaggcaagatgttaagttttgtttaaagcatcaagaattccaggcccggcgcggtggctcacgactgtaatcccagcactttgggaggcctaggcgggcggatcacgaggtcaagaggtcgagaccatcctggttaacacggtgaaaccccgtctgtactaaatatacaaaaaatttgccggccgtggtagcgggcgcctgttgtcccagctacttgggaggctgacgcag

SEQ ID NO: 8845 - DNA, 588 bp, Homo sapiens
ggcacgagaacctgtcccagacctacatggccatgtacctcacctactcgctccacctgcccaagaagttcatcgcgaccattcccctggtgatgtacctcagcggcttcttgtcctccttcctcatgaagcccatcaacaagtgcattgggaggaacatgacctacttctcaggcctcctggtgatcctggcctttgccgcctgggtggcgctggcggagggactgggtgtggccgtgtacgcagcggctgtgctgctgggtgctggctgtgccaccatcctcgtcacctcgctggccatgacggccgacctcatcggtccccacacgaacagcggagcgttcgtgtacggctccatgagcttcttggataaggtggccaatgggctggcagtcatggccatccagagcctgcacccttgcccctcagagctctgctgcagggcctgcgtgagcttttaccactgggcgatggtggctgtgacgggcggcgtgggcgtggccgctgccctgtgtctctgtagcctcctgctgtggccgacccgcctgcgacgctgggaccgtgatgcccggccctgactcctgacag

SEQ ID NO: 8846 - DNA, 300 bp, Homo sapiens
ttcaggagttggacgactgctctttggccggattgcagattatgtgcctggtgtgaagaaggtttatctacaggtactctcctttttcttcattggtctgatgtccatgatgattcctctgtgtagcatctttggggccctcattgctgtgtgcctcatcatgggtctcttcgatggatgcttcatttccattatggctcccatagcctttgagttagttggtgcccaggatgtctcccaagcaattggatttctgctcggattcatgtctatacccatgactgttggcccacccattgc

SEQ ID NO: 8847 - DNA, 319 bp, Homo sapiens
ctaattgcagtagttaattgtaacaagcccttcggtgatcctgaaacatgttacagtttgagaaacactgctataatacgtgtcatttaaattgtttcaggttgtgggggtagggaataagactaccaatttattcatcttctgtgcaatattacctgtttacctaactcttagagatattaacacattttgaagaatgtgtcccatgagattataatggaactgacaaattcctattgcttagtgatctcatagctgtcatgaagtcttagtgctgtaccttactcatgtgtatgcggtggcgatggtgtacacaaat

SEQ ID NO: 8848 - DNA, 452 bp, Homo sapiens
tctcaccgtgatcaagttgaggggcttccggctcccttctacagcctcagaaaccagactcgttcttctgggaaccctgcccactcccaggaccaagattggcctgaggctgcactaaaattcacttagggtcgagcatcctgtttgctgataaatattaaggagaattcatgactcttgacagcttttctctcttcactccccaagtcaaggggaggggtggcaggggtctgtttcctggaagtcaggctcatctggcctgttggcatgggggtgggacagtgtgcacagtgtgggggcaggggagggctaagcaggcctgggtttgagggctgctccggagaccgtcactacacgtgcattctggaagcattagaccccaggatggagcgaccagcatgtcatccatgtggaatcttggtggctttgaggacattctggaaaatgccact

SEQ ID NO: 8849 - DNA, 280 bp, Homo sapiens
cgaattcggcacgaggtccatctttgtagctgacatgacacattttaaaaatgtcacattaaaatgaacgcatctaatggctccattatgtcttttagagtggtctggcccagctaattgcatattgaaatacattagatttgtcataaattactttcctttattgtcttttctgtcaatcttaggacattaaatgtatatgtttgaaattgtgtttaggtaggttatctgagcatttggttcatatagtaaagagagcgttataagttcactgtaagcc

SEQ ID NO: 8850 - DNA, 410 bp, Homo sapiens
ggcacgaggggtgcttctgtatatcctgacaacagtggccagccattaaagagttttgagtaggggaactggatttgtggttttagaaagatcatttggcttctgtgtgaaagaggccaaaaccaggagcagaaagaccagttaggaagctgtgacagcagttgagagacgatgttgtcaaagtctgcagcagaacagaacaggggtgaccccacatggacatcatctctgctcttcagtcacctgtagtgcagagttttgaagtaggtctgagcatggaaccgtagtggttgggaaggaaatgccatttgcctatggggtgattaagatctttttttttttcctcaggcggagtctcgctctgtcccccaggctggagtgccgtgacgtgatatcagctcactgcagcc

SEQ ID NO: 8851 - DNA, 580 bp, Homo sapiens
aaatgatcaagggaaacatttcatagtccttaatctttctagtataaaacatcaaacaaatttcatgtagaatatctcttggtagctattaatattgtgaaattgtctttgttttaaacacattcacacattatgattaatgtattttaagcatatttatgtgagccatctttacaaattcaataattccttttctagtaaacactaaaacctattaaatcaataacattgatttatgtatatatatattgattcataacctaaatatatttatattttatacacatttatttgcatgctgtaaaatataaaatttagatatatttttctgtaacttaataggtatcttggcaattcagaaaacaaatttccgctccagagctgctctgactcaggcatctgtttcctttaggtgtctggttgagaaagtactcagagggtagaggatacttgagcagggtagagacccattagacaattttgtgtggaggtcaatacaggaggtaaattgtctactttggttagaaggtgcctggtttattcactgagacttgattacaacaaaagatagagtcacaca

SEQ ID NO: 8852 - DNA, 489 bp, Homo sapiens
tcacggcaacctctacctcccaggttcaagcaattctctgcctcagccttctgagtagctgagattacaggctactaccaccatatctggctaatttttgtatttttagtagagacggggtttcaccatgttggccaggctagtcttgaactcctgacgtcgtgatccacccacctcagctccccaaagtgctgggattacaggcttaagccaccgcacctggcctaaagataggctatcatccagaaaaatatactgtgatctaatgttaaaaataagttaaaactacctcaagctagtagtttgcacagtgtctgacaaatgttactgtgttttcctcaaaaatttaaaacatcagacagtcctcgtgtgaattcactgcagcatactgggtgccttggtgcacagtttggaaattgaggcacaagaattaacgtttcttgatgtcatgaaatataccatgtccaggccaggcgcagtggctcacac

SEQ ID NO: 8853 - DNA, 476 bp, Homo sapiens
  misc_feature 396: n = A,T,C or G
aatctcttcctcaccagccaggatggaacagtgtctgcctttcttcattccctgctgaacctcttgcagctgcacttgttttcttctctgacctggttcttgtctccatgagtcctgggtggagtgccagatcaagcccctgctgtaggctaggtgcggtggctcacacctgtaattccaacactttgggaggccaaggcaggaggatttcttgagcccagtagttcaaaactagcctggtaggccaggtgtggtggctcacacctataattccagcactttgggagactaaggcaggtggatcacctggggtcaggagttcaagaccagcccggccaacatggcaaaaccctgtctctactaaaaataaaaaaattagccaggcatggtggcggnggcctgtaatcccagctactagagaggctgaggtaggagaattgcttgaacccaggaggcagcagcctcagtgagccgag

SEQ ID NO: 8854 - DNA, 649 bp, Homo sapiens
actatctcggctcactgcaagctccgcctcctgggttcaggccattctcctgcctcagcctcctgagtagctgggactacaggcgcccgccaccgcgcccagctaatttgttgtatttttagtagagatggggtttcaccgtgttagccaggatggtctcgatctcctgacctcgtgatccacccgcctcggcctcccaaagtgttgggactacaggcgtgagccaccgcgcccggccaacaatcttaaggctgatttcctctctccccttcccttacttctgctgggctgcaagcaagattgcccacccttggctaaaggcatatgtactcttggattagaagaagggcagattcctagctagctactgatgaccaaaaagaataggaagcactgctggtagaagaccattactgacaaatctttcctggcggtacattcaaaccttgccccacaagggcattctgacagtatttaacaacatttgtattgcaaataactccttttgacttagtgacttcacttctaggtatgtatcctaatagtaatgctcacacatattctttcagaaagatgaatctgacaagattgcagcacctctaaataaagaaaaattagaagccagctaaatgtccaccagagaaaagct

SEQ ID NO: 8855 - DNA, 77 bp, Homo sapiens
aaaccatacacatatctgtaagtggcagtatacacatttctttcaaacataagtgaaacacttataaaaactgatca

SEQ ID NO: 8856 - DNA, 513 bp, Homo sapiens
  misc_feature 260: n = A,T,C or G
gcaaacaaaattaaatagcttattaaaagggttatacaccataagcaattgagatttatttttagcattcaaggatgtttcatcacaagaaaaccaaactatataatacactacattaacagaatgaagggaaagcacacaacgcatgcacacacagacacgtaaatgcacacacacgcaaggccatctcaattatggcagaaaagcatttgataaggtgtagtgctctcttagggggatatggctatgaggaaaagtanggtgagtgtgtgtgtgtgtgtgtgttattaagggcagatgtaaaaatgtatctttttatatttgggaagaaaactgacaaataaagctaacaaatcaacaccattgatgtgttatctagagacacaaatataaacacagtagtaactggaaagaagacagacaacgttggcccagtacatgcaggagatagatgtggtgggagcttatggaagttcccctgtaaggaatagcaagcaattcttcagctgatat

SEQ ID NO: 8857 - DNA, 507 bp, Homo sapiens
tatggtcagattctggcgggggtcccttttctgatttgcaaatggccttctttttgttgtattctcacacagtggggaacagagagaggggggaagctctcctgtttcttcttgtgacagcactaatcccattcataaggcctccatcctcgtgatgtactcaccttccaaaggccccacctcctaattccatcacattgtgggtgatttccacatatttcaacatacaagtttaagagaaacacaaacattcagtccataacataatctgtctgtggctatactgctctaaataataagtaaacaatgtagctagtttaacttgtcccaaaactggttattccattggatgagtttgtttggaccccttatgtgggaagtggacaagggttaagtttgcaattatgatcttaacatcatcttccttcttttaacttctgttaagattaagtatgaaaatacattcaaaaccaggatatctacactgaatagcattttttatgtagt

SEQ ID NO: 8858 - DNA, 415 bp, Homo sapiens
ataccgctgctatacgactacctgcaattaaagcctgataaataccatggggggtttttttacttgaacacttacagtgcattttcctttaggaattgggcatcccctgctagctagtgtttcaacctaactatcaaagcttattgaattcaaaatgtagctgatctataaattacaaaaactctattctacagtcctacaagagagtctacagaaaacaatgccttcttaatcctaaatttgaaagttaagcctgggtacagtggttcacacctgtaatctcagcactttgggaggttgagacaggcagatcatgaggtcaggagatccagaccatcctgtccaacatggtgaaaccctgtctctactaaaaatacaaacattagctgggcatggtggcacgtgcctgtaaacc

SEQ ID NO: 8859 - DNA, 505 bp, Homo sapiens
gacagatgtacatgataatacatatggaggcagttcttatattacaacaataagcaacgcttgctatataaataactgctgctactacatatcgtataactatacaatacccatataacatgcattgcacgatcttccctgaataactcaattatgcacctgctacttactagcggattggaggtataattaaggagacctaagacataatctgtatgttgtaaaatataaacgcataaacagagcagaaaatacgagatcattcatagaaaagtcaatgttttaaatacactcatttaaagaaattattcaaatttgcctttagcttcacagctgtaagtactaaacagacaaatgtgtttcttggagttacaactgtaggagcacagcatcaatctgtgaagctgagagagacaatgagtgaggattcaacaaatacctctagtcttttaacttcttgtgaagcagaatgattgaaaacaactaggctaacttaattctatag

SEQ ID NO: 8860 - DNA, 500 bp, Homo sapiens
gtgcatggagacaggaatgaagccagaacgcaggtggggtgagccgcatggcaggatgatggagctcagtccggctgagaagtgtgttcgttagcatcctgcaggagtcctcaaggtcattcgacaattggtgcttcattcatcggctcaataaatatacatgagcacttacacagttcctggtacaatgaacataaaagctaaaatccgtagcctgggccgggcgcggtggagctcacgcctgtaatcccagcactttgggaagccaaggcgggcggattacctgaggtcaggggttcgagacaagcctggccaacacagtgaaaccccatctctactgaaaatacaaaaactagctgggcatggtggtgcatgcctgtaatcccagctactcgggaggctgaggcacgagaatcgcttaaccccgggaggcagaggttgcggtgagctgagattgcaccactgcactccacctggacgacagagtgagactccgtctc

SEQ ID NO: 8861 - DNA, 514 bp, Homo sapiens
gaaagatttactgcttattcatctggaggcaatccttctcttaaaaaaataaacaaagcttgctatataaataactgctacttctacatattgtataagtatacaattcccatataacatgcattcaaagttcttccctcaattcctcaattttgcacctgctacttactagcggtttggaggtataattaaggagacctaagacataatctgtatgttgtaaaatataaacgcataaacagagcagaaaatacgagatcattcatagaaaagtcaatgttttaaatacactcatttaaagaaattattcaaatttgcctttagcttcacagctgtaagtactaaaaagacaaatgtgtttcttggagttacaactgtaggagcacagtatcaatctgtgaagctgagagagacaatgagtgaggattcaacaaatacctctagtcttttaacttcttgtgaagcagaatgattgaaaacaactaggctaacttaattctatagttttaattct

SEQ ID NO: 8862 - DNA, 123 bp, Homo sapiens
gctggtcttgaactcctgggctcaagcaatccgcacgcctcagtctcccaaagtgctgggattacaggcatgaaccacagcacctggcccacagacaaacttttaataacatgcaagaattca

SEQ ID NO: 8863 - DNA, 563 bp, Homo sapiens
tgtattgtcctgataaaatgtcctgaattctaataagtaaatgcttaagtcagtctttgctctggagaaacaaccctggtcccagcagtgtgctaaggccaacttgtaataagcttgcaaaattgattttaaaattttcaaataattttaaacttcccacttttttgacatcatgttgataacttgaaattggttatagtgggactatttacactatggaaatcagcagcctccactaattaggcccctcaaccactaggaaccagctgtgaaacactgaccaggacaccactgcctggctcacctattttctcagttaggattgcatactttgcatgttatttatcattagtaatctctatagagaatttaaataaaggaaaattgaacagtttgttcttaaaattttacttttgtaaacgtacttaaactattcacatccaattggaaattgagtctccaaagtatgtgtgcgtggtagttttcatttggtgttaaagaaattttgaagataatgaaaatgccactggagtggaagtcaaggaacttggatttgtcactga

SEQ ID NO: 8864 - DNA, 413 bp, Homo sapiens
tgggagggtggaacaaccatcccaccctacagaaacactgaacaccacccttagtgaatcaatgaagcctgaatgggaattgaacttttacctgcatctgtagtcccaaagaagtgcccctcctttcctggccccacctaaaacagaaagcttaaataatatttagttttataatacccaaatatccaggtttcaatggaaaatcatttatcacatcaaggaccaggaagatctcaactaaatctcaaaagaccatcaatagatgccaacaccaagatgacagaaatgtgagaatgatctgacaaggattttaaagccatcatcatacaactgcttcaaccagtgattacaagaatgcaacaagcaaatgaaatataagatataaacaagaacccatggatattttaaaattt

SEQ ID NO: 8865 - DNA, 531 bp, Homo sapiens
atatatgttttttgctgaacagtttgagattaatcagggtaaggagatgtcatgatgcttaccctctctctctatatatattttaaggcagggtctcactatgtcacccaggctggagggcagtggtgcaatcatagctcactgcagcctcgaacttctgggctcaactaatcctcccacctcagcctcccaagtagctggaactataggcacatgccaccacacctggctaattttaattttatttctatagagagaaatcttaccatgttgcccaggctggtctcagactcaagtgatcctcctgcctcagcctcccaagtattcagattataggcatgagccactgtgcctggcctaagttcttgagcatctgtttcctaatagtaagggcattctcgtacataaagacactaacatttcaaaatatgaaaaatgaacgataattttctcattatatctggtatccagtccatatttaaatttatctagttgtctccaaattgtcttttatggcgattttttcttcct

SEQ ID NO: 8866 - DNA, 604 bp, Homo sapiens
acctcctacctgaagggggctgctggctgtggggtcccgcttgtgcccgccacctccttctctgtcttctatgtcatgtgaggctggcattcccacgcgtgattccaggcttgttgttcatctacacaaaacttttaatacgattttgacaaaaaacatagaaaaggatgacttgccctactgaatattgaaatgaaccgtggactaactatgaactttcaaacaatccattagcggctgagaaataaacagaaaaatcaatggcccaacacagacagtggagaaacaggctgaggagcatgtccaagtttgtatggtcaggagtgtgcctttcaagtctgtggggaaatacgtgtggaaaagcaagacaggagtgtatttcataccacagggcagaaggattccagacttatgtggaaggaataaagtcatcacaatgtgagcttacatgggcctgtggggcaaaaggctttctaagtatgacttctaagggagaaatcataaaggaaatgcatgaataataaaaaaggatacattttctatggtaaaataatatcacagaaggaaaattgcaaactgtgaaaatatatttgcatcatatgtc

SEQ ID NO: 8867 - DNA, 652 bp, Homo sapiens
catgttagtaattctaaatctcagcgatccctgttgttccataacagtaccactgctggaaactttagcttatagtattgggtcaaaaggagaatgctgggtgcttcaaaataaaagagaagtttgcagtgattgtcattttatagccaagatgagacttaaagacttcctcaaagtagatactcaataagcatactttatttttattactgcactcacattaggttttataatactgtgatatttacaatgtatatttccaaaaataattttatgtgttttatttcatatacttctgagaatttctctgaaatatagaggcagatattattaggttggtgcaaaggtaattgtggtttctgcttttaaaggtaatggcaaatattacatttacttttgcaccaacctaatacatattcttcttagattttcttagtcccttattcatcctcctttagtatagagccaaatcatagccatagacatatccttatcacttaatcacatgatcagttagattgtaatgaaaaactcaagtaaataaatgtaattgagtacactaactcatagaaagaaatgttttgattaaggtcacactattttttaagaactaaaaaagccagacgttgattccagaagtacagacaccagc

SEQ ID NO: 8868 - DNA, 640 bp, Homo sapiens
agagccagaggtgacggcaacacggtatcagcaggctacatgagtggccacgtgtgcagctgttcagagaaagcctgtgcgctggggtggtgctgtgaagctgatcgaccaaagggatcaaaacccagcgttggacgcagcatctaaggagagaggttccttggccacatcctccacccaggcgccaaacagtgaagagaagccacgcatctgagagtcaccaaaggagcagttaactcacgctcagcccttgatcatccacactgaggggaactggctggccatcatcaaaagcgcatctctgccgctttgcaacacgagaagtcatctgccttagcagcaggctctcctcctgaagtaaggccccaaagatttcctgtgatccaggaaaggaaaacagtaaataagccagcttccgtgtcctcactgacggggggcagcctcagaaagcatctcttttctccaaatctccagacacttctccactctgagccaagtgctaacccaaacagttcatgactcaacagctacgtagtctatccacccattcatgtgacattgtgaaggcgacactgccacaagccacaaccaagccttctacagggatgaaggccaaggggactctatgcagggagcgcat

SEQ ID NO: 8869 - DNA, 601 bp, Homo sapiens
ctttggaaggccaatatgtgtggatcatatgagcccaggaattgagaccagtctgtgcaacatggcaaaaccttgtctctgcaaaaaaataaataaaatacaaaaatacaaaaattagccaggcatggtggcgtgcacctgtagttccagctactcaggaagctgaggtgggaggatggcttcagcctgggaggttcaaggctgcagtgagccatgattgtgccactgcactccagcctggatcataaagtgagaccctgtctaaaaaaaaagaaataaaaagaaaatggacaagtagacttagtagacatgggaaagctaaaaataggaggatgggggggaaaacagagaagcaatctgatttgttctacagagctcccccaaaggctcaaaaatggataggagtaaaggttatagccatggtgagagtccaaaggtagtaagttagtaagagggagccgatgacaaatgtggcgaagatagaaataacagtacttgattaagcttcaagagggcaatgatcatataactgcttaattcgtggtccctagatgcgcctatttcaactaaacatattgttgggtggatagatagaaagaag

SEQ ID NO: 8870 - DNA, 591 bp, Homo sapiens
ggacatcttaagtctctagctcagaaacaatgagatgtaaatttgagttgtccagaattgtatttatggccatctaggaaaattcttgggtaagttcgacatttcggcatgttgctgggattcttccagggtttgaccctaggagtatttgtagttgctcctgtcagtggtaatttagcaagcatggttggagagatgcagactgacatcttctgggatgttggcctcagtgagaattcgacatgatgaatattagatggtagagcagttggaatcagaggctgaagaatgggaccaatactgattccaatccccactcttggcctcatccatcaccatcatctccctgcccttttcttctccaaaataacgactagcaaaataaaactctggccgggtgtggttgctcacgcctataatcgcagcactttgggaggccaaggcgggcggatcacgaggtcaggagatcgagactatcctggctaacatggtgaaaccccgtctctaccaaaaatacaaaaaatttgccaggcatggtggcaggtgcctgtagtcccagctactcgggaggctgagtcaggagaatggcgt

SEQ ID NO: 8871 - DNA, 110 bp, Homo sapiens
gagacggagtttctccatgttggtcaggctggtctcaaactcccgacctcaggtgatccacccacctcatcctcccaaagtgctgggattctgattattattcttcaatt

SEQ ID NO: 8872 - DNA, 410 bp, Homo sapiens
tagcttctccaagtctctgttttctcatttacatatctgctacagtcatgaatgtatattgtctccctagaggattgtggggccatccgtgatgggataaaaattattaatgaggaaatgttctcaaacctaactagacggatagctggagagagaacttagatgtgtattttataaattaccatgtgcacatacaccctttttttggcaagtggtgggaggtatcagagattctgggtgggggctgtggcctaagcagctccttggtcattgggacggtctctgggccctgacgcatgggagggacagttggctggtaggacacttggaggtgggggctccagctaagccactgcagagatggggcgtgggccatgcaaggtggtgaagactgggtgtaggtatgtgtg

SEQ ID NO: 8873 - DNA, 309 bp, Homo sapiens
tacggctgccagaagacggcagaaggggcaaagggccccagttcctctggctggggtgtttgctgggcctaggcgcaagccacgcatccatatgggttcctctgcattgagaactgccgacaggacgtcctcggagtcccaagcaattgtctggtttgtgatggacccatctttcatttcttgattattcagtagcttcgtgtcctagaaaccaagaggaccatttctataaaagaggttggttgaataaagacagcgtgagaatagaggagctcctattcccgaagtcagctgcctgttctgctttca

SEQ ID NO: 8874 - DNA, 291 bp, Homo sapiens
gacagaagggtcaccctttcacatttctaccagcaatgcactagagttcaaatttcaccacatccttgccaacttgtgttattttgttgtttttgtgctgttgttgtttttaataacagccatcctaatgggtgtgccttccttaggaggcagccacatatgaaatccatgtgcctgtgttaatgcaaaggtggaatttcctatggctggcatgctcactgcacagggatggaaggccagttgggtggaaaggatgagaaagctgaggtcctggagggctttgagggacgg

SEQ ID NO: 8875 - DNA, 72 bp, Homo sapiens
gaaaatgactttagtagttattaacctgttgactgtacaggtaaccttcaggttccgattgtgtgggacagc

SEQ ID NO: 8876 - DNA, 458 bp, Homo sapiens
gctggagtgcagtggcacaatcttggctcactgcaacctctgcttcctgggctcgagcagtcctcccactgcagcctccccagtagctggaaccacaggcgtgcggctcattttttgtagttttgatagaaacaggtttcaccatgttgcccaggctggttttgaactcctgagctcaagggatccaccaactctgggatccaccaactctggcctcccaaagtgttgggattacaggcatcagccactgtgcccagccagtatacttaaagatcttttaaatgcagataacttactgtatgatttcattagcccaaatttctgtctctttaagcacaagtccacaatccctcatctgaaatattgaggccacatgtgtgttggaaatcaatttaaaatttttttttaaaagtgtgtgtgtgaagttatgtaaaccccattgctttgtggcagcacct

SEQ ID NO: 8877 - DNA, 633 bp, Homo sapiens
ttactcctgagaccattacaaattctcagcaggctgggagcacagttgagatggataggaggaaatcagtgcgtggctccttccttcctccttgcattcccacaacgttctcaagcatttgctggtgtcaggccctggacacagagagatacagaggagactccagagggctggagaccaagccctcctgcaggagctggtggtctaggaagggaggccaggcagggcagtgacattgtgatgtgaggggctctgagacaggggccctgaggaacagacagggctcaagagctcagggtcccggggtcctgggctagacctcttttccacacatgatgcctccttaccgagcaccctctgggtgtctcaaactcactaatggcacacagaggagggttaaattaagaaatttaaaaattggactaaatcactgccgctaagacagaattcctccatgccctggagtgggttcctccagcactcagttcccaaccagataggtcttggctcccacctggccctcttgtctgtctagccctgactttgtacttgccattcatttgatgtatcatgcatttatcaagggcccctctgggtgtgcacagcactgaactagatgaaatctgatcaact

SEQ ID NO: 8878 - DNA, 468 bp, Homo sapiens
gaattgtggaatggggaaacggggtttacagaggttaaataattgcctgtgatcacacagattgtgactggccaggtgatttgaactcagattgttcagattccagagcccagctccttacacaccaccacctgcctggaaaacaatgggaggcacaacaagcttttggagagtgatggggcatgatttaacctgtgccttaagaatgctgagcaggtcaggcatggtggcttattcctgtaatcccggcactttgggaggccgaggaaggcagattgcttgagctcaggagttcaagaccagcctgggcaacatggcaaaatcccatctctacaaaaaacacaaaaattagctgggtgtggtggtggcatgcctgtggtcccagctacttgggacgctgaagtgggaggatcacctgagcccacggaaggtcaaggctgcagtgagtcatgatcacaccactgcact

SEQ ID NO: 8879 - DNA, 354 bp, Homo sapiens
gttataaaaaatacttgaagttgcaaccagctattaattgaaaaccaaaaataggccagctgcggtggctcacggctgtaatcccagcactctgggaggccgaagcaggtggatcacttgaggtcaggagtttgagaccagcctggccaacatggcgaaaccctgtctctactaaaaatataaaaattagctgggcgttctggcatgtgcctgtaatcccagctgctcgggaggctgaggcaggagaattgcttgaatttgggaggcaaagattgcagtgagctgagatcacaccattgtacttcagtctgggtaaagagctgagatcgcaccattgcactccagcctgggtaa

SEQ ID NO: 8880 - DNA, 585 bp, Homo sapiens
  misc_feature 477: n = A,T,C or G
aacacattgtatcaaagatcatgaaagcaatgttttcattcaattaaacttgctagaagctaatgaaaactgcccagagaatttctctctgtaaattaaagatacacaacaaagattgtcacccgacatgttttcaactcaattaataattttggttagcaatagctgtaaggagtttgcatctgtgaagatcaaaccacagaggacatagagattaggcagaatttggctaagttgctaccaaagttttagtgtttaatccaataatcttcaaactcattaggtctgcaattgagttgcagatctctggagctcattctttattaagagatggctgaaacttcccttttccagttgggtggaagccctgagaggactccatattcttccccgggaggatgttagcacatctgccagtagcataagccagaaccaagaagtacatctgagtgtgaaagaatgtattattaaaaatanttagttttggactgatgatcttggacattttaatctgcctgtatgctaacttcaaccatctctcatttacaagaactatttaggaaaaatattgaatccacctggctg

SEQ ID NO: 8881 - DNA, 133 bp, Homo sapiens
ctagcacaatgtgttcatccatggtaacaggagagaaggcactgcacacagatgcagatgcagtcacataagtagatgttgtgataaaaatatatggacattttctgagaaaacagaagcaatcattagagat

SEQ ID NO: 8882 - DNA, 96 bp, Homo sapiens
gacaggtcttgattacatgaaggaccttactaaacacccttccatcctaacaaaaatatgtggagcatttgaccattgcacagggatgagttccca

SEQ ID NO: 8883 - DNA, 517 bp, Homo sapiens
gttgtctgataacagtaatatttttaatgtgttgagtgatatttttaatttgttaggcacatcgcaatcttttacatttatctgcatatatattatttggtcctcactgcatccttgtcaagttgttttggcaggcattattttctattttatctgtgggaacacagacccagcaggtctgtggtggaagagccagttagaaaccaagacctccacttccaacccagctatcctttcattctaacacactccctctggtaaattctagaaacaggcagcaaaacagccaaaaactaaagcagcttactttttcatatgtaatatgtaaatgaatagcaatggcaaatgacaatgggaatgtctattaagaaatatataataagcctggcgcagtggctcactcctgtaaataccagcactttgggaggccgaggcaggcggatcacttgaggtcaggagttcgagaccagcctggccaatatggtgaaaccccgtctctactaaaaatacaaaaatt

SEQ ID NO: 8884 - DNA, 491 bp, Homo sapiens
tgtgggtgggtttaagcatttggtaacacaaggaagaactcaaagattatgacatcggtggagagtggggggtgggggagtgtcagaggtatcgggagagtgcagaaggtttgaaatagttgattatagtaggaatagtgagctatagtactagattttcagagcacagtagtcatattttcgagcatcctttggtcccatgtggaattggagattctgaattatagagaaacccatctgccttatggtgactttctctggtagtatttcgttgccttaggccaggcatggtggctcatgcctgtaatcccagcactttgggaggccgaggcaggtggatcacttgatgtcaggagttcaagaccagcctggccaacatggtgaaacctccgtctctactaaaaatacaaaaatcagccaggtggtggtggtgcacgcctgtaatcacagctacttagcaggctgagtcaagagaattgcttgaacctggg

SEQ ID NO: 8885 - DNA, 433 bp, Homo sapiens
gcaggacccatacctcatagacagccaggtcggtgcaggcataggggatgatgccgagcatattgggcaggtagccgcggtaaagggcgcgggtgccctctcgctgcaagatctgcctggcgcagtccagcagccccttgtactggcccgtccgacgcaaggtcaaccgcgtcttcagcacctgaggatggcggggaacaaggcagctcatttgattgaatcctgtcaatgaccctcggggtagccattgtccccaccctacaaacaaggaaaatgaggctcaggaaggcaaagagctgggtttcagacccggatctgtcagattccatggaatgctctctgaattttgagttctgaagcacaaatgctggcaaaggccaagagagtgagggaagaaggctcacgtctgtcttcccagccctttgggaggctg

SEQ ID NO: 8886 - DNA, 94 bp, Homo sapiens
tgggcattatccttgcatttatcatctttgtgtctcagactcttgataatggcctacccaaactaggcatgacaataaatgttggttgaaatga

SEQ ID NO: 8887 - DNA, 477 bp, Homo sapiens
acaaggcacagccctagatcccttaaaccttgattccatacaacacatttttgtgagctcaaggttggggcaaagaggttggggcacagtgattggggcaaagttacagattaacagaatctcaggacaaagcaattgttcaaggtacaggtcaaaatggaatttattatgtcttccctttctacatagacacagtaacagtctgatccctcttccttttccctacaaaatagaaatgatcattagcaacagaagaaaactaaaatgagtaacttattttttttaaagtaacatactggctaggcatagtggctcttgtctgtaatcccagcattttggcaggtggaggggggcagatcacttgaggtcaggagttcgagatcagcctggtcaacatggtgaaacctcacctctattaaaaatacaaaaaatgggctgggcatggtggctcacgcctattattctagcactttggga

SEQ ID NO: 8888 - DNA, 600 bp, Homo sapiens
tgtcttcttccactactcagaaataaacatcatgttttgctctgtgtccttccagacgtttctgtcatataaacacactatgattagatttgaggttttgtaaaatggcatgacaatcataatccgtctgtaatcttctctattcatttaatgtgagcacctttcctcaccagcgcagataacaaatgccttacattctgtttttaacaactacttaagtttctgtagaatagagaaactaccatttttataactactgtcctctagatagatgtttagaatgcatacaactttttgctattattaacaatgctgcaactatggccgggcgcggtggctcatgcctgtaatcccagcactttgggaggctgaggcgggcagatcacgaggtcaggagatcgagaccatcctggctaacacggtgaaaccctgtctctactaaaaatacaaaaaattagcccgggcgtggtggcagataccctgtagtcccagctactcgggaggctgaggcaggagaatggcgtgaacccaggaggcggagcttgcagtgagcggagattgagccactgcactccagcttgggcaacagagcaagactct

SEQ ID NO: 8889 - DNA, 55 bp, Homo sapiens
ggtactcccatcacagggcttctgcttggcaacttatcttcctattatgaagctc

SEQ ID NO: 8890 - DNA, 450 bp, Homo sapiens
cggcctcccaaagtgctgggattacaggcgtgacccaccacacttggcccgaagacttattattatcccatcagcctttctctcatggaatttggcctcaaaaattaagtaaacatttaagtcaaaaggagagtgagaatattgccttctagcctttcatataagatttgctggtatttaatgaggcctgattctgcctggcactgtaccaatgcccttatttactggtgagaaaactgaagttcagagatgtaaagttatatggtctagctcacatagcttctgtgtggtgaagctggggttccaactcaggtctaattccattagagtcttgcgtctttcctgcctactcatatgtaccaagactcagctagtacaggagttgggcaaggtactgagactacaagggggaatgggtggtgagtctactttctgggtatagtcaaattc

SEQ ID NO: 8891 - DNA, 627 bp, Homo sapiens
ttgtccattcatttggccacactaccatagggatcctaattcttcttgagaattgattcttttgtttttgtttttgttgttgtttatttattttgagaaagggcctcattatgttgcacaggttggcctcgaaatcttgggcttgaggtatcctcctgcctcagtctcctgagtatctgggacaacaggtggatgccattgtgcccagcaaattattttgacttataattcattctggatgacattttatataataggactacagttaatgttggttttattttgcttatcttggttgttattgtgattgactttttaaaactttttgttcatgtttctttagcatttctaatgtttttcagcatggtaactaaatacttttatataatataaatgctaaggttacatggtaggcattgttcatgggcaccatgctatacacctataaattaaaatcagtacaatcatatccaaatgaatacaattatatcaggtgacagagttgttaatagctcagaagataaacggtttcaccattgctcagtagataaatttcttctttccaaaatgtgatttaaatatcaatacttccccagcactttgggaggccgaggcaggcggatcacg

SEQ ID NO: 8892 - DNA, 176 bp, Homo sapiens
tccgttgctgtcggtgcgccagttcacactccgggtcagagttcctggcccggtgcacctgagaggtcgctctccgactctcgctctggaccctcttgcgccattgaaccccctgatacgggggcctgagaccccagggcttaggagatggatccagtccctggcgctcctacttc

SEQ ID NO: 8893 - DNA, 509 bp, Homo sapiens
tgagaattggtgtaagacatcacaatcccattattcagagcgcgtatggagtggaaacgcttgtagggtttcaccaggtaagcggtgttgaactttctgcttgtgtattctctctgggcagagatgccacttgcctcccccaccatgccatctctgaagaatattacagaccattttggagcatggtgaataagaaattttcaccttaggagttcacttgaatagtcatttttatatttgtgactgcaagtcactcttaggggctgtacttccttagtactggtagcattattatccaatggacttttatagctttcattaggttttcttttgtttttgttctttaaagaacgttttacttatcttagtatttcatttttcatctatattatgaggcagtaagagtcttctgtttttccaaagttgagactgctttatatttatttcgtattgtctacagctgtagtgttcaatacattagccactagccacatgtggttatttaaata

SEQ ID NO: 8894 - DNA, 611 bp, Homo sapiens
actgaatgtagaagaccaacagaaatttaatggcacactaccactaccctttcctatatcattattcccctgggggtcatactgctattaaatcatctatttggtgtatgaattttggatcctaacattgatggagctgtctgaatctcctttgtatttacttgaatcagtgttgcctatctgttgtgcagccaatccaggatcagctccaggtaagccacttccaaaagctgcttggtataaatgatgatgatgaaaattatttattaaagtccagctttcttatcatctagaattttgttctgtagggaggtaaatctattttctcttgaagatacagagctaatttatttgactgaagcacttcatgacagcaatcatggaacacaaaaagaagctatcaatgtgcacacagaagcaagaacacaggccgtgcacacaggacaagcacagcaactgactcaaaagatgagcccttcccccagcagtcagtgggattcttctggtcttcctggaaaggataaagaacttatgagcactgtcactctaaaagggacagaatctaacgcaccttcatacaggccatctgaagcaaaaataatttggataaa

SEQ ID NO: 8895 - DNA, 413 bp, Homo sapiens
cctgggattttgccggatgtcattcaatggctttcaaggatgatgcacagctaggccataggagagtaagctcaaattcccaccctgtcacccatacacagaaactcattctggtttttctgccatgtctaggccatacaatgaaagtcgctgaagaagaatatgaattttgcctgcggatttgctaacactcgacaatcctaggaggtaaaaggcaaaagaggggctgggtgtggtggctcacgcctgtaatcccagcactttgggaggctgaggcaggtggatcacctgaggtcgggagttcgagaccagcctgaccaacacggaggaaccccgtctctactaaaaattagccgggtgtggtggcacatgcctgtaatcccagctactcgggaggctgaggcaggagaatc

SEQ ID NO: 8896 - DNA, 200 bp, Homo sapiens
acgacagaagggggctgcctctaggttctgggaagatggcgaaggtctcagagctttacgatgtcacttgggaagaaatgagggataaaatgagaaaatggagagaagaaaactcaagaaatagtgagcaaattgtggaagttggagaagaattaattaatgaatatgcttttaagctggggagatgatatttggtatat

SEQ ID NO: 8897 - DNA, 453 bp, Homo sapiens
cagtctctactaaaagacagaaacaatacactgccaaaatgttaagttgaccaccgtgaaacttctctattggagtgtctgtttctttaagctgtgaatactgaaattatgccttgtctcctccccaccccagggggatgccgttttgcagtgtggacacgtgtttgaagcagttactaaactcgtcatcctggttaagaaggagaacattgtcaatgttgttcaaggaaggtaggtggcttcatcttcagctcaggaagtaattcaatgttaaaatgtttattaaggccgagcgtggtggctcatgcctataatcccagcactttgggaggctgaggtgagcagataacttgaggctaggagttcaagaccagcctggccaaaatggtgaaaccccgtttctactaagaatacaaagattagccgggtttggtggtgcacacttgtaatccc

SEQ ID NO: 8898 - DNA, 432 bp, Homo sapiens
gttttctttgacatcactgcaccacaacacctgccttgcagttaaacagttgagcctggtgatagtaaaagagccaattctcaaaaaatgtcacagattttcttctaagcattctttatcacttggaattctcttttttgttgttgaatgatatttttatagtttgagaatacactttgcggggggaacattgactcttggattttgtatcactctgcactaaagtgtagctactacatcagagttctcagtaaaaacttctaatattcgaaacctgtccattttatcccctacccagagcagtcccagtgatcacgttgctcaaaatatttacttcttggttgaaaatatcaagaacaacctcaccaaatttccaaaggacatgaaactagctggggttgggaatattctaaatcatagaaatataattat

SEQ ID NO: 8899 - DNA, 300 bp, Homo sapiens
agtgagtggtcttaccaaaaatccagtatccttgccatccttgccaaatcccactaaaccaaacaggcgttccttctgtgcccagtcctagtattcaaaggaaccctactgccagtgctgcaccattgggaacaacacttgctgtgcaggctgttccaacagcacactctattgtacaagccacaaggacttctttacccacagagggcccatcaggactctatagtccatcaactaatcgaggtcctatacagatgaaaattccaatttctgcatttagtacttcgtctgctgcagaac

SEQ ID NO: 8900 - DNA, 137 bp, Homo sapiens
ggcacgagggaagagggaagaagagaagctggttatttctagaggatgtcgtaatctacatcacaggcagaactgatggctcagtggctgagtggccagtatattgtctttttttttttgaaacaaggtctcgtttt

SEQ ID NO: 8901 - DNA, 110 bp, Homo sapiens
ggcacgaggagggaggatcccctgggttgtgcatatggcgggaaggggtattccaggagtggaggatgtcagcagggtgggaatgggatcagtgaggggaggaggagcag

SEQ ID NO: 8902 - DNA, 688 bp, Homo sapiens
attcggcacgagaaatgctgaatattggtaacaagcaacaggggaaacaaggcagtctgagcacacagaactcaagtcctcctaatgggatcccagaatgcccatggaggaagcagcatgtgcactgtgctgagtgctgagcaggatttcaagagagcaaaggcagagatgctggacagggcagcacaggaggacgagtgtgcatggtcactctgagcagggctggttcctgggctggttggagcacagcatggggaactgaaaggcagacactggccaagaaagtccttgtgcagggcttcagaagtgagcctcacaagccatcctaggccacactgccatcaagccccagacctctacatgcccatttggtttctttccagctcatatagcttcctaagtattgtggctaacagttccctgacttgaattcctagtttctgttaacagttttctaactttcaggaaaaacaagccaatttctaaggaaagtggctgtgcttcagtcaggagtagtccgaggtagacatccaggacagtatgacgcaaagggtttggagcgcaacaaccccttgcgttatatagccatttaatgtaacctgtttgtgtgagttcatacctggctttgagccactattgtctgtgagtaatataactgcactgctgactctgtaggagagagaataaa

SEQ ID NO: 8903 - DNA, 539 bp, Homo sapiens
ggcacgagggtgggtggcagaggggaaatccaacatgcagactgtggcagtgtcttgaacttctgtttattcaggtcattgaataagaaactcttttcttctgcattcctgtctttctgcatgtgtgtgtgtgtgtgggctgggtagggactgtttttgagatcactgggctgaaatgtattctaggggtgaaggatctaggatgtacctgctcgtcatttcctgacttcaccttttaccaattcttttcttaacaaatttaaaattggtcagagcaggagctgctagctggctttttaacagtgtttctcataatggcagtactcagcaaatagtttttctcttgtctcctaaaattaagttgcaagactaatgtaacaaacagtaaaatttaagctaaagaactcagtatacgctgggtgtggtggtttacgtctataattccaacactttgagaggctgaggtggaaggattgcttgagcccaagagtttgagaccagcctgggcaacgtagggagaccctgtctctacaaaattt

SEQ ID NO: 8904 - DNA, 639 bp, Homo sapiens
cagtgggaagggcactgggctggaagccctacccatgtcagggaatgtctgggcctcagatttttattttctagaatgaagatacttaccccccaattgctgagatatttgaataaaagtatatgtgaaggattttgtaattatagaatgtcctacaaatatgagtagttcgtttgctacttttttggcgaagaaaaatattgggatgcatgaataatatctacctaaggtacctaaggttgtattcatcccatttattgaatgccaaggatataccagctactgctccagatgttgtattcagggaacagaagaagagtccctgtgcccatggagctaacagcattctaggggaggaaagatgggtcagctgactttcacgatctcaggtactgatgaagattgtgaagattattacatcaagtgaatgtacgggtgatttagagaaagctggtagctaggctgttcaaggaagggcctctgtgagaaaggggatggctggctgggtgtggtggttcacgcctataatcccagcactctgggaggttgggagtttgagaccagcctgaccagcatggagaaaccccgtctctactaaaaatacaaaattagccccgcatggtggcacatgcctgtaat

SEQ ID NO: 8905 - DNA, 223 bp, Homo sapiens
ggcacgaggaactgtcccccgttatctctgtccatacagcaacagcccccaatggccctgaccacctccctccccagcagaacgccccttcgtgggtgtgaaaatactttctattctggtcagcaccaagaatgcctttttcccttctgcaggtcctccagtgattccccttaagaatgcccctttcaaagccacccccccatcgcagcggcacagctccctc

SEQ ID NO: 8906 - DNA, 183 bp, Homo sapiens
ggaatatcctcaaccttaaatccttatctgccgttactcagggatatactaggattatgtcatcaattatcttcaataatagcatttttggtcaaattaaatgagtggtaagcttcttcacaatgtgaccattgaaattgaatggtttgttctgtacctttttgcttcagcaatcaattttct

SEQ ID NO: 8907 - DNA, 343 bp, Homo sapiens
gagggcaggagagtgaccaagcagctagaagagagggtgcagcaccccaaggagaggactgggggagtgggtgttccaggaagggctctggcatgtaaagctgcacagaagtcaaatcagataaagcctgagagggatccatgggatttcttggcaaagggattgttggtgataccaggaagagcagcttcagtggctcatggggagagaagccagattacaggagatcagcaactgagagagtgagtggagagcatcttttaagaatgtcttgagtgcgggccggctgcggtggctcacgcctgtaatctcagcactttgggaggccgaggcgggcgaatca

SEQ ID NO: 8908 - DNA, 539 bp, Homo sapiens
ggcacgagagttttggatgagacttggtatggtccattctgggacaaaattcctctctctctctctctgcggacccgtgaaatctagaaaataagttatttgcttctaaaatacagtgatgggacagacataggatagacattcccatttcaaaagtgagaaattgggccaggtgcagtggctcacacctgtaaccccagcacctgtaatcctagctccccaggcggctgaggcaggaggattgcttgagcctgggagatcaaggttgtagtgagccatgattgcgccacctttattggaaacttttattccagttaccaataacacattcctcatttcctccagagacctcaccagaaacacctttaatattcatatttctagcagccttctgttcataacaatatatgcatcctgttaagatgataggagatttctctgcacctctcctctttgtgagcctgcagggacattccctttaatgtccatatttctaccagcagtctcttcaaggcagtctaggtttttcctaacataca

SEQ ID NO: 8909 - DNA, 630 bp, Homo sapiens
ggcacgaggtttgtgtgagatttgatcatagtctaaaactatcacgtctgagttgccttaggatgacagtgctgacacccagtaggaagtatcccatttttatcaggaaagtcagtcacgcgtagggatggtgaggagacgcgtagggatggtgaggaggggagaggagggagacctgctggtgcccttgcaccagggtgaggcctgactcacgctgcttccccccacaggccctgctttgcttgcctgctttttccagaatcgattttgcaagcttcaagattctgttcccctcttcgcagaagtgaggaaggcaaatactcagggtttgaagggagacctggccggcctgagggctggcagatgtgagggcaggacacctgggatggactcgtaggctgacccaggcccaaagggggctgcctgttcccaactctttcactctgtaacccattttaaaatgagtttttgaatcttgcctcaaattgacctacttggataaaatcagtgcttttcctaacttgattttgtttgacgtggttccctctaagagaatggtaggaattgaaactatttgtatatgttgaaatttgtaggggttcaggaacccatggcagaaacactaaacta

SEQ ID NO: 8910 - DNA, 528 bp, Homo sapiens
ggcacgagcccatgtcccgcccgctcgtctgcctggctgcggggtgacacggggcttcgccttgggaaggggtcgagggaagcagttagacggctgccgggcggcggctgccgcgcggcacacaatatttatttaattgcccaactaccactgatgaagatatattggagtgactgctgaaattgcctttttgtttttaaccagaggacagtccatttgtttcacttctttttgctttctttactgctatgagctttactgaacggctgaaaaacttggaaaataaaatggacatgctgtagtcttgaacataatttttttaaggaaaacttaaagtgccagagtgaaagccagaatggcatccagagagaggctctttgaactttggatgctttattgtacaaagaaagatccagattacctgaagctgtggttggacacttttgtttctagctatgaacaatttttagacgttgactttgaaaagctgcctaccagggtagatgatatgcctccaggaatatctct

SEQ ID NO: 8911 - DNA, 331 bp, Homo sapiens
attcggcacgagggaagggaggtttaaggaagagactgtggacagaggtgttagggaaggtgtcagagaaggttaaggagccaacatggatcatgggggtggtacagtgttgccagggctggggaggattggctgcagtgtggggtacccagccgctgccatgtggagagggacctgtcactcctgctgtgaactctcccttcttctgccctctgacctcctgctggtgcctcccattggctaaacacagttgatggccagtgcactggggagctgttcttggagcccacaggcatctgcttcttggcacagagcagacaatggattgagt

SEQ ID NO: 8912 - DNA, 535 bp, Homo sapiens
ggcacgagcgtggagagaatactcagaaatgaacctctttaaagccttgcaggaatgagtcactcttacttaatgaaatgttaaagccaattaaaaagcatgctgtgatgcccagcttccctttccacagggtgcatgcgtctcctgctggtgaatcacatgcggcaagaggcaactggctccacagcctgggatgctgccgtaccaagaggaaagaagcagcaaaatgcctttacgttgttctaaacccccgacgcataaagtgtagaggagggatggccaagggtgggtggtagaaagtgtgttcaggctgacactggcaatgagtacagataatttcactttcctcttccaggggcaaaggctgatggcctctacctttgtatccaggagaaactgcagagcagccctgtgactttacaaaatatgctacctcaaagtgctaccgataaacctttctaattgtaagtgcccttactaagggcacatgtcttaatcaaagttagttttttgttttctggtttgtttttttttt

SEQ ID NO: 8913 - DNA, 603 bp, Homo sapiens
ggcacgagctaccctacagatattgaatgcaccttgagataatttagtgtttttaactgatacataatttatcaagcagtacatgaaagtgtaataataaaatgtctatgtatctttagttacattcaaatttgtaactttataaacatgttttatgcttgaggaaatttttaaggtggtagtataaatggaaactttttgaagtagaccggatatgggctacttgtgactagacttttaaactttgctctttcaagcagaagcctggtttctgggagaacactgcacagcgatttctttcccaggatttacacaactttaaagggaagataaatgaacatcagatttctaggtatagaactatgttattgaaaggaaaaggaaaactggtgtttgtttcttagactcatgaaataaaaaattatgaaggcaatgaaaaataaattgaaaattaaagtcagatgagaataggaataatactttgccacttctgcattatttagaaacatacgttattgtacatttgtaaaccatttactgtctgggcaatagtgactccgtttaataaaagcttccgtagtgcattggtatggattaaatgca

SEQ ID NO: 8914 - DNA, 422 bp, Homo sapiens
ggcacgagctttaggttcttgattatgtcactgtaataaagcaaccaatggacctttcatctgtaatcagtaaaattgatctacacaagtatctgactgtgaaagactatttgagagatattgatctaatctgtagtaatgccttagaatacaatccagatagagatcctggagatcgtcttattaggcatagagcctgtgctttaagagatactgcctatgccataattaaagaagaacttgatgaagactttgagcagctctgtgaagaaattcaggaatctagaaagaaaagaggttgtagctcctccaaatatgccccgtcttactaccatgtgatgccaaagcaaaattccactcttgttggtgataaaagatcagacccagagcagaatgaaaagctaaagacaccgagtactcct

SEQ ID NO: 8915 - DNA, 573 bp, Homo sapiens
atccttgaaaaatgctatgttggaatcttaatccccaggacctcagaatgtgaccttacttattaaaaacagggtctttacagaggtgttgcagttacagtaaggtcattagggtgggccctaatccagcatgactgatgtccttaaaagggggactttggagagaaaaacatgctcaaggaagaggatgtgaaggctacgtgaagagactggagtgatgtgtctgcaagccaaagaacaccaaaaatcgtcagccaccacctgaagctggaagaggaaaggaaagatcttcccctagggccttcagagggaacacggccttgatctcagacttcccctctaagaactgtgggagaatcagcatcttttgtttaagcctcccatgttgtggtactttattgtggcagcctgagcaaacacagtggctaaggaaactaatttcaatcagagacaatattcaaaattcagcactggatattggcaggactaggcactaaccagtcagaagagatgacagctttgaactactcacacaggtgggccactgtggggcacagagatgatgtatggaaa

SEQ ID NO: 8916 - DNA, 410 bp, Homo sapiens
cagccaatcacaggcttccagctaacaagactatgcccaaataaggcaaatgcctcatcacatgatgctcaaatcaggcagccacctaggcgaggccaatcaggtaacttttctactttgcttaattgttcagcctgtacaaatttgctgcttatgactgctgagcagagctgtctaaacctcttctggtttggagtgctgccttatatatgaattggtctttggtcacataaaattggttaaatttaacttctctaaagttttgtattaaattgtatgtaaaacattggtagcacaatttggattcagatacccaaatattgactatgataatgtaaataatccttaagcagactgatttacaaaggcctgaacaagtttgatattctgaatattcacttcttctgatg

SEQ ID NO: 8917 - DNA, 411 bp, Homo sapiens
cgccggccgccctgcgtacgctcgcaaggcgctcgcagactccggagtcgccaacatgtcgaccgccatgaatttcgggaccaagagcttccagccgcggcccccggacaagggcagcttcccgctggatcacttaggtgaatgtaaaagctttaaagagaaattcatgaagtgtcttcataacaataattttgaaaatgctttgtgcagaaaggaatcaaaagaatatttagaatgcaggatggagagaaaattgatgctacaagaaccattggagaaactgggatttggagacttgactagtggaaaatcagaggcaaaaaaatgaattttgatgagaagacccctgggccgtgttcagtggtctctcaggacggagggcatcatcctgcctcttaggttggctgaggc

SEQ ID NO: 8918 - DNA, 164 bp, Homo sapiens
acatagctcgccttttgcaacaaaacgacttacaggaacagaaaaagagaaagaaacactttccagaattccctgcaacccgtgcttatgcagatagttactattatgaagatggacaccaaccagggtcaaagagggccaaggaattgggttctggattctca

SEQ ID NO: 8919 - DNA, 501 bp, Homo sapiens
ggcacgaggtttatcgaggacacaatgaggatgccaaggcacagagaagttaaggaacttgtccaaaatcaccttagtgataactggcagagcttgaatcagaattcaagtaatctggcgtcatgtccaataccactaaccattgcattctgctgcctctcaaaaataaaccaggcatagagtaaaattcatctgtagttcaagaaacaatttattgaagcttcctttttctgtcaagtttggaaaacgggagagaagataggaatcgagactgagaagacgaccaagtggttctgagctgagagaactgggaaattgaaggacgtagattagctaagggaagatacaagtacctgaatccttctaaaaattttttttattgaggtgaaattcacataacataaacagccattttaaagtgaacaattcagtgacataatattcacaatgttgcacaaccaccacctctatctagttccaaaacattcccggccgggcgcg

SEQ ID NO: 8920 - DNA, 62 bp, Homo sapiens
tgaggagtggagctgaatttgaatgcaagccttggcaccttaattgagcaagtttgaaacct

SEQ ID NO: 8921 - DNA, 383 bp, Homo sapiens
  misc_feature 383: n = A,T,C or G
ggcacgagcaagaactgggacgtcgagtggtctggagattacagcctctgccccaggtgcacccagctatatgagaaaggtggggaccgggcaggggaactggatgctgggggccacaggggaatggccaggctcttttacaggctttagcacagaccctcttttctcatggctttccaccttgtagctatgggactatctcttcaactcagggaactcttccacaggagtccatccagtatgtaaaacagggacacatagctcctctgagggtggtgggagtggaaggcctgggaccccactgtcttggtgtctgaggtacttcctggaacctcacgtctccattgagcggtttggaagccttattcaggcagtacattagn

SEQ ID NO: 8922 - DNA, 325 bp, Homo sapiens
  misc_feature 219: n = A,T,C or G
agcattaacatagaaactagagattagtagtactggagccaagttttatccaaaatcgtgtggctctgttattttaaatcaaaagacaaataagaaaacaggacactttgtgtccctagctttgaatctgattattttgtatattccaaaaaacacctagacccctggatttttccacagcagctctacttaactatcagtgaaaaacgctgggacatnccaccaccaccaacagcaccccttatgagattatccaattgtttaaaagcccagctttctttctttgaaagtactcacttggggagctatcctgcctaacaggtat

SEQ ID NO: 8923 - DNA, 423 bp, Homo sapiens
gaaaagtaatgggagatgaagctggaggtctaagttgacataagatataaagatgaagggcttatacttcagattgaaaataggattttatataaaccaataaaaaggaacaatccacaaggtttttaattagggtagtgacataaccaggtttatgtttggtaacaactcagcaaaagacagaatatggcccagagtacagaaaagtcagaggcagattaattagctaaggagattacttactaccattctctagtcaaggaatgaactaaactagcagcaatgtgcataacacaaagatagaactgagcggacttaggaattaggaaggaaaacaattctataggatttggtgataggctgactatggaggtaaagaaggggtggaagaagactatgatatttctaacttggggaattggg

SEQ ID NO: 8924 - DNA, 573 bp, Homo sapiens
catttttcattcatgtgtaaagttatttagtaagactgttgttaatcttccagagtgatagaattttagaagagaccctggacatctagacattttttatgctactacatatggaattatactttactggtgactcatcccaaatagtgtatttttcagagttaaaagatttgttacggctgggcgcggtggctcacacctgtaatcccagcactttgggaggccgaggtgggcagatcatgaggtcaggagttcaagaccaggctggccaacatggtgaaaccctgtctctacaaaaaatacaaaaattagccaggcttggtggcacaaacctgcaatcccagctattcaggaggctgaggcaggagaatcactcgaaatggggaggtggaggttgcagtgagctgggatcgtgccattgcactccagcctgggcgacagagcgagactccatctcaaaaaacaaacaaacaaaattttgtcacaataaagtgattaaacgccctcttcaaaaacaatagaattgtcagcctgccggcagtggctcatgcctgtactcccagcactttggga

SEQ ID NO: 8925 - DNA, 215 bp, Homo sapiens
gggttctgtatatctcactgtaaccttgacctcatgaccttgagctcaagaccctgggttcaagggatcctccccactcaccctcccgaataactggaacatcaagtgcttgctaccacacttagctaatgtttaaattttttgtagatacaggatctcactctgttgcccaaactgatcttgaactcctgggctcaagcgatcctcctgccttg

SEQ ID NO: 8926 - DNA, 527 bp, Homo sapiens
tcttatcttcatctcatcattcaacctccacagttgcttcagcagagaatgagggagcccagagggttgtacacaagctctaaatgcttcagcctgtacttacacagagctcatagccccatgcagaattggccacgtcgttctaccaaactgttagggggctggaaagtgtgtgaaataacatggctttttgatgaacagaaatgcatttccacaagctgttacaaaagaagggtagtgatacaggtaggtaaaacgtgtcccctacagactgggaccctaaacaatgtttaaaatgttgatatataaaatgtagtcaatcggaggagccaagatggccgaataggaacagctccggtctacagctcccagcgtgagcgacgcagaagacaggtgatttctgcatttccatctgaggtaccgggttcatctcactagggagtgccagacagtgggcgcaggtcagtgggtgcacgcaccgtgcacgagccctgcttgggcgaggcattgcctcactcgggaagcgc

SEQ ID NO: 8927 - DNA, 534 bp, Homo sapiens
gagtgcggtcacatacttccagaagagcggaccagggctgctgccagcacctgccactcagagcgcctctgtcgctgggacccttcaggtaggacagctcccaacgctgtggggactctcagcaaaacttctccttcctttccacggctctgcttcttctgacctcatcttagttttgctttttcttttcttccttcgctatttttctacgatcctctaagaaccaagtccttgaaacttttggctcaaagtggatacagagacaactttttctagaaagttcagaaaagtgtattttgaggacggagtctggggaaatcaatgggatggggctaaaatcgtgcctggcagtgaccgggttcttgttctaggatgtggagggagcagggactttgaaacaaactgggataggatcctgtttatggaggaaacaccacacaccttggaaatgacatcgggaactggccagatgtttttcacctcctccgttttgattccgattgcttcaggacttgaactgttactccgctcgct

SEQ ID NO: 8928 - DNA, 585 bp, Homo sapiens
ggacttaaactttataatttttggttatcatgaataatgctgttataaacatttatgtatgagcccatggatatatgttttaatttcttttggatggattttagggggagatcaagaagttgctgaagtttttttttattgttgtttattttatcttttttaaagaaatggaggtctcactgtcttacccaggctggcttcaaactcctgggctcaagagatcctcccacctcagcttctcaggtagctaggattacagccacacaccactgtgcccagctaggaagttgcagaggttttgattactcctggcctttagttttctgaagataggatgttaattcaatttgctaaaatgaagtcaggatggcagtaggggttttgaggcaaggaataatggtttggtttaatatcctatagggaatgggaaggagagctgaccaagggcagattaaaggaattttaggtgccgtggaagtttgtgctgaaattgaggactgttgaatctataagattttcctaaaagtgctcagctgcctggtagaagaagcagagaagagtttagtcagaatgagggagtgagga

SEQ ID NO: 8929 - DNA, 413 bp, Homo sapiens
gaacttaaagtaaaaaatgaaatcaaataaatcaaataatgttttgggttttttttgttattttattatttgtataacaaagaaacccacacccatttgcagccaacttgcatttccctccaaccccctaatcctaagcaaccacgaatctttttgtttctatggatttgccattctgcatgattcataacaacagaagcatataatgtgagctcttttgtgactgccttctttcacttagcataatgcttccaaggcttatccttgttatagtatatattaatactcagtcctttttattgccaaataatattccatcatgtggttaattcatttcattggttgcacaattctgtgaatatactaaaaacattaagttccatacaccaactaggtgcattatatcttactga

SEQ ID NO: 8930 - DNA, 468 bp, Homo sapiens
cgttcccccgctacatagtctttcttttgtgttatttagtttaccatttcttttttccatcttgttataacctccacgagttgtgtctcttttgttttctacattatacccaacggctagcacataacaggcacccaatatatactgaacgaactaaggaatgaatgaaggaatgaatgaataggtggcttataggaaacccctggggccagggactctgcaacatcaccatgtaactttttctttgtgctgagaagcagagagaaacaatagaagatatctcttaatctctcaaggatgctactcccaggactgcttgcaatttccgaggagataagccacaagttacagaaaggaagcagctgtgtagggcctgcaagtttcctgctgcaagtcaccctatgttcagaagttaccctggctgggccaggcatggtggctcacgcctgtaatcccagcactctgggg

SEQ ID NO: 8931 - DNA, 457 bp, Homo sapiens
tggctcacacctgtaatcccagcactttgggaggccaacgtgggcagatcacttgaggtcaggatttcgagactagcctggccaacatggtgaaaccctgtccctactaaaaacacaaaaattagccaggcgtggtggtgcacatctgtaatcccagctacttgggaggctgaggcatgagaattgcttgaacccaggagacagaggttgcagtgagccatgatcccaccaccacactccagcctgggtgacagagtgagactctgtctcaaaagagttattaccaaaacaatagactataaaatctgtagtcttaatttgcatatcatggtagacaggaaaatacctttagcatcttaataaaagatgaatcaaactctctaataaataccctagaaaagacaaacaatacactaaatataagattaaagagtagtttctaatacatcattctaag

SEQ ID NO: 8932 - DNA, 194 bp, Homo sapiens
tcctccaacgcccttttgatccaagattgattaagagacattggcagatgctgagaaggacaacccaattgttataacttgcagaccgatggggagatgggttccagtctgcacatgactcatgcacagtccccccaccccaccctgacttataaaattccaaaccgactacaagaccagaaacaaaccacatg

SEQ ID NO: 8933 - DNA, 333 bp, Homo sapiens
actactacttttcatgcaatacttcacatacaacttgagggttacagaatccagattaagcctctgttctggaaggattatcacagaaacccacatttacttatttcagagggggtcatctgcttcccctctgccctttctctaataaaacttcaaaaaaacagaatattgtcaggccggacgcggtggctcatgcctgtaatcccagcactttgggaggccgaggcaggcacatcacctgaggtcattactgacttctagaccagcctggccaatatggagaaaccctgactctactaaaaatacaaaaattagctgggcgcggtggcatgg

SEQ ID NO: 8934 - DNA, 500 bp, Homo sapiens
ttagtgtactggatgtcaggtccctcaaagattccttggaccattttcatgtgaatgaagaagaaatcaattgtctttcattgaatcaaacggaaaacctgctggcttctgctgacgactctggggcaatcaaaatcctagacttggaaaacaagaaagttatcagatccttgaagagacattccaatatctgctcctcagtggcttttcggcctcagaggcctcagagcctggtgtcatgtggactggatatgcaggtgatgctgtggagtcttcaaaaagcccgaccactctggattacaaatttacaggaggatgaaacagaagaaatggaaggcccacagtcacctggtcagctcttaaaccctgccctagcccattctatctctgtggcttcgtgtggtaatatttttagttgtggtgcacaagatggtaaggttcgaatctttcgggtgatgggagttaagtgtgaacaggaactgggatttaagggccacact

SEQ ID NO: 8935 - DNA, 72 bp, Homo sapiens
gctgtgacagcctcttacctaagtaccttaagagattttgtgtgaaaagcaagcctttcccacaggacacga

SEQ ID NO: 8936 - DNA, 403 bp, Homo sapiens
tacaatataaacaacattgatgatatatgtatattatctacatataacccagaaaatagaaaaagaaaatttcagtacacaggaacaatattgttcacaaagtagttttcaataaactttaaagaaattatattatacaaaacacgttctttgataacaattataaattatgaataaaaatatagtaaaatatatattagaaactaaaactcctaaataatccttgaatcaaagaggaaatagaaatggaaattacaaaatttttagaatgaaatttttatgtactatataaaaaatgtgtgtaataaagccaatgtacattcatagacataagtgcatgtattaaaacaaaacaatatgaaaaagaatttcaaaatatccagtgtattcaattcaaaaaact

SEQ ID NO: 8937 - DNA, 567 bp, Homo sapiens
ccgttgctgtcgaataaaagcaaacagaacactccaacttagagcaataacggctgccgcagcagccagggaagaccttggtttggtttatgtgtcagtttcacttttccgatagaaatttcttacctcatttttttaagcagtaaggcttgaagtgatgaaacccacagatcctagcaaatgtgcccaaccagctttactaaagggggaggaagggagggcaaagggatgagaagacaagtttcccagaagtgcctggttctgtgtacttgtccctttgttgtcgttgttgtagttaaaggaatttcattttttaaaagaaatcttcgaaggtgtggttttcatttctcagtcaccaacagatgaataattatgcttaataataaagtatttattaagactttcttcagagtatgaaagtacaaaaagtctagttacagtggatttagaatatatttatgttgatgtcaaacagctgagcaccgtagcatgcagatgtcaaggcagttaggaagtaaatggtgtcttgtagatatgtgcaaggtagcatgatgagcaacttgagtt

SEQ ID NO: 8938 - DNA, 415 bp, Homo sapiens
cagcacacaaacagtggcttatccaggtccatcatattattacaaaattactattatcactattatgtaataactgtttgcttaaaactattttgctttcaatgtatttgaaacactttgcttatctaacacattaaagctataaagtcatataactttcctctccatttcacaagacagaagataagctcagaagactggacctatgttgaatggtttggctaggatgacagaatcagtatgaggaagatcttggacctaagtcttctctttatgtcactcttttatcactctgcattgtcagttgtacatacacattaaattgagtggtgacaatttgttaggagataaagtaggtcttcagttttcaatcttgccccctctgcagcccccttcagccctgtggacatgggcc

SEQ ID NO: 8939 - DNA, 315 bp, Homo sapiens
gggcattatcacaccagaatttcactgctgtccagagtttacctctgcatgaatgtctctaggctgattgctctctgctgagtactaacgaaggaaatccaacattcatgttctactttgggctttctgatgacacaggagcctggcttgtattcagtacacatatattgatgttatgtgacttgactaggccataaaaacgataaataccttttaatagcacctactatggaccaagtgctgttataagcaatttacacaaatttaattgtcaacctgggggcggtggctcatgcttctaatcccaaaattttg

SEQ ID NO: 8940 - DNA, 344 bp, Homo sapiens
gcctctcactcataggaggggcccaggaaagagggaggaggcaagaaggggaaggagcacaaggagtgtgggtgaggggtgtaaccatgagggcaggcagggggcaggacggaaggcaggagggcctggccaggggaggcctcaggaggatgagcaggaggcgagaggagacagactatgaggccagagggagaccctcacctgagaatctcctttagcgtgcggtgcaggaatgcataattgtcatcgaatttgtaccaaggcatgaatggctgaccttcactgtacacaaagttttcccagcagtatgcaaattctgagacgaagaggcaggaagcagtcag

SEQ ID NO: 8941 - DNA, 526 bp, Homo sapiens
cttgtacagtatttctactttttattctaatcaactggactgttgcattatttttatgtagattgctaacaaggtttttgaagaaacactcttaaaagtcataaaagggaaaatcttgacagttctgggatattgccacccttgaccttttggaaaaatgtagacagcatctcccaggcatgacgcctagggatcgtgtttatctgtcatcagttggtgactccatgtttattgagcactggctataagccagacttggtgagggactgaaacaattacaagacacagttctgcactggaagaaataggaatcaacctaagatttcctgtcctgctaggtcatcaggttcctgtcccactactttccttcctctaccaaattcacttatagcctccaagtagtgtaactatcaatagcacccctttcactccccaaagtgtcctaatttggagagtaagttgtatgatcaccctacctacagtctgcctgttttccaatgcacactttgtctctcccctgctcttg

SEQ ID NO: 8942 - DNA, 308 bp, Homo sapiens
ctaattacggttaatcacagtagaaaataaaacttgattccctttcctgcatggcttgagcatgaaataggagaagggacaagacaacctccgggtattgtttctaattctttaaaaagttgtacttgcagccaggcacggtggctcactcctgtaatcctaccactttgggaggctgaggcaggcggattgcctgagctcaggagttcgagaccagcctgcgcaacatggtgaaacgccgtctctactaaaaacacaaaaaattagccaggaatggcagtgtgcacctgtagtcccagctactcggg

SEQ ID NO: 8943 - DNA, 87 bp, Homo sapiens
agcctggttccgatgaacgcaactctgaatgcctggaacattcaaatgctcttgtttgaggaggtggccaaatgtaaatggattctg

SEQ ID NO: 8944 - DNA, 117 bp, Homo sapiens
actccccgccctaagatctctgtgtgtgtcctgggggaccagcagcactgtgacgaggctaaggacgtggatatcccccacatggacatcgaggcgctgaaaaaactcatcaagaat

SEQ ID NO: 8945 - DNA, 300 bp, Homo sapiens
aattccgttgctgtcggatcagccagtttagaggacctgtgggaaaatctgagtttaaagcctgccaactcccctcatgtaaatatctctacaaccttgtctccacaagttattaatgaagtgtggcaagaagaaacaattgggcgtctactacaacttgtagaccttccacttcttgactccttactgaaacagcaagaggctgtacctaaaattcctcaacctaagaggcagtccaccatggtcaacagcagtaactatctggatcgagggattctcaaggcttatagtgactctcag

SEQ ID NO: 8946 - DNA, 391 bp, Homo sapiens
gcagtggcatgatcttggttcactgcaacctccacctccctagttcaagtgctcctcagcctccagagtagctgggactacaagcaaatgccaccatgcccagctaatttttgtattttttatagagacagggttttgccatgctacccaggctggtctcagattcctgggctcaagtgaactgtccacctcagcctcccaaagtagactattcttatattttcctttcattgtggagtaaaacaaaaattgtttcatatgaatacattttcacagtaggaagaaacaaatttcattcttaactgaaacttacaatggccagaaattaagccactcccaaagtcattaattgtttcacctttggcttcttacctcccatttattgaaaatc

SEQ ID NO: 8947 - DNA, 346 bp, Homo sapiens
atttttctcttccccaccacagcatctttgcgtgtgtgtgtcggcgggtgttggagggggcaagttaagcctcattccctataatttggaacattccttcggatttgatcgagtcagatagagttggtcaaacccaatgggaaaaagactaaaggaactacaaaacagaaacaaacaaatgacaacaacaacaaaaaaacaggtaagcaaaacaaacaatcaattgcacaacttatacaattagtgagcactctaatggtaaggagaaattaagtccagctggttgttaatcttaactttggccaagacaaaccccagttcagttacttacctgcagacgggtctc

SEQ ID NO: 8948 - DNA, 272 bp, Homo sapiens
  misc_feature 129, 133, 136, 137, 140, 147, 149, 155, 156, 157, 158, 159,160, 161, 180, 182, 185, 186, 190, 194, 197, 199, 201, 208,209, 214, 218, 220, 221, 225, 226, 228, 237, 241, 245, 246,248, 251, 253, 255, 256, 261, 267, 270, 271: n = A,T,C or G
aattccgttgctgtcgacaaagtcgcagatgcatacaagactttttcaagaaacacatacagtacaaattcttagatgaagactttgtgttcgatatatacagagacagtagggggaagggggggaagnttcntgnnacntctttgntnatcctnnnnnnncatgatttactactttaangnggnnttgntggntantngnaccatgnncattncttnanngtcnngnttttcttantaantcgnntnttncntnnactgncctaanatnnt

SEQ ID NO: 8949 - DNA, 409 bp, Homo sapiens
tacgggaacatctggtcaggattcagacttcccagttactgctgcttctacagtggactttctcaaaataaaaaaatcatgtgaagaaaacgtatgcagatctttaaaagactgtgaaatggaaaagtgtccagactcttgtgcccatgagatggagtctgttgcagatcatgaaccaaataaaagaatattgggcagagtaaatttgtctttaaatgatagccattatggacagcaagataaaggaacatctctcagagaaacacaagaaatgactgaaggatcaagactagaaccaaactctgagtttggcaaagaaagtacctttggaatttcctcaaaagagtcgatgtcttgccatgatgaaagctctgtttccctaagaagcctgaaatccattgaaataatg

SEQ ID NO: 8950 - DNA, 295 bp, Homo sapiens
agaacagttaatggagacgtactctactactttgttgttgaccactggctatttggggaacagtgtcaggtggatttggcatggctattaaaataatcaacttaaataaaaaaatacatcccaatataattcccttgtagttcttttagttggatttgaaactgttccacaactgaaatttggaaaatcaagttatattgaaggtggagggaggaatggttggctgaatttaaatgacagatttaattgttttgttttgttggagaatactgtctataaatgtctaagaatttgg

SEQ ID NO: 8951 - DNA, 440 bp, Homo sapiens
actcgtctgagaagaagagctatcacctgagcgctctggagaacttagccggagctttcaggcagtctgggagcctacatggaggcgtgtaggcttatgtctcatgtccacgttgcccgggagacaaaatccttttctatttagagctgccccaaaatgttctgcaccagcttctcactgcggtggcttcaccttagcatacaggtatgtggacggccactgtgctggctcaccttggacactgccttcatgggcctgggtcaggttctcagtcagcagctcttgccaactccaggaggcccagacccaggagtggcctcctgctgccggacacgaagagggaaagagctgagctgcccggccctcttcttctaacaagccctcctgggttgacaaagaaagtctctccctgcactgggtgacactggacactgtccctg

SEQ ID NO: 8952 - DNA, 528 bp, Homo sapiens
caagtgagaaagctgtggttgaaacagattcagtaacttacgcaagtttatattctctgtcaagtgacccagctgggatttaaacaggccttttgactctaattctagtattcctcccatgtgcagtattttattttatattgcacaatagataaaatataattttggtttctccttttttattctaaaagagtaaaagcagttatctcaatatgttatgttcattctagtgatgactttactatcatgtactaaatgtgttttgtttaaagtagaagttaacttcacgttatactgatttgtccccccataaaccaactgtatgtcatcatataacaaaagttgttaaaagtgctatataccatataatgttgcatctaaactgggacacttatctgagatgcttttgcgtgggacaaatgctatattagaaatgactaggactggccaggtgcagtggctcacacgggtaatcccagcactttgggagactgaggcacgtggatcatttgaggtcaggaattcaag

SEQ ID NO: 8953 - DNA, 433 bp, Homo sapiens
ttggcaggaacacattgaagactaagagtttttaggccaaatcatcgaaaataaataacatcacttgagaaatgatcagagaaataagaaagggccaccataacatgaataagacctactgtgaaggagaaggctttgccatttctatgctatttagggtgaactttgagttatggtgttctgttgggcacatcacatattgaaagaaaagtttgaaaagctaaagtcattgggagagcacacaggatggcaaaaagtcataaaatctttcttaacagcagtggttgaaatagttggagccacttagtttaatgaagacaaattagtgaagacagtgtggctgaccccaaatatttgacaggctttcataagtaaaagggatattggcctcatatagctctgaagtatgaatggctgtaaatggaaattggac

SEQ ID NO: 8954 - DNA, 519 bp, Homo sapiens
atttactatgggccacgttcttgctgtgctccttctccctgtggttttcaaaaaccagtcacctaacctgaagcctcaaactcttcatctgcaaaaatgagttgtggcaggtgcctctgaagcaaaaatcctgggctagaaggagtgtcgtcatctaaggcaaaaaagaaaaacaaaatcaagactaagagaggaggaattagaatgagactcatgtaccctccttccccactccaggggaaggagagactgtttgggaatgccctcccactacttccagggcagaggctgtgcagaggagccttggagaatctgcagcccactgatgactctgcttcagtcagtgtttctgactttctgatggagaggcctcccattgataagatttttgtcactgcagctaaatgggggcttcaaatacaaataagtttcagttacagaaaaaaaaattcttgcacgtttaagcttatcccttctacggtattatctgtgagaattatagaccaaccataaggcact

SEQ ID NO: 8955 - DNA, 356 bp, Homo sapiens
cctcagcctgctgagtagctgggattacaggtgcccaccaccacgcccagctaatttttgcatttgtagtagagatggggcttcaccatcctggcccggctggtctcaaactcctgacctaaggcgatctgcccgcctcagcctccctgagagctgggattaaaggcgtgagccaccacacctgggcaccttatttttttatacggctctactgcatacagttgaataagaaaactattcctgtattgctgcactttcacactgcttcaaaatcggcctaggagaaacaatgctttaattgcttcgggtgcatttaattcctagagccaacgggcttggccaaaggcaacctaccc

SEQ ID NO: 8956 - DNA, 440 bp, Homo sapiens
  misc_feature 32: n = A,T,C or G
aagctcctgtccccaaacaagaagcagagganaaaccacactagcaagctgcaagagttggcactgctgctgcccatagccctgaagacggggaccaagaagctcacaaaggtacagggactagaggagaggggccagatttgggacgcaggtctttaaatagcagcaaatgggtcaccctctcctgggaaacctggacagatcctttcagtggcagcattcaaatgggaatggtgctactctgaacgggaatttccgggagtctgtgatcccataactaggtgcctggaggatcctttttttgcaaaggagagaggagaaaccgggctggggaaatagagatagcacaaagatcattgttccaggaatcaaatagccatgggtttgagccctctagcttcacagctacagaactctgggcagtttctcaggctacccag

SEQ ID NO: 8957 - DNA, 510 bp, Homo sapiens
acccatccacccatctactcatccatccatccaaccatccatccatccatccacccatccacccattcatccatccatccacccaaccaaccatccaccttttcatctatccacccacttgtccacccacccattcctccattcatcattcaaccctctcttcctaccatcactgtttcatccatgaagatttataaagaagtgtaacatttggagtttataaaccagtatttgagacctaattctaattctttccgcctgtgcaatcttggacaaatagttaaaattatctacattttttgtttattctttggtaaaatgggagagagtgcttatctttacattatgaaactactatgagaagtagatgattcagctggttgggtgtggtggctcatgcctgtaatcccagcaatttgggaggccaaggcgggctgatcacctgaggccaggagttcaagaccagcctggcaaacatagtgaaacaccgtctctactaaaaaaaaatac

SEQ ID NO: 8958 - DNA, 560 bp, Homo sapiens
ttccttccttctctctagcatcatattctcagaaattcttcctgtgttgctccattccagttcttataagtgattgttgcatgtggttttgtctagttttatctgtttttggtggaagagttattttaatacaagctgcactggaactgacttttgaattgaaacctctttccatgcttggttcaaaccaatccctatacgtaatggttatgagcccagagttggagccagggtcctgaattcccacctctgacactttctggctcttaatctctgactatttgcttaacatctctgtgcctccatttctatataagtttttttacggttattatttatttaataaatggagaaacaaagacccaacatgacacctggcaatttggtggcagaacctaaatctcaggtgtcctaacttccagtccaaagcatagagaaaaatagcagcatggagataatagctgtaagaatgttaattctctagagcatgcatcaatattattaatataaagtaaggccgagtacagtggctcacacctataatcccagcactttgggag

SEQ ID NO: 8959 - DNA, 479 bp, Homo sapiens
agagaatcggcctgaagctccctggagctccctggagggttccaccccccttgctccagctcacccagagttctacgattcaaaacagctggaaatgtgtgccctgctctccccaacaagaaaacagaacagaacatggctgtttctgccaagcgaattctgaataagctgcattccatttcattaaaacaattacctgagctccagccaagaattacataaagcttcctcccagcatcaccccctcccccataaaacacacatcatgctgctttcaaataggcagagtgaagctctgagccctcgctagaagacctcatagtcctcgccaagtggccagcctcggcatctctgcacgctgacatagatgacatgaggctgaaagaagaccttggcatgaagccctcccctcatgagagcctgctggctgcccgaaatgtttctagtaggcaccagggccctcacctctgcctcagagc

SEQ ID NO: 8960 - DNA, 636 bp, Homo sapiens
ttgcaaaggctaaagagttgggtgccactgaatgcatcaaccctcaagactacaagaaacccattcaggaagtgctaaaggaaatgactgatggaggtgtggatttttcgtttgaagtcatcggtcggcttgacaccatgatggcttccctgttatgttgtcatgaggcatgtggcacaagtgtcattgtaggggtacctcctgattcccagaacctctcaataaaccctatgctgctactgactggacgcacgtggaaaggagctatttttggaggctttaagagtaaagaatctgtccccaaacttgtggctgactttatggctaagaagttttcactggatgcattaataacaaatattttaccttttgaaaaaataaatgaaggatttgacctgcttcgctctggaaagagtatccgtaccgtcctgacgttttgaaacaatacagatgccttcccttgtagcagttttcagcctcctctaccctacatgatctggagcaacagctaggaaatatcattaattctgctcttcagagatgttaaaaataaattacacgtgggagctttccaaagaaatggaaattgatgggaaattatttgtcaagcaaatgtttaaaatccaaatgagaact

SEQ ID NO: 8961 - DNA, 300 bp, Homo sapiens
ggaagaaaagtggcagcatgaacagtaagagaatcattacaggctgggtgcagtggctcgcgcctgtaatcccagcactttggtaggctgaggccaggagtttgagaccagcctgggcaacatggtgaaaccctgtccttacaaaaaagttaaaaattagccgggatgtgataccttgtgcctgtggtcccagctacgtgggaagctgcggtggaaggattgcttgagcctgggagatcgaagcttcagtgaaccgtaattgcaccactcccttccaggctggaggacagagcaagaccc

SEQ ID NO: 8962 - DNA, 407 bp, Homo sapiens
gctaaaaggcggatagatgttcagttcctccatgaaatgagatttagttcccatgtaatggcattttccataataactgctgatatcatcaaggtaaagagagctgcttctcctaactacccatgaaagaatttagctttttatatttctacctctcccatatagtttaatctctccccactgcgagtatgactgactccaaggtattgaagtctgtgctctaattgggaattcaatgaacaagacttcagtgaatgaacttttttagccatattatataaaatgaaaaaggatctgctcctcatttcaatctcctgtacaattgctcctgaacagtagtacagaattgtagagatagcacattatgcaacctggctttttatctgagacatacttaatgaaagcac

SEQ ID NO: 8963 - DNA, 432 bp, Homo sapiens
ggcacgaggtattaaataagatgtctttaaacagaaacacacatatatgtattgattgattaatgaggctctcaagaacctgactctgtgtttcccctacgagcagtgtttcagtattcactaatcgagtgttcatggtgactttatagaaccactgcaaatagtgagaattaactatacatatatgtttctgtgtgtacgcacatgtgtgtgtatgcatacttgtctctaaacatatgggattatactctgctgctgttttgctctttatgtcattatgtatactatataagtatatttttacattataatatgtgctatatattaataaatttttttaaatgtattaatatctgctcttactgagagagttttcagcctgctgaatagtcagttttacagtactagctaaaccttcttttcttttttttt

SEQ ID NO: 8964 - DNA, 400 bp, Homo sapiens
ggcacgagccaagctgaattccagattctgaaagctgagctggaaagaaccaaagaggaaaagcaagagttaaaagagaaactgaaggaaacagagacacacctggaaatgctgcagaaggctcagggctttggcaaagcttacgcggctacgtatccacgtcagctatctccttacttctgtcctccctcacttggagcttcgtgagatcgggtatgactcagaacaagtggatgggatcctgtacacggtgctggaggcaaatcacatactggattgagcaccagactgtatacccttctcttctcttatcttctgtctgttctcttttctctccctccctcacgtctctctctctctctctctctctctctctcaccctcacctttatgccttatat

SEQ ID NO: 8965 - DNA, 582 bp, Homo sapiens
agattgtgccactgcactccagcctgggtgacagaacgagactccatctcaaaaacaaaacaaaacaaaacaaaaagatgcatttattggccctgtttgcatgttttctggaatccagaacataaacccctaaaaggaccatctccagtcctttgcttcaaagaatcagcaggttagccttgttcatcaaggggcaatcctcctgagttctgtccccaaagagaaaaagcaatgcctaccacatataccttatatttaaccatgagaattgagctggatttctagagaacagcaatggattttgagccaagtgttcactcgagttccagcacagggacacacagtcccgatgggagcatccaaaatggaatctactatgttcaagaatatacactgtctcacacacaaacatcctgcaggatagaccacagggtatgctgtataagctcctcaataaatacagaaatacacaagtatgggtggggcgtggtggctcacaccaataaacccagcacttaaagagggcaaggcaggaggatcacttgagctcaggagttcgagctcaaccagcatgggtaatat

SEQ ID NO: 8966 - DNA, 560 bp, Homo sapiens
  misc_feature 403, 418: n = A,T,C or G
ctcccgagtagctgggactacaggtgcacgacaccacgcccagctaattttttgtacttttagtacagacagggtttcaccatgttggccaggctggtctcaaactccggacctcaggtgatccacctgcctcagcctcccaaagtgctggggttacaggtgtgagtcaccgcgcccagccaataaaaacatttctaattttacattaatattatgaaatacaatggcagcttatattgtttttacacacacaaaatttctgaagccagtcactgagggagaagtatataaactgcaggtacagccatcctattcatcacatggtagagtaacaacagatgctaaagatgacattatgtctccacttaggaattccatggaaaagggaaaaaacggtaagcanataactattacgcanaattgtatttaatactaacgatctcttgaagagttcagatgagaggctaaactagctgtgtaatctaagctaaatcttgagagatgactgagattttcatgtttcaaaaaaggggacagacctgggagcagtaccaacactc

SEQ ID NO: 8967 - DNA, 72 bp, Homo sapiens
gggagtttctcctgatcacctttgtttaatttcagattgaatattttataaacaaactgaaacttatgcctg

SEQ ID NO: 8968 - DNA, 567 bp, Homo sapiens
attgagacagagtcttgctctgtcgcccaggctggactaaagtggcacaagctcagctcactgcaacctctgcttctcaggttcaagtgattctcctgccttagcctccaaagtagctgggattacaggtgcccgccaccacacctggctaatttttatatttttagtagagatggggtttcaccatgttggccaggctggtctcgaactcctgacctcaggtgatccgcctgcctgagccttccaaaatgctgggactacaggcgtgagccgctgagcccagcccaaccctagaatttaatagtgaggggaaactgaggccgcagatatggaagagacaagcttgtcccagaacgtttctcatccttctcatgcagagccttttctcccaggtcatgttctttattgaagcatcacttctacaggctgcaagacacagaagatcagggaccaattgataggagcaggagcaaaggaagtaatattattttgtggcttccaaaaccacaaggaatgagagttgcaaaatgtgttcattcaatccattcaacaattatttattgagta

SEQ ID NO: 8969 - DNA, 647 bp, Homo sapiens
ctgggactacaagcacgtgccaccacacccagctaattttgtttgtatttcttgtaaagatggggtttcactgtgtcgcccaggctggtctcaaactcctgagctcaagtgatctgcccacctcgacctcccaaagtgctgggattacaggcatgagccaccaagcctggcctgctataaataatttaattttcattttaaattaataatttgaataacttaattctaaattaaacttgtccaaaactgactctttctgccaaaaacctgcactctattttgattccctgtccctctgactgaccaccttgtcatggttcaggcctgaaatatgcaaatcagactctattctccttttctgttatcaagaaggagtcattccaagagggagtgacatacattataatagacacattatatttctttaaatttttatggattcaaataaatataaacacttttttcacatggaatgtatccctttttgcctataaacatggtggaggtggcagaagccatgggagtgctaaggggaagcctggtgcatcacctgccactgtcattgccatggattgccctccatttaccaataaagtcctgttgggcctgtgttttacgcaagctggtctctgtcacagagtatggct

SEQ ID NO: 8970 - DNA, 616 bp, Homo sapiens
gcttcatttcatttaaacttccccaaaaccttgtatgagtggagtctggggattcagaagaagacggtggtcatcacagaagttgaaattctctactgtttacttcttcaaaggtcttgttagcggtggccttgaaggtgatgaagaaagacactttcaaggtggacaggtataattattgggtcaccaagaacaaatttgaaaaacaaaatatgccaattgaaattagcatgtagcacctaaatacccagaagcttcttcattgaataatttattcattgaataaattatgtaaactgaattagtaattcctagtgaaatagtggatgaattgagaatagtggtattggtaaaaatggaaaaaaatttttttcttctgagacagaatctcactctgtccctgaggctggagtgcagtggcacgatctgagctcactgcaacctctgcctcccaggttcaagtgagtcttgtgcctcgcttgaggcacaagattagatttagtagagatggggttttgctttgatggccaggctggtctcaaattcctggcctcaagtcatctgcccacctcgacttcccaaagtgctgggattacaggcatgagcgaccgtgcct

SEQ ID NO: 8971 - DNA, 365 bp, Homo sapiens
ggctaattagcaatggggatttatggttatttctagcccactccgaacaatgagttatgtaagcaaagcaacatatataaaaatgtaaataggccggtggctcatgcctgtaatctcagaactttgggaggccgaggcaggtggatcacaaggtcaggagttgagaccagcctggccaacatggtgaaaccccatctctactaaaaatacaaaaaattagctgggcttggtggcaggcgcctgtaatcccagctactcaggaggctgaggcaggagaatcacttgtacccaggaggtggaggttgcggtgaactgagattgtgccactcccctccagcctgggcgacagagtgagacttctttcc

SEQ ID NO: 8972 - DNA, 575 bp, Homo sapiens
aatccagctaatatgtattaaatatgcactatgtgacaggttctgtgagggtgttggggggaagaaagacagggtttctgccgtaacgagccaataatctccttagtaagaaaaaaacttggaatgagaaaccattcattcgtttagccatttactcaactgataatgtatcctgggcctattgtggactgaattgtgtctttccccattccctgcccaaattcatatgttaaagctctaaccccaatgtgactatacttggagatagagccttttgggaggtaattaaggttaaaaaggtcataagagtggggttctttggtaatcccagcactttgggaggccgaggtgggtggatcacgaggtcaggagatcgagaccatcctggctaacacagtgaatccccgtctctactaaaaatacaaaaagttagatgggcgtggtggcgggcacctgtagtcccacctacttgggaggctgaggcaggagaatggtgtgaacctgggagtcggagcttgcagtgagtcgagatcacgccaacgcactccagcctgggcaacagagcgagactccgt

SEQ ID NO: 8973 - DNA, 546 bp, Homo sapiens
aaatacatgtgaaaatcaagatctaaatacacatttgaactttagaagaacttaacttacatattgtaagatgaaaggtttagtttctaattaaagcaaatttggttttgtaagagtagtatgtaaaacactgccctggccctgtgcggtgactcacgcctgtaattgcaacactttaggaggccaaggtgggcagatcccttggggtcaggagttcgagacaagcctggccaacatggtgaaattctttccgtattaaaaatacaggccaggcgcggtggctcacgcctgtaatcccagcactttgggaggccaaggcgggcggatcacctgaggtccagagttcgacaccagcctgaccaacatggagaaacccgtctctactaaaaatacaaaattagccgggcatggtggtgcatgcctgtaatcccagctactccggaggctgaggcaggagaatggcttgaacctgggaggcggaggttgctgtgagccgagatcgcgccattgcactccagtctgggcaacaagagtgaaactccgtct

SEQ ID NO: 8974 - DNA, 276 bp, Homo sapiens
tccctgtctctttttctttttgcttttagttggctgggcacggtggttcatgcctataatcccagcactttgggagggcgaggtgggcggatcacctgaggtaaggagttcgagactagcctgggcggatcacctgaggtaaggagttcgagactagcctggccaacatggtaaaaccccatctctactaaaaatacaaaaactagccaggtgtggtggcaggctcctgtaatcccagctacttgggaggctgaggcaggagaattgcttgaaccc

SEQ ID NO: 8975 - DNA, 437 bp, Homo sapiens
atctcggctcaccgcaatctccacctcccgggttcaagcaattctcctgtcccagcctcctgagtagctgggattacaggcatgcgccaccatgcccagctaattttgtatttttagtagagatggggtttctacatgttggccaggctggtctcgaactcctgaccccaggtgatccgcctggctcggcctcccaaagtgctgggattacaggtgtgagctactgcacccggtctataataacatttttaaaatttataaattattgaaatgttttatatcaatttaaaacattattattcacagtttaccacttcatagtgctgtgttaaagaccatactaccattattttcaaagaataagatctcacatccccaggagtacctgaggagtgctgagacagcatgaaataaacatgggatatttctaaattgct

SEQ ID NO: 8976 - DNA, 578 bp, Homo sapiens
  misc_feature 196, 343: n = A,T,C or G
gacagaagtaaaagtattaataaacttaaattttaacaatgatttgatcaattagttataatatcctacctttccactctctcctttgtaaagtatcggcatgcttatgctattacagtactcatttgctataaattaactttaaattaaatgattttgcattgttacacaattgattgatacttgtatttcaggncttgggaattactgtttgatatttttgtatgcaacatagatataaatcatactacacttagtcaaagtctggactctgaaggaactttaaaaatcttttgattaaatttctctctgttaatggtatgctcctactcatcaaaaattntcataaactccagtcattacagatgtcaacatgtgcaagaaacagtacagtcaaattataacagcaaatttatatcaactcttttgtttgctttttttgagatggcactctgtctctcccaggttggagtgcagtggcatgatcttggctcactgctgcctcccgtattcaagtgattctcctgtctcagcctccccagtagctgggactataggtgtgcaccaccatacccagc

SEQ ID NO: 8977 - DNA, 409 bp, Homo sapiens
gtctctattagcttaacaaattacacacacgcacacacacgcacatgcactcatgcacacacacacacacatgcactcatgcacacacacacacacacacacacacactgctgtataagcaagttcactatgaacccatcagctgggacccaccatttgattctcctgacaacagctgcaaagaagagcaagatatatgaggaacaggacagggcaaaaaacaacatacatcagaaacatactgccatggagcaaatgaaaattgtgaccaaatatttgaccacaacctaagaaattaatgaaataatcacctctttaaaacaagagcacaaagccaaataaaatattcaaggaagacacaacactagaagatgtttcaacataatatgaaaaaacatcaaaacttagg

SEQ ID NO: 8978 - DNA, 341 bp, Homo sapiens
tccaaagaaggaagaacccatcttccacgccatgatgtttgttgtttgcttttaaatataacatacatatagaaaaatgtacaaataaagcatacagcatgatgcccttttgcaagttggatatttttcggaatgagcctctaaaccaggaaacagtcctttagcagcacctgggaggctccctcattctctcttccaggcactaccaccctcaagggtggcctgcttcctgagttttcataccatagaatagctgggcccattttatatacaggtgctccttgactcacaaatggattatgtcccagtaaacccattgcaagttgaaaatatggtaagtc

SEQ ID NO: 8979 - DNA, 510 bp, Homo sapiens
tgaggggacacccacaaacggagtgaccaccagccccacacctcctctccccggggcctggaatctcccaccttgatcctctggggttctaattctggctcaggggcagcggaaagattcctctgcttttcctcctttttaccatctacttatgtctgaatcttacctctgatctttccattgcctctgtgggaaaatggtagaataattcttacatgccaggctcatgtccagtcaggccaatatggacaatgtttagtgtgagtgtgcatgcgcgtatgcagttaagagcaagtgccttggccgggcacagtggctcatgcccgtaatttctgcactttgggagactgaggtgggtggatcacttgacgtcaggagttcgagaccagcctggccaacatggtgaaaccccatctctactaaaaatacaaaaaattagccgggcgtggtggcaggtgcctgtaatcccagctactcaggaggctgaggcaggagaattgcttgaaccca

SEQ ID NO: 8980 - DNA, 439 bp, Homo sapiens
tgcttgaccacactttcactggcaaagatttaaagacaatcagtattacagctatatgattaaaataatttaagcaataaattaaataaaatttggggaattaaaatacaacctaactttttatccagatctagcaagtggtatttttatttttattgcaacctttcagaattcatattaggatattttaaagtctaagtgttgtatgaagagtagtatattaattataatggtgttaacttcatttaaacttacctgtatgttgattattcttcctctgtaaaattaagccacacagataaaacgttctgctatacttaacaagatagatatttgtataaaatgaaagttaagatattatccatagtgtaaatatttatcattcattacaactaaggggagactgtacccagatgatttcttcttggaaacaatattt

SEQ ID NO: 8981 - DNA, 423 bp, Homo sapiens
ctctgggggcagctttcaacttgcaattgaaaaggcatgggggaggaacataggaaattcttaacaaagagaccgtcgccatgggaagcccttactcattcttacatctcagaaagccaggaaagtagaaggctcaacctgttgataggagtgctaatagaagattcaaaatgtgctctcccttctctcctgctcgtatcagtcatcatctcatcccactgcaacttcttgcagagatggcactgttctttaagattggtgcagtgtctctaacacagcagaggcagtgaatttacaaaaccctggtcctactgcctttgagccctccaactggaaattagttaaacaactttagctggccgggcgcggtggctcacgcctgtaatcccagcactttgggaggccaaggcgggcggatcatga

SEQ ID NO: 8982 - DNA, 441 bp, Homo sapiens
gcttacactgggcaccacacatgccgcgctgagcagtgagaatcaaagcacttctagttttagaaagtgtcctggcactagtagtaacccaggtttccaaagggatgcagaataggcatgatagtaggccagaatacacacacagtgccagactcctgcttcctatttctcaaaaactgtgcttccggctgggcatggtagctcacgcctgtaatcctagcactttgggaggccaagacaggcggatcccctgaggtcaggagctcgagaccagcctggccaacatggtgaaaccccatctctactaaaagtacaagaaattagccggggcatggtggcgcatgcctgtaatcccagctacttgggaggctgaggcaagagaattgcttgaacccaggaggcggaggttgcagtgagccaagattgcgccattgcctgggc

SEQ ID NO: 8983 - DNA, 491 bp, Homo sapiens
gagaagtgcaaaggccctgaggtgggtgtgttcttagcacatctgaggaatgtactggagagaaccacttaaagggaacatggtatgcgctcagagggccaggcagaaccagattatgagtggcatcgtagacagtggtcagcaattcaatattatttggacagagatgggaagtcactggagggcttggtgcagaagagtggctcactctgacttaggttgtgaaggtactactccaactgctctgtaaagaatgacctgtatgttggtcaaggacagaagcagggagacccactggaaaactgtgacgatagtccaggtgagaaatgacggtggctcagaccaaggtggagggggaggaggtggcaagcagtcatcagattccaggtatatcctgaaggtagaaccaaaaggatgattcctggattcctggatttctcaccaaatgaaagaatggagttgtcatttatggaggcagtgtaagctgggca

SEQ ID NO: 8984 - DNA, 58 bp, Homo sapiens
gttggggcaaaaaaatataatggggggagacattatatataaaggtgatatttacttc

SEQ ID NO: 8985 - DNA, 95 bp, Homo sapiens
cgcaccaagagttcatggccagaaattcagtttgttgaaagcaagattaacaagaacactaatctaagcagcacagagggcctggggagtgtcac

SEQ ID NO: 8986 - DNA, 64 bp, Homo sapiens
gtatctttccttgaaaatgtacttaaatataccctctgactattaaaaaggtattcaaataatg

SEQ ID NO: 8987 - DNA, 589 bp, Homo sapiens
atcacaggtcaagcaatgcatggcagtgggctagattcagacaggggagcctcaatttaggacccccagatttatcatacaaggtggaggaagggttcagatagggacttggggattgccaactctgaccctctcttcagatgaagagattagccctgtggaggagtccaggatttgtattttagtcttggtactgggtgttctgggttgagttgctagaccattctgggacaagttgctagaccattctgggacttactttcttcctccataaagtcaaagggtaggtagatcacacatttttaaagtgtgctccttgaggtgtgtcaggggttccataagcatttgctttcagttttattaaaagcagcctgtactctcaaatttgagtatatttgaaattgtaatgagagcagttgctcaggatggagtgtggtggctcatgcctgccccacactttggaaacctgaggtggaggaaaccttcaggccaggagtttgagaccagccagggaagtatagggagaccccatttctacaaaaaacaaaaatattagctgggtatagtgggacacatgtgtagtttgaac

SEQ ID NO: 8988 - DNA, 635 bp, Homo sapiens
  misc_feature 530: n = A,T,C or G
gtaacatttattccataggaaaggaaagtcataatttatcatgtaaggagaaataagtttgaggacaaaactatacacacacacaacacagagacacacaaacacacacagagacacacatacataacactcacgagatacattattctgttaagaaatgtacctacacacagcatgagtttcaagtcactcacctataattatgtttctctgaccacattacaataaaatcaaacactgaaaatatttggccctgaatttgattacacagctatcaatattttcataaacaatatgaaacctaagtgcagggcatatggtggtatcaagaaaatattttaaaagctcttcttcaataaagttaaaggtcatgtaaaaactctataaactttttctctataaaattgaattgggttaggatcaagaaaaataaaaggcttcagccacttgaatatttgtactaatgtcactcatttacattccttctcatcagagagcggcctgaagacaacttaatctagatgactcanaatacacaaaactcacttgcttcacttgaatccaaaattagaggttagaagttcaaatgttactacagcattgtgcataatggtaaaatactgaaaatagtctga

SEQ ID NO: 8989 - DNA, 371 bp, Homo sapiens
aagaaaaaagtccatggtacaaggcaagtgcatgttgtgttggccatgtcggtattcagcttgtaaatatctatcattgtcagagcttgcatttaaggaataaattcctagtcacagccatagtcatattttggggatgtcaaaactggcctcagaatacagaataagtaccatttcccattgttgaaagtacactttgcttctttattacatttgtttctttatcttctctatagtctatgttaactgtatttcttcttttcaggctggctaaagttcaagaaaatactattgcttctttaagaaatgctgctagtcatgtaagtaacctttaaacaactttagactgctgaggtagagaaatatggatc

SEQ ID NO: 8990 - DNA, 496 bp, Homo sapiens
ctttttgttttgagaccgagcctggctctgtcgcccaggctggagtgaagtggcaagattacggctcactcagcctcaacctcctgggctcaagtgatccccttgcctcggcttcccaattagctgagaccgcaggcatgcgccaccattccccgctgatctttatttattttgtagagatggtggtctccttatgttagccaggctgctctcaaacacttgggttcgaactcctgggctcaagcgatccttccacctcggcctcccaaggtgctgggattacagacgtgacccaccacacccgtaacaatctttcacctttttgacaaaatcttttttataaaagccgggttttatcaaaaagatgaaagatggtaacaagcgttgacaaggccatggagaacagacagcttttgtacattgttggtgaaaatgtaaagtagtacaaccattatggaaaatagtatatagatatttcaaaaactaaaaataaaat

SEQ ID NO: 8991 - DNA, 260 bp, Homo sapiens
gaaaatctaagacctgagtaactattaaatattacttactcatgcatcaatcctctgaccactgtatgtcccctgacatgagaatggtagaaaagggtgtattagtaaggcagcaataggccgggctcagtggctcatgcctgtgatccaagcactttaggaggctaaggcaggcggatcacaaggtcatgagtttgagatcagcctgatcaacgtggtgaaaccctgtctctactaaaaatacaaaaattaaccgggca

SEQ ID NO: 8992 - DNA, 511 bp, Homo sapiens
gattcacaagcactttatattattgatcatcagtttccacatttattcctttgaaagaaatacatccttggatttttctgtacatattttgacatttgttactgacaaactatttttatcatcattaaaaataataataacaatgatatattttttacctgaaagcctccatttcttttaggtatttttcttcattttggagcttcaggtcgacattttaaatgtgaaatggatttattttttccttcggttcatcctctaattttactcctgcctgtttatgtcttaaaacttgatagagttaggccgggcacagtggctcatgcctgtaatcccagcactttgggaggccgagacgggcagatcacctgaggtcgggagttcaagaccagtctgaccaacatggagaaaccccatccctactaaatatacaaaattagccaggcgtggtggcacatgcctgtaattccagctactcaggagactgaggcaagagaatcacttgaacccg

SEQ ID NO: 8993 - DNA, 318 bp, Homo sapiens
cttccacatgcatggacactgccagggctcccacatgaccttccaatggtggtgcaaagcacccagggtctgcatccagcagcttcagtcaaggcccctgctctattgctctggcgagtctcaatgacttgattcaagaggcagcatgggcccgggcttaaaagagccgggccggttcctcgctgtgtgaccctaagcaaacaatatcacttctctgcttcctcatctttttttaatttaaattttattttcttttaattgagacagagtctcactttgttgtccaggctggagtgcagtagcgtgatctcggctcac

SEQ ID NO: 8994 - DNA, 412 bp, Homo sapiens
agtgaggactataaatatcactgaattactatggaggtgggctgctgctatgggctgtgtggaaatacttttgatgatgtgtttgcatgtatatttcttgggaggaactcctgtttaatatcccatgatgaaatgctgagaatctgccaggcgctgtggctcacacctttaatccctgcactttgagaggccgaggtgggcggatcacctgaggtctggagttcgagatgttagaaacaaatgctcgttcctcagtgcggaaaagaagaactagcactcagacaaagaattttctcagcaaggcaattttactttctgcagaaagggtgcttcttggaagtctgattgccatgagagcaccttgaacaaagaaaagcagaggtttttatccctgctgcattgggtccttact

SEQ ID NO: 8995 - DNA, 297 bp, Homo sapiens
ctcctgtcctcctgtaggatccaggctaagctggagaggcctcactggtgtggagctcgatgacgtcatctaatctattagtttgtttggggcccatgagggcataatccactgatggcctcatcgccatgccgtgggtccacactaccctcaagctgaggctatgcttcctatagcaggaataccaaggctctttcccaggagtcctgatgagaactttgtctcaaggactcctcattggcctggccggaactttcttagtgctgcctttagtctaagactttttctgtcccacct

SEQ ID NO: 8996 - DNA, 444 bp, Homo sapiens
agcgcaaatcaccacctggagtacaggtgtgcccctcgacctcctgcggtttgttggcatgaagtctgtagaggtgccaagagagctgcagatgcacagtcacctgctgaagacacatgttcaggtgggcagcctccaaatggctggttattgcttctgcttcctgctcagcaaaggagctgacgttggtctggtgttttcagttgtctgattcatttgacaaatatttattgtgtgtcgttaggttctagaaactgatcctagtgttgttttggtactgatagtcagttacctcagattttcccttcttttctttttcctccatgtatttatttatttatgcatgttcatacattacatgtacctggaatacatgcacactataaaaaatacagagatacaagaatgtctgtttttatttttccaaccagtgagtagaaaaca

SEQ ID NO: 8997 - DNA, 522 bp, Homo sapiens
gttaaagtgttaagtgaaataagaccttgaatggtgaggaatggtcaaacaactgctgtaagaattacgagggatagaataccaagccaagagtcatgcaaatcagggatactaaagaatgaggaagcagagttggttttatgtaagcaaaagcaaatagcaggaagtgtagcctttttaaagaaatctcagtaccacagcctgttgggagagattatttgtgattgggagaaatgggagccatcagcaagcggaggggcttggaagtgatggatttttttcatggtttttttcttctgactccgttcgagattataggtccctagaaggtaaaaatctggtctttcattccacaaagtgttttttgttttgtttttttgagacggagtctcgctcttctcccaggttggactgcagtggcgcgatctcggctcactgcaagctccgcctcccgggttcacgccattgtcctgcctcagcctcccgagtagctgggactgcaggcgcccgccaccacgcccg

SEQ ID NO: 8998 - DNA, 404 bp, Homo sapiens
ttcaccccacccaaaacacagggaataagcatagcaaaaacatctaggggcagctaggagcagggacaagaggagaggcttagtggcagctggcacacaaatctcaacaagctgcagatcctactggctgggttgaagactctgcctggatctccaaacgcgagtctcatggggtgtctcaactgtgaacatccaacaagctgacatatatcctcagcactctgcatgcaccacttgatgtggctggcatcctgagcacaccatagacatcaacatgtatgtgctccctccatggagagcacacatgaaccaccacagattgcatgtgagctttcacacataggacacataaattagcagacagctctgatggatcaggagaaagtgcacagccaagaaccttc

SEQ ID NO: 8999 - DNA, 395 bp, Homo sapiens
gctgtcggaagtaccgtgagtctgatggaacctcatctgtttgaattactagcccagagggtcatcactctttacctgcaaacagtaccttctctgatgtctgggagaggtggtttatttcccatatacttgttaagtgtagatcttggggaagaacaactaacaccagaaacatcacatgttggctgttggggaggtgcttgtccattttgtatcccttttattttttcccaatcaacagagatccagttagaaggagcagcaagaccttccaggaggccatgctggaaggacatggggtgaggaggatacctaaccttcccttgcctcagtttctcatctgtaaaaaggagggtgatagtatcatggatctcaccagaatactggagagctga

SEQ ID NO: 9000 - DNA, 503 bp, Homo sapiens
atcacctcaagccagccagttgattagaaatattgacaggtattcagagaataaatttaatttgaattccttacacaagcaagttttcagaaggttcatttgttaatcgatttatctggaaatgagaaagccccttttccatagaagtgtaggtccacacaggctcgtctaatataatctcaaataatagatcattttaatgagaaaggtagtaagcaatgcagtgacatcactagtaatgatgcagttttataatcatacctccgtgaaactcaatataaaacctgtccaaatgtagaatgcaatgaaaagtcaataggcggccaggcacggtggctcacgcctgtaatcccagcactttgggaggccaaggagggcagatcacctgaggtcaggagttcaagaccagcctggccaacatggtgaaaccccgtctctactaaaaatacaaaaattagctgggcatggtggcaggcacctgtaatcccagctactcaggaagc

SEQ ID NO: 9001 - DNA, 349 bp, Homo sapiens
atcgcatacgggtacacgaactatggtgtctgacctagaaaaggcacagatctctctactggaaagaaaacgatgtaaccgattgcacaagggtgcccagggaagacccacgattgcccatcaaaggaacatgggtgaggatgcacgaagatgaaggaatgcacctggcatttctctcactgtgctcttaccgcatcagcaacccccaacttttgggcctactctgccccccatgcgtgaataccctgcttggatgctgtgcttttgcgcgttgtctctaagcccctttctccagggcatgttggtttccctggcctctcagagacctaactggagcctagagtgcctt

SEQ ID NO: 9002 - DNA, 543 bp, Homo sapiens
ggcacgagatgcctagtggtctctgagtgtaggattcttgaacctgctgatttgcatttcacctgtagttctacagtaaaaaatgattttatataacttttggtatataagtctcaaaaagtgtgagtcagaagagatgaaacattatatttaaaatttcatatcaaagcttctaatacaacgttgctagagccatggcttggaaataaatcaggaaaaaaccctcaaatacagaatcagttgtgttaatgcactagaacttgccttctgctttaaagccataattaatcatttaaatgctggataaaaaccatgtgttttgtctttagaaaaggtgttgagtggacttcaaggtttagatctgtgctgtcccatacagcagccactagtcactagcgggcctggctattgagcacgtaatatgtggctattgagatgtgctctaattatcaaatacacaccaggattcaaagacctagtacaaaaaaagaatataaaatatctcacaaatattattgtattgattacattttaaatgataat

SEQ ID NO: 9003 - DNA, 469 bp, Homo sapiens
ggcacgaggtcagctcgggcaagccctccgagaagaacctctacgccgacatcgacgccgcgtggcaggcgctgcgcacccggtatggcgtgagtcccgagaacattatcctctatggtcagagcattgggactgtccccacggtagacttggcctcgaggtatgaatgcgcagcggtaattctccattcccctctgatgtctggtttgcgtgtggcttttccggataccaggaaaacatactgctttgatgctttccccagcattgacaagatatctaaagtcacctctcctgtgttggtcattcatggtacagaggatgaggtcatcgatttctcccatggcctagcgatgtacgagcgctgtccccgagccgtggagcccctttgggttgaaggggctgggcataatgacatagagctttatgcacaatacctagaaagactaaaacagttcatatctcacgaact

SEQ ID NO: 9004 - DNA, 550 bp, Homo sapiens
ggcacgagattcaaagtacatttgacaacccactgcaagttgtggcatacatgggtgccatgaaccatgacaccaactacagctttcaggttcaatgtggcttaattgtggtggcctacaaagatggatcacctgcccacccacatttcatggatgcagagctctgttcccagtactggaccaagtggcttcttcgactagaagaatatacggaaaagaaaaagaaccagaatattcagaaaccagaatattcagaatagggagcaagttgctatttgggaacattcagcaccttctcacagtttgggaacatatattgctgtttactccagtgtaaaaatgaggtgccactggatctgagtgctacacgaacacaagtagaagtattaatttgttgaaatgtgttgttaccaaaaagactgaaaagccccaaagtctagatataaagacctagacttcggcacgcgaaatcccagctatgctacctcttatttacctgaaaggaggacacgcaggatgggcagtcatgctggtgactcttgtactccct

SEQ ID NO: 9005 - DNA, 280 bp, Homo sapiens
  misc_feature 65: n = A,T,C or G
ggcacgagcagagatctgcaaattacagcccacatgccagctgcttgtttttgtaaataatgttntaccggaatccagccactcccacttgtttacatatcatccctggctgcttttatgctacaatgaagtggagggttgagtagttgaaacaaagaccttattgcttgcaaagtctgaaataaacacactcacacacactgatttatgtatagaatatgtatacaaatatatcttttatttatctatttttttgagattgagtctcgcttgttgctct

SEQ ID NO: 9006 - DNA, 510 bp, Homo sapiens
ggcacgagagaagatgaccgagagactcttgtcagccaatgcagggacacactctgtgttaccaagaactggctgtctgcagatactaaagaagagcgggatctctggatgcaaaaactcaatcaagttcttgttgatattcgcctctggcaacctgatgcttgctacaaacctattggaaagccttaaaccgggaaatttccatgctatctagaggtttttgatgtcatcttaagaaacacacttaagagcatcagatttactgattgcattttatgctttaagtacgaaagggtttgtgccaatattcactacgtattatgcagtatttatatcttttgtatgtaaaactttaactgatttctgtcattcatcaatgagtagaagtaaatacattatagttgattttgctaaatcttaatttaaaagcctcattttcctagaaatctaattattcagttattcatgacaatatttttttaaaagtaagaaattctgagttgtcttctt

SEQ ID NO: 9007 - DNA, 236 bp, Homo sapiens
ggcacgagaatcagtcagatatgcctagatgaagaaacaaaatggcaatctgagtagaagaaataaggagaaaggaggagaggtgtgaaaaaaagtcctttttctgagaacaagcattcaaacagataaaacacaggtttcataaagaaaagttaaatgtcccactactatgagtcaaaatggtgcatttgctttttcctgggttttgatttattgccctctgtttgtaccccaca

SEQ ID NO: 9008 - DNA, 577 bp, Homo sapiens
gcccacctcatgttcctgtacctgaactctcaacagacactgttataaatgtgatcactaatatgacaaccaccatccagagtctctttccaaatctccaggttttccctgcgctgggtaatcatgactattggccacaggatcaactgcctgtagtcaccagtaaagtgtacaatgcagtagcaaacctctggaaaccatggctagatgaagaagctattagtactttaaggaaaggtggtttttattcacagaaagttacaactaatccaaaccttaggatcatcagtctaaacacaaacttgtactacggcccaaatataatgacactgaacaagactgacccagccaaccagtttgaatggctagaaagtacattgaacaactctcagcagaataaggagaaggtgtatatcatagcacatgttccagtggggtatctgccatcttcacagaacatcacagcaatgagagaatactataatgagaaattgatagatatttttcaaaaatacagtgatgtcattgcaggacaattttatggacacactcacagagacagcattatggttctttc

SEQ ID NO: 9009 - DNA, 480 bp, Homo sapiens
ttgaggatctcgaccttgtccttccagcaggtgctcccaagccacctctgggcctgagaataggcatcacatgactctgtttaatcctccgacacagcaaggatgccgggaagcagggcaaagtggttcaagttatccggcagcgaaactgggtggtcgtgggagggctgaacacacattaccgctacattggcaagaccatggattaccggggaaccatgatccctagtgaagcccccttgctccaccgccaggtcaaacttgtggatcctatggacaggaaacccactgagatcgagtggagatttactgaagcaggagagcgggtacgagtctccacacgatcagggagaattatccctaaacccgaatttcccagagctgatggcatcgtccctgaaacgtggattgatggccccaaagacacatcagtggaagatgctttagaaagaacctatgtgccctgtctaaagacactgc

SEQ ID NO: 9010 - DNA, 127 bp, Homo sapiens
ctcacctctctccccaagaaaaacatgtgaaatgcgagactgtgcgctcttaatgacatctatattaagggatctgaattctccatcataaatgaacatggtagcttaccaaatatcttctgataat

SEQ ID NO: 9011 - DNA, 550 bp, Homo sapiens
ggcacgagagggggcgggcccgtacgccgattccatatgggcgccggcgcggagcgccgcggggcagcgcggggtcgccatggctgagctgcagcagctccgggtgcaggaggcggtggagtccatggtgaagagtctggaaagagagaacatccggaagatgcagggtctcatgttccggtgcagcgccagctgttgtgaggacagccaggcctccatgaagcaggtgcaccagtgcatcgagcgctgccatgtgcctctggctcaagcccaggctttggtcaccagtgagctggagaagttccaggaccgcctggcccggtgcaccatgcattgcaacgacaaagccaaagattcaatagatgctgggagtaaggagcttcaggtgaagcagcagctggacagttgtgtgaccaagtgtgtggatgaccacatgcacctcatcccaactatgaccaagaagatgaaggaggctctcttatcaattggaaaataaaagtatttgccagtggccatcagggctgagggcaagaatatattttttataagg

SEQ ID NO: 9012 - DNA, 516 bp, Homo sapiens
ggcacgagcccaggctggtcttgaactcctcagcttttactttagcttcccagtgtgttgggattacaggcatgagccacaatacctggccaagtccttttttttaatcaaatgacttattaatacacagtttctttgccagcttttgttttcatttgctatcaaaaatgttgcttagtagtgctttgatctgagttatcaataacaggtaaatgccattatggataataattcaaaaagaagcttattaattattaggcctatctgagagtgaagtaaagttagcattttctttttgtttattctacttattgtttatttgtttagagacagggtctcgctgtgttgcccaagttggagtgcagtggtgctgtcataactcattgcagtctcaggctggagtgatcctcccatctgaccctcctgagtaggtgggattagcatatgccaccatgcctggctaattcttttattttttaatttttttgtggagatggggtcttgccgtgttcaggt

SEQ ID NO: 9013 - DNA, 403 bp, Homo sapiens
ggcacgagactgtggagagatctcagtttttctatctgtaattgctcatattttgaatgctaagttttcatcaaccataatttttacgtgctctaatatgtttcttcacagattcatgccatgttcagtttaaaagagtcctgttcttttaatacattatctttgaaatgcctcttactgaggaatgactaaacttcttctgaaatgtgctctctggattgaagtcaagagtacatgttgcaacaaagataatcatgacttttagtattaagagacaattaccagattgagtgctacttagaaaagtttccctccctgtgcagagattactgtacttatcaaacaacccgccccatgtgggcaatatataattgagataattagtatccaactgatactaaaa

SEQ ID NO: 9014 - DNA, 295 bp, Homo sapiens
  misc_feature 216, 224, 231, 239, 251, 262, 265, 267, 275, 281, 283, 285: n = A,T,C or G
ccagcctggccaacatggcaaaacactgtgtacactacaaatagaaaaattggccgggcatcatggtgtgtgcccgtagtcccacctactcaggaggctgaggcaggagaatcgcttgagcctggagggcggaggttgcagtgagacgataccgtaccactgcactccagcctgggcaacagcaagactccgtctccaaaaaaaaaaatttaaaangatttttnttatggnggtttcanaaatggttgtgnggcaggctggntgnantggcacangcctgnantnccagcacttt

SEQ ID NO: 9015 - DNA, 473 bp, Homo sapiens
ggcacgagcatttcttgtctttattaatttgacttctctagggacctcatttaaatgaaatcatacagaatttgaacttttgtatctggataaaaaatatatacagcattttgctgactgtaaaatgtatttttttgggccgggtacggtggctcatgcctgtaatcccagcactttggtaggctgaggcaggtggatcacctgaggtcgggagtttgagaccagcctgaccaacatggagaaaccccgtctctactaaaaataaaaaattagccaggcgtggtggcacatgcctgtaatcccagatactcaggaggctgaggcaggagaatcgcttgaacctgggaggcggaggttgcggtgagccgagatcgcgccattgcactccaagccttcaattcctatctgtgagtaggtcctcaaggcttcctctgctcccagtcggacaacccatcggctgggacagtactgat

SEQ ID NO: 9016 - DNA, 429 bp, Homo sapiens
  misc_feature 349: n = A,T,C or G
ggcacgagtagggtcttagtactggtttgggcataattatactcagtgtttgggcctctgctaaaattctaagacgataagaatatcagtttaagttctgttacagttgttttcatgaagcttgtaagattgatatttaagtggacaaagtgggaagtagtcagttttcagggctccaggggtcatcactttgtgctcagagtacagctgtcaactagtgatttggtgcatttagacaaggaacaggagcaaagggcctatttcaagagggtcatagacactgccttgtgataagtgaatggctagagggtttcttggtaaactgaagtccttttcacatttttagctntttctgtggcaacctgtcttttacagaagctactcatgaactctggcttttcattttcagggttgggctggacattcttt

SEQ ID NO: 9017 - DNA, 276 bp, Homo sapiens
ggcacgaggcatagagaccatcatggcatgctccccgtgtgaaggcctctacttttttgagtttgtgagctgcagtgcgtttgtggtgactggcgtcttgctgattatgttcagtctcaacctgcacatgaggatcccccagatcaactggaatctgacagatttggtcaacactggactcagcgctttccttttctttattgcttcaatcgtactggctgctttaaaccatagagccggagcagaaattgctgccgtgatatttggcttcttggc

SEQ ID NO: 9018 - DNA, 271 bp, Homo sapiens
ggcacgagcagactcgcattatggacaagtcccttctccccacacaaaggatgacatacaccgcatagtccatttcatttcagctcctgatggcatctgaccgccgtggacacttcccagtggtctggcttttggagggagagtagagcgggggatgatctgtgccagttggtcactccttggatattggagttatctccactggtcttgctgctcctctgtgttgattttcattaactcatttcacctcagtgaattctggagcctggct

SEQ ID NO: 9019 - DNA, 434 bp, Homo sapiens
  misc_feature 422, 426, 427: n = A,T,C or G
cattcggcacgagattgaacaccagtatacaataactttagggtcatatggatcattggtttcacgattacagtaggtctggtgcatggcactcccagatctagtagaggctctgatgtcagtagcaggatggaggagagctgggcttacagcctctcaacttgttggcccttataccatcactgcactcatgtccttgctctgtgcagaagtagaatcagaaaagcatcaggcaccttcatggtataaattgtgtctatgggtgcagtgaataagcaaaaatcagaagcagaccggagggacttataaaaataggtacagggtcacaatgggtgcctatatgtagcctgtgacagataagaagctgacagtgagacaaacaaaaaactgaggctagagcctcattcctctgactcctaatncagnngtctctc

SEQ ID NO: 9020 - DNA, 99 bp, Homo sapiens
taattgtttttcttatttaaaaaaaattttttttcttttttctttattctttcttttttattctaaattctcggatccatgggcaaaatgtgcaggttt

SEQ ID NO: 9021 - DNA, 397 bp, Homo sapiens
ggcacgaggagagagagagagagagagagagagagagagagagagagagagagagagagagagagagagagagagagagagagagagagagagagagagagagagagagagagagagagagagagagagagagagagagagtgcgcgcgcgctctctcactctctcgtgtgcacacactctctctatatatatgtacacacactatttttttttgttctctctctccctctatatgtgtgtttttttatacacacacatatatatccctctgtgttttctctctctctctctcaaagacactctttttttttttttttcgccgcgcgattttttttctctagagagaacacacactctcacgtgtttgtgtagagagtgtctctcttatatacactc

SEQ ID NO: 9022 - DNA, 347 bp, Homo sapiens
ggaggagctcaagcagctcttaccacatgatacaagagccggctggtggaagagtggggaccagaaagagaatttgctgaagaggagaaggaaaaaaaaaaccccaaaaaaaaaaattaaaaaatcccccccccccaaaaaaccttgcccttaagggggaagaaaaaccaggccttttaaaaaaggcaataacaacactttttgttgccagaatccctttgttttggttgaaaggatttttgtggccaatttcttgaattataggggggagttccccccccccaggatccaaggggcaaagcggggcccccgattgtccgtcttgtccgcgtgccgccttcccaagg

SEQ ID NO: 9023 - DNA, 425 bp, Homo sapiens
gtctgttggtcagatacagtattttgatgatttcaatcaataactctgcaagccttggtgttattactggtgtctttttctgtctgctttcccccacccccgtccccacattttatttgctttctcaaaagcatctgcacacagatacacgggtggacatcctcagaggcagggtgactcagccgaacagaaccctgcaacatgcactggcaaaagtgccccacccagcgtcgaacacccgaccttgtcatttacccacgggtgctagcacaatcagtgtgctatgattgaggggcggctcttccccctgccaactaaaccctggggaaaatgaacactcaaactccgttgttggtatacactgccattagccaaaggaacaaatgatcaaatggaaaaaacagacattttgttgtttgacattt

SEQ ID NO: 9024 - DNA, 298 bp, Homo sapiens
ataggtctgagccacagtgcccaggccaaactttatcttataaacatatttgcatgtctgtgaattaatgatgtactgcagcatcactaaattagaaagagacaggaaacaatttaagcattcatcaataaaggactgattaatatatggaggtacatctacacaacgaaatactatgcatctgtaaaatagaaccaggaaacatatttttgtttgcatatggataatctttttctggaaagatatgtaagaaactgggaacaaggggctgggtgcggtggcttacgcctgtaatccc

SEQ ID NO: 9025 - DNA, 397 bp, Homo sapiens
gaattcggcacgaggagagagagagagagagagagagagagagagagagagagagagagagagagagagagagagagagagagagagagagagagagagagagagagagagagagagagagagagagagagagagagagagagagagagagagagagagagagagcgcgtgtctctctctctctctctctctctcacacacacaaaggggggggggagacaccccgatatattttttttctctctctgctcagtgcgcccccccccctctctctctctgtgtatatatatatatctctgttctctctctctctctctcacccctcttttttttgcgcccccctctctctcgagagatctctctctctttttttcacacccccccacgcgctcttttt

SEQ ID NO: 9026 - DNA, 342 bp, Homo sapiens
  misc_feature 323, 342: n = A,T,C or G
gacacaggttggagcagagaaagaggaaacatagaggtgccaaaggaacaaagacataatgatgtcatccaagccaacaagccatgctgaagtaaatgaaaccatacccaacccttacccaccaagcagctttatggctcctggatttcaacagcctctgggttcaatcaacttagaaaaccaagctcagggtgctcagcgtgctcagccctatggcatcacatctccgggaatctttgctagcagtcaaccgggtcaaggaaatatataaatgataaatccaagtgtgggaacagcagtaatgaactttaaagaagaagcanaggcactaggggtgatccn

SEQ ID NO: 9027 - DNA, 308 bp, Homo sapiens
aaacactacatcactgcctactccaagccctagctccagtacgggaagtgaaccatgacaggaaatttaacatctacaggaaaagtagaaacacaattcttctaaaggtttatataactccaactaaggtcatctctttcttgccattaacttcctgaacgcctgtaatccagcactttggaggccgaggcggctgatcacgaggcaggaatcgagacatcccgctaaacgtgaaacctgctctctacaatacaaaactagccggctaagggcggcgctgtagccaactacttgaagctgagcagaga

SEQ ID NO: 9028 - DNA, 341 bp, Homo sapiens
  misc_feature 147, 148, 149, 150, 151, 152, 153, 154, 155, 156, 157, 158,159, 160, 161, 162, 163, 164, 165, 166, 167, 168: n = A,T,C or G
aggcctagcacagtggtgtggagttccagctactcagaaggctgaggtgggaggattgcttgagcccaggagtttgaggctgcagtgagctatgattgtgccactgtactctagcctgggcgacagagtgagactctatcccttttnnnnnnnnnnnnnnnnnnnnnnaaaaagcggccgttttttcctctgggccccgaaggggaaaattctttgggagttttgggacaccccacaattaaaagggggggaaaaagggcttttttttggaaaatttggagactttgttttttttttcccccttttagcgggggaaaaaaaggtaaaaccaaaattttttt

SEQ ID NO: 9029 - DNA, 388 bp, Homo sapiens
  misc_feature 146: n = A,T,C or G
cgggcatggtggcacatgcctgtaatcccagccactcgggaggctgaggcaggagaatggcgtgaacccaggaggtggagcttgcagtgagctgaaatcgcgccactgcactctagcctgggctacagagcgagactccgtctcanaaaaaaaaaaaaaagaaaggaaaaattgggggggcccggcccgggggcctaatcttggaattcaaaccttttggggggcccgggggggggggataaaagggcagggattttgaacccagggggcccggaggggaaaaccttttttttttttaaaaagaggggggggagaaaaaaccccattgggggccccttcccgaaatccggggcggtaaaaaacccttggggggtttggccaaacccaa

SEQ ID NO: 9030 - DNA, 72 bp, Homo sapiens
gatgggaactggagactaaagtttagccacagagacagtatgtgatcaataaaaattctgaacactgggctg

SEQ ID NO: 9031 - DNA, 590 bp, Homo sapiens
cagttactttcaaggctgaggcagaaggatcgcttgagcccaggaggtcaaggctgcagtaaactatgatcacaccactgcactccagtctggggtacagagtgggagcgcatctctaaataataatgacaatactaagaaattcagcaaatggatgtttcatatgtgtgcatttcattgcatgcaaatttataaaatctcaaagataactgcaaacattgaactccagttggtgatatgaatcctgaaatgtttaagggtaaagagtactgatgtctgctttaaaattctttaaccttctttaaaaatacatttttaaaaaatcagatgacttgatagaggaatggactgatagatgtgtaataaagtaaatacagaaaaatgttaacaattgtagaatctagatgatggggccaggtgcggtggctcatgcctgtaatcccagcactttgggaagctgaggcaggtggatcgatcacctgaggtcaggagtttgagaccagcctggccaacatggtgaaacaccatctctaccaaaaatacaaaaattagccaggcgtgacagcgcatgcttgtaatcccagctactc

SEQ ID NO: 9032 - DNA, 352 bp, Homo sapiens
gggctcagaggagagaactcccagagggtctgggccctccccattcagagcattgagccagaccaggcctgtcgtggtcacctgcatggaatcttctccctacttaggcactgccaggcggaccatcttctggatgagaagggcagggcacaatgtctcctccagagagagatggtacagtctctggagcagcaggtaatgccagggcggtggagggtaagggatagggatagtgcgcaaaaccttctgtccaccatgtgccagaaaccaagttcacctgggacgagggctggtataaaggaaagaagaggagcgggcactcccagggaagaccgtagcctgggcaaagatg

SEQ ID NO: 9033 - DNA, 505 bp, Homo sapiens
ctctctatacaaggggggtgggggggaagggtgcgtggaagaaagcctgggtcaagagctctgagaacgctgctgccctggcatcattacagcaatgacaaaggagcagaaccttcataaagcaaattagaaaacttcccatgctaccaggtagttcttttatttgtaaatgaggagtggaataattaaagaaaaatcacaactgcattcttagaatgtgaatttgctgatttaccaatagatacttattgattatgcaatatgtaccaggcattattccaaggacaagttgtaagcaggacagataagctactttctcttatgagtcttgcattccaatatagaaacagagataataaagaaataatgggctgggtgcagtggctcatgcctgtaatcccagcactttgggaggccaaggtgtgtgggtcacctgaggtcaggagtttgagaccagcctgaccaatatgatgaaaccctgtctctactaaaaatacaaaaatca

SEQ ID NO: 9034 - DNA, 323 bp, Homo sapiens
  misc_feature 323: n = A,T,C or G
ctactcaacatcgtgtggttctgccaagtaaaccacaaaatgcaaagaatccatgatgtgagacctgtgtttcccataaataagagataaaaataacatctaggctgggcctggtggctcatgcttataatcccagcactttgggaggcagaggtgggcagattgcttgaggtcgggagtttgagaccagcctggccaacatggtgaaaccccatctctactaaaaatacaaaaattagctaggtgtggtggtgcatgcctataatcccagctacttgggaggctgaggcagaagaatcgcttgagcctggaaggtggaggtn

SEQ ID NO: 9035 - DNA, 279 bp, Homo sapiens
gaaaagaagataatttaacattagatattgctaaaccgaaaagacagctttttgaggcatctcaggctcatctcagcctgttgcctggagctgatattcttactggagccgctgatggcctttctaacactaatcctttaaagtggattaaaaccataggtggatcaacaattgcaaattttattttggtttgtgtctgtttatgctgtttatttttagtctacagatgccgacggcgccttggtagagaagccagacacagcgaacgaaatagcaatg

SEQ ID NO: 9036 - DNA, 117 bp, Homo sapiens
cctggaaggtggaggtttcagtgagccgaaactgtgccactgcacttaagcctgggtgacagagtaagactctgtctcaaacaataaaaaaaaaaataaaataatttaaaaaacttt

SEQ ID NO: 9037 - DNA, 154 bp, Homo sapiens
tattaccctattgacctgccacatggtagagataatgatcagtaaatactgaaggaactcggagactggtggcggcagggggaaggcagggttcctccgtatgctgagcgccagtcccctgggcccacttttcttttttttttttttaattttt

SEQ ID NO: 9038 - DNA, 256 bp, Homo sapiens
cgaaaattcaccacttccacttaagatctgttgacattattttatgtatgtattcttccgtgaatttatttatttatttatttttttgagacagggtcttgctctgccgcccaggctggagtgcagtggcacgatctcggctcatggcaacctctgcctcccgggttgaagagattctcctgcctcagttttccgaaaaactgggactgcaggcatgtgccaccatgcccagctaaatgttttacgtttttagtag

SEQ ID NO: 9039 - DNA, 340 bp, Homo sapiens
agggcttgcacgataccctcagatgtttctgttctaacctacctgggctttaggctgagtacataagcaagtgagggttttctaacgatagaagaatgtctctgccacttggaagtcccaggcttagtgagaagcatctaccatagaggacaggaggaacacatttcccactgtgccccgggaggaagtgtcgcctcagcagcacacagtggctacagagctgcacacctggataaacccaggataagacaacgtttgccagacaaattctgtcgctggctctcccaccccgtctaagaatgtgtcctgttacattacgaaaagcaacacatcagaactg

SEQ ID NO: 9040 - DNA, 105 bp, Homo sapiens
tcgatgaggtgctggtgtgtggatggatgaggtgctggtgtgtgggtggatgatgtgctggtgtgcggatggatgatgtgctggtgtgtggatggatgacatgct

SEQ ID NO: 9041 - DNA, 205 bp, Homo sapiens
cacggtgctcagaaaacggtaagaataaaataggtatttactactcaggacatagtacagagttattgtatatttattgaactgaattgagctgtctagtttgccctttaaaaccaggtgttttagtatttggaaatatggacaatgatacctttggtgttccttaaattcaccagattcgtgatcatattctccaactaaattc

SEQ ID NO: 9042 - DNA, 511 bp, Homo sapiens
catatgttcctccaagtctaggaaccattgccataaatatcaaccgcctcttcctcgtgagaccacagtaactatgggatgatacaataagggcaagatgaaagatcaaagctttggtgaaggaaagataatggaataaaagacacggctgtgtatcctgtaattaccactatacaaacaggcatcagctttatagtaataatcgtagagcatttattctgcacttcctatatgccaggctttttactcttttatgaacaacatctcacttgtcacagcttgaggctgtaagttgaattatgtgttgcttactaaagatactggaaattatacatcaaaattcattttggctatgtttagatagtatcaaaatggggtattttccaaaattagcaaatatagttttattattggtaataatatcattaataaaaacgataaacagaactgacaaaagtacattcaagaaatatcaggccgggtgcggtggctcacacctgtaatcccagca

SEQ ID NO: 9043 - DNA, 126 bp, Homo sapiens
ccgcttgggcgggcggccagtggcgactacagcagggactggctgccaacccctccggctacgggccccttaccgagctcccagactggtcatatgcggatggccgccctgctcccccaatgaaag

SEQ ID NO: 9044 - DNA, 591 bp, Homo sapiens
ctctcctttgtccttgggcctcttcgatcacttattgtaatcgtcatttattgcaattgactacttgcgcctgtagtcccagctactcaggaggctgaggcaggaggatcgtttaagcccaggagtttgaggctgcagtgagtcataatcgtgccactgcaccccagcctgggcaacagagcaagaccttgtgtctaaaatttaatataaaaattattttttatattaaatcatggaatatttcaaacatacagaaaaccttgtctcctgtatgtctcctatcatgccccttgatgacagggacacagattcattacttcttctgtgccccaatcctcagcctagagcccagcccagattaagtgttcagtagaaaaacaaaacaaggccagatggggtggctcacgcctgtaatcccagcactttgggaggccaaggtgggcagatcacaaggtcaggagttcaagaccagcctgtttaacattgtgaaaccccgtctctactaaagacacaaaaaattagctgggcgtggtggcatgcccctgtaatcccagctacacaggaggctgagggaggagaatcgcttgaacc

SEQ ID NO: 9045 - DNA, 535 bp, Homo sapiens
tgcaataaatacgttgcatgctgcggaggcagggaaggcattcttctgcatgttgtgtcctgcagtggagggaaaggcattcttctgcaggatgcatgctgcagagaaggagggaaggtgttcttctgcatgttgcatactgcaggggggaaggcactcttctgcatgttgtgtcctgcagtggaggaaaaggcattcttctgtaggttgcatgctgcagagggagagaaggcatttttctgcatgttgcatgctgcagaggaggagggaaggcattcttctgcatgatgcatgctaatccatggacatggaggccatgaaagaggaaggaagaggcagtaacaatgggtactccaatcgcacagcttttcaagcaagtgttgtttgctttattcttttcctttcaaaggagagagaaaacccaaaaccacctccaattacaatatgtggaagatgaaataaaagaaagtcaagttaatttgtggccttttaaaaaaacaagaggttgagcatggtgtctcacacatgtaatccc

SEQ ID NO: 9046 - DNA, 542 bp, Homo sapiens
gtaaataaatacttcaattctgccaggggaggtggctcacgcctgtaatcccagcactttggaggccgaggtgggcagatcatgtggtcaggagtttgaaaccagcctggccaacattgtgaaaccctgtctctactaaaaatatgtgttttagctgggcatggtggcacatgcctgtaatcccagctactcaggaggctgaggcaggagaattgcttgaacctgggaggtggaggttgcagtgagccgagactgtgccactgcactccagcctgggtgacagagcaagactccatctcggaaaaaaaaaatcaattataattttgtttacatgtattattacacaaaatggtccattattcagaagcctcccatttgaggtaatgattggtattattaggatcttttgatgaaatcttggttgaattgatgataatatgtttttaaaatatatagatgtttttatttcccaaataaaagaaataaagactctttacaatttaaggagaatattagagaatttttaaaataggtcaggcacg

SEQ ID NO: 9047 - DNA, 525 bp, Homo sapiens
ggactccaccagtctgaccttagagccccacttttaaccctgtttacccagggcccccaggtacttcaaatctatattttgggccctgagctgttgcccacatttcactcagaatgtaatactcagaagcctgactgctttgtctctaccttgtcttcctggcttctgtaatcatttttcccctttttaaaccttttactttgaataattcaaatttatagaaaagttgcaataactggccaggtacagtggctcatgcttgtaatcccagcactttgggaggccaaggcgggtgtatcacctgaggtcaggagttccagaccagcctggctaacatatagtgaaaccccatctctactaaaaaaatacaaaaattagctgggcatggtggtgagcgcctgtaatcccagctactcaggaggctgaggtaggagaattgctcgaacccagaaggtggaggttgcagtgagctgagatcgcgccactgcactccagcctgggcgacagagcgagactccgtctctc

SEQ ID NO: 9048 - DNA, 463 bp, Homo sapiens
atcttggggaagtttaaagacacctggagaatgaaatcttggattttactttcctgaaaggctgaggctaggcataattctctgcctttgttcccctcctttgtcttggttaaatgttcctggccatactgtacctgtggttttattgtcgtcctttttgggaacaagcaggatataaatcagtcagtgaaattttagaatgtagctctttggtctagcatctaagtagataaagaagaaatgggcacttaataagtgcctctggaggcttgtgatttgcatggggctcccaatgaaaggtaaagtctttgcttagaggttacacacaccgaatgcagggtggtcctcaggcctctggtcacagcatgcacagtgctggtgcctcgatctgcaaacctggtgcgcgcagccgctggggaccatctgccccaaggccaccccaggacttatcagaaaggagaag

SEQ ID NO: 9049 - DNA, 129 bp, Homo sapiens
cactttgggaggccgaggcgggcggatcacgaggtcaggagatcgagacgatcctggccaacacggtgaaacccccgtctccactaaaaatacaaaaaaaaaaaaaaaattcacccggggggggggggg

SEQ ID NO: 9050 - DNA, 600 bp, Homo sapiens
cattatcttagactatctagactaaaatgccactcaaaaaaaatcaaaaaataaaaaagtgaaaatactgtccttttcatttaattacttatacctacactattattaagacacaacaaattttgttttccaaataactagctgtgggaaataagagaggagaatattacagattatcagaaagaaacaaagcaaacaagaatgattaaatattagtacacaatttgacacattttctgtattaaaattttatgtctaatatctggatttaaaaatttatctcaacaaaatattctttcataaagagttttagatggctgggcatggtagctcacgcctgggatcccagcactttgggaggccgaggcgggtggatcacttgaggtcaggagtttaagaccagcctggccaacatggtgaaaccccatctctactaaaaatacaaaattaggtgggtggtggtggcgcatgcctataatctcagctactggggggctgaggtacgagaatcacttgaacctgggaggcagaaggcggaggttgcagtgagccaagatcgtgccgctgcactctagcctgggcaagagtaaaactccgtct

SEQ ID NO: 9051 - DNA, 340 bp, Homo sapiens
atcattagattggagagccgccaaacacctaaactatatgaagctaaagtctgtttaagaaagagcccatccaggctgggtgtggtggctcatgcctgtgatcccaaaactttggggggccaaggtgggtggatcatgaggtcaggaaatcgaaaccatcctggctagcatggtgaagccccgtctctactaaaaatacgaaaaaataattggccgggcgtggtggcgggttcctgtggtcccagctactcaggaggctgaggcaggaaaatggcatgaacccaggaggtggagcttgcagtgagccgcgattgcgccactgcactccagcctgggcgac

SEQ ID NO: 9052 - DNA, 602 bp, Homo sapiens
aactaaattactgtattcttcaactaatgggacacaatattcttttttttcttttttgagacagagtctcactctgtcgcccaggctggagtgcagtggcatgatctcagctcactgcaacctccacttccagggttcaagctattctcctgcctcagcctccaaagtagctgggattacaggcacgtgccaacacgcctggctaatttttgtattttcagtggagacggggtttcactgtgttagccaggatggtctcgatctcccgacctcatgatccacctgcctcggcctcccaaagtgctgggattacaggcatgagccaccgcgcctggccgtaatatcctttttttaatcccacttggaaatcacaaaggaagcattactaaattatgatttaattctgcatagttaatggaaaaatattttgccatgttttcaccttattacattttctcaatatcagacaaagacctgtttttttcccattaccaaagttgtggatcatttcacgtattttaaatggatttaatcctcattaactgagaaatacagttacctagatcctctatgctatctaaaatattgaccaaaaaaaaaaa

SEQ ID NO: 9053 - DNA, 492 bp, Homo sapiens
ggcacgagggaggctacagatgcccctgagcaagtcgaggagattctggatcacagtgagcagcaggcacgccctgctcgtgtaaatggaggcaccgatgaggagaatggtgaggagctgcagcaggttaataatgagcttcaactggtcctagacaaggaaagaaagtctcaaggagctggcagtggacaagatgaggctgatgtagaccctcaaagaccaccaaggccagaagtaaaaattaccagtccagaagaaaatgaaaacaaccaacaaaacaaggactatgctgccgtggcttagaacatttttaaaaagagagtatatggatcgcaagaaaaatgaagggttatcatacttgaaagataagcacatagttattgctgaatataatgtgacactatggtcgaatactacctacgaattataacattagaagcctagtggaaagaccagataactttaaatggctactaaaggataattacttac

SEQ ID NO: 9054 - DNA, 524 bp, Homo sapiens
tcgaattcggcacgagggcagatgttcttggagttctaccagaagaagaagtctcgctggccattctcagacgagtgcatcccatgggaagtgtggacggtcaaggtgcatgtggtagccctggccacggagcaggagcggcagatctgccgggagaaggtgggtgagaaactctgcgagaagatcatcaacatcgtggaggtgatgaatcggcatgagtacttgcccaagatgcccacacagtcggaggtggataacgcgtttgacacaggcttgcgggacgtgcagccctacctgtacaagatctccttccagatcactgatgccctgagcacctcagtcaccaccaccatgcgcaggctcatcaaagacacccttgccctctgagcgtcgctggatctctgggagctccttgatggctcccagaccttggcttttgggaattgcacttttgggcctttgggctctggaacctgctctgggtcattggtgagacttggaaggggcagcccccgctggcttct

SEQ ID NO: 9055 - DNA, 183 bp, Homo sapiens
ggcacgagacaaaatgaagctttaaaacagaaaaaagaaatctacaattccccatttaagtaggctgttaaatccaacatttaaaataaaaattaagctatttcttttgggtttcccacaccacttttacctgtactgattttttttcttcttttttttttttaaaaaaacagggttttgttt

SEQ ID NO: 9056 - DNA, 413 bp, Homo sapiens
ggcacgaggaaaagtccaagctcgtggtgggtggaaaagtgttcgccgaggtgtgcatggtttcccagccacgtccctgttttcaaagatagtttcactttggtctctgaattgaaatgctgtctactgaaagggtttcaggatcgtttatgtaaggggctgtgatgaaattgcattccccatagataaaagaaaaatcatttctatccagatatctgagcacaaggattggcttgttagtttaacacatccgtatttttggacattcagtgttacttgctgagtctgacagcctctgggcccggccaggggccctgttaacaaactgctttcacatcccaacagggtctgcttggccactcattgcatctgcgattaaccctaaaggctttaaggaacgggccacctgtgac

SEQ ID NO: 9057 - DNA, 431 bp, Homo sapiens
  misc_feature 313: n = A,T,C or G
ggcacgagacaggttctaaagaagtacccacgcctctggtgcatgaccaagccccctagccggcggccgaagctttacatcgtgaacctgcagtggaccccgaaggatgactgggctgccctgaagctacatgggaagtgtgatgacgtcatgcggctcctcatggccgagctgggcttggagatccccgcctatagcaggtggcaggatcccattttctcactggcgactcccctgcgtgctggtgaagaaggcagccacagtcggaagtcgctgtgcagaagcaaagaggaggccccgcctggggaccggngtgcaccgcttagctcggcccccattctaaggggctggtttggcaggggcttgacaaaacgcacaaaaaggaagaaagtgacgtaatcacgtgctcgatgaaaacaagttgcactttt

SEQ ID NO: 9058 - DNA, 300 bp, Homo sapiens
cttcttttcatttttcttaaactaatttctcacaattttcatttttgtcctgagacttgaagggaaagtaagttttaatctagaccatattatttagttacatctaatctctctagacaaaagacagtctggagagtactctttagttctatttattaattttgtctctagattgagccagatttccccatgcatagctggcattttattggcctctgcagaattgctttttctggattggactttggtaatccatatgaaaatctctatgaaatttaattgctcgccaggtgtggtggc

SEQ ID NO: 9059 - DNA, 499 bp, Homo sapiens
ggcacgagcttcctccaggcattataatattaggttaatttagaggagcatatttatatgtggagttacattgtgttggccattcaggagactgactgtgaaagaatccaaactttatatttctgccttgccagtttttttttccttttcttcactccatttgagacactcttgacctaatccagtaaactctaattaatagtcttggtaaattctgtttcaagccatcctgagtagcgtcactgacacccgatctgtttcagtaaggtcaaattagcatcctttactatttttctggcatttaaatgaatgactttgctatggtttttcaagtgtttatagtaaatatgtccatttgatggaaatataaatatgcattaagtgtaagtggctaggcacaccctgctgtcactttttatggtaatcagtgtctttcactttctgttgtttttaatagggaccagctgacaacgccacattaaaaccacagggactcaaa

SEQ ID NO: 9060 - DNA, 436 bp, Homo sapiens
agatccatttgttcaggagtttcaatttaaagttcgggatgaaatggctcatgtaactggacgcgtacttccagcacctatgctccagtatggaggacggaatcggacagtagcaacaccgagccatggagtatgggacatgcgagggaaacaattccacacaggagttgaaatcaaaatgtgggctatcgcttgttttgccacacagaggcagtgcagagaagaaatattgaagggtttcacagaccagctgcgtaagatttctaaggatgcagggatgcccatccagggccagccatgcttctgcaaatatgcacagggggcagacagcgtagagcccatgttccggcatctcaagaacacatattctggcctacagcttattatcgtcatcctgccggggaagacaccagtgtatgcggaagtgaaacgtgta

SEQ ID NO: 9061 - DNA, 431 bp, Homo sapiens
ggcacgaggcgggcgcgaccggaggcagtttccgttactatggcaatgacggcagggactacaacaacctttcctatgagcaaccatacccgggaaagagtgactgtagccaagctcacattggagaatttttatagcaacctaattttacagcatgaagagagagaaaccaggcagaagaaattagaagtggccatggaagaagaaggattagcagatgaagagaaaaagttacgtcgatcacaacacgctcgcaaagaaacagagttcttacggctcaaaaggaccagacttggcttggatgactttgagtctctgaaagttataggaagaggagcttttggagaggtgcggttggtccagaagaaagatacaggccatatctatgcaatgaagatattgagaaagtctgatatgcttgaaaaagagca

SEQ ID NO: 9062 - DNA, 405 bp, Homo sapiens
cgttgctgtcggaacatttatattgttattctttgtggctattggtgtgtctcacaggcaaaagttgatttggctaaaataggctcagatgtatttgcgtgcccgcgtgtgtgtgtgtgtgtgtgtgtgtgtgtgtgtgtatgaaagagagagagactttgacgggtgtagatattttttgcgctttgcctactatatgagtgataatcatgtgtttactaacaagtcgatgacctggctgtattcataataccatttaatattggcgtgagtgttctcgcttgacaaaaagaggcctcccctgcttctttcaacaactgtcacagagtgggtgggctgaaagctctgcccacggccctgctattggcgagagaggtcttttgtgggagcggtgtctcgtgcgtc

SEQ ID NO: 9063 - DNA, 93 bp, Homo sapiens
ggcggacccgatgaaatggaggtttgaccatttttcacaagaatggctgtttcccatgcccaagttagagtaagtgctaatgcatgttggaat

SEQ ID NO: 9064 - DNA, 371 bp, Homo sapiens
atggtgaaaccctgtctctactaaaagtacaaaaattagccaggcgtggtgacacacaccagtaatcccagctactcaggaggctgaggcaggagaatcacttcaacccaggaggcgggggttacagtgagccaagatcatcccattgcactccagcctgggtgacagaatgagactccgtctcaaaaaaaataataataaaataaaatgaaatcgagagatctacatgtacatggtcacctgacttattataatagtgtcactgcaaacaagtcagggtagaatggtcttttgaataaatggtagtaggtcaattacatacccacatagggaaacatgaatcgtgacccgaccacaccattaatgaacat

SEQ ID NO: 9065 - DNA, 489 bp, Homo sapiens
gtgagtgcctgtaatcccagctactcgggaggctgaggcaggaaaattgcttgaacccaggaggcggaagtgagctgagatcatgccattgcactccatcctcggcgacacggtgacactccttttcaaagaaaacaaaaaacaacaaaaaacaaaaaaaattctacattcataaccctctagagtcatatactttaaaacaaaacaggctgggcgcagtggatcaagcctgtaatcccagcaccttgggaggctgaggcgggtggatcacgagttcaggagatggagaccatcctggctaacatggtgaaaccccgtctctactaaaaatacaaaaaaattaggtgggcgtggtggtgggcgcctgtagtcccagctacttgggaggctgaggcgggagaatggcgtgaacccgggaggcggagcttgcagtgagcagagatcacgccactgcactccagcctgggcgacagagcaagactctgcctc

SEQ ID NO: 9066 - DNA, 164 bp, Homo sapiens
ggaattgtagaaagatccagaaatgcagcccactcccagagattcctaaattggtctcagatggagtctgacccatctctttttatacgttcccccaaatgattctaaattgtggctagaaaagagaaccactggccgggcgcggtggcttacgctcgtaatcc

SEQ ID NO: 9067 - DNA, 308 bp, Homo sapiens
ggaccattatttagctaccattggttgcctaatctagtttggaatcgggaggaagggaatgtcagagacaccttcctgaaggagttgatggctgaacccagaagtgaaggtggctgggatttaccctggcagaaaactggggatgaacatcctaagtgggaaacatttggggtggacagagtgacggtagacgaatcacagaaactcagacctgctaaggcggtaggatattgttaacgtgcaacttctcatgttgttttcgcagacatagctgacatagcatccaattattattctttaatttcctc

SEQ ID NO: 9068 - DNA, 290 bp, Homo sapiens
tacggctgcgagaagacgacagaagggaagataaaatttgaaatctggttaggctggtgttagggttctttgtttttggggtttggcagagatgtgtttaagtgctgtggccagaagcggggggaggggggggggtttggtgaaaattttttgttatgatgtctgtgtggaaagcggctgtgcagacattcaattgttattattatgtaaaaaaaaaaaaaaaaaaaaaaaaaaaaaaaaagggggggcctttttttcggtaaccccaacctgaaaaaaacctttggggg

SEQ ID NO: 9069 - DNA, 368 bp, Homo sapiens
gaaggggagccatggaatttttccggtagtccccaactttacccccactgcttctatctttgtggctttgccctcttttatcgcctaataaggctggatagcactttgattcctcaccgtctaacacacggcactttaattttgaggatagagaatggctaacataaagtattcctataatttattaggcttactgtattgtatgctgtggtcacttaaaaagaggactacaatactatatataacacattcagaaatgttgtataaagaccctttttgaattcataaatcttttcttatacagccagattatcataaaatgtatgtgtgggtcgagcgcagtggctcacgcctgtaatcccagcact

SEQ ID NO: 9070 - DNA, 593 bp, Homo sapiens
ttgtccagttcctttgctgggaagagacctactccaaaaactccaagtacagattgcttttgggccacaaggaagtatgactttgagcctaactgagctgaaggccatgatgttaacccttactgtcccacagactgaggactggagactatatgcaaaaaagactccagaaccaggagtaaatgaaatgtatcggttacttactaaaattcctggagtataggctgaagataactcaccagggctggctgtaaatcaggcactggtagtagtagggtcagaaccaggaggcccccttcattgctgtggagatatagtagataaggtgttctcaagccagagagattttacagaccaacccctcagggccccagatgttgaatactttacagatagaagcagttttgtactggaagggatctgacaagccgggtatgcagtagtaacattaaactcagcagcagaggtacagtctctgcccaccggaacatcagcccaaaaggcagaactaatagccctgacaagagcccttttgctagcaaaagacaaaaaaagtcaatgtctggccagtcacggtggctcacgcctgtaat

SEQ ID NO: 9071 - DNA, 426 bp, Homo sapiens
ttatacaaatcaataagaaaactgcaaatgagaaaattatatcaagcagcaacgctctaatgaagaaataaaagtagccaacaaaaagttagaaaatggccaggcacggtagctcaagcctgtaatcctagcactatgggaggctgaggcaggaggatctcttgaggtcaggagttcaagaccagcctggccaacgtggtgaaaccccacgaggtgaaaactgtctctacaaaaaaatacaaaaattagtcagacgtggtggcatacgactgtaatcccagctacttgggagtctgaggcaggataatcacttgaaccaaggaggcggaagctgcagcaagccgagatcacgccactgccctccagcctggtgacagagtgagactctgtctgaaagagacagagagagagagagagagaagaaag

SEQ ID NO: 9072 - DNA, 545 bp, Homo sapiens
tcaggttcacagaactgcagcatttcctctgaggttctgttgtttttatcaataaaaagctaagggcattacactgcattaaaatgtcaaatagcaaggatatttcctcaggttttcacggacaaacatattctataaagttagtttgatgtcttaactgttgcacctatctgaaaggatacttgagacaaaacaaaaatttttttttttgcctgtcacatctgatgttatagacaactttgaatgcaatcttagtgtatgggatgacaatatttaatattgctcgtttgatttaaatgatttgcgagtaaaattcttcaaaattaagagaaaaaaatcagccaacaccaacattttggtgctttgtctttgtcaatattctcatcaaattctttaacttcactgtattattctcttgagaagaatctatggtcagactagttttcaaatatggttctacttctcatttttgaacttgggactttagctaccacctctgacactcagtgttcttacacattaaatgagatttatactagtaagac

SEQ ID NO: 9073 - DNA, 355 bp, Homo sapiens
  misc_feature 27, 28, 29: n = A,T,C or G
gaaaataatatgtatatgctgtaatgnnnccattacccttcatgtgaacttataattgacatttgtctctaaaagcagtcaagcattcatctgtcatttcagttacactaggtaagtatatgtaaataggtgcaaagaaaagtttgatgagtcatatttatagaatatgttctgagcaaatggcagcaactaattacatccaacttatcgttggtgttcaattttgtctttcaacagcaatcaaatctcaaaagtctatatatacaactaagtctgccacaaggctttgccatagctgatacatttatcttttaaaatagtaattgggcctggcacagtggctcacacctgtaat

SEQ ID NO: 9074 - DNA, 615 bp, Homo sapiens
agagggcttcttggaggccaggcatgaactgagcttttaaagataaatgggagttgcccaggtatggtagactgtcacatcaatggcctccagtgagtcatgcccccccccgcccggtgtccatgcttttgtgtaatcccttccgtgctgattctgggcttggccacgtgccttgctttggccaatgggccatcagcaaatgtgatgaaagcagaagcttgtgaaatgtttgtacgttggagcttgcttttttggagttcagttgccacttgagggagtctgaactatctcagtttacatcaatcaccatttgggatctgccagcccccagttgacctaccatgggaccacacaggcctgtgacctgccatgggaccacacaggcatgtgacctgtcatgggaccacaaaagcatgtgtaattccaagtgatgccatacagaagagaaatgagccacccagataaggctaccgtggtgattctaaaatgtggacacaaattctttgacattccttcatcaagaggtgacatctaggccgggcgcggtggctcatgcctgtaatctgagtactttaggaggctgaggtgggcggatcatgaggtcaggagatcgag

SEQ ID NO: 9075 - DNA, 436 bp, Homo sapiens
aaagatgtagatgcagacatgaaaatgcatgcaaatacatacacatgtagataaatatagataaagctatcaaaggcatcttcctttcaatcttcttttgagtataattcggaatttatcctgagaaatactgataaaatatagggctaggcaaatataatttgggatgctgtagagtgttattagtagaaacgacttctcttttctgagccttgtgaaatagctttcaaggggcagctggtagtgatttaagggcagtcacagagacagccaattagagttaatcagtcattatatttacagcatcagactatcatgcaatacaaaacggatgccgacttgaccttttcatcccctatatttccttccccatctcaaacagcagccaatcttatgcaattggcttcattatgaataatgggaagcatcttacatt

SEQ ID NO: 9076 - DNA, 570 bp, Homo sapiens
gatttcatgtttttgaaagatgaaggcaagatttcaatttctatcatggctcattctgctttctagggacatccatcttttaagccatcagatcatgctgtttctgtttgaagtccatctcaggtactgcttgacatgtacagatgctgaagcactgcccctttctaagggagggggaaagttcttatcaggtactctgccttagcagctccccttgccttcccaacctggaccatccttgccttattctcatcttcatgcttgtctcctggctaatctcaattccattttgtgttcatgttcgactggtgttatgatcctgatatttgcaagaaaagaagattaatctacactataaactctatgtgagtaggagcaaggtctgtttgtatttattattgtataccattaccattaccattaccattacctagcagtacctgttacatagttggtaagcaaaaaggtaaaaaaaaccagacaacaatgggccgggcacggtggctcacgcctgtaatcccagcactttgggaggccgaggcgggcggatcatgaggtcaggagatcgag

SEQ ID NO: 9077 - DNA, 553 bp, Homo sapiens
tcctatttattttccataaatgacatgacaaaaattctttattgcattggggtgcgagtggggatgtgaacgggacgagggacgaggtataaaactagttattgcacactccaaaagctctgatttgaaaatatagtttaagccctggtttacagaaacactttaaaactctagtcttaatctagctaaagctccttaccatcttggcaacaaaagcaatttgagcaatttgagcaaaaccataatctaatttaacctaaagcttgtaatatgtatctttgcattaagtaagatgtgtagttttaattactttccttaagttagaaagtagggcccagtgcagtggctcacgcctgtaatcccagcactttgggaggcctaggtgggcagatcacctaaggtcaggagttcgagaccagcctggccaacatagtgaaaccctgtcttcactaaaaatacaaaattagccgggcatggtggtgcctgtagtaccagctactcaggaggctgaggcaggagaattgtttgaacctggggaggtggaggttgtagt

SEQ ID NO: 9078 - DNA, 446 bp, Homo sapiens
aaacattagagacaatcctattaaagttaggaataagataattatgcatgctattaatgttgttatttagcattgaactgaaaagctctagccagtgtaataagacaagaaatattaatattgaggagaaaaaaatatcattatttgcaaaattattgtctacctgaaaataaccctaataaataaaatgtacttacaaatcagtgaagaaatgaatacaccaatagaaaaatgagcaaaagacataattgagcaattcacaaaggaagaaaaacaaatggtcaaacaaaacaaaagtaaatagtccatattgggctgggcacagtggctcacgcctgtaatcccagcactttgggaggctgaggtgggcggatcatgaggtcaggagttcaagactagcctggccaacatggtgaaactctgtctctaataaaaatacaaaaatc

SEQ ID NO: 9079 - DNA, 180 bp, Homo sapiens
acacagtaaaaaacgataaagcaggtatcagcactgaccttatagaaatgcaatcatcagggctgggtgtggtggatcatgcctgtaatctcagcactttgggaggccgaggtgggtggaacatctgaggtcaggagttctagaccagcctggccaacaaagtgaatccccgcctctact

SEQ ID NO: 9080 - DNA, 396 bp, Homo sapiens
ctttagcaactaacacacatagcagctgaggactggcttcaccagcctcctaaagagaatctgagcaagaaaccacagcatccaccaaacaggctgagtgtggaattaaaaggaaagaaatgaagaagaagaaaaagaaaggcatgatgtctaaaaacaaagagctacaaaaaagaaagaaaaacatggaagaaatgtgaggggaaaaaaagaaaatacaaggcagttttttatttccaagggctaacagaagatatccttaaagacaacatgcataatacatttagatgtgaaagaaacaaaatttaaatgaatgagaaaggaatagttaggttaagcttcttggtgaaagggatggtttagtcaccatggtttacaacgaccctgctgggcact

SEQ ID NO: 9081 - DNA, 454 bp, Homo sapiens
gaccctaacctctctttgttctcctagacccagtgggtacaagctgcttcctacacttattacattacctcaggttcctgtgtgctgtcagccctgtgtgtagcacccacactccttctgatcccttcagcatcttgtgcacacaggcttaccgcgtgctttcacagccagcatctgtgctccctcgtatgtgcccagagagtgagaagtgcctgacaattcttgtccgcccgaggcagccatgaataaatgaccatggaagctttaacaatgtagctcccttgcctctgatcaggatgactctgagagatgtgacctacactgtctccagagctcccctgtggggctgtgccagagtcaccgtccatggattcgcttttctgatcctacaacttcactcccctcccagttttccctggagtgtcttcctaataaactactttcacatggattc

SEQ ID NO: 9082 - DNA, 589 bp, Homo sapiens
acttcaacttgggcaaaatgcatgctcacgtttgcaaccacctcccatatgtcattgcactgtacatctgaatcttcaccccagctccctttcagcactgaagtccattttggatgtctgttgattgagggagccacctgcattttcctcaggcttctcagagggagcacagacttcacaaccttcattatccacctcccaaaccagctctttgatctgggctcctgacctgttagtagcacatctaaacgcagtagaacaggcacgtcagtcattcttgctccactgcctttcccctaatttccagttagtcgattcttcatccaaatagctttcaaatttttcccctctctttcatccccacctgtctctttgccttctttcagactttctccagacatccttctagccaaactgctttcagagtgacctgtctgcaaatttgtcaaatcattcctatattaaatcttttaaatgacttgccattgctcaagttgtacatagagagcttattttaaaagcccaggctgtgcgcagtggctcacacctgtaatcccagcactttgggagtctaagcaggcttgatcac

SEQ ID NO: 9083 - DNA, 416 bp, Homo sapiens
agatccaaccttgctctaatatgacttataaaaggcttacgggaaatatggctggtttcactgttaatgattcccctctcctttcttccctctcttcatagcaggctttattgcaagaaaacttacaggaggcaaagtgttcaagtgtaaagaacgatacactgactatccagatatgagaataatttactctgtttccttgaagagattacaccacaaaatagataagttagtaggtaaagaactgctttcttccaaccaaaaaaaaggagaaaggtggtttttagtagttttagttttgccaaaactaccgaagttgaagacttcccaaaactactaaaggaagactgaagtggaaggactgcttgaggctaggggtttgagacccggctgagcaacatagcagggcagggagt

SEQ ID NO: 9084 - DNA, 594 bp, Homo sapiens
ttacaacagctctcatttattcagaccttattctgtcccaggggccgggccaagtactttatgtgcattgtatataaattaatcttcctagcaacctcatgagacagatactattaccaccttcattttatggataatggattaaaagtcaaagtggttaagtgacttcctctttgtcagtggagaaccatccagggttttacaactgcagagcccattaaaccattgtcgtatactgttgatccttgttctcacagatttcaacatgttgggaggatgacatagaaacctgaaactaagcatacagggaagtgggctctagcctatttgaaaaggctctggagggctgggcgtggtgactcacatctgtaatcccagcactttgggaagccaaggtgggaggattgcttgagcccaggagtttgagaccagcctgggcaacatggtgaggtcctgtctctattaaaaattaaaaaattagcccagcatgatagtgcatgcctgtgatcccagctactaggtaggctgaggcgagaggatcacttgagtctggaaggtccagtctgcagtgagccttgatcacaccactgtact

SEQ ID NO: 9085 - DNA, 574 bp, Homo sapiens
taccattagcttttttattgggtactatcctttgactaaatgcccatgtctatcaaagtgatgacactcaacaagcacaagcacttctctatttattcattcttaccatgtactcattagaattagattaactttaaaaaaaatgtaattgatcctatcataacaacatatacaataggtgagcatatgtactgtttaagcaatatagctaataatcattagaactctatttgtaagccccacaattatagtatctcagtaacatttacatttaccattattttccattagactttcccttattctagcaataaatttcatccatagacacaaaaattgaaatttaaaaattttaaagtctcagtaagtcattcaattccaataccattatacattttatgcttaataattatcaaactctttatagactttgttgtttcaatcgttttaatagtaattacaataatcctttctacacatttttaacacttagagctttatgagcaaagatactaaaatataaaaaatgctaagtgctggccgggcgtggtggctcacacctataatcccagca

SEQ ID NO: 9086 - DNA, 580 bp, Homo sapiens
gaaaccccgtctttactaaaaacacaaaaattagctgggtgtggtggtgcacacctgtaatcccagctactcaggaggctgaggcaggagaatcgcttgaacccaggaggcggaggttgcactccagcctgggcaacaagagcaaacctccatctcaaaaagacaagacaagacattacctaataatgtcttatctagtggtaattattaggtaatgtcttatccagcgagtcctttctctggcactgattagttaaaaccctcagaggatcactcagttttcaaaggtctcacctcttcctatattaaatcattattaatccttgcattggtcaagaaaagtttttaattaaacaaaaggcagaaaattataataaatgattgtgaattgtccatttgttactcactgagcttaacagatccttccattcccaaaagtacattgtcacttttgatgtctctgtggatcacttgattagcatgtaaaaactccaatgcctgtaaacactgaacagaagaaaaacacctattaatgaaatagtccctgaaaagacacagggaggcacatgcagtagctatg

SEQ ID NO: 9087 - DNA, 437 bp, Homo sapiens
tgtgtagacaattgtagaatttcgagctaggagtagaagagaactaatgctgagattcctttctgttaattttttttcatgattctgataaaactcaggattctctcctcagaaacatgtacacgtaaaattttgcatataaattttggggcttggccaggagcagtggctcatgcctgtaatcccggcacttggggaggcctaggtgggtgaatcacctgaggtcaggagttcgagaccagtctggccaaccttggtaaacctcatctctactaaaattacaaaagttagccaggtgtggtagcaggcacctgtaatcccagctacttgggaggctgcggcaggagaatcgcttgaacccgggaggtagagattgcagtgagctgagactgcgccattgcattccagcctgggcgacaagagtgaaactccatctc

SEQ ID NO: 9088 - DNA, 559 bp, Homo sapiens
aacttttcttcctctcctcacagaactttcactttaattggtaagtgttaaatatctttggatctccctttcaccatctgtaaaatagctacttttcaaggttgctagtgagatttataaataataatgtagggggtatatctcttatttttaaactagctttctttataaacataaaatatttataaaactaaaggttggaaaacacttgtatagtacttaagaggacaaaatgatattcatgtttctgtgttgaaacaggttacttttatgttaggttaagacaatcccagttgggttatgtttccaagcaatttcacccctaaaatgtataaacaaagtgtttcacttttcacctgaaatgtcacttctaccattaaatgccccttcctttcaaaagaactttcatgatgtagttgaaagtgatgggtcgggtgtggtggctcacgcctataatcccagcactttgggaggccgaggcaggcgtatcacctgaggtcaggagttcgagatcaccctggctaacacggcgaaacccgctctctactaaaaacacaaa

SEQ ID NO: 9089 - DNA, 476 bp, Homo sapiens
  misc_feature 408: n = A,T,C or G
atgtaatgaaaagtacaaaattgtaataaaatggagaattgtaaatgtaattttcattcatttataattaattcctttaaaaggttacaaaaattgttaagaaattgacatctatataaatgtaaaattaagtaaatatttgtacattttcttttagtttgttttagccagttttaattacttgagattatactgggcgtgcatgtgtgtgtgtgtatgtacatactcataaaatatacatctatacacatacatattcttccactatcactatgttgtgatcattttcccatgtcatggaactgattcaaaatatgatttttaattactgtatcttattgcctcttatagaagtaccattacttacttagcctttcttcagtaggttgtttccaacatttctcttanaaaaaatgcacctcatctgtaacgagaccaagaaaaaacattaatttgttcattttaaaagcttattt

SEQ ID NO: 9090 - DNA, 458 bp, Homo sapiens
tttgataacaattaagagtgggtttccaggttccttgggactctattttagtgttcgtttccactccagattagacctttccaaatactctcagaaactttagatgtcctccaatcaaactctgctctcttgaaaagactgccagcagtcttttatacctctctatattgccattccagaaatactggtatttggggtcatgtttctaactagggaattgagagttacagatagcataaggagtagtataaggatattgcaacaaggattttgtaaaggatccctgagtaagggatctcaagccttagatggaagaaatatatcatgtttgcatgtgtgttagtgtgttagtgtgtgtgtgtgtgtgtgtgtgtgtgtctcatccagcttgtggccctatgagccctgtacagaaaatggtagaggctgagaacatagacattcccacatttaataat

SEQ ID NO: 9091 - DNA, 70 bp, Homo sapiens
gtctcctgtcttccttctgtttctcccctcttccttcttttccttctcccccacatgaatctaaatgtgt

SEQ ID NO: 9092 - DNA, 137 bp, Homo sapiens
agttttcctggtttggatgcagcaaccaagaactgggtttaacagtactgaggtcaagagattatttcacggtttaacaatgttcaatattagaatgctatccccacagcaaatctaaaatatagtcctgacctggg

SEQ ID NO: 9093 - DNA, 436 bp, Homo sapiens
tagtactttcttggatggctttggtcatcttttcactcaataaatacatagagactatgggatccatgccagccagtgggaatcctgatctcatggggttcatgttctagcgagagagacacacacttactaaataaataataaaaagaattacagatggtgacaaaatctctgaagcaataagcaggatgcaggcagtggggaatgggagatatttgaggagggatttcactttaaatggaacagctagggagggcctctctgatgtagtacattttcttctgagaatgtgaaggatgagaagcagccagccatcaagtactaatagctaacatcattatttaaaattgttattaaaacataattaatggccaggtgcggtggctcacacctgtaatcccagcactttgggagtccgaggcgggcagatgacctg

SEQ ID NO: 9094 - DNA, 509 bp, Homo sapiens
taaatatttgcttaaatgactttttctcttctaattgctgatcacaatggatctcaaacttttaaaaagtatagcacacttttcgtcagtaaataaataatgaaattaaaattttagcaaagcagagatgctattctggtcgaaggggtttgtgagtacagcctggatctccaacctccatgacctccaggaacattctcacaggtcctgagagattttgggatattctgtggatcagaaaaacaattagtagcagccacctctaccaagggaattctctgcataacagaatgttgttaagttttcatatgcatcatcattttgacactcatattattataagatttattattgttattattagtttcagtattagtatcagcattatcatcccccttctgcagaagagtacacaaaggctgaaaaggtttaaatatcttccttaggtggtagagcctgaatttaactctaattagtttgactctgaagccatcattcttaaccatcat

SEQ ID NO: 9095 - DNA, 545 bp, Homo sapiens
tggtcttttggtttttgttgtgttcatttcacagcagatcagtgagcgtgtccttactgcctggccccagttcaagtcctggtgttagtgcttcggctttgaagtcagatgacctggggtcaagcctgtgccttgccactgggtggctgtgtggccttgggcaagctatttgctaaactttctgtttctgcatctatacaaagtgaataagactgaaaccttcccttcgtaaggctgttgaaggccaggcgtggtcactcacgcctataatcccagcactttaggggaccgaggtgggaggatcgcttgaggccaggagtttgaattcagcctggcaaacatagcaagaccccatttctacaaagaaattaaaaattagctgagtgtggtggcatgtgcctgtagtcccagctactcgggaggctgaagtgggaggatctcttatgcccagtagtttggggcaatagtgaaccatgatccactgcactccagcctgcatgacacagtgagatcctgtctccaaagcaaggaaaaaaggctcttct

SEQ ID NO: 9096 - DNA, 626 bp, Homo sapiens
gtatccgtatgatccatatgaaaaacaaaagtaaatcttgaccccttcttcacagcgtaaacaaaaatcaattccagatggactgcaatctgatatgaaagactgttacaatagacttttagaaagaaacactgaacactgtcttcacagggagtgtctggaaaggagctgagggtactttcaaggagctgctgatattcctgattttgatcttactaaacaaattataaaatgatttcaatatatgtacccacgtaagcataaattggtactttaagacataatactgaaaaccttttacaaaaagttttgcagaaagaaagggtcctaatagcaaaggaagttcaggccgggagcagtggctcaagcctgtaatcccagcactttgggaggccaaggcgggtggatcatgaggtcaggagatcaagaccatcctggccaacatggtgaaaccctgtctctactaaaatacaaaaaattagccaggcgtggtagtgggcgcctgtaatcccagctacttgggaggctgaggcaagggaatcgcttgaacctgggaggctgaggttgcagtgagctgagatcgcgccattgcactccagcctggctacagagcaagactccgtctc

SEQ ID NO: 9097 - DNA, 344 bp, Homo sapiens
tatcctcttttatacttcattgagaccaccagtaactgatgtagccacataaggagacataggttataaactagttatcttttaaaaggctcagcaacacaactcttgaaatgcttatcaggataatggtagctatagctgtccatttagaggaattctaggacagtgggagctgtgctactagcactatataattgcggtcagtgctgacaaataacatttaacaagtattgcagtaatcatcacttacaggtaccatttatttcaaaacaactttttttgtctgctccaaagttaaaataattaactagctaagcattattattcgactggtctaaaaacta

SEQ ID NO: 9098 - DNA, 578 bp, Homo sapiens
ggggataccccgaatttaaataaaatcgagttgtattacagttagggatctctcagttcccctccttccctgttggagcattcacttctctgagtgccgtttttttccaagtgtcaagtggcagtaatcatttctcctcctaaggacagtgtggaggctaaaaacaagttatgtgaaggtttcagctcaggctctcagtcctaaaaaataagacttattatgagagggtatagacgaggtggtctagaacacaggttttgaggtaagagttgggttaaaatcctggctctgctgtccaccagctctgccacctagggcacgttatttagcctctctgagcctacctcatggggtttgtaaagattaagcagtgggccaggcacggtggctcatgcctgtaatcccagcactttgggaggccaaggcgggtggatcacgaggtcaggagttcgcaattagcctgaccaacatggtgaaaccccatctctactaaaaatacaaaaattagccaggcatggtggtacacgcctgaagtcccagctactcaggaggctgaggcaggagaattgcttgaaccc

SEQ ID NO: 9099 - DNA, 429 bp, Homo sapiens
gactcacagggggatctgttgcaagctgaagtttgagaccaggatgctagaccctgaactacttgaggacagaaatcctacttctccctcacctgagtacctagcccagtacctggtcttcaggagatatcaaaagctatttgttgggcggatggtgggtaaatgaatgagtgggtgagaggccattcatctctgtacagctctgttgaatgtatcctcttttgtcttgcacaccattcctgcttccgctgggatgtgcgtgcttcccaggccagtgccaggagctacagtcatgccaggtggcagcagatgagacctactttggaaacctgtgtccgactcagggcagttacctgtgggtgcagtaccagtgccgggaaggtgagtccccaacttgcttgagcatagaaatgtccctctgattttatg

SEQ ID NO: 9100 - DNA, 615 bp, Homo sapiens
ttcatttgcatttccctgatgattagtgatgctgaggttttttttcatagacctgttggccatgcatactttaattcttataaatgaaaaccacatatacaatgtaacccagtgagttaggcagggatatgataaccatgagatcaactaaccctgggaagtggcaggacccgacctatgcaaatgccatgtcttcctgaaaccctgttccagaattgctttcatgtgactctctttctactctttcacactatctctttgtttacatacttcccccaacttacatattcccaaccacaccattttaatctcagtgcatgactgatttacagctttgccactctatgtgagcactgaccccaaaagggacttccaatctgtttagttactagattataatacagaagagaaaaataaacgtaacattgaattcctatacccatattagctttttacaaatcagatcaaccatggcagtgaagactcaccattcatcttttcgttcattaatattataaggaaatctattcctgtgggcagacattaaacatgagagaaattaacacagttgcactaatgcaaacacaatgtcaataatttataatctgggaaaag

SEQ ID NO: 9101 - DNA, 379 bp, Homo sapiens
gtgtccccaccagactgaaacactgtacccagaacgagaaaaagctcatattttctttaacaattagcaattctgcaaataaaggggtaggaaacttaaggggagatgtagtctgaggatacagaaagccaacaagcaaaaatttcttctagttaactctgaaagctgcccaaaatggcataggttaaagtggaaggtagtgggctccctgtcatggggatatattcaagtaggggttggacagccacctcaaagggctgcttttaaaagaagagctggttagtcaaaagttccttcaggctggtcgcggtggctcacacctgtaatcccagcactttgggaggccaaggcgagtggatcacctgaagtcacgagtttg

SEQ ID NO: 9102 - DNA, 561 bp, Homo sapiens
gaggttctgataataggtactaaaaataaatctgggctttattaattgaaacctttgtaccccctcccatcttcatttcccttcccttcgccatggctgacaggcataactttccattctttctgaatgcttatcccaaagtagccatgagtgactttcctgatactgcttcgggggtgggataagttcagaagaactaagaagataaacaacaaacaaagcaaaacattacaaaataagcaaagaaacagtacaacccaccaaaaattgtatcaaagtctagattattaagacattgtacttgctgttttgaaaatactcttctgaactttgagtacagttcaaagtcaatgacattattttaaaatcttctatgtgagagctgctacaagaacaattgtatagtgattaaaattaaaaaaaaatttttagttgggtgtggtggcacacacctgtagtcccagttactggggaggctgaagtaggagggtcaactgagcccgggaggtcaaggctacagtgagccgtgattgcgccactgcactccagcctgggtggcag

SEQ ID NO: 9103 - DNA, 361 bp, Homo sapiens
ggtggagattgcagtgagccgagattgtgccacttcactccagcctaggtgacacagcaagactccatctcaaaaaaaaaaaaaaaaatttttggtttttttttacccccttacccccccccaaaataaaaggccttttaaaccccggtaaaccggctttttacctttaaaaagaattttgaaaaaaaggttttttttttccccccaaacgggattttgtaaaaccaaaatttttgttcattgaaccctaaaactcgggggttaaagaaaccttcttgcttaaccctccaaataaaaaagggccccccccaacccggggaatttttgttttattcccaaaaaaaaggggggttttgttttt

SEQ ID NO: 9104 - DNA, 94 bp, Homo sapiens
atgtcaatgtgtctgttgtcatggcggaggtggacggcacctgctactgagccgcccgcctgtccccacccctgaataaactccatgctcccac

SEQ ID NO: 9105 - DNA, 488 bp, Homo sapiens
gaatattaattgtcagaaaacaaaaatgaaatacagaaatagcttgattatttacagcttggctcagcatttgccacatttgcacatggtctgaccagttaacagactatgattggcttaagcttagctactatgattggctaagactaagccacaagttacaaaatatactcttaatttagattgcagtctgtttacacactatgttaggttaaggatgtaagtacagaggcagctttaacaatctaatttaacaatattatctaatttaacaatattatccagtggcatagaaagaataatgtgactttaggtttttactaaataaataaatgtagaaatatcctaatagaggacacagtggccaaagtatactccaaaaacatacaagtcataataagatttaagtgagattttaatgacaggtttttaaaaaattgtcttaagaataaatcattcaaaccatggtaaaatagttgacaatcggg

SEQ ID NO: 9106 - DNA, 310 bp, Homo sapiens
acatctggaagaaataaatttcctaggatcaaagggctccgtgtgcagcccagagggtcctcagggtgctcctcagagcaaacaaacagttttcttgatgagtcactgcaattttttttttttttgccaaaagcccacatgtattgcaagatctcaaggaaaagaggtggagtaaggagaaagaaaaaaaaatttaattagggcaccagaagtcatttttaaaaattttacccccaaaaaaaaaaaaaaaaaaaaaaaaaaaggggggccctttttttccgaaaccccaaccggaaaaaaacccttgggg

SEQ ID NO: 9107 - DNA, 578 bp, Homo sapiens
ttgatttcaaaattccaaatatttttgaggacccaccgtaagtctttttcatgggtttttataggaagtacatgtccctggtttaaagatactctggtgaggttctcttgccctgaggaggggctctaagaatgaggcccttgcataggcagtctgggagaagggcaaaagcagaagggattctgtgagtctggaaagttcctcagcaccttcttaactctgagcgtaagtgctagggtgtactggggcatgcctgagctgccagaaggaatatagacacatctacagtcttaattttgacaaacaaaactggtcagtgaactggaagagttaagtattagttaaggggaatctgaaacttccttcccaggtcaaaaatatcttcaccacccaccatatcttttatgcaacacatatgtcctgagtaggcactctgggccaggagggatttctacagtgtactagacacaggcattactttcaatgaccctggtgatcctcagggcaaagaaaactataattaccagaaaggttaatatgttgaactttatatattggaaaaatatggcaccaaatct

SEQ ID NO: 9108 - DNA, 617 bp, Homo sapiens
aattcggcacgaggtggcccaaggggcccacaataaataacacagtcactcctattggtacagcaatgccaagatttagaagttatttcataggagctgggacaaaggtcaaacctctctttgggcaagaccgtattctttattgcatagctttgaaaagagattttgtattacccaaacatttattttaaaaaggcacccccatatatccatcactcgaactgtacatttctaaatgtacattgacctttggtatattagtctagcaatccagattttgcctcttgttaagcgtatcagggtcctggcaggaagtagacgacacactgaaggataactgtcaaaagtttaatgaagagactatttacaaaggtgtgggcaaagttaaggggaacaacaagtaagagatggtgtagcatcttagacctagcaacagcagaaaataattgccactcctaactctgaagagataaggagagggaatacttagcagaacacagcaagattgattagtaaagcacagagctcctgacgaggagatgtgaccttcaggagaggaatactacccccaagctatggcccagcagggaaagagcataggtaatacattctctgac

SEQ ID NO: 9109 - DNA, 406 bp, Homo sapiens
ggcacgaggcaacgaaataattttaaagtggatctgggttggtagtgcttatgggagttaggcaaggaaaaatgcagattctctttagaatatcttcacctaggtcccaaaggattctcatagatagatttccaacaaatatgaggttataataaaaaatacaaatcacatatagaagtatggcaccatgaatgagaaaggaaaaaactgtcagaacaagaccctcaagactttactggaattaacaagcaatatgtaaagtaaatagaaataagctattcataataagaataatgtataagagactactaaaaataactgggcagatttgaaaataatctaagttctgggaatgaaaataataactgaaaaacagctgaaagagagaattaatgaactaaaagaa

SEQ ID NO: 9110 - DNA, 479 bp, Homo sapiens
tcattgtgtaataaaatggcagtttccaaagatggatgtctttagtttttaaatgacatgttgatttttttcatgatatctgcaaatatttttgtcttttttgacctcagaacaaatgtaaagcattgattggagcacacacaaaagttaggaaatatgctgcttggcaactgagtaaaagtaaatatatagtctcttaaacttccaaaaaagtatacaatagtacaggatgggttctattcacaagctttctgtctgtaacgtaaaagatatcactatctaaaaataaaatcagaatgatgaatttcagtgacaacaataaaagttttgggaccgtgagagttgttcatctaattgagggcactgccttttcttgtcctcaggtataggatattgctccattttaagccattgagggagaagggctttgtatttaaattgcaagctaataaatagtctttttctcattaacacacatg

SEQ ID NO: 9111 - DNA, 224 bp, Homo sapiens
ggccagtgtgggacagggttgtgtaggtgtgcatttcaaacacatttattattcagaagtggtgcagataacgcttagattacaccgaagaatttagggagggtgggggatgaaggtctgttagtaaccagaaacacattagttgggcatcagtaaggggcaacataaaggaatggttcccctcaaaaacgaacaaaccaaattttatacaaaaaaatgaaatg

SEQ ID NO: 9112 - DNA, 493 bp, Homo sapiens
ggcacgagggggaaaataacccagttttgatcttttttagtctgggtgcttactggatgtcaaggtagaaagtgtccaacaaggtgctttaactataggttgagttctcaaaaaggttaagagggtagagttatagtgacatcttcagcatatatagtagttgaggccagtggaaaatttcccattgagagctctgagaggaaagtattttagaagccaagggaaaaaggagtattgagaaagcgttagatatcacagaaaaattagattggtgatttctaagacaaggatataaccgttaggatgtcattgacctttgtgggagtaataatggggacagaagtcaggttttgctataagttgagggtgtccaatcttttggcttccctggtctactttggaagaattgtcttgggccacctataaaatacactaacactaaaggtagcggatgcgctaaaaaaaacgaatcacaaaaaaaatctcataatgt

SEQ ID NO: 9113 - DNA, 140 bp, Homo sapiens
aggtattgtgttatagcagcataaatggactaagacaatgccaaaggtggcacttgccatagatctgctgtgatgatatcaactctttgctttccaggagttaaagctttggattctgatgggttgattttcttttgtgt

SEQ ID NO: 9114 - DNA, 300 bp, Homo sapiens
cctagttaaatcacaacaagttagtaatccataaatgatgtgtcctgtttctctttagtagaaattatatttttggctaccagttaagaaacttgtactcctttgtcccttatgttactataaactcaagatgatgagttttgtggtatttgacttcataggcaaaatcaaaatttttactttgttgctattctgttttatgaaataaacttctgtctatgcatttgaactaagtttcagcaaattcaatctaaattgaataattccagctcccagttttatcctatgttgctcataaaa

SEQ ID NO: 9115 - DNA, 306 bp, Homo sapiens
gtttgaaaagttggcggaggactgtaagcggagcatggacattctgaagcaagccttcgtccggggtctccccacgcccaccgcccgctttgagcaaaggaccttcagcgtcatcaagatcttccctgacctcagcagcaacgacatgctcctcttcatcgtgaagggcatcaacttgcccacacccccaggactgtcccctggcgatctggatgtctttgttcggtttgacttcccctatcccaacgtggaagaagctcagaaagacaagaccagtgtgatcaagaacacagactcccctgagtt

SEQ ID NO: 9116 - DNA, 96 bp, Homo sapiens
ctcctcttgtcattcctaggacatagacggttagggaaactctcatctttccttcaccacctcatgagtctaaaaacaatgataaacccagggaag

SEQ ID NO: 9117 - DNA, 491 bp, Homo sapiens
  misc_feature 271: n = A,T,C or G
gaattcggcacgaggttctcaggccttccaggtagtccccttcctggacttaagagtgcaaactcttctctgtggttctagccttgggcagaattatatcccagagaccacagagcaactgtcaagctgcttaccccctcacccagggctacagcctgtgcccagccctctaatttgtgcctctcttgtgttgggggtggtgggggttattcctttccctttcctgctctggcctccttgaaagttcagagtacccagtacaagtcagctntaaagtacagcttttagtgtttcctgggttgtttctctggggctttagtgagggacctttgccctctggtttttcttgcctcctggtttagggagcatctcacacttgttagtatctggttgttgggccagccgtgcctcctctagatctggagccaggccaggcaggggccacgtgtgggccagtcagccactacaagatttttgctaagctttgggct

SEQ ID NO: 9118 - DNA, 553 bp, Homo sapiens
ggcacgagcttgaagtagaattttttttcattccttacacttctcagtgagtggtaactgtagtttttgctatcatttttcattttcgtttttgcagttgaacatacttttttcactcagagagttggagggacttgcccaagactgcccaatggcaatgagatttcaacctcaaatcaatgttctttttaatgcaagatgataaagagtgggatttatcctaatttaggatagaataaagccaaatactttaggataggttctttggtgtccatgggtgcaatctaatgcccatgatgcaagtggcagagtagagaattagtgcacagcaataattaaagtgacatattgccaaaggaagcggttatagcccattatataataccttttaaaggacagacgcatactcaggtttattttacctgctgagcttctgccttagaagttttcagaattgtgattacattgaataggaaaaaagtctgaactatcagaagcagtgccgcaactttgacaaacaactgattatataataatctgcctctagcatgag

SEQ ID NO: 9119 - DNA, 395 bp, Homo sapiens
gaattcggcacgaggcttgatcgtctgggcctgtgtttcaactgggataggattctcaatccttcttgttcaaactctgaagtccagaaagctctgaaaactgaaagtttttccataatttatttcactgtaaaacctgaattgaactgatatttatctcactaaaaatgagtattcatatattgtactgtaagaatcgtaaaattaccaagtaatatcccagacctagttagataaatgcactattggcttttaattccaaaaaaatcttaattctgaggcacatttggctgacagcatttcagatcagggattttgaacctctaattcaatgatgtagataaatatcaccacttctactaccattgtctattactgaacacttaccatgggcc

SEQ ID NO: 9120 - DNA, 449 bp, Homo sapiens
ggcacgagggcagagaatcccttgtagaaaggtgggggagaatcataggatattataactgtaaggaacatgcaagattttccagattatacccttgatagaatagataagttccttaaggctcagatcttgcttaaagtcgtccagcctgttagagacaagtagaacacgaagctggcctctggagtctttattgagtactttgtacaattggtgtagactgggagagccctcctcacttcccctttcttgtgctgtaatttcctgtggggcagaacacctcagaggtttctgtgcatcaaaataagatgcagcaaagacatggaaaaaggataacgagacagattcccagcagtaagtagatgaggttgtgttttttataaaagataacgaggcattccttccagaaatgtggagcctttgtagatttcagtgcataaaaccaagcc

SEQ ID NO: 9121 - DNA, 480 bp, Homo sapiens
atgctgcacaagaacaaaatataaatctgtatggcaccaaaaatcaaagtgaaaaccaaaccaaaaacccaaacaccctatgtaactatcggaggcatatacgtggtataaatgactgtagctgtgatacacacatggctacttgtcacatcactttccataattatttactgcaaaatgattgacaggcttttggtgcaggcaaccgttaacctcctgcttcctttgttacctctggattactttgcagtaaattgcaggtcttttaagagatttaagcttcagttttctcaaaacaaaacaattatcctgtcttatctgaagatgcaaggttgtgggcaaaagacgctggttataataatgccctcatattgagtggtctgtaaacggctgcacacttcaggcactgtagttgctgaaaatgctttgttaaatgtgaccttgactggctttacaggggtgtagaatgtaatctacaca

SEQ ID NO: 9122 - DNA, 466 bp, Homo sapiens
  misc_feature 372: n = A,T,C or G
ggctcgaggagagagagagagagagagagagagagagagagagagagagagagagagagagagagagagagagagagagagagagagagagagagagagagagagagagagagagagagagagagagagagagagagagagagagagagagagagagcgcgcgggcgcctctctctctttttctgtctctctcgcgcgagatatttgtgttctctctctctcaccctcttgtgggcgcgcgcccccccccccctctctctctatttctctctgtgtggcggcacacagagtatacactctctccccatcatccttctctcttacagaggggcttctttttctttactcacactctctcacgggaaatttttnttttttgtttttttgcccccggggctccctatttttatattatacccccccccctcctttgtgttttttttttccccgcccgaaattttttttt

SEQ ID NO: 9123 - DNA, 522 bp, Homo sapiens
tcgtttgtgcctgagcacccacaatttcaggatttaaactgtgtggcacctcagctttcctctggatgtaaccactccttggtgaaaaagggaactcctaaccaatcccatttgacaaaggctaggcaatcttcattctgcttggctttagtcattcttgtcattgggctgcagaagaaaaacaactttgctgggtgatcccactgccttgatttcacctcggagcgaggctgggccatgtccaagtcttatgaggtcaccctgactagaaaaaattgaactcacctacaaatagtctgaaagagtggtgtatatcaaatacgtgggtagtgttgcatttcaaatgaggctcttctggttgaaatgatatatttataaaaccagaatatcaaaaatgggtgatgtataatgtctctttagttttttggtatttggcctcttttaaagcctgtcggatgtatgggagaaaacaatgaacgtgctttgatttcctatcagtcactcttaagaacatacatattg

SEQ ID NO: 9124 - DNA, 300 bp, Homo sapiens
gctggagcacgctggagaggccatccctgccctggcagccgcggctgggggagactcctttgccccattctttgccggtttcctgccattattggtgtgcaagacaaaacagggctgcacagtggcagagaagtcctttgcagtggggaccttggcagagactattcagggcctgggtgctgcctcagcccagtttgtgtctcggctgctccctgtgctgttgagcaccgcccaagaggcagaccccgaggtgcgaagcaatgccatcttcgggatgggcgtgctggcagagcatggggg

SEQ ID NO: 9125 - DNA, 354 bp, Homo sapiens
aatgagaacatgatttttaaaaaaatattcactcattgttttattttggtcaaaatgctacaaatccttagaaaagtaaattctaaagtatagagtttatcttttttaactattaaaacctgatgaatattacaggatatgtcctaaaagtataacattgattaattagccttcagtgtaagcaacaggtcatctccgttccaaataggacctcagtaaacctggatgaactagagaattgaagataaccttaaagctaatgctctttaggctgggcatggtggctcacacctcccaaagtgctgggattacaggcatgaaccaccgtgcccagtctttttttttttttttaaa

SEQ ID NO: 9126 - DNA, 462 bp, Homo sapiens
atagaataaaaatgtaaaaaccaacaaattaatagactgtgtgtaaaagacataagaacattatctagtatgattgtgggcattaaagccaaacacatttcatcggcccagaatggccatttcacctctagcttctgagtaggagagtcgtgaatgctttgtccattgtgcatgtaaacaaaagtcatataatctcacttttaacagggtcagaagaacctatttcttcttaactattacaaatgcattttcctgcatcgattggaaatccaggacatcactaaagatttttccattttggcatgtctttaggaggaagaaatcgtggactggtggagtaaattttatgcttcctcaggggaacatgaaaaatgcggacagtatattcagaaaggctattccaagctcaaggtacctggatctgtgctgctatgggtggagaatcgacatcctttgaaactg

SEQ ID NO: 9127 - DNA, 466 bp, Homo sapiens
taaggataacctttgttaggaaaaacaagacactctctgctgcatttaaatcaagtgcagtgcaacaactcttggaaaaaaactacagaattcactgttcagtccataatattataataccagaagatttcagcatagcagataaaatacagcaaatcctaaccagcacaggttttagtgacaaacgggcccgttccatggacatagatgacttcatcagattgctacatggattcaacgcagaaggtattcatttttcctaggtatttggaaaacagaaattttcaaggtcaagaaaagaaatgaattttgtattttttgtatttgagaagataatgcttttgctttactgagacattatttacttgactatttttggttcaatactactactgttgtcaccatttatgattctgaattttaaagttggaaagttctaagtatcaaagtttttaatatataatgc

SEQ ID NO: 9128 - DNA, 276 bp, Homo sapiens
catgagccacggtgcctggttctcactgcccccgcccccctttttgttaacttcccattgtctgcaagaaaaaataagtttgatcattcagggttcctgatacatctgtctctgcttccctctccagcaaaatctttacttttcaacagaatttctgagttctggctatatgaaactattaaatactctcatattcagtacttttaatttcatatgaaatctgcctgggtttgttctgttggcagactttcagactgtgcatctttttttttttcc

SEQ ID NO: 9129 - DNA, 194 bp, Homo sapiens
ttttcctttggaaattcatactacaccctcgttcccagggaaggaaataaattgatcggtattgcacaagaacgagatctttgattcgtgtcaagattcgtttctaaccaaccagccagagctgaattgtttcgggggggggagcctggcctaacaaacgtatgagaggagaggtttggatttttttttttttg

SEQ ID NO: 9130 - DNA, 593 bp, Homo sapiens
ccaggcatttttctgtatatttatttctaatttctgtttctttcttatgaattgtctggttaagtcctttctcattatctcaaggtgttttagtatgagatttaagaatattagatatataagcccttgagctatcatattagttagaagtagttccccttttttggtcttttcatttttattactatatgtacaaaagtttaacatcctatggagtaccttgttcatggataggaagagtgaatattttaaggacagctctactctccaattggtttatagatgcaatgcaattctaatcaaagtctaaaaaggttctatgtaaaaccttacaggtttactctaaaatttatatggaagaggaaaaggctaaaagcatccaaaatacacttaacgaaaaagagcaaaacagggaggtttgtctcccagaaattaagatttattggaccgggcgcagtggctcagggccgggtgcggtggctcacacctgtaatcccagcactttgggaggccaaggtgggcggatcacctgaggtcaggagctcaagaccagcctgaccaacatggagaaactccatctctactaaaaacac

SEQ ID NO: 9131 - DNA, 656 bp, Homo sapiens
atgtttcattcaatggagtgggggttctgaattttccgtcttctttattcttggctcctgttatgttttgaagaatggtgaagaaaattataaaactaagtgacatgattataacaacacactttccaagctcagtgaagcactcaaagctactcaacaatatttttactgagctcttctcaactctctttctcaattcctatagcagctgttctaaaatgtctaccaattttctcaagatctccaggcactcttctcaatcccatcaattaatgtcctgattgataaaacagaggtctctacattcttcctctctatttccaaacttattaccacctacaccttctctacctgcacctttcttagaacagaaaggcttctccaatttgtaagcttaatgtccccatatcagttattgatttttcccgtatcccacacctcaaccctattctattactgataggtcaccccttcttcttagacagatctttcttccttttcacaaatgcataatgtgatatatgcatttgtgtaagaaactcacattcctcaaggtcctaaaaaacagtaaggtttttggataaataacattagtaagaatcttatgcaattctgtaataatcatgataacaccaccaacaatcacaatagatcat

SEQ ID NO: 9132 - DNA, 189 bp, Homo sapiens
tggcctttcaacagttttcatatttgaagaattagaaatgaagtccgttcaaattctccaaagaacctccagccactggtgggggacattcttaattcacattcctatcagttggtatctcctgtccctgaaaacactgatgaggcttgggaggagaatcccacctttccctgcagggggttaggctgg

SEQ ID NO: 9133 - DNA, 369 bp, Homo sapiens
tgagcaaggatggggctggggcgagagggagaacaggacggagctggcctccagctcctcatggtgcagatctgcgaggcacacatgacccgcagtgtccccaggtgacgcctcattaggaagtgggagatacatacaggttagcaaacctcggcctgcaggtcatgtccttttccgtgtgtcctgtgagtgaagaatggttttacattattttttattttagttttttgagacaaggtctcactccatcgcccaggctggggtgcagtggcatgatctcggctcactagagtctctgcctcctggtcccaagtgatcctcccgccttagcctccctagtagctggcactacaggtgcgtgccaccatg

SEQ ID NO: 9134 - DNA, 242 bp, Homo sapiens
acgacagaagggtacggctgcgagaagacgacagatgggtacggctgcgagaagacgacagaagggggcctacgtgttcttgcggtggcggagcggcggattagccttcgcggggcaaaatggagctcgaggccatgagcagatataccagcccagtgaacccagctgtcttcccccatctgaccgtggtgcttttggccattggcatgttcttcaccgcctgggtcttcgtttacgaggtc

SEQ ID NO: 9135 - DNA, 485 bp, Homo sapiens
tttggttgctgttctttcctagactcttcagaaaaaaatgaattaactagcaatgcttaaagaggtagtaaatacaagccaatccattttcattccagctgcatttcatgcttcagagtaatggctgttagccagaatcacttgtgaagctttatacacatatacattctgtgatcttattccctgtaaacccctattcagtagtcggtctgtgatgaaatcccaggcatcttcattcaggttaaaaaaaatatatatatgtctacatgaaattctggtattccctgttgaaaaccagtcttaagttagaggcattctgcagttgtacggaaagtaagggaaacaaagttaaaatggaaaaaattgaattaagaggcagaagtaatgaatttgatcatttgttcattgccactcattgtagacacttatttttgatctctgtaaacatcagcttatatctcaaagtatgaggtctgaatacttgc

SEQ ID NO: 9136 - DNA, 331 bp, Homo sapiens
ggggcagtatatctttgttaattgcccctcaatctctctcctggaatggcatccttttactttgacctctgctccagaggaagatttcttctccattcatatccgagcagcaggggactggacagaaaatctcataagggctttcgaacaacaatattcaccaattcccaggattgaagtggatggtccctttggcacagccagtgaggatgttttccagtatgaagtggctgtgctggttggagcaggaattggggtcaccccctttgcttctatcttgaaatccatctggtacaaattccagtgtgcagaccacaacctcaaaacaaaa

SEQ ID NO: 9137 - DNA, 182 bp, Homo sapiens
gccctggcatatggaacctacccagtccattgctgcctgctacaagatatgaacagcaatggcacatattgtggttatgagtcactcattggactgcggattgaatgaactgtatccatccccatcatgatgtacagaaccaactctcttcactaatggagtctcactctgttgcccaagct

SEQ ID NO: 9138 - DNA, 344 bp, Homo sapiens
attacagtacagaagaaagtgagtcagtggtgggagagactcacaaagcaggaaaagcgaccactgtttttggctcctgactttgatcgttggctggatgaatctgatgcggaaatggagctcagagctaaggaagaagagcgcctaaataaactccgactggaaagcgaaggctctcctgaaactcttacaaacttaaggaaaggatacctgtttatgtataatcttgtgcaattcttgtgattctcctggatctttgtcaacctgactgtgcgattctgtatcttgggaaaagagtccttttatgacacattccatactgtggctgacatgatgtatttctg

SEQ ID NO: 9139 - DNA, 266 bp, Homo sapiens
cctactaggtcaagtgagtaccaaggacagcgtggcaggtgaccatacagacgcctgaataacaggaggcatgctgcattgaggcctacctttggaaaaagataccacgatgctttaacaaccgtggttaatagtgttcatgcctttgttaattgtactcatgaagtagtaataaaggttaatattctccattggcattatcaaatattaaagtactggccaggcgtggtagctcatgcctgtattgccagcaatttgggaggctg

SEQ ID NO: 9140 - DNA, 300 bp, Homo sapiens
aattccgttgctgtcgggcaggggaggggcttccaggattcacaggggcagatgggagccagcagtgggcagctgggagctgcgactcattcaaagagagggagttagtgcagggtaccgagatcaggaagaggagtggtgcagaggtgggaggtgatgagactcaagactacagagagaagaaagggccggcagcccagatcccagccccacccctcctgccctgcattcaggcagagcacagagggataaagagggaggtgggttgggggacaaggcagagatgcatatacctgggac

SEQ ID NO: 9141 - DNA, 88 bp, Homo sapiens
gcagtggacgtggatttggggatggctataatgggtatggaggaggacctggaggtggcaattttggaggtagccccggttatggagg

SEQ ID NO: 9142 - DNA, 285 bp, Homo sapiens
gcctgctacgcagccttaaaacctgaggctttaagttcctagtattgagaagccccagatttcatacttatttactctgttggtttcactttcctctccattttgtgtctcttgggataggctttgttttattttcaagctcagctatgtatataaaagaatgctgggctgggcgcagtggctcacgcctgtaatcccagcactttgggaggccgagttgggcggatcatgaggtcaggagttcgagactagcctggtcaacatggtgaaaacctgtctctacta

SEQ ID NO: 9143 - DNA, 318 bp, Homo sapiens
gacctggacattgctgtggattttttcagtttcctgagccaatccatccacctactggaggaggatgacagcctgtactgcatctctgcctggaatgaccaggggtatgaacacacggctgaggacccagcactactgtaccgtgtggagaccatgcctgggctgggctgggtgctcaggaagtccttgtacaaggaggagcttgagcccaagtggcctacaccggaaaagctctgggattgggacatgtggatgcggatgcctgaacaacgccggggccgaaagtgcatcatccctgacgtttcccgatcctaccac

SEQ ID NO: 9144 - DNA, 457 bp, Homo sapiens
cccagagcctggggatgccaaacatccagaatgtgatgggacaagatgggggcaggggcctcacctccctgcagaggtccggccaggtctccttgtccctggacaatctcctgagcctctctgcttggtggagcaggcacctgtgtgcagaattcccactgtggccagcacgaggaagtcttttctagtgaaaatgtgtcttgtggtcaggaataattatcctttcccctgtagccaccaaggagggcaaatagagaaaggtaacctaattgaaggattggtcatgtgaaaagggctacatttgggaagctgggaaaggcctccaggcttctaaagcagctagcttgggctggattctcacacccaggctgccccttggattgttctacccaagcttttccctggggtctgggctcactccataaggtaaggtgccttttaccttatggtccttctt

SEQ ID NO: 9145 - DNA, 498 bp, Homo sapiens
gggctggcggtggcgctggctctgagcgtgctgccgggcagccgggcgctgcggccgggcgactgcgaagtttgtatttcttatctgggaagattttaccaggacctcaaagacagagatgtcacattctcaccagccactattgaaaacgaacttataaagttctgccgggaagcaagaggcaaagagaatcggttgtgctactatatcggggccacagatgatgcagccaccaaaatcatcaatgaggtatcaaagcctctggcccaccacatccctgtggagaagatctgtgagaagcttaagaagaaggacagccagatatgtgagcttaagtatgacaagcagatcgacctgagcacagtggacctgaagaagctccgagttaaagagctgaagaagattctggatgactggggggagacatgcaaaggctgtgcagaaaagtctgactacatccggaagataaatgaactgatgcctaaatatgcccccaag

SEQ ID NO: 9146 - DNA, 200 bp, Homo sapiens
ggagaacatcagtgaggtcctgaggaaagcagaatgaggccaaggaggtgttgaagtgtaatgcaggcacaacagagcctcaacctgttacacaggcagctctggagctctgatggccttcaagattgtcccaaattgaagtatggggattggacctttatatctcacatcaactaaaaatcattgatgaaactgctccc

SEQ ID NO: 9147 - DNA, 284 bp, Homo sapiens
ttatttccctcttttcaaagaataattattgctattgtttttgttagtatcccaaagaaaagttattatttttaatatacgcacctagatctctgtctctctctacacacacacacacacacacacacacacacatatttacatatagatataaatctggaatgtatctttttatacatacatttgaaatataaatcaatatctctgtatatatccatttatacttatatatatgcacatattggtattatttatagattaaaaaaaactactttgttaaatag

SEQ ID NO: 9148 - DNA, 281 bp, Homo sapiens
gtgctgggattgtaggcatgagccactgcgcctggcctcattattcatacttttctatctcccctctagattgtgtttctgtaacctattgtgcacacaataaccggcacgatgcatgcagaaaatgtttttgaatgacatgttggttgaataaaacttgttggatgaatggatagatgggtggatggatggggtaagtggacaatgatggaggatggatgggtggataaatggatggatggatggatttgatggctggatgcatggatgggtgagtgggg

SEQ ID NO: 9149 - DNA, 394 bp, Homo sapiens
gatggagaaatagacctcacctcttctgggtagagtagtggcaaagtcacattgtagaaaagcctgggaggtggaaaatttttttcatgattgtctttgtaaagtacaatctactacctacactttaacccaccaattcatcttttagaaatttatcctgtaagtggacttacaaatgtgaacaaaaataaatgaacaagggtatttgttactaaaatagtaatagcaaaagactggattaatctaaatgtccaataatagggttatttaacccaatttatttgtgcccatgcaatgcatagctatgtgcctgtctttttttttttttttttaaaaaagaattttttttttttcccccaggccgaattgggaattgaaggggccaattttgggt

SEQ ID NO: 9150 - DNA, 584 bp, Homo sapiens
gttctattgtgcagccaagtttgagaaccatgcaataggtccaactcattcaggaggggtgaaagtctaaatgccaaatgtagctgctccatgtctctggctctctgaggtcatttgtttattcatccaacaggccactcactaatgggtttccactgaggtcacagaaacacaatcttttgagtattagtgtaaaaactcccaactaaaccagaaaggacatcattaattcatttattcatttgataaacactgacttagaccttcatctgccccagtcactgtgatatgcctgggaatactgagttgattaatgattaattctagtgatcgagaagctccagaccaataagaggaatggatttcaacataataatatttactccctttacttttactgagtattctatgctagaaactgcacttagcaatttgtccacattatttatttttatcttcataaagccttctgatgtaagcagcattgtgcctgttttacagatgatgagcctaaggcttcaagagtaactgatcaggccaggcacggtggctcacgcctgtaatcccagcactttgggaggccg

SEQ ID NO: 9151 - DNA, 384 bp, Homo sapiens
ataactaacttcttttggtcttcccacatttaataacctctcgatcagagcctttctttttttatgtactcaaaaataatagaaatgccatttttaatatttaccaataacctatttaacttagtaaggaactgcttcccctgggggttagaaatttgtacacagccttctggatacaaataatctttatttaattaattaatttatttgttttttgagatggagtcttgctctgttgcccaggctggagtgcagtggctcgatctcgactcactgccatctcgccacctgggttcaggtaaaaaattctcctgtctcagcttcccgagtagctgggactacaggtgcatgccaccatgcccaactaatttttgtatttttagt

SEQ ID NO: 9152 - DNA, 230 bp, Homo sapiens
  misc_feature 73: n = A,T,C or G
ccacaatgtacgcatcgacggtggccttcattttatgttgcagaatgaatccgacgtataggaagtctttcangatattatccaggagaacttccccaacctagcaaggcaggccaacattcaaattcaggaaataaagagaacaccacaaagatactccttgagaagagcaactccaagacacacaattgtcagatttaccaaggttgaaatgaaggacaaaatgttaa

SEQ ID NO: 9153 - DNA, 343 bp, Homo sapiens
tactccacaaatagagatgtatctactcggatcgggggaactgtaggagagaattgtgaaagccacttcctacgcccaatacgaatgagttgtctttaaacatctgccaggcccaggcagctctccatgcaagtgcaagttcacaaagaagttttctactcctgtcctattccgccttcctttgatcctactctggaagagttagaaactggcaaacttggggtgcaagcataaaaattaggtgtctcatctccttccccactgtggacttctagcctacagaagttcctagctgaatgaaagacctagattttgtactatctcatgtttgggatttggattg

SEQ ID NO: 9154 - DNA, 630 bp, Homo sapiens
cttccccagtttaatataagaataagcagtctctgttctctaaaagccagaaggcttatgggggagaccaacgcactaatttagggcttcagcagaaatttctgtaaagtgaggtgtgcctacctttttccctaaatgagatgtcccctaccctacagattgatatttgatgatgcaaaacaattaaacaaaagactctctttgctgacctgtgaaatctgaagtttttacggtgaaaagtgctaatacattttcaaagttgacatagtatatttatcactttacacctaacggtctttctatgacgaattgacttaagcgctttgtactggagaatcagcacaaattaccttttttaaataaggggaaggctgaagtgacaagcttgtctcccctggagttaacaaatacagttctcttttagaatagggcgctttaaagttggagaagttctgagagcttgagggtcattcaaactgcaaggtaccctgttcaccgagtaattcaggttcagaaaagtcaagcagagatatatgcagtgatgtgtgcaaggcttcacagctgggaggttgtactacatccccacaatgataagcctttgctgccttcttgatcacttttgctacatct

SEQ ID NO: 9155 - DNA, 500 bp, Homo sapiens
gatgcccagaaaattggtaagctatgttaacaagccatattagatatcaagcattaatatggaaataaaccagcctgtttggtggtctcttcacatggacgcgcatgaaatttggtgccgtgactcggatcgggggacctcccttgggagatcaatcccctgtcctcctgctctttgctccgtgagaaacatccacctatggcctcaggtcctcagaccgaccagcccaagaaacatctcaccaatttcaaatccggcaggcatgtcaggcctctgagcccaagccaagccatcgcatcccctgtgacttgcacgtatacgcccagatggcctgaagtaactgaagaatcacaaaagaagtgaatatgccttgccccaccttaactgatgacattccaccacaaaagaagtgtaaatggccggtccttgccttaactgatgacattaccctgtgaaagtccttttcctggctcatcctggctcaaaaagctcccccactg

SEQ ID NO: 9156 - DNA, 608 bp, Homo sapiens
tctgtattgtggaatttctgaaagaaagtgtaaatggcaatgtgtggaactaaagggtaggcaggtagattaagcagtagattaagccagcagtaactgttctgtttgcttccgaaaagcatgctattttacccacaggccacagtttctccattcccagttgtccaggatattttctcctagagttgttccataattgcctatgtctctgatactaaggattcttaatatatgtcattcctccaacacacaggcatacacacatccatataaagttctattatattggtttttcagcaactatattaaaaatctacattgggccggacgcggtggctcacgcctgtaatcccagcactttgggaggccgaggcgggcggatcacgaggtcatgagatcgagaccatcctggctaacacggtgaaaccctgtctctactaaaaataataataaaaaaaaattagccgggtgcagtggtgggcgcctgcagtcccagctactcgggagactgaggcaggagaatggcgtgaacgtgggaggcggagcttgcagtgagccgagatagcgccactgcagtcaggcctgggcgaaagagcgagactctgtct

SEQ ID NO: 9157 - DNA, 356 bp, Homo sapiens
gggctgctttcttacctcatcattgataggcacacttgcactaagccttacaatacctctgtccataatagctgacatgtgtatgcaaaaggtaaggaaactatttattattcatagatattttatgtgtgttattaaaacaaacctaatgaaagttgagatgtgattaaattataaggatacaaacataaataatacttgatgctttctctcccaaggtgctttactacatagaaatatagaaagtaccgaagaaatagataatttccatttttagcttttccatttttttccctaaatttctaagttaagggcatcatcttcatatgtagttctccagtttttgagctgattct

SEQ ID NO: 9158 - DNA, 593 bp, Homo sapiens
ctacagaggcattaaatattgtagtcatattatagaaagtacaatgaattgttatggttttggtggacaaataattcttaattttcaatttaattgcaacagtaactataacatacaagaattaaaagtacagtggtatccttgagggatattttgcttaggactagaatatacaaccagagataaaaattgtgttagtaatataaaaattcaataatatgactgggctattactagatttggtgagaagtaggatatcaaaggcatttgctgggaggcatgagcagagaaaacgggacttaagagaattgttggccaggtggggtggctcacgcctgtactcccaacactttgggaagccaaagtgggcagatcatgaggtcaggagttcgagaccagcctggtcaatatggtgaaactccatctctactaaaaatacaaaaattagccagggctggtgtcatgcacctataatcccagctacttgggaggctgaggcagaagaatcacttgaatccgggaggcagagcttgcagtgagccgagatggcaccattgcactccagcctgggtgacagagtgagactccgtctc

SEQ ID NO: 9159 - DNA, 603 bp, Homo sapiens
tctggcctgaggacactatacacacagagcgcagtctatgtggaggccagaaagtggaggtcaaacacatatgtctacttattatttgaatttatttcttattcttcctatttttttaaattttgtagagatagggtctcgtcgcattgccaagggtggtctctaacctctgggctcaagcagtcctcccacctagacctcccaaagttctgggattgcaggagtgagcgactgcacctgaccacagttttctttgttagcagtcaaaaaagacgaagaaagaacgtgttcagctgtaattcctaggaaaaaatatgttcgggccgggcacagtggctcacgcctgcaatcccagcactttgggaggctgaggggggcagatcaccaggtcaggagatcaagaccatcctggctaacacggtgagatcccgtctttactaaaaatacaaaaaaaaattagccaggcgtggtggcgggcgcctgtagtcccggctactcgggaggctgaggcaggggaatcgcttgaacccgggagccggaggttgcagtgagccaagattgcgccactgcactccagcctgggcgacagagcgagactccgtc

SEQ ID NO: 9160 - DNA, 568 bp, Homo sapiens
tttctaagactatgttctctcgtcacgtcatgctacatgtgcccttaataccatggttcaacgttcttcagttctcttactgtcatcatttataattgccttttgagagatctcatccattcttaagatttgaatgtccacttctgcatggatggcatgcaacatctccagtactggcattttccatatattgcagtaccactttggaaatgcactgactctttaaaagccacataaatgttcagccattaaattcaaagttattatgtcttaataaaaatgatttcctcccatctcaaatcattattttctttcaactatcaatacaataacctgttacacaaatccgtacgttgtttatggtattttgaaaccatatttttatcttcattcttgtttgtaaaagataatctattattgaattctttcacacatcactctaaactcctttgcatttttctcttatccacttttactttcaagatttttatctaaccgctttatcccctacattgtgattcatacgcagcccctgggaagggaggagtgcctctgcccaaccacgatg

SEQ ID NO: 9161 - DNA, 564 bp, Homo sapiens
agtcaacaggtagaagctatagttttaagtgtagtgacactcctgctctgtaccttagtaaaaagaagtgtcccccttccagtaaccaaatttaaaaccacaaagcttatagttgcagggacaggaagcacaatttccccaaaacacatgaccatgaggtccactggttctgatatgtattgtactttctaaaggtaccagtccaatagtgtttgatacccgtgtcaatagtcacagtaatttgaagacgaaaacactggatcagtaaaagggatttcaaaggggcatcaatctcatctactacagtcttagttctattataattctagccccattttatccccttttatagtggaaatgaatattgcaattttcctgccccaaacttctcattgtgtattgagagtatagtggacagataaattgtctctttaattcacaggtcttcagaatgagagaagatatgccaaagactttttatctatacctgttcctgttatgatgatgaaatcctggactactagactgaatctgataccaaaattggaagagtttttgggtatc

SEQ ID NO: 9162 - DNA, 65 bp, Homo sapiens
ggcacgaggcacaggccacggagagagagaggccgggcctggatgaagccgtgggcgttggtgcc

SEQ ID NO: 9163 - DNA, 483 bp, Homo sapiens
ggcacgaggcacgcagcacccactcagcacctcttagaagatgcgtccgtagtatatagtatgatttttcgaaggggattttgctcatattaagggttgctttagggatgtccaggaagggtcaggtaaggaatctttcaatctgctttctaattggcttagttttcccactgtcttcgcaaaaggacaggaatttccaagttagtttgcagcttgtctttcatcaagcgaaatgctcatgctgttgggtagatggtaatagaaaccttttgctacctttatttatcaagagttgtggagccgaggaaccgtgtcttgggagttgtgcaggattgaaactcacaaaaaagcctgtttgaagaagttgttacctatatttattcaaggcagttcacaagccttatactaactttgcggggtctttcagttgagcttacatgactgcgcttggctttgtgccttggcagccaacatttgccatgc

SEQ ID NO: 9164 - DNA, 469 bp, Homo sapiens
ttatgacaacaccagagcttgagcatcttgagaaccaactttgcccaagaatattgattagtagtttctgccatggtcacaggaaaggagaatttagcattttgtgtctctgtgtgtcatacctgaataagagtctattggtgcaaaagagcatatccaatagtgatattcataaaataagtgacgcaaaatagtccatgcaggatgggcacagtatttcaataaaatacaggtagttaagtaaaggtaatttctagttgagtacataactgagacagaaaatatgtgcatagcaattttaaggtatgttaataaaaaagataaagaatttactaaaattaaattgcaagaattctgcaaccatattttctttgcaatttaattttctgtattttaatttcttgggatatatttatatttggcagtataggatggaattttcaaaaacaatattgaaaagggctgggca

SEQ ID NO: 9165 - DNA, 372 bp, Homo sapiens
acctggtgcctctgactgcgcctctgcctttgccgcctggctcctggtggttcaagttccagaaaggtccgagggctgtagggtccttagagaacctagaggctcctcctaggaacctttaaaaatgataccctgccctgcgttggagcctgtgaatttctttgcatgtgaggggccagctgtcaggtggtcggctgagccagggcagacccaggagcccagcacgccatcgcggaggcctttctgatggcacagtgctagccgttcctcctgcttctccgcccacttggccatgtctgggaaaaggctccccccaactcccttgctctccctggagcaccacgggcaggactctgaccgggatgggcaggt

SEQ ID NO: 9166 - DNA, 337 bp, Homo sapiens
ttctataactatgttaatgtgacctgtaaaacagttcacttctcaacaagtcagcttcctcatatttaaaatgagaagttgtcttgagtttctaaagatgtttaggctgcattgtcttgggcctgctcaggattttgacctctgagataaaagctggatttaaaaagccaatccaagccaaacacctggcattattagcattgttattccatcagatctgtttgtttgataaagaagctgggggtggaattggtggtgccttaaataccctagcttggtgcagaggtaagatactctgtctgggccacggtggctcatgcctgtaatcccagcactt

SEQ ID NO: 9167 - DNA, 422 bp, Homo sapiens
ctgctgcgcaccctggagatggggtgtgaccctgggctcccgttaatgttgttgtggctccagatgcctcagaaataacttccagagtcaacaccatctgcggaagtgccgtgagacggtgcatgggctggagacagagacagccggcgccgaacatacctggggctgcccgtgcaaactggggcaagcccttcagcctccatgtggctgctttactatggagaacagaaatgactagaacctgacttgtggggttatggcgagggtggcatgagatgagctttgtaacaatgtgttgtttatgggcagcaaaaccctgactcattgtctgggttactaatatccaagagttcatcatcagcgataattattgtcaatagtcgtaactgcaaaagtctcttttaaagctaaaatggatgccg

SEQ ID NO: 9168 - DNA, 523 bp, Homo sapiens
caagcagtttcaccggatagtgacataccatcgccacctttatgatatccacgtgactgttcagccaaagtataaacacgtttatcctaagaactctgtagtaagaaaaagccatttgtagggtgcttaagcttgtttgtaaaatggcctacttgaagtcctcatgaataatgagggttgactttcatttgcttgaaacttaaggaagtttgtgcctataaaagttactgcaattcagtatttctttatttttttcgagacagagtctcaatctgtcgcccaggctggagtgcagtggcatgatataggctcactggaagctctgcctcaggggttcatgccattctcctgcctcagcctcccgagtagctgggactacaggcgcccgccaccatgcccagctaatttttttttgtatttttagtagagacgggttttcaccgtgttagccaagatggtctcaatctcttgacctcgtgatacgcccgccttggcctcccaaagtgctgggattacaggtgtg

SEQ ID NO: 9169 - DNA, 613 bp, Homo sapiens
  misc_feature 543: n = A,T,C or G
tgtatttttagtagagatggggtttcaccatgttggccaggctggtctcgatctcttgaccttgtgatccacccgcctcagccccccaaagtgctgggattacaggcatgagccacctcgcccgtcctgacagagcttttaaggatgcatggagttctggggagttgagtctgttttcttgtctcatcagaaacacatcagaaaacacctttgaagtttaaggtgccagcaggtgtccctaagcattctaagtctacacgctgtgccccgtgcaatatcacttaagttaaactaataccttttctgctggtcttcacacagctactaatatgttctgatatataacatttctctgagaggggaatcaagaatgcaattttggctgggtgcagtggcttacaactgtaagcccagcactttgggaggctgaggcgggcagatcacctgaggtcaggagttcaagacatgcatggccaacatggcaaaaccctgtcttctactaaaaagacaaaaattggtcaggcacggtggcaggcgcctganatcccagctacttgggaggctgaggcaggggaatcgcttgaacctgggggcggatgttgcagtgagctga

SEQ ID NO: 9170 - DNA, 505 bp, Homo sapiens
gtattaaaagaaattgtattgtccagtgaagttttaagaaacagaaaccataaggtgattattatttttcaagccccaaaggagaattcattagatgacatacttttaaagttcatggatcagggtcgggtgcggtggctcatgcctgtaatcccagcactttgggaggccaaggtgggcagatcacctgaggtcaggagttggagaccagcctggccaacatggtgaagctccatctctactaaaagtacaaaaaattagccaggcgtggtggcacatgcctgaaatcccggctatccgggaggccgaggttgcagtgagctgagatcgcgccactgtaccctagctcgggtgacagagtgagactctgtcttagaaaataaagtccatgggctggtcgcagtggctcacgcctgtaatcccagcactttgggaggccaaggcaggtggatcatgaggtccggaaatcgagaccaccctggctaacaggtgaaaccccaaaatt

SEQ ID NO: 9171 - DNA, 277 bp, Homo sapiens
  misc_feature 223, 277: n = A,T,C or G
acgacagaaggatacggctgcgagaagacgacagaaggggctttcccgggcgctgattcctgagtgctgagcgcgaacccgaggagatgaaccctttaactaaggtgaagctgatcaacgagctgaatgaacgagaggtccagcttggggtggccgataaggtgtcctggcactccgagtacaaagacagcgcctggatctttctggggaggcttccttatgnactgactgaaggggacatcatctgggtgttctcacaatatggggagaatggtan

SEQ ID NO: 9172 - DNA, 579 bp, Homo sapiens
atggtaatgctataaaatctctgtttaaaataaagttattaagaaaaatgtgagctgggttaaagaaaagtgttatagtgagacaggttgaagatggttttggccaaagccatgagagtctgggaaactatggcctcaggtctgggaagcattcctctcctgcaagtctcagctttgcccatcaacatgctgggtggccttgggccagggactttccctctctcagtttcatccagtgttaggtgagaggatggaaccagagcagaggtggctgagtccagagagtgcagaggagaggccctgggcaaaggggtgaggaggaaggctctggaaagctggggatggctgggtgcggtggctcacacctgtaaccccagcactttgggaggctgaggtgggtggatcacttgaggtcagaagttcaagaccagcctggccaacatggcaaaaccctatctctactaaaaaaaatacaaaaattagccgagcgtagtggcgtgtgcctgtagtcccagctactcgggaggctgaggcaggagaatcacttgaacctgggaggtggaggttcagtgagttgag

SEQ ID NO: 9173 - DNA, 91 bp, Homo sapiens
gcaggagaatcgctggaacctggtaaacaggggttgcagtgagccgagagagtgccactgtactccagcctgggcaacagataaagacctt

SEQ ID NO: 9174 - DNA, 585 bp, Homo sapiens
ttcatgagatatcttgaggaaggtgctggacttcccacagtatgtggcatggagactggacgtgttttatatagttatccaaaaggttatgccagaaactgggagaagggaagacacctatgtcctccagataatttcaaaatggtttcaagaacactgatagagggaaacagtggggctgtggtacctgcgattagggatttgccatggaaaacagattccatattggagattttctcccaacattttattatgaaaatacatttacagaagagttgaaaaacctgtacagtgaaggctgggtgcattggcttacacctgtaatcccagtactttgggaggccaagggaagaggattgcttgaggccaggagttcaagaccaacctgggcaacatagtgagacaccaactgtacacaaaatttaaagaaaaaattaaccacgcctggtggtgtacgcctgtagtctcagctactctggaagctgagatgggaggctcccttgagcccagaagttcaaggttacagtgaactatgatcatgccactgcactcttgcctggaccacagagcacgaccgtgtgtctc

SEQ ID NO: 9175 - DNA, 408 bp, Homo sapiens
  misc_feature 312: n = A,T,C or G
tttcctactcatctgatccttttcctcattaaaccctcgcatctgcttcactctgcagtctgaagtttctaaggccagaactcatgacattattttattctacaccttgcttctcaacctgggtggactcatgcatcctttcattcattcaattctctggcactgtgtgaggtactgggaattcagtggggggaacaaggcaggtggagcccctactcccatggaagacagacagtgaatcaataacaaacacacagacaagatcattctagagagtaacagggattgtgaaggcaatagagagactacggnggaaaaaaagagagagactatgggagacagcactactttagcctgtgtggtcagggaaggcccctctgaggaggtgacatttgagctgagaactga

SEQ ID NO: 9176 - DNA, 497 bp, Homo sapiens
gagcatagactcttggtcagaagcccctgcttcctacagaatctctgctaatacccttgataattctattggcccaagatgcaaaaaagcccagaactactgcttaaactttcccaccaaagtacttgcgcctggctgggaagattgtgtcagccccactggaggtctggaaaagaggcccagattcaccaacctcaagcataaaatttctctgaagtctggccgggcggggtggctcatgcctgtaatcccagcactttgggaggctgaggcaagcagatcactttagtccaggagttcaagaccagacctggccaacatagcgaaacaccatctctactaaaaatacaaaaattagctgggcatggtggcgggcacctgtaatcccagctacgtgggaggctgaagcagggagaattgtttgaacccgggaggcagaggttgcagtgagccaagcttgcgccactgcactccagcctggttgacaaagcgagtct

SEQ ID NO: 9177 - DNA, 280 bp, Homo sapiens
tgtcccagtttttcctggactgaggggtttccttggacacaggactttcagtactaaaatgtaaaaatcccagacaaactgggacaagctggtcaaacctagttgagtttgaatttgatatttaacactttcaacatcttaatgacatttaagatgtgaaaatagaatgtatttttcatactcctcgtcactgggacactatatttcttcactgacaacttttaatggccaaggatcttatcactaatgaaaaagggaacaggctgggcgaggtagctca

SEQ ID NO: 9178 - DNA, 492 bp, Homo sapiens
ggactagctgggactacaggcatgcgccaccatgcctggctaatttttgtatttttagtaaagacggggttccaccatgttggccaggctggtctcaaactcctgacctcaagtgatcctcccgccttggcctcccaaagtgctgggattacaggcatgaggcaccatgcccagccctgttattggatttttctgtccaaattttgaatctagacactgacacagggagtaggccttccagtttctagttggtacaaagaagagttgagaaatttgagagaggcaataatttcagccccattcttaacacagttggcttagttggtaactgttgaagattattcacctactttttcctcaattcttgctttagaagagccatcaaggaacagctattaccagcagaactgctggaaggaatccagtagatctggccccttgggagagtgggggaagagcaagagtagcctcagggaaaggggtcagggagag

SEQ ID NO: 9179 - DNA, 483 bp, Homo sapiens
gagtggaagaaaaggcaaatctgtattggatagacatcagtactatctgccacacgtataactgtgctgtgttaaaactgctaatattttttccaaagccagtttaaagaaatgcagttttttagatgttttgaacaattgatttaataatatgcaacgatagatggaattttatatttaccataaaaatcttggaattctggccgggtgtggtggctcatgcctggaatcccagcactttggtaggccgaggcaggtggatcacctgaggtcaggagttcgagaccagcctggccaacacggtgaaaccccatctctaataaaaatacacaaattagccgggcatggtggtgagcacctgtaaccccagctactcgggaggctgaggcaggagaattacttgaacctgggaggcagaggttgcagtcagccaagatcatgacactgcactccagcctgggcaacagagcaagactccatctc

SEQ ID NO: 9180 - DNA, 225 bp, Homo sapiens
atggtttgtaaagactagggaaatcaaaattttataaatagggatctattgttttattaaatgagccctggggaacatttttaaagggttcaaaagtgagaggggattcctgtaggtaattagattcctgctgtctttggcctaaaacctaactaaatatacttaattaaatcacatatatgggccgggcgcggtggctcacacctgtaatcccagcactttggg

SEQ ID NO: 9181 - DNA, 62 bp, Homo sapiens
gttaataggacagaatcgctgctcctccatggcccctcttgttttatccctttctttggatc

SEQ ID NO: 9182 - DNA, 518 bp, Homo sapiens
aacctggtgagggcgtgttacatgctgcccagggccaggctgtgagtgctgtcttggacatctcgcccagaattgtgtttttgtttcaaggctaacacagaaaaccagtcttactttgggaaaggagaactggtttattattgattggatggaaagcaaatggccaggtctgtagtctccactgtaatttaaaaggctctatattatgataatcttttgacctgccaactttcttgttttcgttcaacagtgggagagtgggtcttgctcttctgtactactctgattgacaattctcaccaggttctactgaaaagatctagatcatagccatttgtctcataagccatttggctgaactgaaagatcaaatcatgtattcacaacattctgccttagtgttgatttctaaaagatcctagttcttaaaaaacacagcagaaatctaatgtgttctttagatgcagttggtgtagctggacattcagtatttgttggtacttggcaaaatgatggag

SEQ ID NO: 9183 - DNA, 114 bp, Homo sapiens
aaagtgcagggaaggtgcttggaactaaatgctcaaaaaaagtccatctggccaggtgcggtgtctcacaccagtaatcccagcactttgggagaccaaggcaggcggatcact

SEQ ID NO: 9184 - DNA, 582 bp, Homo sapiens
gtgaggtcaggagtttgagaccacccgggccaaactggtaaaaccccgtctctactaaaaatacaaaaattagacgggcatggtggcgggcacctgtattcccagctactcaataggctgaggcaggagaatcgcttgaacccaggaggcagaggttgtagtaagctgagatcgcaccactgcactccagcctgggcaacagagtgagactccgtctcaaaaagaaaagaaaaaaagaaaaaagaataatcctcaactttctccagtttaccagggataccgatacttttctctcaagcaattaaattgatggtagctcattccaactgaacgttaataacaagctgtttctcaaagcaacacacaaagaagttaattatataaatctatcacaatgggcagcatcagaacagtctgaggactataacaaatctacaatatctcatttacactataaacattccaatcaactcaattttccagttagaaaatctttttgttggccaggcgcagtggttcaagcctgtaatcccagcactttgggaggccgaggtgggtggatcacgaggtcaggagttcgag

SEQ ID NO: 9185 - DNA, 478 bp, Homo sapiens
gccctacattacgaatgcaaaagttttcttagaaatccaataactgtaatattggccagaactgtaatcaaatggtcaccctctaggtacaagggaggctggaagaatgaacatttttggctgggcacaccactaaacaaatccagggttttgatggaaaggaaggggtggggatggattgcaggtgacagctggtggtgcctaccacaagctccaataccaagatgggcactgaattcacagggatcttttaaatttagtttctggatttgagtgaaagcaaattgggttgcctcatccttcgaaggaaaagtggatccatagtattctactgtcagaaagggaaatagagtcaccttgaagacaagaggtgagagagtgctgcaggtctggagggccaagtggatagaagctcagcatgacctccctctctctgtctcccctttgttcactttcattagtcccgttcacttgggct

SEQ ID NO: 9186 - DNA, 622 bp, Homo sapiens
tcaagtgattagtgtggccaggcgtggtggctcatgcctctctaatcccagcactttgggaggctgaggtgggtggatcacctgaggccaggagtttgagaccagtctggctaacaaggcaaaaccctgtctgtacaaaaaatacaaaaattagccacgcgtggtggcacacacgtgtagtcccagtcactcgggaggctgaggcacgaaaatcccttgaacccaagaggcagaggttgcagtgagctgagattgtgctactgcactccagcctgggcaacagagtgagattctgtctccaaaaaaatttaaaaataaaaaaagattgagtgaagaaaaaaaaatttgcagattccatcagtcaaagccattttcatatatctcctttgaatttccatttctgtgtataagggttttaaaaaatagttatcatattaagtagacagttgtttaattttcacattacgcgagcatttccatttcattacctgattttcataaccatcactctctgatgactatgtaacattactctcagtgcatgtttctcttactaccccctattgttggatgtctaaattgcgtctgattttttctctgttccataaaattgaaataaata

SEQ ID NO: 9187 - DNA, 628 bp, Homo sapiens
tagtaggacttaaaaactagtgataaatgagaacaacaaaactatttaaatcctgctggaagcctgctctccaagataagtgtatccagtgtaagtcccctgagattctcctatcagggccgggtgatttacgagttgtatgatttatcaggctccatgtaccaggtgtcacctctgcattcagcttcactgatcaagaaaatgaattcgatcctggatctctgtccttccaatagcagcttgccaggagaagtcgttaatgtgatacattatcttgccggctgttaatatcatgtacccgtcttgtttcccttcttttagttcagctgagcatcaatttgtgccatgatatttacatgaatatcttcatttcatcagtaccattgtccatctgtttggctgagggctgaattacagagctgtggccaggaatggaggcattaggcagtctaaatgctaacttctcccaagagagaagggcagtcccgttttcagttttcctgcccctgcttgctgctgaaatgcagcctagcagacatagagcaggaattagaaaaatcatcctttaacagaaagttagaaaatgatgaggggccgggtgcagtggctcacgcctataatcccagca

SEQ ID NO: 9188 - DNA, 542 bp, Homo sapiens
aatttgtataaaatagtaagtggctggcaagtagaatcacaataagggattttacttttgttccaaatatatattccaggtcttgagtaaactaagtgataatactgattaataggagcatctattatacatgtgttatgtatgtgtattatccatagatatataatacatgtatatctggatttattatatgtgtatatatacagatacatacgtatgtatgcaaattaactttaatatctacaaaacacttaaaaatggatattagatcacaagtacagcctcaacaatgccaccaaaatatatatactgtgcaggtattattttattctccaactttccttgatttttgtttttccatcttattggtatccctactgtaataaaaaaaaaaggggggggagtttattttgtcaagtaattgcttaaaattcctttccatctcctcagatatttaaagaaaactcacagttttctttgtcccatcttttctccttggctacttccctacttttccctacaaatactatgtattattcaca

SEQ ID NO: 9189 - DNA, 164 bp, Homo sapiens
gaggtggaggctgcagtgagctgtgattgtgctgctgcactccagcatgggtgacagagtgagactctgtctcaaaaaagagtgtgtacacagccagagccatataaaatacaggcacagatcactctgcacctgtcatctaaaaagacacatctggctgggcg

SEQ ID NO: 9190 - DNA, 108 bp, Homo sapiens
gctggtgtgcagtggcatgatcacagctcactgcagtctcaacctcctgggctaaagtgagcctccctcttcagcctctcagtagctgggactacagacaggtaccac

SEQ ID NO: 9191 - DNA, 543 bp, Homo sapiens
gaagatactgtcagtctgacatacattatgcatctgtctatccagaattcctcacactgctgatttctgaagagcattccaacttcagtggatctttttcatctctgcgtcttgaccatctcaacctggcccttctgacaactccagtgagaagaaggcagaaattaagaacagaatatatattttttggtctcagtcatgctcaggatggcgcaagatgagaaacagcctggaatttcccatccttgacaatctttaccatatcctgcccttcttgggcattaagatagagttaagagataggaaaaaccaagaaaagcaaaagagtcaaccaataagaagagtataaaaggacaaatatgtcaatagtttatgttatggagtttgaattctcacttctccactttccagtaatatgacattgggcaattacataaattcaattagcttcagtctccttttccttaaaatgtggataacaaaagggttgactccatagggttgttatgactcaacacataacataaaaagtactcaaatatt

SEQ ID NO: 9192 - DNA, 433 bp, Homo sapiens
gagcaccgtcttttcccactcatctcacactatgctacttattctgaaattgcccaataaatacacctattaaggacacagatgattggtttgtctgaaagtccagatggaaaacagactcaacttttcttttttggtgtatatgtgtttgtgtgtgcgtgtgtgtgtgtgcgcgcgcgtgcgtgtgtatgtgtgtgtggtgggggagagaatgcacaaacactcgaggtggtttgtatatttgactggtgaatttcatagttgtttttctggggttacttagaatttgagagtccgtgagaagcattaggaagaacattactgagaaaaaaggaggggtgggaagcccctagacttctccccgagggtatccccgctgcagtcttctttagatgtttggattccccagtcctcttgttttgaggcgtgatat

SEQ ID NO: 9193 - DNA, 413 bp, Homo sapiens
agtgtccttcctaaaacataatctccatgagagcagggaccattctaggtacaggggatatgcaaggagcccctaagatatacctttgcatatcccctatacctagaatgatgtctggtacataataggtattcagcaaacattcattgtaatgaattagtgagttttactcaaaatgcaagaaagatgaattgaaactacaagatagtattttttttaacctaggaaattaggaaaactaaaagaaaaatggataacacactagatgaggaagattgtggtcaaataggtgttttcatgcattgctggtggcagtgtaaattgcttaaccatccatggagggcagtttggaaatattaatcaagattacaaatgctggcagggcatggtggctcacacctgtaatcccagca

SEQ ID NO: 9194 - DNA, 472 bp, Homo sapiens
actgttttttgtcttttttttagtcaaggtctcaccgtgtcacccaggctgaagcgtagtggtgtgattttaattaatttctgccttgaactgggctcaagtgatcttcccgcctcagcctcccgaggagctgggactacaggtgtgagccaccacgcccagctaatgtttttatttttacagagatgaggccttgctgtgttgcccaggctgggcagatcctcagcctcccaaagtgttgggattacaggcatgagccactgcgcctggccatctcatgtttaagtaagcttgggaagtgctacctgtttctgcaatactgattggagtgcttgctccatcacggtgctgagcacagagacagctctttaaaatttatcacacttaatcgtcaccacagccctgctaagtcacgggtcataccccccctttacagatggaaacaccaaggcagtccaaaggaaagtgctta

SEQ ID NO: 9195 - DNA, 320 bp, Homo sapiens
gcaacgtagtgggacccccgtctctaaaaaactaaaaaaattagcccagcatagtgatacatgcctgtagtcccagctactcaggaggctgaggtgggaggcttacttgagcccaagggtttgaggctgcagtgagctgtgattgctccatggcattccagcctaagcaacagaacaagattctgcctccaaaaaaaaataataaataaataaataaatatgattttgaaactttaatcatactttctattgattttgaaactgtaatcatactttctatatagttggctaagggaggctatagtgatgtttcgtccttc

SEQ ID NO: 9196 - DNA, 578 bp, Homo sapiens
  misc_feature 471: n = A,T,C or G
caacaaggctaggcactttcctaaatcagactcttacgaggaaaaacagctcacatttgttttctctcttcactgtggaaaatgttgcccacagcaccagggggatgatacccacttgccctgtgggcttatctggctcttcagggataaagaaagatgagaaaaggccatttagttaatgaggcctccacatccagttagaatttccttcggttccttcttccctcaatcctttcttctaaggctgtaagtggcctgagggtttgcatcactttgtgagtgtaaaatgttaggctcataaatgcttagtgagaacacaccttctctgtttcagacactgtgctctgccttgggcatacaaacatgaataagacactgtgtctgctttcctggaactttagactggcaagagaggtggattattttagcactacattattggtcttctgatagacacatggactctactgngggagcccaaaggagcagttcctgactcaagagagtagagtcagattttacctcctccaggaagataaaacctgagatcagcattgaagaatgtatcggtaggagtc

SEQ ID NO: 9197 - DNA, 532 bp, Homo sapiens
atgatacattcacacaatggaatactgtgcagtagtaaaaaagaatgaggaagttctttctgcatgtatataggatgatcttagagttacattgttatttaagaaaagcaagatgcttaacaggatgtactgatgctactatgtgaaaaaaagaggaaaacagcacatgcatattgtacatttgaatgtgtatatatacagacgtacaatatgtaggcatatgcatatacatatataaaatgtctctggaaggagcacagttgctttcaggagaggctggggtaaaaagggacttttcacagaatatcctttggtatctttgagttttaaatgacatgaatgtgtgtatatatattgatgagggaatctagagatccactgcacggagtaagaaatatgaagataagtgcagtgaagtgacttagaagggagagtcagagagaggaggcagtggtggttgaccctgttgtttggagtgataaacgctgtagaaagatcaagcatggggatgatgaaggaaaggtcatggtga

SEQ ID NO: 9198 - DNA, 492 bp, Homo sapiens
agaactgtttgtttatttatttattgagacagcctctctcttgcccaggctggagtgcagtggcaccatcttggctcactgcaacctctgcctcccagttcaagcaattttcctgcctcagcctcccgagtagctgggattatagacatacgccaccacgcctggctaatttttgtatttttagtagagacggggtttcaccctgttggccaggctgattttaaactcctggcctgaagagatctgaccatcttggcctcctaaagtgctgggattacaggcgtgagccaccgtgcctgcaataaggaggcttttaatctaaggtctgaatgacaagaatctaaaccatgaagagatcaggggagaaaaatgcaggaaaagaagacaaggacaaaggccttaaggtgagtgtgagccccaacaaaagtgggggagtgggggctggcacatgctgggttagagggtgaaggaattagatgaattttgaatact

SEQ ID NO: 9199 - DNA, 385 bp, Homo sapiens
tgcacacatatgtactatacatatatgcttataaaactcttcattttaggactatttcatttgcaactcactatagctgcaaattgaattaactaattgcaaacccagtttgctctagctgaagtatgtggaaaagattggattaactattatatctggaaagtcaaagggttttctggcctcaagcattgatgaatgaagggtatcaagctatatcaacaggatggatctctctcttttttctccactttcctctgtgctgtcttcattctcagaaggtactttccttgtggcagcaaagatgactcccatgatctctggatctgcatagttcttactatttgcaatctaagaacctatctctttgcgtccttattgctctttc

SEQ ID NO: 9200 - DNA, 465 bp, Homo sapiens
tagtaatttaaagaaaaaaaaagaaaacatgtttggagcaagagtacacatggtatgattagggcagcaatgactagtttgctccagtttggctggagcagagatgtggcacagtaggcttgtggcaggcaagaggatcacactgtgaagagccttgaatgcatagctaattcatttggtttcgtcatgtaaaaaaggggtccagtgaccacatctttgaggacaaaactcaaccttttgctgagaatacatttatacctgtcagatcacgtgactttgctttgatgccgagaaagatttcaccatggcaatggggagcccctgaaggtttttgagaatggtgccatgtgtgattataaaattagcctggagtgcgtagggctggagaggatggaaaccaggaggaggaaaagtcaggcccagtgtggtggctcacacctgtaatcccaacactttgggaggctg

SEQ ID NO: 9201 - DNA, 597 bp, Homo sapiens
gtcgtgttctgcactggggaagtttcaaatacagacattccgctttgtatcattgccaaactggaagtgattttgtgttttattcaagcatttcaaccacgctctgattagaaaacttttgatttaccacgttctgggaagaaatgaattatctagagcagagataaacctgtggtctaaaaatgggtctcagtggtgtccatggaaactgaaaaggtcacatttgtgtgagtgactgtatggtttgcagatgggagaggatttaaaactttctcagattctcaaatgggtgggtgaccccctcagtggttaagagctatttcctgcataggaaaagagttcactcactggctcttggaatttcatctcgcatgttgctcaggtagtttaatagaatttacgaaggggccacaaaggagtctaatgtcagtcactgaagagtaaaaattagaagctgatgagaaaaggccaggtgcagtggctcacgcctgtaatcccagcacttagggaggtcaaggtgggcaggtcacctgaggtcaggagtttaggaccagcctggccaatgtggcgaaaccccgtctctactaaaaatacaaa

SEQ ID NO: 9202 - DNA, 617 bp, Homo sapiens
gggtttcgtacgtagcagagcagctccctcgctgcgatctattgaaagtcagccctcgacacaagggtttgtcgaataattgcttcattttcttgagcaatactgaagcaggatgaagtaagaggaatgcattcatttaaacatgctttgctttatgaattttgtctcttttttggtctctttttcttatattcaagttacaaatgtacaagtatccttactaagagtgctccttttgtattttacatatatacagtatgaaaatacattggaacactaggaaagtttttaaataacagttctaatttatcagaaaattgtgttttgggattgagttctttgtctcagcccagaatcccaggtcctgggcctggttttctaatgctgtcatctcagttcgatattttactttagaacctggaatctcctacttaatatatgaccatgactttgaaaggcaaaagaggaatcaagaataaataaaacaaacttaatcttcatctttaaaaaaaagaaaaaagaaaccaaaatgagaatcaacacttcataggctcactgggttttcttttcttttctgttaatttaaactcagttatttttaatgcttaatacataca

SEQ ID NO: 9203 - DNA, 637 bp, Homo sapiens
agtccagcacacagaatccaagctctgcctgtgcattaggcttcaggacatgagggaatggcagtgaattagggctgcactatgccaggaacactcatttaccacaactggatttgtcagcagttccagtgaactttccttaggcattatagaattaactgtacttagagagaggttcttggttaacctcagtgttttcacattttaaattatttcctaagtttcaagtgaaactaaatatcatttgaaagacttttaaaggcagtctgcccaccccactccaactcaccccaatttccactaacaactacttcaaatgtaattgtcagaaagagcaccccactccactgcaccccaaatcagcctccgatagatattgcatctgaccctggggggcccttcccgctttcctcttgctatgctcactacactttatttccctcaatgaaaactccttccccaccctcctaatgtgtgacttcacattctatacatagaatttctttttttttccaaagtgaatatagttttatatattttttaactacataaaaataaaacacactcaatacaaaaagaaatggataaaacgcaaatgtgaaaacaaactcaccaatcaccaaccactcagaacttt

SEQ ID NO: 9204 - DNA, 595 bp, Homo sapiens
  misc_feature 89: n = A,T,C or G
agagaaaggttggggtaagtaatttcctcctaaaggggaaaaaagcctacaatttttgtataagtaactgaatccatatagaggcaggnctgacacttgaaaaaggtcacacagtgtgagtatccttagaaatagaatgtttcagtattgtggggacaaagttcagctcacttaagaacatttcctattacgaaccagttattttcaaaatgagactgctatgtagttatataaattactcaacaactgcagtagaactagatgtaatagctacaataatatttctagtataaattatctaagaatcatttttaacatatctcctttgttagtattcattatactcaaagcttgagggacaattgaataatcagcctctatattttcaaagttgttctacattgagagttgtcatcatttagttaagaaaactcgaaatttttgcacttatgttcaatgaggcaggttgaaaaagagtttccgctcttaacacgtcattattctcttttttcaaatgtaattacttagtcaattaacgtcactcttctgtaaaacatttaggtgtaagtgaaagccatttctttatcatcatact

SEQ ID NO: 9205 - DNA, 349 bp, Homo sapiens
ggcacgaggttaacttctctgagagagttccttgtaaggctacttataaatagtagtatatatatatatagtttatggcagggaagatctgggaagtaagcaaaaagagcctttagttaggcaacatagaacaaaatagaggtcacaggttccatgcactgaagaatggaattgaaatagagactccagggtcatagactcttggaaggaagactagagtacattcatgaccctcacccttaattacttcacaggtgagaaaaccaagagctacagaaaataagttattcctcagctccagggctacctgcgatctgtgtttgctctgacgaatggaatttatcctcac

SEQ ID NO: 9206 - DNA, 439 bp, Homo sapiens
ggcacgaggcgagctgaagtacacaaagtttcaaggccagaaaatgagcaactcagaaatgataacaagagacaagtagctccaggtgctccttcagctccaaggagagggcgtgggggtcatcggggtggcaggggaagatttggtattcggcgagatgggccaatgaaatttgagaaagactttgactttgaaagtgcaaatgcacaattcaacaaggaagagattgacagagagtttcataataaacttaaattaaaagaagataaacttgagaaacaggagaagcctgtaaatggtgaagataaaggagactcaggagttgatacccaaaacagtgaaggaaatgccgatgaagaagatccacttggacctaattgctattatgacaaaactaaatccttctttgataatatttcttgtgatgacaatagagaac

SEQ ID NO: 9207 - DNA, 535 bp, Homo sapiens
ggcacgagatataaaagcgtttagaagaagaagcaaaagagacccgcacattccacccagggagggcatggagaaagaacagtgagtggaaggaaaacaggtctgtgctgtcctcaagcatagaggtctttctatggcacgcacccggagcagccaaaaggacactgtccacagccaggccagagtctagctgtcacacacatatgcaggtgtgttgcatacctcaagcatgcgttcacgagttgtaatacttaagtgaatttgtttttttacagcaacaacctatagttccatttaaaaagggatagttatttaattttaattaaaacatatagtagatgttttctcactttggattatgtatccatcttcaacagctttgttgaggtgttgtttacacaccctcaaattcactcgttttaagcatacaatctaataatttttagtaaattcagaattgcgcaaacatcacaatctagtaatagaaattctctttcactccaaaagaaacctgtgctctatttagcaactccct

SEQ ID NO: 9208 - DNA, 512 bp, Homo sapiens
ggcacgaggcctaaagtaactgaagatccatctttacgtatacgtgcaagtcacaagggatgcgatggcttggcttgggctcagaggcctgacactagttattataaaatgtactttcagcagtcttctgggacttgactaccttgtggattgtactagaaatgtcaggtatggtgactgctctgcccaccactctaaatgaaactgtccccccacagtctctgttgcccaggtgtcctatgtccctcgtcacagctgaatggaccaaggcagatgtgctatcaaggacagccaatcacaagtgagcagtaatctctgatatgctttggtgcaaaaagctgagttgagtcaacagttatttaaatttgtgtgcagtcacttccgtttgctggggaatggcgtggtgagggaagattgatataagttacctcatatctgggttacatggatatatatcctacagttgcttaaaatacatttcaggattctttggtttgcagcatgtgttttgg

SEQ ID NO: 9209 - DNA, 195 bp, Homo sapiens
ggcacgaggagctctctctggaaagctcgcactggaatggagaacacaagcaggaaatgtgaaaagtaacggttgaaagccttacttatgatgacacatagggaggcaggtgcatatcttacaattctagacacttggataccttgggaaaccatattgaaagttaccttgatttctttctttcttttttttttt

SEQ ID NO: 9210 - DNA, 227 bp, Homo sapiens
acagagcaggaagcccccccatgtccacctctacctcattttgtcaagtcttcaagagacctccaggcccagtcactgtgaattcattcctctgggtttaggcactcacctccccgccaccccagagaggtagcatattaaatcattaacagaatctaatataaaggggccctgtgattactgggaacaagttctcctgatttatatgcgattgaaccatattccct

SEQ ID NO: 9211 - DNA, 408 bp, Homo sapiens
tggaatgccccagagcacctggcctggctgaagcaggctgtgctcgggttccagcttccgcagatggaccttccacccctgggggccccctggctccccgggtgctccatggttgtccagtacgcctcccagatccccagctcacgccagacacagcctgtcctccagtcccaggtggagaacctgctccacagaacctactgtatgtggaagagcaagagtccctccccagtccatggggcaggcccctcggtcatggagatcccatgggatgatcttatcgccttgtgtatcaaccacaagctgagagactggacgcccccccggcttcctgttacatcagacgcgctgagtgaagatggtcagatatgtgtgcatttttttaaaaacgatttgaaaaaatatgat

SEQ ID NO: 9212 - DNA, 298 bp, Homo sapiens
aaagggcagcgggcagaaaccgggctggggctggcattagctttccctcctcccagtttctctccagcgcagcagggcacctctagcccagaaaaagaaaactgactttctcttatttctgttttctgctgctgctaatctcctcctgaagggttgtgtggcttcttgggactctggaaagaaactgcaggggacgaggacaaaagaaacagctactgtagtcactgcagctatgcaggctctgtgctagccctggaaaggcctggacgttcaagtctgctgtgccgggggtaggccc

SEQ ID NO: 9213 - DNA, 346 bp, Homo sapiens
gcctgggtggagcgtagacagctcagcaccccacggggggcgttggagccagccttggttttgttgggtaaggatgttagaagaggggcgaagacccatagccactggtgtgaagggtctgctcttgaccgaaggctgcctccctctgggtgcagaccaggcaggtggtcccagtcacggtgccctggggccactgggtctgtctgccctcaggctccactagacacacctgctgaggcagcacactagcaacggtgtctgtgaggggcagctgcacagccccctcttgagggtgctcctaagcgttggataagcccatgcgtttctgcttttggggagcagagcc

SEQ ID NO: 9214 - DNA, 117 bp, Homo sapiens
agacaaattgaaaagcttcagagaaaggctagaaataagattcttgggcgagaataagactttaagagattcacatatcctggaatctgaagactcacatgcctaggctgggcatgt

SEQ ID NO: 9215 - DNA, 305 bp, Homo sapiens
cgattcgtttgtaggcaatggaaagccaccagtggttttagttgagcagcaatgaaattaagcctgtgctttgcaaagattaatctagcagcaacagattggaagcaacaccaccattcctggtatcagatccaggtaaaatatattacagctctatactggagcaataacagtaatattagaaggagaaatagaacagaaaaatattgcacaggcagaatggggaggtcccacagatggagctgatcttggctcattgaagcatgggtggcattgatcatgtcaaacacaggatgaggaactgg

SEQ ID NO: 9216 - DNA, 489 bp, Homo sapiens
  misc_feature 418: n = A,T,C or G
attcggcacgaggcaagatccctccacctgtcattatggtgcaaaatgtgagcttcaagtatacaaaagatgggccttgcatctacaataatctagaatttggaattgaccttgacacacgagtggctctggtagggcccaatggagcagggaagtcaactcttctgaagctgctaactggagagctactacccacagatggcatgatccgaaaacactctcatgtcaagatagggcgttaccatcagcatttacaagagcagctggacttagatctctcacctttggagtacatgatgaagtgctacccagagatcaaggagaaggaagaaatgacgaagatcattgggcgatacggtctcactgggaggccactgtaggaggatcaattgagcctagaagttcaagaccagcctgngcaaagtagggagaccccttctctacaaatagtaataaaatgaaccgggcatagtagcatgtgcctgcggt

SEQ ID NO: 9217 - DNA, 473 bp, Homo sapiens
tgcacgaggggacactggattctcattctactcaaactcccactaggactgttggcttgttcgcttctcaagtgtttgtatttttctgagttaatatttttgggtgtaatttacatgtaggaaaatgtacacatttttagtgtacagttcaccaagctttggcaagcatgtatagcctggtaacccacaagccaatggagacctagaacattcccgtgaccccagatgctgggttctgtgtgccttcccagggcttgtggctgggcacatcaggcatggcgggtaccatgcctgacagctctgaaccagttgggcgacctgggtctgggaggtgctgagggacccagcaccctgcaggcgtttccttttgtctcatgtagcagtgcagatgtttggaaagtcacacgtaaatcttgaaaaactggaaacaggccaggcgtggtggctcatgtctgtaatcccagcactttggg

SEQ ID NO: 9218 - DNA, 198 bp, Homo sapiens
ggcacgagatcacatctctcaagttttaaaatgggtttttttgttgttgttgatgggggggagagggtccaccagcttttaaatgttttcacatcgagtgttccaaaaataactggttagcctaagtcacttccaccctccaatgttgtgaatgcagtctctagcattcgctatttaatgtcttcttcctgcactatt

SEQ ID NO: 9219 - DNA, 569 bp, Homo sapiens
aaaagttaaaattttatttttctctcatgtaacattttggataatttgatgattccctaatgttgggacccagtcttttctgtcttaggctcacaactatccttgagcctgtgtcatgggggatgactctgaagctgcgtgcaccctgttcattcacattttcttggcctgaacttagtcactaggctattcctaactgcaagagaagctggaagatgtagtcttccttctgaccagccatgtgctcaaccacaaattgagtttcagttattggagggcagaaagaatagatatggggctgctttgtaggctgctgctcggggcagcctctgctgtgttatttgagatttataattttccttggcttcccagatgacagtggaaaaaggcatagtcaagacttcaagtgcggaaaatgttggcaactctgacatgcaagttcttttccatatagagctgagttatgctggagtattttggttacaaagacttcattttctcacctgtctgaattcctgtttggattttagttactcttgatttatcagcatggattaaaaattgaaaag

SEQ ID NO: 9220 - DNA, 496 bp, Homo sapiens
ggcacgaggagccatggcagaaaatcagtgatgtcattgaggactctgtagttgaagattataattcagtggataaaactaccacagtttctgtgagccagcagccagtctcggctccagtgcccatcgctgcccatgcttctgttgctgggcacctctctacatccaccaccgttagtagcagcggggcacagaacagcgacagtacaaagaagactcttgtcacactaattgccaacaacaatgctggcaatcctttggtccagcaaggtggacagccactcatcctgacccagaatccagccccaggtctgggcacaatggttactcaaccagtattgaggcctgttcaggtcatgcagaatgccaatcatgtgactagttcccctgtggcctcacaaccaatatttatcactacgcagggatttcctgtaaggaatgtccggcctgtacaaaatgcaatgaatcaggttgggattgtgctgaacgtacagca

SEQ ID NO: 9221 - DNA, 86 bp, Homo sapiens
aatgatggcataggtggatgaggacatcagatgggttaatctacaagtgaaatttgagggaacggtgttccaggcatagggaatag

SEQ ID NO: 9222 - DNA, 240 bp, Homo sapiens
ggcacgaggtctcgagtttgttgttttttgtaatccgttttagagtgaattaaactcagacatccctggattgtatgctgtctgtagaatgttgattttcaggcacggggatgtagctgtagaatgtggcttgttcattcttcctgataagaaattgatctcctgaatggattggccatttggtaatttcttagtgaaaggctgactcttgaatatggctgttataatataaattcttac

SEQ ID NO: 9223 - DNA, 492 bp, Homo sapiens
  misc_feature 428: n = A,T,C or G
catccctgacagttggataataggttccaggaagttcagtggtaaattattacaaagcaacatttatagctgattgaacttgaaaagccattttggtgttgaatggcaaatatgtggacttcagcattcctggagcctgatgcatcccgctggatggccctgttcctgtgtacatgatggcctggggactcagcagtgtgcagggtactctcctttagagggtgctttgaggaaagaagtttgctgccacttacagaagtccccttcccatacagtgatataacacaagtaccccatgtccagggagcatctttcctctgatggcttgaggacttatttattaaaaggacaggaatgtctggcaagaaacagaggagctcttaagtactgtaaatactcctagtcactctgcatcagggctgcaagtntaagcagattgctgtggtgtatacacatgattttagcatgataacacttctgtttaatgtcctt

SEQ ID NO: 9224 - DNA, 491 bp, Homo sapiens
aattcggcacgagcagggatccacttgccttaatttgcacagtgttcttataaatcaacagaaagtacacataacagaaaaatttaaaaggttagggatcatttatgaaaaaatgcaaatgccaacaaatgtgagaaaatgctcaatcttacttataatttaagaactacaattcagccaggcgcggtggctcatgcctgtaatcccagctacttgggaggctgaggcacgagaattgcttgaacccaagagggagaggttgcagtgagccaagatcatgccactgcactccagcctgggcgacagagcaagacttgtctcaaaaacaaacaaacataaaacaacaaaaaaattaccattaaaaatgagagagttttcattggcaaagttaaaaagaaaggtgaaagaaaaacctactcttcttgatttgtgtttgttcacttatggagaatttattttgtcataatgtctgaatcataattaaatatgtt

SEQ ID NO: 9225 - DNA, 419 bp, Homo sapiens
ggcacgagctctctctctctctctctctctctctctctctctctctctctctctctctctctctctctctgtgggtgtctctctatctatcggggggtgtgtcacacacacagagtgacacagacacagagagagagagagagagagagagagagagaagatctgcacgctcacagagagaaaaagggacagagagagcacactctctcgatagagcgaaaaaactctataacgcgagacaagagcgcgctcacgcgagagagcgcgcgcgcgagcgagagcgcgcgctctatgcaggccacaaagagagagagagatagagagatgggcacacatatatagagagagagacagatatagagagaggaacccccctcccatataaaaaagacaattatttccagagaaaaacgccaaat

SEQ ID NO: 9226 - DNA, 433 bp, Homo sapiens
ctgatgttgatctaaatctcaaaggacccaaaatcaagggggatgtggatgtgtctgtgcctgaggtagaaggtaaacttgaagtaccagatatgaacatcaggggccccaaagttgatgtaaatgcccccgatgtccaagctccagactggcacctgaagatgcccaagatgaaaatgcccaagttcagcatgcctggcttcaaagcagagggccctgaagtagacgtcaacttgcctaaggctgacgttgtcatctcaggacccaaggtggacattgaaggccctgatgttaatattgaaggaccagagggaaagttgaaagggcctaagttaaagatgccagagatgaacatcaaagcccccaagatctccatgcctgactttgatttgcatctgaaaggtcccaaggtgaagggcgatgtggatgtttc

SEQ ID NO: 9227 - DNA, 334 bp, Homo sapiens
cagtttgaaaaaggacctggttgccaaagtaccatattacccatcaatgtcctctcctacccatttccctttttcacaccctctaaatctctataagcaaatgcggaaaatgcaaactaagctttgaacagaatcaaatgagtccctctgggacacttgcaggggacttatttcttccgaaggatgtgacagcagcttctcccaatagtggcagcgtttgtttcactgttagactggaggagcacaaggagcatacaacatgtggctctgtccacaccactgtgaagttgttggttctgagaaattactggggggagtgttaaaacaagattgg

SEQ ID NO: 9228 - DNA, 258 bp, Homo sapiens
ggcctctactgggaaccaccttctgtaggacagtcaccaggccagatccaaaaggcttgaggccctgtggtccccatccttgggagaagtcagctccagcaccatgaagggcatcctcgttgctggtatcactgcagtgcttgttgcagctgtaaaatctctgagctgcgtgcagtgtaattcatgggaaaaatcctgtgtcaacagcattgcctctgaatgtccctcacatgccaacaccagctgtatcagctcctc

SEQ ID NO: 9229 - DNA, 474 bp, Homo sapiens
ggcacgagacacttatgtgatcaccaaaggatttactagtatcttggtcattccaattgcacaatgttaactgtacaacacacagcgagaaaagtgaatagacttcactaagggattctaagtttagaaaataggttttgttttcttaaaaaattttgtgtataatacaaactaatgaaaactatacatattctccaattcctatagtaataataatgtaactgttacaccaactttcctcatatttgagagatgagtacatgttggattgcagcatttcttcatgttaaaaacatggaatattattcaaatatagtacttggggcctaaacaactaaaattagtcaccgcataactagttgaaaatggcataggcataaaatgttaataaagaatggcagttatatttatgctcacttcctggagtaattgggtaatattcagaaaggcacatcgtggtagtttaagtgtaca

SEQ ID NO: 9230 - DNA, 411 bp, Homo sapiens
acccttaaggagttttgctaccacccatacggcaactgtctctcccgttagacctgggggcctcaaccttgacccccatatgtagttggtgggggaggcaaaggtggtctctgggcagggatacaggacaaaaaactgtgttttcacaaagtataaggagttttactttctagagtgccccccatcctacttttgactctgattaaaaattacctatgagactttgtgccttaaaaaataatttataggccgggcacagtggctcacgcctgtaatcccagcactttgggggaccaaggtgggtggatcataggtcatgagatcgagaccagcctgggcaatgtggtgaaaccccgtctctactaaaaatacaaaaattagccgggcgtggtggcacacgtctgtactccc

SEQ ID NO: 9231 - DNA, 122 bp, Homo sapiens
cacccaccacattaacaacataaaaccctcattcacacgagaaaacaccctcatgttcatacacctatcccccattctcctcctatccctcaaccccgacatcattaccgggttttcctcat

SEQ ID NO: 9232 - DNA, 410 bp, Homo sapiens
gttgagaagctgggaatggtggtggaacctaaaagacttccaactctgaggaaattgtggtagaaatggaagcagtataacctatgattgaacttaaccgatgtaggtgattgagattgtatttgcagagacaatgcttaaagaaataaaagaaacccagacataaaaactgaagctttaatggagatacataaatacataggaccttggaaaacaaatgaagtaatataactgcatataatttgtttacatatataaaacataggaaaatggaaatacagtgtattcttaagtgtacatttctctgtgtgaaatttattgtgtgcttttactttacataatctgtggaaagtatagaacgtgatccctacccttgagggataatgaggggtcactttatacttcaggga

SEQ ID NO: 9233 - DNA, 401 bp, Homo sapiens
ttctgtgcctgctgcaccagtcaaatacttccttcattaagctgaataataatggctttgaagatattgtcattgttatagatcctagtgtgccagaagatgaaaaaataattgaacaaatagaggatatggtgactacagcttctacgtacctgtttgaagccacagaaaaaagatttttttttaaaaatgtatctatattaattcctgagaattggaaggaaaatcctcagtacaaaaggccaaaacatgaaaaccataaacatgctgatgttatagttgcaccacctacactcccaggtagagatgaaccatacaccaagcagttcacagaatgtggagagaaaggcgaatacattcacttcacccctgaccttctacttggaaaaaaacaaaatgaa

SEQ ID NO: 9234 - DNA, 409 bp, Homo sapiens
accattcttttactctgagttcttccattgtgatcatctagtcagatgggtagatccttataaggctgagcataataagcttcctgatagctctacactggtatgttttggggttcatggctgagctacttttgtgttttatttatcttcctgatctctttttcactgtaagaaacatccagcacccagggaaatttgctgtctaattcatactccactcttcaaactagtcctagtgttcagttttgttttgttttttttctgtgtctggaattctattaaaatgtgtcaggctgttttaatttttgttgtttaattttctttcacatgattatatgtgctccatggatttttttgtttgtttgtttttttgtttttgtttttgtttaagcggggtcttgctcttgtc

SEQ ID NO: 9235 - DNA, 254 bp, Homo sapiens
aatctgtacaaattattagtttatatagaatttaggcaacaaggcaaacaacaaaatgtaaaactggaaccacgccaattactggaaatcaagtatatatggaagagtcaagatcaaataaccaaaatccccataaattgtcaagagtttgagatcagcctggccaaaatagtgaaaccccatctctactaaaaacacaataattagccaggcatggtggcgcacgcctataatcccagctactcgggaggctg

SEQ ID NO: 9236 - DNA, 398 bp, Homo sapiens
acggacgtcaattagattaccatggcacaatacggccggaggtagggcacaggaagttaaaggtatttatcctggcaccagctgcgataatggttatgactaactcagtcagtaactttgaaagtctgtgataaccagcattgaagccaactgtgtttataacatgatggaaagtgtgtttgtgctaaaagcatatctgtgaggtgtgctaagaggtcatcctcaacagttttgggcttcttcctttaaaatatgtgattaacttgcttctggaattgaaaaagtaattctgcagtaagttattttgaagtgaggggtagttttgaagtgaggggtagtttaacactcattaggtgtttattactaataaagtataagctttgtttcaattcttggac

SEQ ID NO: 9237 - DNA, 506 bp, Homo sapiens
tgtccttgaatgacgtcctctttcctgttttatccccaagcccctgtatgtgagatctgccatccttcccctcaagagaatattctcccctaccctttgggtaggagtcctttcatgaggaaggtgggattttctgactaagctctacctaaggcattatcctttggcctaagggaactgaagtttccagcagaagccacagagctttaagataggaccttgggctgggcgcggtggctcacgcctgtaatcccagcactttgggaggccgagaggcaggtggatcacaaggtcaggagatagagaccatcctggctaacatggtgaaaccccatctctattaaaaaataaaaaaaattagccaggtgtggtggcaggtgcctgtagtcccagctactcgggaggctaaggcaggagaatggcgtgaacctgggaggcagagcttgcagtgagctgagatcgcaccactgcactctggtctgggcgacagagtgagactccgtctc

SEQ ID NO: 9238 - DNA, 577 bp, Homo sapiens
tagtattccatggtctactaaaattttaatgaatcattataaaagatgagtggtcctgatgtttcaccaactcttcaacctgtaaaaggaccgcaagagattcgctcaatttatactagctttgatatttttttaaaactgattattttttttagggtggttcacatctgtaatcccagaacagggaggccaagataggaggattgcttgagtccaggagctcaagatcatcctgggcaacataatgagactctgtctctacaaagaaaatcaaaaaagtggccaggcacgatggctcatgcctgtaatcccagcacttttggaggctgaggccggcagatcacgaggtcaggagttcgagaccagcctggccaatatggcataaccccgtctccactaaaaatacaaaaattagctgggcatggtggtgcatgcctgtagtcccacctactcaaggggctgaggcagaagaatcgcttgaatcgggaggtggaggttgaaatgagccgagatcacaccactgcattccagcctgggctacagaacaagacctgtctcaaaaaaaaaaaaaaaaaaa

SEQ ID NO: 9239 - DNA, 293 bp, Homo sapiens
cccaaagtgctgggattacaggcgtgagccaccgcgcccggcccaggtgaaatattattatcctccacctacaaactaagaaaaagaacctgaatgactgcccgggactccctgggtaggagagaggggagctaacaccagagcccaggtccccagctccccacccagggcttcactgcttggctccagtcaataaaatagcacaggtctaaagagtctaaaatctggaggtccccaccagaaagggatccttctttttttaaaaaggaaatatatccaaaggttagaatcag

SEQ ID NO: 9240 - DNA, 545 bp, Homo sapiens
agtacacactcctcagttatgtagattaaacaagaaaacaccagtagtttagccacttgtcaagtttcaacttaacttattatcatcatgatatgaataggaatgtataaaattctcagtttggggtagatgacgctatggttaaaactggaattttgtaatataaagcaagggggaaacaggtataagataacaagtggcaaatgacacaggattaaagaaaaatgagaaaagaaggggagaataaatgaaaatcaaattgaagagggaggaactagaaaaactgtaggacaaagtgtaaatgaaagaaaatggagccgggcgcggcggctcacgcctgtaatcccagcactttggaaggccaaggcgtgcggatcacgaggtcaggagctcgagaccatcctggctaacacagtgaaaccccgtctctactaaaaatacaaaaaaattagccgggcgtggtggtgggcgcctgtagtcccagctactcaggaggctgaggcaggagaatggcgcgaacccgggaggcggagcttgcagtgagc

SEQ ID NO: 9241 - DNA, 453 bp, Homo sapiens
gggagatggagagggaaagcatttggaagacagaaactgaatacacaaattgcaaatatttgaaatgaacaagaggtcatttcctacaaattataaatgttaaaatgataagggactattatgagcaaccatatgccaataaatttgtcaatttagctgtaatagaatatttggccgggcgcggtggctcacgcctgtaatcccagcactttgggaggccgaggcgggcggatcacgaggtcaggagatcgagaccatcccggctaaaacggtgaaaccccgtctctactaaaaatacaaaaaattagccgggcgtagtggcgggcgcctgtagtcccagctacttgggaggctgaggcgggagaatggcgtgaacccgggaggcggagcttgcagtgagccgagatcccgccactgcactccagcctgggcgacagagcgagactccgtctc

SEQ ID NO: 9242 - DNA, 627 bp, Homo sapiens
ggattccaagacctgcagcctatatgaggtatgtaaaagctattttcataaggaaacaagcaggttgcacatataagcccaacacagattaggtgctcagttgaatcacattttgcagaaagttgtggtctgcatgtatgactatacctttagtctagctttacaaagacataaaacatgtcataatcataaactaaggataaaaggaccttaaaatctagtcatcttaaggctgggcatgctggctcacgcctgtaatcccagcattttgggaggccgaggcaggcagatcacttaaggtcaggggtttgagactagcctggccaacattgtgagaccctcatatctactaaaaatacaaaaattggccaaacgcggtggctcacatctgtaatcctagcactttgggaggctaaggtgggtagatcaccagaggtcaggagtttgagaccaacctggccaacatggcaaaaccccatctctattaaaaatataaaaattagcctggtgtggtggtgcatgcctgtagtcccaaccactcgggaggcggaggcaggagaattgatttaacccgggaggaggaggttgcagcgagccaggatcgcaccactgcactccagcctgggc

SEQ ID NO: 9243 - DNA, 518 bp, Homo sapiens
ggctggtcttaaactcctgacctcaagcagtcctcttgtcttggcctcccaaagtgttatgattacaggtgtgagtcaccacacccaacatgtgtctatatctgtagatacagatacacacaccatttctacctgaatatatagcaatatatatgtgcttccacattctttgtctacatgtttttttttcctccaggatgaatctgtgatgatgaataaaaaagtgaataaaaaagttatttttattcaggtgtagataaactacttctgtttctctcaagctgctataacatgggccatcttgtttggttagaatgtatagtcaattccttagaatccagaagaggagtcattaattcttgctggaagataagggccaagctgtaacttctggcatatggaggaagatcctgactcaggaacaagtacatcacacttggagtcatgagccctcatttggagttccaattctgttattacctcaataggtgaaacccatgcttctgcgtactctacca

SEQ ID NO: 9244 - DNA, 479 bp, Homo sapiens
aacctagaattatgttcccagtgaaataacttttaaacataaaggcaaataattcattttcagataaacacgaagtgggtatttaccgacagaagacatagactataagtattgttaaaggcacttcattaggcataaaattatgataccttataaaaaacaaaatttatgaaagtaaatgaagaacacaaaaatgttataactgtgggaaaatgtaaataattgtattggatttttaaattgtatctaaagagaattgagtaaatagaataaaaaactgatactaatagacaatatctaaaacaaaattggcaggatagtgaccgcagcaaaatgatggattaagacttttcagcaattatctcctcacagaaacgtcagtttgaacaattatccatccacaaaaatactttcacagaactaaaggatgcagataagatgttacagtaccaaagattaacatggaaattaaaattaat

SEQ ID NO: 9245 - DNA, 365 bp, Homo sapiens
tagttttcaaactctggcaactctgtgaaaaatagagcaaactagagagccctggagattggtagtagggaagggaggatagcaggaagtttgaaaaattagcagccccggggcctaaaggaatcagctgtcatcattttcatcattattattttggttaggatggcttgaaaatcagaacgtatcttggtttacgtaattgaggtcttaaagaactaagaacagttaaatagtcacaactaccaccctctgacttacataatcattggtgtgggcttcgttttgcctttagagtcacatctttcagtaaattcacagagatcaagagggacgtgcaacatacagcttaaaggctgttatgcttc

SEQ ID NO: 9246 - DNA, 285 bp, Homo sapiens
  misc_feature 79: n = A,T,C or G
ggtcacaaaggtattgacttttggtcagaagttccagggggcgagaagaatgaactaactccatgcattctttttgtgnttttggttttggtttttttgagacggagcttcctcttttgcccagctggagtgcggggctcaatctcgctcactgcagctccgcctcccaggtcacgccttcttctgctcaggcttcgagagctggactacagggcccaccacacgccagctaatttttgatttttagagagacgcgtttctcgggtagcaagatggctcgactcc

SEQ ID NO: 9247 - DNA, 318 bp, Homo sapiens
atgacagaaaatgtttttatgctgtacatgccttttgaacatttttcaaaatacttgtaactttgaagaaagtgtgtatattgttagaaggctgtaaggagagcaggtctctgctctggtggtgattttactcaagaggggatgtgaatatttatatttttgtgtggatttctgtgtaggagtttttgtatgtatggaagaaagagaagaaaatactcaaatacctgaggataatttgctcaggagtcaaagtgataaactagtttaatgaattaaagcatggttttccatgacaatttttaattacatcctttgcca

SEQ ID NO: 9248 - DNA, 100 bp, Homo sapiens
cccactctgtgagctgtctgtggctccgcctacacacagctcctcaccctgaagctgctgggttcccctgcatcacacgcccaccttccccagtgaaccc

SEQ ID NO: 9249 - DNA, 365 bp, Homo sapiens
gctgtcgatgagagtactgaccatgttggccatcctggtcttgaacttctgaccccaaatgatctgcctgccttggcctcccaaagtgttgggattacaggcgtgagccactgcgcccagccttgaggtagcatactttctgaaataaaaaagtagattatgtccgaagcagttgacctaaaaactgccttggactgacatttgttaggtggtctaagatgttctcttcacgctttgcaaaaaaatgagcttttttggagtttaaattaagcatccctctggtgtgtttggttttttagccaccaaaaatttaacaaatttgataacctgtcacgtgtaagttcagaaagcactttggtcttaat

SEQ ID NO: 9250 - DNA, 99 bp, Homo sapiens
ttcttctttcttcctaacattttcatgtgagatccagaaaggacacattgtctctggccattcgaagaaagaaagaaagaaaaaaaaaaaaggttttta

SEQ ID NO: 9251 - DNA, 350 bp, Homo sapiens
cgttgatgggacctcagagtcacttgaggaagcaacatttgagcagcatctaggagccttctgggaaaagatggagaaaactaaagacgttaggtttattgcaaaccaatcaatcatactcactgatcacctactagaggaaacctgtgataacacttgtggggagatttatagaaagaagacgtatttgcacatcaggattttacatcatgatgtgtgcctgtgtgtgtctgaaaaatactagcataacaagctggtgagtacactatgaaaaaaaacaacaacacctacttcatttggcagagcaccagaaatgagggggtaatgaggtcctgtctttgtggcatggt

SEQ ID NO: 9252 - DNA, 395 bp, Homo sapiens
ccgttgctgtcgttgtccttttctaatagttcgtgttttagaaattcagaacaaacaatttctgaatgctcctcagaacgccaactcaggcagagaatctcaccgaaatagagaagaagctcatgctcctggaagaaacagcccgaggagagccgctgggccacatctggccactgtccgcagcgctgtcagattgctggggccacatctggccactgtccacagtgctgtcagatccaaggagagccgctgggccacatctggccactgtccacagcgctgtcagatgccgaccaaaccctgctttggtgttgaggtggttcgtctggtagcctcctttcttaagggtatttaatctgctgcaaattgttttcatgtatgcaatagatgttact

SEQ ID NO: 9253 - DNA, 446 bp, Homo sapiens
attccgttgctgtcgataccaagtgctctacaaggcaacctgtgagcccagactggatcctggaccagaaaaaggacactagtgagacaactggcagaatttgcataagaagcacggcctcggcctcgggtggtggagtcactgctgagcccatgacgttctgcttatattccatccctgcatttggaagtcgttctttgccaggaggaaagtgaggaaaaaccagcaataacaaaacagcagctctactgacggaggaggaggagcccaggaggcggctggtcagggcccaggtgtggagggaggccaggcataggcaccccgacttctctggaactactgacattttctcgcaagcagagaggaagatggaaaggtcagggaggagaatgagggaggggtctgccgcggggagccacaaactccgtggggcacagaaagtgcaa

SEQ ID NO: 9254 - DNA, 394 bp, Homo sapiens
tctgtacagcagcagtcacctattttttctcgttgaatattttcgatccatggttggttgaatccacagatgtcacactcacagatatgaaacccacagatagagagggcttactgtacttagatggaaagtaaagaagaataaaaggagttagagagaggccggaaggatcttttagaaaaggtggttgggaaagaactttctgtgctggtagcatctgaccagagacctgaatgatacaaagaagctaatcataccaagatcagaagggacaatgaactcttaacaattgttcctctgaaacaagttatttgtagaaggaaaacaaaggtaacgacagtataaaaaagaaaagaaaactaggccaggtgcggtagctcacgcctgtaatccc

SEQ ID NO: 9255 - DNA, 609 bp, Homo sapiens
gagactttttttatcagactgaaatccgtcctgcctttttagaatgagctcatttttcttcactccagctaatgctgacatttaccaaatccagtcctgattaagtaagcttccatcaccaagaaaactggaaaaaaggtaggattcataagacagtggattcccatccagtgcttgtagctctgttatcctctttagaagtatctgagggttaacaaaattggaaattgtagaggaaacaaatttgcactgaatttagacctaatttacctgaaaatgggattcctttaaaatccacagtgagcccacagttttgtcctgtgactgagattcagtcacaccttgaccatgtatttatttcataaattaagccttcaggccaggcatggtggctcacacctgtagtcccagcactttgggaagctgaggtgggtggatcacctgaggtcaggagtttgagaccagcctggacaacatggtgaaaccccatctctactaaaaacacacagtactaaaaaacatctctgctaaaaacataaaacactacctgggcatggtggtgcgcacctgtaatcccagctacttgggaggctgaggcaggagaattgc

SEQ ID NO: 9256 - DNA, 619 bp, Homo sapiens
aacacaagtcaaagacaagtgtcaacatgctttcaaccaacattaatgaggaaacaagacacaaattctttttctttttttattttattttatttttgagatggaatctcgccctgtcgcccaagcttgagtgcagtggcgtgatctccactcaccacaagctcctcctcctgggttcacgccattctcctgcctcagactcctgagtagcggggactacaggcgcctgcaacaacgcctggctaattttttgtattatagtagagatggggtttcaccgtgttagccaggatggtctcgatcttctgacctcgtgatatgcccgcctcaccctcctaaagtgctgggattacaggttgagccactgagcctggccctgtttgttcttttacattaactttacaatatatttgccatgttctaaaaatgaatttaattggaattttattgaaattatatgagacatgatttagtccaagatgaacacacaacattattattactctttccatccagctatggcatatttctttgttttctctagttggcctttgtatcgctcaataaaatttgtggctctggtatatttcataataatcatacattatatttcattatt

SEQ ID NO: 9257 - DNA, 290 bp, Homo sapiens
ttagcattttttcccactggttctaaatgaaccccatcctccttactttaaaccttcagaacagttgcctatagatagagttattagtcagacatttgggaatatctaaactacagaggaatgctgaggaattgtagctacacatgatgattgcaatttcaaggaaagggaatttatgctgaaatatttgaataacttcccctcttagtttttactatgtcaaaaaaattcatgtaaatgtatccctttacacaattggtctactgaaatttttggtgaaactaaaacac

SEQ ID NO: 9258 - DNA, 466 bp, Homo sapiens
atctaagatgatcattttcccactcgaactgagtgaaaaaggtgtttattgttgcagaaaacatctgcgtataggtattggatgctagtggtgcatatatgaatacctatctctgctcttcaggtggtcacagtccactgggggagaaaaacacagatacttagtacaatttattctatactgcagatgtgcagagtgctgtgggtatgtagataactttaagctgaatcttggtcggtgagcaggtgttcagaagatagacttagtggccaagtgcggtggctcacgcctgtaaccccagcactttgggaggccgaggcgggtggatcacttgaggtaaggagatcgagaccatcctggccaacatggtgaaaccccgtctctactaaaaatacaaaaattagctgggcgtggtggtgcatgcctgtaatcccagctactcgggaggctgaggcaggagaagcgt

SEQ ID NO: 9259 - DNA, 92 bp, Homo sapiens
gagcaagactccatctcaaaaaaaaaaaaaaaaaaaaaaaccccggcccggggaccaaaaccgggaatcccaggaatttggggggcccgggg

SEQ ID NO: 9260 - DNA, 372 bp, Homo sapiens
cctcccaagtcgctgggactacaggcccacactaccacaccagctaatttttaaatttttctgtagagatggggtctcactgtaatcttgaacagctggcttcaagcaatcctgccgccttggcctcccaaagtgctgggattacaggcatgagccactgtgcccacataacaatgtttcttaagtgaatacatgaatagctcatcatctatggaatactgtgctttacaccaagtagtttgcatttattatttagtattcataacagtctacctgcaaccattgcttttcctattttatagaggagccagaggctaagtaaattcctcagtctcacacacagtgaatggcaaagcctgggttcaaattcag

SEQ ID NO: 9261 - DNA, 573 bp, Homo sapiens
aatatttatattgacagaaccatattttcccaaagttaatgttatttctgggtgataaaaatgggcatttcttgataggaatttggtcctgtatctaagattaaacttcctttctcacatacatctgctctgtgttgccatataagtgatgggcagtaatgacatttttgaaatcactcaagccataatcctgctactccctcattccttacatagagatggtcaccaggaatactatctagttgccaatccctaatacctctctaatcaaggcacttgtttctttctcaccgtcttagttaagatatcctcatcattcaccagcagtttttaaactccagtgagcttcagaatcaccctccagagcccaggaaaaaatccgaaggaccagcctctacccaggaggttctgattcaaaagggaaggacaggacaggcctggtggctcatacctgtaaccccaacactccaagaggtcaagtcaggaggatcccttgagcccagaagttagagaccagcctgggcgacacagtgagaccccatatctacaaaataaaaaataaaaaaaaaatta

SEQ ID NO: 9262 - DNA, 487 bp, Homo sapiens
  misc_feature 420: n = A,T,C or G
ctactgtcattatgtctggctaacaggagaaactctgtgagtagctattaattaacaaagacaaagcacattaaagagaaaatggaaggagggagggaggaaggaaagtaaagtttgagaggaaaagaatatagattcataagtcctggggataagtaatgaagccttatgcttgctatattttttctttctggaaatatagtagttgtctgtggtgaaagaagaaagaagaaattacttgaacaaagagtttaaataaagacttgactattacaatgttaatgccaacatactacccaaaacagtggattgcccataataggttccataaatataattacgtttgattaaatcaaactggaaataccacagatttctggtattcttcataccactccaaaaggataataacagtaatanagtatttcatatatatacacacacacacacacacacacacacacacacacacacacacacacacaca

SEQ ID NO: 9263 - DNA, 612 bp, Homo sapiens
acagaaagtttcacgcaccaagatccatcaggaactataaaatgtttgttgtagaatctggcactgtacatacccactaaggcaaggcagatatggaagagtctgagatgacagtagaaatttagactgttggtcaaggcatgttgtctccaaggtaaaatagttttcgattaggatataggaaaatagaactatgtggcgttctgagaagagtgaaattcccagcaggtggtaaagcctagagatgcagactctagatgggcaatttccacgttcagtgttttagtcatatctcatttaatgatcagaagcaggaagtcatgaaatctagcttaagtataaatcaaaataagagttacgttgaggccgggcgcggtggctcacgcctgtaatcccagcactttgggagaccgaggcgggcggatcacgaggtcaggagatcgagaccatcctggctaacacggtgaaaccccgtctctattaaaaatacaaaaaattagccaggcgtggtggcgggcgcctgtagtcccagctactcgggaggctgaggcaggagaatggcgtgaacctgggaggcggagcttgcagtgagccgagatggcgccactgcac

SEQ ID NO: 9264 - DNA, 358 bp, Homo sapiens
ttatgactttgactatattttacaacttgaaaaattttcatttttatggtgccatcagcctgctacttaatagaaaatgttttattgacatttatgttctttacctaatgatgtgtatttaaatgatggctgtcatcttcattagaactgactgttgaaagagtaataagaatgagaatacagaaacctggtctcattttaattgtacaaactgagaacataacattgggctgaacatttcaccaatttgactacaacatttaatttaaaaataatatatatctccaatattgtatgatcattattattgtgatttattatgcttactgacacatgaaatatatgtatatatgtatat

SEQ ID NO: 9265 - DNA, 91 bp, Homo sapiens
aggatgactgctggcaactgctgatgaaggagaagaagttgcttggaggtcctggggcccgtggcaagacaaagggaatttggtaaaggag

SEQ ID NO: 9266 - DNA, 313 bp, Homo sapiens
ggcacgaggtccagggtacagttcctttagaggttcctcaggtgaaaccaaagagaactgatgatggcaagggattagggatgcagttaaaggggcccttggggcctggaggaagggggcccatctttgagctgaaatctgtggctgctggctgccctgtgttgctgggcaaagacaacccaagcccgggtccttcaagggattctcagaaacccacttccccactgcagtcagcaggagaccatttggaagaagaactagatctgttgcttaatttagatgcacctataaaagaaggagataacatcttacc

SEQ ID NO: 9267 - DNA, 314 bp, Homo sapiens
cctgagtgacagagcgagactctgtctcaaaaaaaaataaatgaataaaaaataaaacagcaactcttgcagatttcccgaatgtattggtcccagagaacactgaaaataatgtcatgttgttaacaccagtgggagtttgggaaataattccagctctttaatacttctttcagcttcagattaagtgaaatgagtttcacatatttcaatatatgaaattttatgatgacacataaaacaggccaggggttattgaggacacatctgtgagatagtgggcaatgctacatattcgttagtggatgtgctgc

SEQ ID NO: 9268 - DNA, 183 bp, Homo sapiens
ggcacgagccagctacactggaggctgagtcaggagaatcacttgaacgtgggaggcagaggttgcagtgagtggagatcgcaccactgccctccagcctaggtgacagaatgagactctatctcaaaaaaaaaaaaaaaggttttcgttggggggttgctcttttgggggcccaaccccttg

SEQ ID NO: 9269 - DNA, 542 bp, Homo sapiens
ggcacgaggtttccttctcctccctcccgggacaaggtgtcatatacaatgtcattgtttgggacccgtttctaaatacatctgctgcctacattcctgctcacacatacgcttgcagctttgaggcaggagaaggtagttgtgcttcccttagaagagtgtcttccaaagtgttcttcactctttttgccctgcttggtttcttcatttgtttctttggacacagattctggaaaacagaattattcttcataggctttatcatcatgggattcttcttttatatactgattacaagactgacacctatcaagtatgatgtgaatctgattctgacagctgtcactggaagcgtcggtggaatgttcttggtagctgtgtggtggcgatttggaatcctctcgatctgcatgctctgtgttggactagtgctggggttcctcatctcgtcagtgactttctttactccactgggaaacctaaagatttttcatgatgatggtgtattctgggtcactttctcttgcatagctatcctcatt

SEQ ID NO: 9270 - DNA, 118 bp, Homo sapiens
ggcacgaggtacttcctaggagtggttgcatttgggaatggaattgttaaaacttgatgcttaggagcgaatgcagactattcattgggtgtttggggtgggggaagggggggtgggc

SEQ ID NO: 9271 - DNA, 533 bp, Homo sapiens
ggcacgagggcagagtaagtacggtaatttctgcacccgaatgggtagtgttgcctttgaagtagtcaccttgggaagatgtatgtttattccagtgaagctgaccttacacagaacattcctagaaccctctttagaaactgtcaacttgtaagggtcttcagtgttggtaaatctttgtcctttaagggtagatctattttttgaggaatgatttttttttttaacagctaaagagcattagaaaataagtctgctaaataaaatgggtgaagcagctcaggatgatcttggtgggcaggaggaggggttggataaaacacaaggtctgactataaagttgtgaggcctcttgccttgcatggcttcaaaggtaatcccaaaggggaaccctaagtgttcttggcacatgcaacatcaagaaaataactccaattatgctaactcttgagtgcatatgttctagtgtatttggttaaaaaggtggctttgttcattttcagtcatatttcgtataagcagaaatggaaaac

SEQ ID NO: 9272 - DNA, 304 bp, Homo sapiens
tccattatctagttgtcagttcttatcttacttgtctgcccctggcactgttcttcacagttgtactcgctcctttttgcttccaaattacattttcctcatctggtactgagctccctgttaactttctttactcttggttttagcatttccatttccttgaatgtgccagagctctgtcctctgggtctttgtacaggttgttccttgggcctacaatactcatttccaaacttttcacttaactaagaattgcaggcctcagcattaatgctacctgaagctttctctaatcctcatttaa

SEQ ID NO: 9273 - DNA, 427 bp, Homo sapiens
ttatctattgctgggtaagaaattactacaaaacatagtgactttaaacacttgatcttagccaaaggccgagaagtgatatagtggcttaaaaaaatatgtacatatgaacttagtatatttttacccagagcactaaaggtgaccctaattgattttaaatccctgaaacaaggtgtcctgtattccaggccatctattgtctgtagatttgcaaatctttggattcatttctaagtgtaccagtttcttcacactttaaatgttcacacttttaaatgttcatgctttaggctgggcgaggtggctcatgcctgtaatcccagcaatttgggaggccgaggcaggcggatcacctgaggtcaggggttccagaccagcctggccaacagggagaaacccagtctctactaaaaatacaaaaatt

SEQ ID NO: 9274 - DNA, 578 bp, Homo sapiens
tagattatttcttcttaattaacagtacaaatagaatatgtcttctgactagagttaataaagacttctgactagagttaataaagacaagatgactcattaaaacaatggtactaaatattaaacacttattttatttctctcaacctccaatcacgagcccccagttaaatgcattaaggaattttatttatttatttatttatttatttatttatttattttgagacggagtctcgctctgtccccaggctggagtgcagtggcgtgatctcggctcatggcaagctccacctcccgggttgatgccattctcctgcctcagtagctgggactacaggcgcctgccaccacgcctggctaattttttgtatttttagtagagacagggtttcaccgtgttagccaggatggtcttgatctcctgacctcatgctccgcctgcctcagcctcccaaagtgctgggattacaggcgtgagcccccgcgcccggcccgttttaaggaattttaagggcatcaaacttatttcaccagggtagataaataagatatatttataatctcaggtatgaaag

SEQ ID NO: 9275 - DNA, 159 bp, Homo sapiens
cccaggagggttggccggacacagtggtagtggctcacacctgtaatcctaatgctttgggagcctgaggcgggaggaccccttgagcccaagaggtcaaggccacaatgagctatgatggtgccactgtactccggcctgggcagcagagcaaaaccc

SEQ ID NO: 9276 - DNA, 559 bp, Homo sapiens
cacccaggctggagtgcacgggcacaatcatggctcactgcagatccaagctcctgggctcaagtgatcctctcacctctgcctttcaagtagctgggactacaagtgccagccatcccacttggctaattttgtttcaagagatggggtctctcaatgctgcccaggctagtctggaactactggccttgagtgatcctcctgcctcgggctcccaaagtgctgagattataagcttgagtcatcatgccaggccagatggtgcacagtttttaaatgaaatatttaaatcatataaaaactcatggggaataatataacgaatataatacgatacaatgcatacaatgaacaacacaatggcctaatatatgacaagtcacctttattatctatggacctctttttacccctccagctctccccaccaatgaaaaccattatcaggccaggcacagaggctcacacctatgatcccagcactttgggaggctgaggcgggcagatcacctgaggtcgggagttggagaccagcctgaccaacacggagaaacctgtc

SEQ ID NO: 9277 - DNA, 521 bp, Homo sapiens
ccaccatgactggcaaattttcgtattataagtagagatagggtttctccatgttggtcagactggtcttgaactcccgccctcaggtgatctgcccgcctctgcctcccaaaatgctgagattacagatgtgagccactgtgcccggctgcctgagacattttgggcaacagccgtgacagaagaaacgtgcatcccttctgtgcaggggatttaagaagtggctcatggctgattatgttttctttgctccgtttctggaactgtgggagcatcttctgggataagggtctatctgtttgagtctctgaatgactacgaccaccagagcccccttgttggcccgtgatggatgcgaaatcaattcagaagtaaaggccgggtgcggtggctcacgcctgtaatcccagcactttgggaggctgagacgggcagatcatgagttcaggtaatcgagaccatcctgactaaaacggtgaaaccccatctctactaaaaatataaaaaattagccaggcatt

SEQ ID NO: 9278 - DNA, 584 bp, Homo sapiens
cctttactacttcttggttttctgacactgagaaggtcatttagcttctccagatttttgttttctcatgtgcaagataaaggagttgaacaaagacagtggttttcaaactggattccgaggaaccctagggttccaagaagacatgatggtgagaagagcaaggcaaaagggaaagaagacaattgttaatgagcaggacccccacttctacccagattgctccttcttgctctgttttgtctaccatgcttccacacaatactacacttaatcaaagggttttggcagggcacagtggctcacatctctaatcccaacgctttgggaggccaaggaagatggatcacttgagctcaggagtttaagaccagcctgggcaacatggtgagacaaaaaatataaaaattagctggacgtggtggtgcatgcctatagtcccagctacttgggaggctgaggtgagaggattgcttgagcctgggaggtcgaggctgcagtgagccgagatttcaccactgcactccagcctaggtaacagagtgagaccctgtttcaaaaagaaacacacatacacgcacccc

SEQ ID NO: 9279 - DNA, 448 bp, Homo sapiens
tatttttgcgtggaatataataatatctgaaacctccacaggtcctttatacataacattctacctacaaataagagtcactacacatgtgaagcagcaatgtcatatgaccaataatcaagaggggaaaaaaaaagcaaaacaagcaaatagatgatctgcataattgaagttaacagacaagaactttaaaacaaccataattgggacttctggatagctaagggcataacagctgcaccatttagctatatgcctccctgtatttcctccctaaagaattaaaaccaacaaaaaatggtatgtaaatctagacgaaaccatgccttcggcataacttgaagacagagaatgctaaaatattaaaatgaccgtgactaggctgggcacagtggctcacacctgtaatcccagcactttgggaggctgaggcaggtggatcacttga

SEQ ID NO: 9280 - DNA, 565 bp, Homo sapiens
atctgtagaagcaactgaggcttcacctatgatgaaagactttggagtcagactgcttaggtttaaatcccagttccattatttatctatttgccttatgactttggaagttacttaacttctctattcctgtttccttgtctgtaaaattaggataataattgttcccaaatcataaagttgttatggggagtaataagatagagtgtgtaaaatactccatacagagcctggaccatagttaagagtaagtactctacaaaaacttgtttttgtcattagagatacaataaaaagttatgaaccaaagtggccagtaaaaaaaatgaaagtttttatatactgagcatctataatgtgtcagtcattatgttaaccagttttcatacattatttcttttaattttttgtcttcgaattattttaaaagaattaaaagaacacagtatgatttaatgtgaaaacgaaaaagagaagattccagctgggcacggtgactcacgcctgtaatcccagcactttgggaggcctaggcagttgaatcacgtgaggtcaggagttcgag

SEQ ID NO: 9281 - DNA, 547 bp, Homo sapiens
  misc_feature 322: n = A,T,C or G
gagcagaggtcagggcttcatataaacagcctggtccctaactgcttcccttctgcagtcaaccccaggaatggactttttgttcagtgtctcctttcatcctctttgaagagatgcaaatttgaacagacggtgtcgctgttgggaactgttttgtccctgccatcaattgtatgttcctctctgtgattatctggtgagacagtgcaaaaatagggacaaaactaacaggaaaaaatacaaggaaacaggaaactctagcgtacaggagttggccagcataatttatttttttcttatgcatggtcatgctatgtggttntgtaaacttcctttttaaaatcatggttgattgaacatttaagaaaagttttgactggacacggtggctcacgcctgtaatcccagcactttgggatgccaaggcaggtggatcacctgaggtcaggagttcgagaccagcctgaccaacatggagaaatcctgactctactaaaaatacaaaattagccgggcgtggtggcgcatgcctgtaatcccagctact

SEQ ID NO: 9282 - DNA, 287 bp, Homo sapiens
  misc_feature 130: n = A,T,C or G
caatctcggctcaccacaacctctgcctctcgggttcaagtgattctcttgtctcagcctccggagtagctgggactacaggcgcacgccaccacaccaggctaatttttgtatttttagtaaagacggngtttcaccatgttggccaggatggtctcgatctcctgacctcgtgatccacccgcctcggcctgggatgacaggcgtgagccaccgtgcccggtctaaaattttattttctacagttctaacacccagaagtgagattgctggatttttgatttctg

SEQ ID NO: 9283 - DNA, 216 bp, Homo sapiens
attcttttatctcatgtagatttcaaaggctgaaataattgagattttttagtttgaagaaaagagaactgaggatttaatgtacattattattatatttttaatggactgtttgggagtaagttgcagacattgttcactttcactcctaaatacttaaatatttcctaaaaacaggacattcttttttttttttatggagtctggctctgtcgt

SEQ ID NO: 9284 - DNA, 329 bp, Homo sapiens
cacgagattttttttgttcgaatgagccttaatcttttactagtgattttttgtttgaaggagccttgatcttggaccaccgaaaaggtgaaaccagtggcaagcttgaatgcttgttttatggtagacttagatacgagaacgggtaaagggtactggataaacttgggatataagattgtcttcttttatgcataccactcataccactggtgggaaatttcatttggaattactccctagggccatggagtcttcctgcatatgctaataatgtaagttcccattacctttggtaataagaaaatatctttaaaacaagttagctt

SEQ ID NO: 9285 - DNA, 420 bp, Homo sapiens
ggaacaaatcacttaaggagaaagtagaaaaaaagctgtattttatcaaagaggtattctaatcggcaagacaatgaccaaccattacgaccaaccattatgagaatatagcttagggacgtttgtgctcagctcctcttttacccaatgtcaatgcctgcctcagtgtattttcttctggaggagagttttgtggatgccatctttccgttacggaaaaccattggaggaatgggcagtttcttgccatgacccaccatcatttaaacaattggtgtttgagttcagaaataagctcatatatacttgaattccatgggttaaataagccattgagttaaagtggtaagaaattaaaggtagaaaatagaagaatagggtgggcttggaggcttatgcctctaattccagcactttggg

SEQ ID NO: 9286 - DNA, 78 bp, Homo sapiens
ggcacgagagcaattccactcctagctccacccacaggaattgaaagcaaagacgcaaacagatgcctgtgcaccaaa

SEQ ID NO: 9287 - DNA, 646 bp, Homo sapiens
tccgaagaaaaagactgtggtggcggagatgctctctccaatggcatcaagaaacacagaacaagtttgccttctcctatgttttccagaaatgacttcagtatctggagcatcctcagaaaatgtattggaatggaactatccaagatcacgatgccagttatatttaatgagcctctgagcttcctacagcgcctaactgaatacatggagcatacttacctcatccacaaggccagttcactctctgatcctgtggaaaggatgcagtgtgtagctgcgtttgctgtatctgctgttgcttctcagtgggaacggactggaaaacctttcaacccactgctgggagagacttatgaattagtgcgagatgaccttggatttagactcatctccgaacaggtcagccatcacccaccaatcagtgcatttcatgctgaaggattaaacaatgacttcatctttcatggctctatctatcccaaactgaaattctgggggaagagtgtagaagcagaacccaaaggaaccatcaccttggagctccttgaacacaatgaggcatatacatggacaaatcccacctgctgtgtgcataatatcattgtgggtaaactgtggatcgaacagtatggcaatgtggaaa

SEQ ID NO: 9288 - DNA, 300 bp, Homo sapiens
ctgccccccaccagcagccccagtgaacaccgcagggtggagcatggcagcgggcttacccggacccccagctctgaagagatcagccctactaagtttcctggattgtaccgcactggcgagccctcacctccccatgacatcctccatgagcctcctgatgtagtgtctgatgatgagaaagatcatgggaagaaaaaagggaaatttaagaaaaaggaaaagaggactgaaggctatgcagcctttcaggaagatagctctggagatgaggcagaaagtccttctaaaatgaagagg

SEQ ID NO: 9289 - DNA, 53 bp, Homo sapiens
cagccgaggggtccggccagtctctttctcaaactgggagaagctggatgccg

SEQ ID NO: 9290 - DNA, 317 bp, Homo sapiens
ctgtcgcccaggctggagtatagttgcgccatctcagctcactgcaacctccacctcctgggttcaagcaattgtcctgcctcagcctcccaagtagctgggactataggcatgtgccaccatacctggctaattttttttatttttagtagagacaggatttcactatgttggccaggctggtctccaactcctgacctcaggtgatccgtctgcctggactcccaaagtgctgggattacaggcataagccaccatgcccggcctacaaaaaatttttaaaaaattagttgggcctctaaccccagcactttggg

SEQ ID NO: 9291 - DNA, 207 bp, Homo sapiens
gcaaggccttcagctggccacgacatgtggccatagctctgatcctgcttgttttggtcaatgtccttgtcatctgtgtgccaaccatccgggatatctttggagttatcgggtccacctcagcccccagcctcatcttcatcctccccagcatcttctacctccgcattgtaccctctgaggtggagcctttcttatcctggccca

SEQ ID NO: 9292 - DNA, 475 bp, Homo sapiens
tggcaccattgtagggatctttctctttctcctgatctcaaagaaaaggtttctatatttcaccatttctatatttcaccactaagtataatttttgctgtaagttttttgcagataacttccatcagaatagagaagtttgccaagagttcgtatctataaatgaatgttacttttataaaacattttttctggctgggcgcggtagctcacgcctgtaatcccagcactttgggaggccgaggcaggcggatcacgaggtcaggagctcgagaccagcctggccaatatggtgaaaccccgtctctactaaaaatacaaaaattagccaggcatggtggcacacgcctatagtcccagctactcgggaagctgaggcagaagaattgcttgaacccgggaggcggaggttgcagtgagccgagaacgcgccactgcactccagcctgggcgacagagcgagactccgtcccac

SEQ ID NO: 9293 - DNA, 497 bp, Homo sapiens
ggatcaaaaggagacttaagtgattgagaaaaacatagtggaatccggaaagaatgacacctgaaacaaagatggtgagtataataacccatctatcctgtgtgtggttgttttttctcagaatgagggagaagctataaagcaaagatctttatctttatttacaataactcataagtaatataaacactgacttggctcttattataactgtatctagggtaccatgaactttgagtgactgagtgaagatggcagacccatactgtatctaactatagacactttttgaccaataaacaatggggcttgcagccaggcacagtggctcatgcctgtaatcccagcactttgggaggtcaaggccggtggataacttgaggtcaggagtttgagaccaccatggccaacatggtgaaacaccttctctactaaaaatacaaaaattagcctggcgtggtggcacacacctgtaatcccagctatttgggaggctg

SEQ ID NO: 9294 - DNA, 562 bp, Homo sapiens
tccagttgtgctgagacagagcaatgggtttccttcttttacatccttgtgcattgctctattgttatggatgataaatttctaaaagtaaaatcactgggacaaaggatacacacacacacacacacacacacacacacacacacttttttgtgacaggatctcactctgtcacccaggctggagtgcagtggcgcaatcacagtttactgcagccttggcctcccaggttcaagcgatcctcccacctcagactcccaagtagctgggaccacagcgcacaccaccatgcctggataattatttttctcagtttttgtagagacacggtctccctatgttgcccaggctggtctcaaattcctgggctcaagcaattctcctgccccagcctcccaaagtgctgggactataggaatgagccaccgcacccagcctgggtatgtattttataaatattgtgctaacttcaaccaagtttttgattagagctgaacagcacacaattaaaataagatcacttttgaatacttgaaggatgacagatgtctagttcattagt

SEQ ID NO: 9295 - DNA, 116 bp, Homo sapiens
gagcagaggccccaggtggagcaagttggcaaacaggctcctctctccccagggctgccggcaatgggggggcctggccccggcccctgtgaggaccccgcgggtgctgggggagc

SEQ ID NO: 9296 - DNA, 535 bp, Homo sapiens
tcaccttcaatggggaaaacaaactttgtaatggtaggaaacacaacaggtacaataatttacaaaaatatgtttgccacatttcagggcaaggcaaaatgcagtggagacatatgttaaattcttatcattcacatttgttctttttatctttaggatgaagctcttacaccaagtgtcacgagtctggagaacagatgggttgagtagttgttcttataaattagtatctgtggaacacaatcctttatatatcaacatcacagtggatttctggtttggtgcatgaccctggatcttttggtgatgtttggaagaactgattctttgtttgcaataattttggcctagagacttcaaatagtagcacacattaagaacctgttacagctcattgttgagctgaatttttcctttttgtattttcttagcagagctcctggtgatgtagagtataaaacagttgtaacaagacagctttcttagtcattttgatcatgagggttaaatattgtaatatggatacttgaaggac

SEQ ID NO: 9297 - DNA, 509 bp, Homo sapiens
tttggtgaagaagggcggcccggggagcgagtgcgctgagtgggcctgggggccctgcacccccagcagcaaggattgcggcgtgggtttccgcgagggcacctgcggggcccagacccagcgcatccggtgcagggtgccctgcaactggaagaaggagtttggagccgactgcaagtacaagtttgagaactggggtgcgtgtgatgggggcacaggcaccaaagtccgccaaggcaccctgaagaaggcgcgctacaatgctcagtgccaggagaccatccgcgtcaccaagccctgcacccccaagaccaaagcaaaggccaaagccaagaaagggaagggaaaggactagacgccaagcctggatgccaaggagcccctggtgtcacatggggcctggcccacgccctccctctcccaggcccgagatgtgacccaccagtgccttctgtctgctcgttagctttaatcaatcatgccctgccttgtccctctcactccccagc

SEQ ID NO: 9298 - DNA, 585 bp, Homo sapiens
gaaataactgttcataagataagccctcagcacagagcgagaaaaagaagactccccacaattcaaagttcagcaacaagtaatagttcagaggaagcagaaagtgaaggagggtatattacagctaatactgacacagaagaacagagttttccagtccctaaggcatttaacacacgtgtagaggaattaaatttagatgtccttcttcagaaggtagatcatttacgtatgagtgagtctggcaagtcggagagttttgaactacttcgtgaccacaaagaaaagtttagagatgaaatagagtttatgtggcgatttgctcgtgcttatggagacatgtatgaactatctacaaacacacaagaaaagaaacattatgctaatattggaaaaactttaagtgaaagagctattaatagagcacccatgaatggacattgtcatctgtggtatgcagttttgtgtggctatgtatctgagtttgagggtttacaaaacaaaatcaactatgggcacctcttcaaggaacatctagatatagcaatcaaacttttaccagaggaaccctttctatattacctc

SEQ ID NO: 9299 - DNA, 227 bp, Homo sapiens
gatgggggagaggggcgagaaggggaaaaatgggaaatagtctgattttaatgaaatcaaatgtatgtatcatcagttggctacgttttggttctatgctaaactgtgaaaaatcagatgaattgataaaagaattccctgcaaccaattgaaaagtgttctgtgcgtctgttttgtgtctggtgcagaatatgacaatctaccaactgtccctttgtttgaagttg

SEQ ID NO: 9300 - DNA, 75 bp, Homo sapiens
ggcacgagcagtctcctgccggaagaaatgggttgagcccgaaagaggctgtctgaggaagggagagggagggcc

SEQ ID NO: 9301 - DNA, 332 bp, Homo sapiens
gtctgatcatatatcctgatttttaggtaagaatacatagccatgacagcaagagaatatctctgcagcttctgatgtacactgaagagcaaaataacttaagacatgtaaagttaggtgcctcaaaaagtaaacactgcatgctcccaaggggaaaaacaattctacaaaacagagagttaaaaaaagagaaagaggccgggcacagtggctcacgcctgtaatcccagcactttgggaggcgaggcaggtggatcacaaggtcaggagattgagaccatcctggctaacacggtgaaactccgtctctactaaaaatacaaaaaattagg

SEQ ID NO: 9302 - DNA, 473 bp, Homo sapiens
tactgcgctagtcccacccgcggaggggacgcaggcgtgcaaatctgtctcgcctgcaggaagcgccgaaaacgctgcatgcgtcacgctatgtgctgccccgggaattactgcaaaaatggaatatgtgtgtcttctgatcaaaatcatttccgaggagaaattgaggaaaccatcactgaaagctttggtaatgatcatagcaccttggatgggtattccagaagaaccaccttgtcttcaaaaatgtatcacaccaaaggacaagaacgttctgtttgtctccggtcatcacactgtgcctcaggattgtgttgtgctatacacttctggtccaagatctgtaaacctgtcctgaaagaaggtcaagtgtgtaccaagcatatgagaaaaggctctcatggactagaaatattccagcgttgttactgtggaaaaagtctgtcttgccggatacagaaagatcaccatca

SEQ ID NO: 9303 - DNA, 675 bp, Homo sapiens
gctgtcggcagtgcaaaacagttcacgccatgatggaaaggaagttgatgaaggagcctgggaaactaaaattagtcacagagagaaacgacagcagcgtaaacgtgataaggtgctgactgattctggttcattggattcaactatccctgggatagaaaataccatcacagttaccaccgagcaacttacaaccgcatcatttcctgttggttccaagaagaataaaggtgattctcatctaaatgttcaagttagcaactttaaatctggaaaaggagattctacacttcaggtttcttcaggattgaatgaaaacctcactgtcaatggaggaggctggaatgaaaagtctgtaaaactctcctcacagatcagtgcaggtgaggagaagtggaactccgtttcacctgcttctgcaggaaagaggaaaactgagccatctgcctggagtcaagacactggagatgctaatacaaatggaaaagactggggaaggagttggagtgaccgttcaatattttctggcattgggtctactgctgagccagtttctcagtctaccacttctgattatcagtgggatgttagccgtaatcaaccctatatcgatgatgaatggtctgggttaaatggtctgtcttctgctgatcccaactctgattggaatgcacc

SEQ ID NO: 9304 - DNA, 473 bp, Homo sapiens
tcacaccagagcttccaccgacagcagaggggacgtaacacaccttctttcccctccggctttccttccccttctctcccgccttctccttattcataccagaagcgcctcagctctgattggctggagctctgtgctatctcagccaatcacaagccgggctgtgctcctacaccatccgaagagcgaatcgtgcagagaccgtgtctacgattggcctctccctgacaaggatttaattttgaatttttctttatggcgtgggagaggccacagcccggactccatcgactcccccggctcttagactaaaatcatgcccaagttcaaacaacgaagacgaaagctaaaagccaaagccgaaagattattcaaaaaaaaagaagcctctcactttcagtccaagctaattacacctcctcctccaccaccctcaccagaaagagtcggtatttcttcaatagatatatctc

SEQ ID NO: 9305 - DNA, 236 bp, Homo sapiens
ggccccactgtgtccccgactaccacaagcagtacgccccgaggtgctccgtctgctctgagcccatcatgcctgagcctggccgagatgaaactgtgcgagtggtcgccctggacaagaacttccacatgaagtgttacaagtgtgaggactgcgggaagcccctgtggattgaggcaaatgacaatggctgcttccccctggacggacacgtgctctgtggaaagtgccacact

SEQ ID NO: 9306 - DNA, 272 bp, Homo sapiens
tgcagggcatattgctgctgagccagaatgagctgtaccgccagatcctgctgctgatgcacctgctgccgcaagacctgctgctgctaaagccctgccagtcttcctactgctactgtcaggaggtgctggaccggctcatccaatgcgggctcctggttgctgaggagaccccaggctcccggccagcctgtgacacagggcgacagcgattgagcagaaagctgctgtggaaaccgagtggggactttactgatagtgacagtgatgac

SEQ ID NO: 9307 - DNA, 255 bp, Homo sapiens
gcttggttgtcggcatccttcttacgtcgggtggttttactggagtattgggactcatgtgatgctgtgtaaccccatctgcggcgtcagctatgccctgacagtgtggcgattcttccgcgatcgaacagaagaagaagaaatctcactaattcacttttttggagaggagtacctggagtataagaagagggtgcccacgggcctgcctttcataaagggggtcaaggtggacctgtgacgggcagtggcccc

SEQ ID NO: 9308 - DNA, 242 bp, Homo sapiens
gctgccactgtggagcagttcgttttgaagtttgggcctcagcagacttgcgtatatttgactgcaattgcagcatttgcaagaagaagcagaatagacacttcattgttccagcttctcgcttcaagctcctgaagggagctgagcacataacgacttacacgttcaatactcacaaagcccagcataccttctgtaagagatgtggcgttcagagcttctatactccacgatcaaacccc

SEQ ID NO: 9309 - DNA, 85 bp, Homo sapiens
cagtggtggtagtggcggtggcagcatgatgggcggagagtctgctgacaaggccactgcggctgcagccgctgcctccctgttg

SEQ ID NO: 9310 - DNA, 434 bp, Homo sapiens
tgctttctgtttggagctcagaattactttttaaggaattactttttaaggattaaaaagatttgtggttgcttcgtggctttgagaagacagtagagcattttcaggaattaatgaaggggagagatggctagaggagagggtgagagagacttgagttcttggctatgactatcaggtaaccaaataaaatgccctgtggaaatggggaccactgatggaccacaggcatgctgcacagttgatagctggaggctcttggagactttgttggcatgtgggctgcctttcctaacctgtgcttatcacttattgcagagtgggaatgacagtattgacctcacggagctgtgaggtttctctgggatgcagggcaggcactcagtaaatggtagttactgtgttctggtctgtgccatggcgggcagcagctg

SEQ ID NO: 9311 - DNA, 533 bp, Homo sapiens
cgataagaaattgcactggccatgtaggggaagctcgacatgaattatgtagttcatttaaaatgcacatcaaagagagaccactttgtttaacataagtgaactctcccttcaattagatacaacagttactgaactattaatatgtatacaagaaaattaatgcggttggattcttaaggaaagcattacagtatattaaaggtgtaaattcaaagagactcatagttattgaatacactaaaatagttaatattttaggttaaaatgtaaacttatcacctaatttaataatgatgttatactaaacacacacatacaagtatattaagattaaattaaaagaatttgctgcttgccccaacaaatatttgcttctggaagctaagactatgaaacaactatttacttacataaatcaagtgaattcttcaagatttctttcaagacattgttctgtgcctcccaatccaagctaggatgtgataaactaaactccacccatagataaacttcaccctacaagtttaatc

SEQ ID NO: 9312 - DNA, 480 bp, Homo sapiens
tatattgcccaggctggtctcaaactcctagacttaagtgatcctcctgcttcgacctcccaaagtgttgggattacaggcgttagccatcacggctgacctcttctctcactttttcagcaaccatgagtcctctgaactctgttgtctggttcttcatgccagaaaatttgtgggctttctatcagaattttgatgctcaagcactgctggctacagtctgccctcatgctgaaaactgtcaaaacagaaaattcacctgttatagcgtttttttgtccttactccaaaatttgcctgctcttgttcagtatcctgagccttcagggtagctgcttttgtcttttgtccagagtttatagatgtaaactaaagttcagtctggtaaggtttgactaagccattctggaaagaaactcttcttccatcatttctttaaagtaaaattatattaagtgctgagagtaagacatagtaatg

SEQ ID NO: 9313 - DNA, 376 bp, Homo sapiens
ccgaaatacaagtctgtgaattggaatgctgttaagaagatatcaacagagtcacaggagtacaaaggatcaggcaaatatttctgacagatgggaagttaaaaaggcttcatgaggaaattgcttctaagcttggcattgaaggaagagattttattttatttttagtatgtatgtatttatatctcattgccttccagaaagattttgaagtaacttataaaaatacatatatcccaataggacagaataattaattcaggcaatctgactaaaaggggaaaattatgtgtatgaaattaataaaccataggtaagactagatgaaagaaatgcaaaccatgggccgggtgcagtggctcacgcctgtaatccc

SEQ ID NO: 9314 - DNA, 526 bp, Homo sapiens
aagacgacagaagggtacggctgcgagaagacgacagaagggaggttaataacataacttgccctagactaaacatacacacacatgtcccatatgaacccaggagtttatcatgcaaccttctcattatgacttagctttcacattattattcatgcaggaaaagaatgctagcagtaatatttcttgacatgaattagtaagttggtagtataatttacactttttttggtcttgtgatctgatagtaaaaatcagttcattacatcatcattgggtatttgaattaagtaagttttctcccatccttaagaaaaatacaaaaggccgggcacaatggctcacacctataatcccagcactttgggaggctgaggcgggcagatcacctaaggtcaggagtttgagatcaacctggccaacatggcgaaaccccatctctactaaaaatacaaaaattagctgggcgtggtggtgcacgcttgtaatcccagctactcaggagggtgagacaggagaatcactt

SEQ ID NO: 9315 - DNA, 557 bp, Homo sapiens
ctgtgactttcttcatattctttgcatcacccagactgacctatttcagtctcctgaaatgggccacgctctcatacaccttcagacttcttttatgagcaactacaggcattcctgtgtactttgctcctctcatagaatttccttcctgtcattttttggtaaacaagctccataaatattatttgtttcagcctagacaacacctcttgggattctagaagaaaccccctttacttcccataggcgtgtactccccacagcacagtatcttcagtaccatcatagcatttatattaccatagtataatttcttcttcatttcttgggaacatgcttaaaggaataaaatgtttgagagcatagtctcttataccattttagacccagaaaacagcacatgactagctgataatagatgtcagcatagaaatattgaataaataaatagggaaaattattttagactgtaacctatcaatgtaagttccatatcaattagaattgatagtaaaatcagaggacataaaagatatagaataaaatatatgcaactt

SEQ ID NO: 9316 - DNA, 365 bp, Homo sapiens
ttagtagagatggggtttcaccatgttggtcaggccggtctcgaactcctaacctcaagtgatccacccacctcggcctcccaaagtgttgggattataggcgtgagccactgcacctggccccatgtctctaactttggatttttaaattgagataatgtggatgcgcctcacacagtatccaccatgtagtaggtggttattagcgttaatttccttcccctggtgtcccatttcttaactatgggtttgtgtatgtattttagctttcatgttcactagcaattttgctattgtacacacgaattacatggaatttctaccctaaaaattctgatagataaaactatatatgaaaaacctag

SEQ ID NO: 9317 - DNA, 481 bp, Homo sapiens
tcttttgcctttttgtgtttgtgctgcatctgtgtggcggtccccagccctggatccttgaagaagaccatatgcttctctgcaccacagcagcctaactagggcacgttcggctttcaatcatcttaaatacgtcctctgtagcccatcactgccctatgtttatgtttatctattattagatacatatttatttggaaacattttatattgaacaatagatgataaaacatagtacaatatttcagatatatttttccaaagtcttatcaattgtcaacactttgcttgtgttcattctctctctctctctctcttcttgtatcttcctgtgtgtgtatgtgtgtgtgctggaaaaaaaagagttagttttatcccttacttacatctacagataatgctaaaaataaaaatgctacactgcatgaccaaagaattgtattctcagtgaaaacttttatttggaaaaattaaaaaaaat

SEQ ID NO: 9318 - DNA, 102 bp, Homo sapiens
gttattttttagtttaactatgttaaattaaactatgttggtcaggctggtctcaaattcccgacctcgtgatccacccaccttggtcaaccaaagtgctgg

SEQ ID NO: 9319 - DNA, 273 bp, Homo sapiens
gtgaacagccacacctacctatgcacatatttttaaaaattaaaaaataaaatataaggaactgtaaaggaggaatcaaaggaaactaattatagtaaagtaacatatctttcaatagtatgtatttccacatgcatgtctagctacatgggaataatgaaagaggtgcttgcccctcaatttggagtcaccaaaaatgtgatgggtgcaaatgctgggatgtggtggggtgatcagatacctggagtgactttattgagaaaaaaaaaaacc

SEQ ID NO: 9320 - DNA, 510 bp, Homo sapiens
ttgcaaatgtaaccatccagattaaaaaagagcattccaggaccccatgagatgcccttgtattcccttttgattacctctcaccccacaaaatatactatagattagttttgcctgatttgaactttatttaaattgatcatttttaattactgaactgagccttaattataatgtgaaatgagcagaaagatatttcaaaatgtttcatgatggttctttatggccagtatttttgtatatcctgtagaaatatgtcattccctttattttcaaacctcatttgtgagattttagggatacgaatgcctttttgggactggtgtggctgtgttcttcttattaattattactgaagtaaagaggaaatgatatcagcagatgtgcagagcttttatttgcactgaatacactattcatttagacaaaaagatcatttctcaattcaaatcagaatattctaatttaaggctgaaatcagttgtgtcataatctctatggaaacaaagc

SEQ ID NO: 9321 - DNA, 345 bp, Homo sapiens
tacacggttttaaaatatgaatggggccataatatgtctattattctaaaatttgattttaaatactcaatttttttagagcagttttaggttctctgcaaaattgggaagaaggtacagagagtttccatatatacactccccgctcccccactgaagtagctgtggagtgacttgtaaagaaattgtggaaaacattccctatcagcacataaatgaaccaattatttaaaaaggtggatgaaaagccatgttgtggttataatcaacatctatttaatcagtccatatttatggacttaaagatgtttctggccaggcgtggtggctcacgtctgtaatccc

SEQ ID NO: 9322 - DNA, 641 bp, Homo sapiens
atctgacatatgggctgacagcacccatgtcaacccagtacgtcaataatgtgtggaaggcatttaatggctttcttattttaagataagaaatacaaaaataaagattctaatattttctcctcataccttgttttgtctgcccgtcaaaatacacagactggatgttggtggatccttgtctagacagcagattctgagtttagatactgcatccgaacagaggaggagacctgtatttacacgtttgtttttatttctgaacaggttccttacctctctgcacgtgtctcccgggttatactggaaatggttatgggacaaatggatgtgtgcagctcagtaatatttgcctaagtcacccctgtctaaatggacaatgcatcgtgagtcctttgtttttcctgtggacagagagtacctgagaattagtttcacgcctataaaatgtaacgttataggattcaggaatgtcaagataatgagtcaagtttcagataaggaactgtcgagaactctcagatgaaagatagataatgattttagttcttaggaaaaaacattgagttaattttttgtctcagtggtttatgaagtactaaaactacgcctgcagtttgatctaaataaatctgacatac

SEQ ID NO: 9323 - DNA, 594 bp, Homo sapiens
ttcttttaacaagtatgtaccaagtgtccatgtattagagcctatattagatgaggaatatgatggcccctaaattttaaaaaatactcagaaaatacaaaatgtaataggacatcaacggatataacagatatccatgtgatacataaaggatatcaattcaaattttcaaagcatacatgcttggctattactacagataagtcagttgaaacatcaaatgaaagcagttaagtcagttcaaagagtcttcagaaaaaataataacatttaaccacaggatgtggtcaatctcctgtcagaccacaaatagtcaccagctgcagataagtctatgattagaaatgttttcagccagcaccacagtgtattggtttgtgaaagagaacaggcaaggtagggggttggtgattagaagtgaagctgggtggccatgatcctataaatttacccattacaacaaattaaagagggcttattcaaagggctgtacaatacctctctattttggctgccaaatgcttagaagagttactttcacgcagaagtcaaaaaaaaggctggccatggtggctcacgcctgtaatcccagca

SEQ ID NO: 9324 - DNA, 627 bp, Homo sapiens
tccggctgcagggcctccttaaactcaggcaggcaatgccattgaggtgttatttctgtccctatatcagtcaaagccattgaggcacccatgggctcaagtgcctgccgacctcaagcgcagcaccatcactctgggctcagtttccccatgttccaaagactcctctgaggccctttcctgctctgaaactgctgctctggggccaggagaacctgagggctgccatgtgtcagggatttcctgtaccttcctgcctgaagcattggggtgggcaagagaagatctcctccccagctccagcctgcaaagtagcattgcagacccacctcctccgttgtctgacaagactcccagctgaccgcgccatgtggggggctggccccatgcagggtgcttcccgctcaccgcctcactggcttgtcctccccaaaacgtggcccatgcatgagcccaccattgcacccctgggtggtgtcagtgtgagtcttccaagaagacaccaggacaggattagacacgcaagagagctatggaggaaatgcctgtgtaggataaggagaggaagcgggaggagcagggaggtccctcgggtgtcaatacaggtctcacctctgtgcaaggagc

SEQ ID NO: 9325 - DNA, 433 bp, Homo sapiens
ggatgataccggctaccacaaaaacacacttagcacataggccacgacactcatgcgaaactacacaagcaattctacaaaacaaccagctaacactatgatgacagggtcaaaatctcatatattaataataaccctgaatgtaaacagtctaaacaccccacttaaaaggcatagagtggccaactggataaaaagacaagatcaaactctctgccatcatttagagatccatctcatacgtaatgacatccacaggctaaaagtagcaggatctaccgtgcaaacaggaaggaaaaaagagcactactcactattcttatatcagataaaacaaactttaaaacatcaacaaacaaaaagcagaaagaaggacattacataatgaaaggttttgatttaacaagaagatttaactatcataaacatatat

SEQ ID NO: 9326 - DNA, 63 bp, Homo sapiens
aaactattgaattatacactttatttatttattttgaggtggagtctcactgtggctctgtca

SEQ ID NO: 9327 - DNA, 368 bp, Homo sapiens
tttctttcacctgtcttaatgtctctttgatgtacaatagaaataaacaaaaggtagttgattttgcagagtgggtgagggaagaaatataaattgtttagtgcctattatgtgtagatactttatatatttttttctgagacaggtagtataataatggttaataacgtgcttagaatactgtctggtacattataaacactctgagttacaattactaattgaatcctcacaataactttataagcaaggtttactgttcttccctatttcacatttgcataaaccaaaatacagagaggttaaaggatactaagttacggccggacacagtggctcatgcttgtaatcccagcactttgggaggc

SEQ ID NO: 9328 - DNA, 68 bp, Homo sapiens
ggttaaatatttgcatggcagggggcttgagatattcctttttaacactgagcagccagttaaaacct

SEQ ID NO: 9329 - DNA, 433 bp, Homo sapiens
tcattattgtaatccacttttataggaaatttttgttgttgtgtatctccttactaaacgaacatttttttgtttttgaatctgcatcaattgttgaacacatatagaatatattaaatacatacaagctaatgaagtaacacatgaatgcatctcataccacttatcctaaaacaaccatttttttctttcattctgtcaaatactttttctctaatatcctatacttttgttactattcatggattttatctatttatagttattttcttactgatatgcaattattttctatgtatagtgtatcacatatcttgcaaaattttgtttggtttgcataatatctttttattctattgtgaatgatattatagaactttacagatgaaataaaatctgtcggccggctgcggtggctcgtgcctgtaatccc

SEQ ID NO: 9330 - DNA, 254 bp, Homo sapiens
tgaaggcatgcatttgcccagatcccttctgtgtttacacaacacctctgcatgccagggtctgtggcacagcctgctccggttgcatgatggtcttgctggtatattttgggcagggaagtcctttccagcacaacaactgagcaactttagttgtgtgaaaacagatgaacaggccgggcacggtggctcacgcctgtaatcccagcactttgggaggccgaggcaggcggatctcaaggtcaggagatcga

SEQ ID NO: 9331 - DNA, 507 bp, Homo sapiens
acctgtgaggcttgcgaaatttagttaacttacctaagatcaccaagcctgaaagtggtggagatgccaatacaggcaggttgatgcagagtccatgggattagcacaacatcctgtctccacccttctgctgtttacggtgctgtgaggaagcctctaatctatccaaagagaagtcactgaaacacttggcagaatggtgggtcccctgtgggataaataaagtatcttgaggacaaccaaagtacttcacagattcctgttaaatgattactttcccttaataaaagggatgggaaacaggttccataccttatgcttctctgttaggacagaacgagtcaggactttcagatctgcagatctggatgcccatccccattgcttcacttagaatctccatgattgaatcagtcaaactctcctcaactgtaacataaaagtgtctagctcttatgtatgagtggtatcttgctgcataacaaaacttagtttttaaagcaatta

SEQ ID NO: 9332 - DNA, 486 bp, Homo sapiens
ccaaagacctgccgggactgacaaaaagcaacaaccgataaacaagagcaagctttagcatcttaaaaatacgctcgccagagtttattttacattttcaattgaagggtggcaagataaaagtgagagactcttgtacgcgtatgcctcaagctcagaagatcaaacaattcaaatataaattccagaaagatcttttagaacagggagaaacctagtcaaaaatgaaaggaaatttcccccagctacagggaaacactgattttcaaattaaaaggccccataaagtgctggggcaggatgactgagaaatgaccccactcagacgcatcattgcaacatttcagaacaccaaaaatgaagcaaacaagtctaaaacttctagactctagagaaagaaaaataggttacttaaaaagaaagaagaggtcgggcgcagtggctcacttccgtaatctcagcactttgggaggctgagatgggtag

SEQ ID NO: 9333 - DNA, 447 bp, Homo sapiens
aggcccatctgtggtgaagagcaagatcttttctcctagcagtgcacggaagagcccagccaagtgcctcatgtagctgaagtcacaggctctgtagctaccatattcattctccacctgccagaggggagggaaagtggaacccagctatgggatggaggtcaaggaccccttgtaccttcttcccctgctccagtcacttcccccttgtacctgatgctaatgatgttgcccccattgtgataaagccatggatatatcttgggcagcaagaccttgaaccaggagtccactgcggcaaggaagtctaaaggaaggagcagagcttctgtgttaggtgctaccatcacacttgctcaccactaaatatgggaagcaatgactcttgtcaagaaattcccaaccctaagcaccttgtatatttgcacgccaatgaaatttgaacat

SEQ ID NO: 9334 - DNA, 464 bp, Homo sapiens
taaaatccagcaattgttcattatttgtaaaatagtaggttctattgattgactttattattgaataaatacattaattattttaaaaaagctcttggcaggccaagcacagtggctcatgcctgtaatcccagcactttggaaggccaaggcagaagggttgcttgagcccaggagttcaagaccagcctgggcaagagagtaaaaccccacctctacagaaaaatacaaaaattggccaggtgtggtggtgcgtgactgtagtcgcagctgctgtgtaggctgaggccggaggatcactggagcccaggaggtcaaggctgcagtgagctgagatcacaccactgcaccccagcctgggtgacagagtgagaccctgtcttaaaaaataaataaataggccgggcgcggtggctcacgcctgtaatcccagcactttgggaggctgaggcaggggcatcatg

SEQ ID NO: 9335 - DNA, 615 bp, Homo sapiens
gcagtgatggacccaggcttttgctagtgatggcagagagtgggcttttatgagtgagaagtgagagaagagatcaaaaaaacttcctggaaatgatgtttttggagctaaatcttaagggattagtaaaaccagattatactcaaagggagggaaggccacagtaggtgtgtgggagagaacagttaacaagccgtaaaacagtatgttgactacaaaagtgaaggggaggcaggaaaatgacatgcacttgggcatgactggaagcgaggaagatcacagtgagggaaagaaagaaatcaagggctacgttcttgttttggactttgatgcctgacaggtgacactaagccagaattttaagctaaatctacttgattgcaaagtcagagatttccctgctctttcactctgcctcaactgtgattgggtattgatcaagtatatctaaagctgtgtccaagaaagcccatgacattgcattgtgtgcaagttatgtgtatatgtttgcatgttcatgtttttcaggagagaagaagaagcatgaccttcttgtgattctcaaagtttaagaatcatttgagccggccaggtgcagtagctcacgcctgtaat

SEQ ID NO: 9336 - DNA, 405 bp, Homo sapiens
gctctcgagtccgggccgcaagtcccagacgctgcccatggaggcgtccagcgagccgccgctggatgctaagtccgatgtcaccaaccagcttgtagattttcagtggaaactgggtatggctgtgagctcagacacttgcagatctcttaagtatccttacgttgcagtgatgctaaaagtggcagatcattcaggccaagtaaagaccaagtgctttgaaatgacgattccacagtttcagaatttctacagacagttcaaggaaattgctgcagttattgaaacggtgtgaagacggattctttggttgataaattgctatcattctaaagtcatggacttcactttcggcaacaaaactaaataaggatggaacatttattgaatgaaaaatgcactttt

SEQ ID NO: 9337 - DNA, 558 bp, Homo sapiens
ctgctcagtttgtttctcagcactgtgctttgcttaaagtcctgctgtaaaactctgagatattgattagatatggacttcaggagtcatgatttttaccatcttattttgtccctgggtcatatgatgaaatacttcagttgttttttatctgtgtaattgcttcttgcattataaggtttttgtaacactcaccattcttaacccaaagcaagctttattaaatatgaaaataggtcatcaaccacatttcattttgtgtacgttaagaactattagtttggccaggcgtggtgacttacgcctgtaatcccagcactttgggaggccgaggcgggtggatcatgaggtcaggagatcaagaccatcctggctaacacagtgaaaccccgtctctagtaaaaataaaaaataaattagctgggtgtggtggtgggcacctgtagtctcagctacttgggaggctgaggtaggagaatggcgtgaacccgggaggtagagcttgcagtgagccgagattgcgccactgcactccagcctgggcgacagagcgagact

SEQ ID NO: 9338 - DNA, 505 bp, Homo sapiens
cactttaatttcctctgaatggtcgttgcaaccccccccaccgccccacccattcctaattacaagttgctgtttccgacttgcctcctggtggcccaatttcaaaacagtgattaaaattaattacctgggggccccctccccggaggggaggagccccaggagccccagagatgcatccacgtccccactggaggttctgcctgggctcccacaccctggcttcccgagtggcctggggacagggacagcctctctctgggtctctgcttgcttatctgtgaaatatttcagctggccagatgcggtggctcacgcctgtaatctaacactttgagaggctgaggcgggtggatcactagagatcaggagctcgagaccagcctgaccaacatggtgaaaccctgtctctactaaaaatacaaaaattagccaggcaaggtggcacgtgcctgtaatcccagctacttgggagcctgtggcaggagaatcgcttgaacctgag

SEQ ID NO: 9339 - DNA, 555 bp, Homo sapiens
atttttgtttttatttttgtagagacagtgtcttgttgtgttgcccaggctggtctcaaaactactggcctcaagtgatcctttgtccttgactgtccaaaagtctgggattacagatgtgagccaccatgcccagccaataagtatattccttcgtttatattaagcgttacatttagagaaattacctagttccctaattcctattttctgctcctccagctgagttacctcggagaggcaacttaacctagatttgctcactcataaaatggtaatactgcggtggctcacacctgtaatctcaacactttgggaggctgaggtgggtggatcacctgaggtcaggagttcaagaccagcctgaccaacatggagaaacctcgtctctaccaaaaatacaaaattacccgggtgtggtggtgcatgcctgtaatcccagctactcgagaggctgaggcaggacaatcgcttgaacctgggcagtgcaggttgcggtgagccgggattgcgccattgcattccatcctgtgcaacaagagtgaaactctgtct

SEQ ID NO: 9340 - DNA, 655 bp, Homo sapiens
tctgttaatatctttaaaaatgaaaaatatacttttcttgagatccaataataccccttctggaatcatatctcagaaacaaatgcatcagttctttaggataattatagaagatttgtgtggggcaggaggggagcagaggaggaaggaaagtatacactgtctataacagcaaaatttcataaaacaaagagaatgctcatcattgtggaaattactaaattaattgtgatatagcacacaatgagatacatacatagttaggcctgttcctgctgacttagagggactgccacaatttactgggaagtagatgaagagaaagtaagatgtagaagtatataatatggtctagtgttcctagctgacaaaactatctctttcatcacattcatgaaaaacagaattatacacatctagctaacagtgataaggtggggagattaaagaaaaaaaagtggctggcatggtggctcatgcctgtaatcctagaactttgggaggctgaggtggggggatcacctgagatcaggcgtttgagaccagcctggccaacatggcgaaacctcgtctctacgggatgggggggaaaaaaaacccaactagccaggaatggtggctcattcctgtaatcccagctacttgggaggaggct

SEQ ID NO: 9341 - DNA, 246 bp, Homo sapiens
gaggaaatcatccataactgcatattattttgatttagaaaaatcaatagtgtgaactctttatttttctccacaatccttcgtttcttgcattccttattttagaatatgacatcacttgtctaaaattcatgaataggaacttcacaaagaattatgacaataaacatataaaaatgttcatctttactagttttgaaaaaagtagaacaaaataaccaaagtgacttttgtacttttctattg

SEQ ID NO: 9342 - DNA, 287 bp, Homo sapiens
ctctctgcttccccttgctcgctcggctatagcccatgggcttctggctgctccttccaccctcagggcacatgcctgccctgcccctgtggctgggcctctctcccaggcatcagcagggctccctcgctccctgtccctacgttgagaaagagaaaagcaggccctgacctcctggagcccgcctggagcccagcggggcttcggtattctccagctgaacctaaatgacttcacaggacatcagcaacagacaaaccacctgggaccacgatggatcacgacac

SEQ ID NO: 9343 - DNA, 127 bp, Homo sapiens
aacctcagggttttttttgtttcattcctaataaagaaataacaaatactgcctcacagactagttgtgataaaataagatatttgatagaaaaatgttttttaaaatgcaaagtattccatatata

SEQ ID NO: 9344 - DNA, 98 bp, Homo sapiens
ccgcagtgcctggcaggttccacttccaattgttaagagtctgaagccagagacagttggttctttcatgctcaaactgggtagcgatggtgcactgc

SEQ ID NO: 9345 - DNA, 170 bp, Homo sapiens
aggtggcatgtgagttttatgaggcaaatctctcagccctgagtttttcaactgtaaaatgagatgtcaatatttactatctttcaggtttgtggcaaatataaaatgagatcatgtgcataaaagtatttgtaaactgaaaaatctcacctcatgtaaaactgttatga

SEQ ID NO: 9346 - DNA, 489 bp, Homo sapiens
ttagttattcacacaaaaacaaccataggactggaactttaaagtgtatgagaatttattcccagtcctaaatggaatatatttttaatgttatcaatacttggggtgaatgaaggtgagttggtggtacccattaaatatcaaggttaggagtggtggctggaaaatcaaccctggtggaagtttaggaataccacggttcaattatgtacatttctgtctgtgagttatggagcaataagacttaaaacaagacttaggctgggcacagtggctgacgcctataatcccaacactttgggagaccgaggtgggcggatcatctgaggtcgggagttcgagaccagcctgatcaacatggagaaaccccgtctctaccaaaaacacaaaatcagctgggcgtggtggcgtatgcctgtaatcccagctgctcagtaaggctgaggcaggagaattgcttgaacctcggatgtggaggttgcggtgagt

SEQ ID NO: 9347 - DNA, 526 bp, Homo sapiens
gagacggggttttgccatgttgcccaagctggtcttgaactgctgagctccagcaattcactcacctcagcctaccaaagagttggtattacaggcgtgagccactatgcctggccatatttttttcccttaatttatatactatagaaatgttggaaatgtcctaaaaaatatgtactcatagttgaggtcaataaacatgtaaagggtagaatcaatctggggaataagttctgatttgctatatgtgaatttaattaaatataagggagttaaaatccaaactagtttacctttgctattttctgagattaaaaaactcatttgtattcacttgagtaatactttaacactgtatatatatatacaaaatgttttttgttgagacagggcctcactgtgttgcccaggccagagtgcaatgatgcaatcatggctcattgcagcttcaacctccctggctcaagcgattctcccgcctcagcctcccagctgggactacaagagtgcatcaccattcctggct

SEQ ID NO: 9348 - DNA, 544 bp, Homo sapiens
ctgtactctgaatcagaataatatactccatcaaggagactgacattggcaccaccttcccagaaatccaggagcgcctttgcatgaggaaaagcagaagggagtaaagtcatgaaacattgtgtgtgtgtttgtataaaactgtatatttttgctcacatataataactatatatttctgctaatttttccttttaaaggctattaagttacttaaaatccattgcctaataaaactgcaattcacctttgtaattcactcatttgtttgctgtcacagggaagatagaaattgagcacgttttcggctgggtgtggtggctcacgcctgtaatcctagcacttggggaggccgaggtgggcggatcacgaggtcaggagatcgagaccatcctggctaacatggtgaaacctcgtctccactaaaaattcaaaaaattaactgggcgaggtggtgggcgcctgtagtcccagctactcgggaggctgaggcaggagaatggcatgaaccccgaaggcagagtttgcagtgagccgagatcga

SEQ ID NO: 9349 - DNA, 218 bp, Homo sapiens
agtatgaattccttaaaaaaaaaaattcattcctcctttctgcgtcataaaataagtaacttttttcccattaaaatcttctgtaatgcttctgaaaaaagcacgcagtttgaaaaacagcaatagtaaatgtgggtctctgatatattttcaaatgctttaaaaaattattaatttattcatcacatgtttatgaattacctacaataacaggcact

SEQ ID NO: 9350 - DNA, 397 bp, Homo sapiens
aaacaaacctgttttccttatttcctaaacaaaattccaaaaaaaacttttttgaagcaaagatcatatgtgttttcaagtatcaagagatctgaagctttttgccaacataaagctaattaaacttcaagctccagtactgggggacacaattatccttactttgccatgtaaatagttaataggatttatttttgtgcttaaagaatatgtattgttgtatgtacttatatttgtccgtgtcagtcttgacccttagaattttgggcacagatggtgtatatctgacttataaccacagaaacaccaaacacaggagctaagaatattactaggggccagctagctccatgtcatcccaacatggcatggctcccactgtgggtaagagagatga

SEQ ID NO: 9351 - DNA, 452 bp, Homo sapiens
gacagaagggtaagaggctcttcagccttgacgttccttcacaagctctctcacctgctgccattaagacatgccttcttccccttccaccatgattataagtttcctgaggcctccccagccatgtggagctgtgagtcagttaaagctcttttctctataaattacccagtcttgggcagtgctttatagcagtgtgagaacagactaatacacagaccaaaagaaaattaatagaaaggggcatggctgtgctgaatggaactgctcgttacagaagaccagacatctatcagaaaaacctgcccaatgccgtagctaattccaaaactaaagattaacccagcaaagccacaatgtacttccaactcttggcagttccaaatgaggtcagcatttaataatggcagcccctaaccctagcaggagcacagcagtaacacagatgaaag

SEQ ID NO: 9352 - DNA, 347 bp, Homo sapiens
acgctttgaaaagagccattcactgattttagtgaaatgaattgttattttgaaaacagttagtgctctggctaatttctcttgttatggcaatctgtgtttggaactccaggactgtgtagatgcagaatgaattgtaagatcctgagaacagcattggctctttctcatgtctgtattttcatattgaaaacagatttgagaacataatagcctgagatgttgatgcacagatataggtggaaatagagagatgacctagagaagcatatttaagctaggctgcagtgatctagagaaaatgtatgtcggctgggctcagtggctcatgcctgtaatcccagcat

SEQ ID NO: 9353 - DNA, 343 bp, Homo sapiens
agatgacttctggtaagtagattctagcacttcttgacactttagtggaaaagcttttggaataattatttattattattcatttacatttttagagacaacctcactctattgcacaggatggagtgcagtgatactgtcatagctcactgtagtcacgaactcctggattcaagtgatcctcctgcctcagccttctgagtaactaaaactacgggcatgcaccaccatgcctgactaattttgtaattttttgtagagatgaggtctcactatgttgcccaggctggtctcaaactcctggcctcaagctatcctcccgctgtgtcttcccaatgtgctg

SEQ ID NO: 9354 - DNA, 429 bp, Homo sapiens
gtgactctgttttctgtggtagtggtagtggggagtgctccaagaactccttgagcctcattagtccctcgttcttatctgagaaggttcctattgcttggtgtattagtccgttttcatgctgctataaagatactacctgaattgggtaatttataaagaaaggaggtttgggccaggcatggtggctcatgcctgtaacccagcactttgggaggctgaggtgggtggatcacctgcagtcaggattttgagaccagcctggccaacatggtgaaaccccgtctctactaaaaatacaaaaattagccgggcatggtggcacgtgcctgtagtcccagctatttgggaggctgagacaggagaatcgcttgaacccgggaggcggaggttgcagtgagccaagatcgtgccactgcactctactct

SEQ ID NO: 9355 - DNA, 564 bp, Homo sapiens
aagtactttataagaattactttattcccatctatgccgggcacagtggctcacgcatgtaatcccaacactttggaaggcagaggtgggtggatcacctgaggtcaggagttttagaccaccctggccaacatggtgagaccacgtttctattaaaaatacaaaaattagctgggcctggtggcaggcgcctttaatcccagctacttggaaggctgaggcaggagaatcagttgaacccaggaggtagaggttgcagtgagctgagatcgtgccactgcactccagcctgggcaacagcaagactccatctcaaaaacaaaaacaaagaaattactttattcccatccaaccaccaccactttaggtagatatcactatttttcattttacaaatgaagcagagaggttaaatttccttgttcaagtccatagagtcaggaaatgaaaaaggaactgaactcaaggagttcataattatttatatacaagtaataaagacaaattcatcgactatggaaatgtactgagtattttgtcttggttacataatggtttttattt

SEQ ID NO: 9356 - DNA, 531 bp, Homo sapiens
attctcctgcctcggcctcccgagtagctgggattacagacatgcaccaccatgcctggctaattttgtatttttagtagaggcaggttttctccatgttggtcaggctggtctcaaactcccaacctcaggtgatccgcccgcctcagcctcccaaagtgcggggattacaggcgtgagccaccatgcccagctagaactttattcctttttatgactgaataatataaattccaatctttgaggatctggaaaagggagaagaatcaggaaaaggcaagtgacaatcaaagagataaggagaaaatcaggagcaaggaatgccctgaaagcgaattgatgaaatgtttgagaagaatagggtatccaccacatgtcccagtgctgcataaaggtcatacagaatgagaagaaaataaaaagccaccaatttctagaattgaagggtaaccataggtggaaatggctgtgaggtagagtctactctcaagtgcttgataagaagccaaggaatagttggccgggcgccgt

SEQ ID NO: 9357 - DNA, 554 bp, Homo sapiens
acaggaaaactatgacctgaattctttgaatcggccaccttatctgcctggttttgaaacggaaacatctttgatctggagtctgggtttgaatgctatgggtgttaaacataaaaaactgaagtccaaggacagcaagggttatcgtaatatctaggtaggtgggacaggcttaattgctttgtattcgtccataaaaattcctttcctgcttgagagggcattgctggtaaattattctgtctcttcctcacttattctcacattccagtttatttcctaagtcataaaaataatacattaaatcctcacataaaccccaaaaggtagatattatttttgtccccattttagagataaaaaattgaaaacaaggccaggtatggtggctcgtgcccgtaatccagcactttgggagtctgaggcagttggatcacttgagatcaggagtttgagaccagcttggccaacatggtgaaacccaatctctactgaaaaaaaaatacaaaaattagctaggtatggtggcaggtgcctgtaattccagctagtcg

SEQ ID NO: 9358 - DNA, 584 bp, Homo sapiens
ggcacgagacctgccctgtgcttcgagggctccccgcctcccgaggagctcccggcggtgcacagtcatggtgctgggcggggcgagccttggccgggccctgcctctccctcgggggatcaggtgtccacctgcagcctggagatgaactacagcagcaactcctccctggagcacagggggcccaatagctctacctcagaagtggggctcgaggcttctcctggggccgcccctgacctcaggaggacctggaaggggggccacgagttgccgtcgtgtgcctgctgctgcgagccccagccctccccagccgggcctagcgccggagcagctggcagcagcaccttgttcctggggccccacctctacgagggctctggcccggcgggtggggagccccagtcaggaagctcccagggcttgtacggccttcaccccgaccatttgcccaggacagatggggtgaaatacgagggtctgccctgctgcttctatgaagagaagcaggtggcccgcgggggcggagggggcagcggctgctacactgaggactactcggtgagtgtgcagtacacgctcac

SEQ ID NO: 9359 - DNA, 599 bp, Homo sapiens
ggcacgagggaaggtgagggctgagaaggaggcatgccagcgggagaaagagctgcctgcagcagtacatcccttccattttgtttaaattgggcttggagaatctattctgaaaacattgactctagacttgtagaaaagagccattttagtttcaactcaaatgtaaagcaaggtagtttggtgacattttgcttttatgtgaaatagtgcacagtatgagttaatctgagcaggtctgaattgaccaaatgcttatctacgaggttcctagagctctgctgacccttggccgaaactctaaaatgtacctattaaagataaatgcttctaccaaagtaaaactctgtgagttgtttcagggcagaatgtaccagccagtcagcgttgtttaacaaaataatcagatttttgcctagcactcggttttggtggagctgacgattttgagggctgaggctggttaggtagctggaatgtgcctatgtgaccagctcacttgcagacaccctgccggaagcagagcttaatcttcctaggactgaggtcttagcacatgtactggtggagtttccagaccaccagtatgaataaaagct

SEQ ID NO: 9360 - DNA, 388 bp, Homo sapiens
  misc_feature 9, 10, 11, 12, 13, 14, 15, 16, 17, 18, 19, 20, 21, 22, 23,24, 25, 26, 27, 28, 29, 30, 31, 32, 33, 34, 35, 36, 37,38, 39, 40, 41, 42, 43, 44, 45, 46, 47, 48, 49, 50, 51,52, 53, 54, 55, 56, 57, 58, 59, 60, 61, 62, 63, 64, 65,66: n = A,T,C or G
  misc_feature 67, 68, 69, 70, 71, 72, 73, 74, 75, 76, 77, 78, 79, 80, 81,82, 83, 84, 85, 86, 87, 88, 89, 90, 91, 92, 93, 94, 95,96, 97, 98, 99, 100, 101, 102, 103, 104, 105, 360, 361,362, 363, 364, 365, 366, 367, 368, 369, 370, 371, 372, 373: n = A,T,C or G
  misc_feature 374, 375: n = A,T,C or G
ggcacgagnnnnnnnnnnnnnnnnnnnnnnnnnnnnnnnnnnnnnnnnnnnnnnnnnnnnnnnnnnnnnnnnnnnnnnnnnnnnnnnnnnnnnnnnnnnnnnnnnctctctctctggccccccccctctctttacacacactttctctcctctctctcgctctctctttttttttctctctcccctcgctctctctgtgtgtctctatctcgtgtctctctctgcgtgtccctcacacacactcgcgcgagagatctctctctatatctctcctttgtctgtgtctctctctcgcgcgcccacacatctatatatttttgcgcgcacacgcgagagtgtgtccctctctctctctgcacnnnnnnnnnnnnnnnncacaccctccccc

SEQ ID NO: 9361 - DNA, 630 bp, Homo sapiens
ggcacgaggtcagggaaggctcgccgctgggagaccgccaaagtgacccgagatggagtctgggtggcctgcttattaggggggcacacctgtgcgaggacgggaggggagggagcagcaggactgggcaaagggagaagctgagccacagtgcgagccggacgcacgggccacgttgcgagggcatgacctggggcgaggcagccctggaggagggggcagctgaaggtgtctgctgaccccacacccaacagctcgggtaacaggccttactgtcagagcgatctggttgccacgtctctgtggccctcagagagacatcatgttttcttttttccctgcacctttttgttttgaaaaatgttcagcatacaaacaagttgaacgtaaagtgagcacgcagattcctaggttcagcaggggtgagcagctggccacgtttcatttctctccctctctgtttatatatgtgtatttttcttttttcctccccactcagcccccaccattagctgcagataccgtgatacccccctcccaaatacttcggtatccaactccttaagaacaagaacctcctatattaccaaaatacaatgaccacatcagttcaatgctgttatctatttt

SEQ ID NO: 9362 - DNA, 155 bp, Homo sapiens
tcggcacgaggagagagagagagagagagagagagagagagagagagagagagagagagagagagagagagagagcgcgcgcgcgcctctctctccctctctctctctctctctctctctgtctgtctctctctctctctctctctctctctctc

SEQ ID NO: 9363 - DNA, 396 bp, Homo sapiens
ggcacgaggagagagagagagagagagagagagagagagagagagagagagagagagagagagagagagagagagagagagagagagagagagagagagagagagagagagagagagggagagccccccctctgtgtctctcacacctctccccccccttggggggatcttttatgtgtgtgtgtgtgtatatgtctctctctgcgtgcgcgctctctttttatacgcgtggctcttctctgttttatatcgcgcacacacacactctcctctagaaaaacacacacactctctcttctctctctgtctctctcatatatatacacaccctctcttgtgtgtgtctccactcacacactctcttttctcgagatatatatcttctctcctcttttt

SEQ ID NO: 9364 - DNA, 582 bp, Homo sapiens
ggcacgaggtcgctgctgagcctctttctgtcagcattctggctggggcttctgtacctggtctctcctttggagaatgaacctaaggagatgctgactctaaggtgaaagagggcacctagggtgggaaattggggggctcaaagttgcttctttgagaaccttgaaggcgtgggggcctttgggaggtgtccagggggacagggagccaaccccacggcgcccacctcccacctccagtgagtaccacgagcgcgtgcgctcccaggggcagcagctgcagcagctccaggccgagctggataaactccacaaggaggtgtccactgttcgggcagccaacagcgagagagtggccaagctcgtgttccagaggctgaatgaggattttgtgcggaagcccgactatgctttgagctctgtgggagcctccatcgacctgcagaagacatcccacgattacgcagacaggaacactgcctacttctggaatcgcttcagcttctggaactacgcacggccgcccacggttatcctggagccccacgtgttccctgggaattgctgggcttttgaaggcga

SEQ ID NO: 9365 - DNA, 398 bp, Homo sapiens
ggcacgaggtcgcctttgcccgcgccccccgcctccccatcactggtctctacaacaagagtccctactactgcgggacttgtggccgctggttccgcgccatggcgggcttgcgactgcatcagcgggtccatgcccgagctcggactttgacgctacagcctcccagatcaccatctcctgccccacccccacctccagagcctcaacagactatcatgtgcacagagctgggggagaccatcgccatcattgagacatcccagccactggcgcttgaggacaccctgcagctgtgccaggctgcactgggggccagtgaagcaggcgggctcttgcagttggacacggccttcgtgtgacgcagctgaaaagcaacaacaaaagggtttggttgg

SEQ ID NO: 9366 - DNA, 590 bp, Homo sapiens
ggcacgagtagaacagtctgttttcagacagtggtttgaaaagtactttgtgccacaggtacagaagcatttgaaatccaagggacttttagaaaaagcagtgcttcttttagatttccccccagcacgtccaaatgaagaaatgttgagttcagatgatggcagaataattgtgaagtatttgccaccaaatgtcacaagtctgattcaaccaatgagccagggagttctagccactgtaaaaagatactatcgagcaggacttctccagaaatacatggatgaaggaaatgacccaaaaatattttggaagaacttgacagtgttggatgcaatttatgaagtgtcaagagcttggaacatggtaaaatcaagtaccataaccaaagcatggaaaaaacttttccctggcaatgaagagaattcaggtatgaacattgatgaaggagccattttagcagctaatttagcaacagttttacagaacacagaagaatgtgaacatgttgacattgagaatattgatcagtggttcgactctcggagcagtgactcaagctgtcaggtgctgactgacagtgaaagtgctg

SEQ ID NO: 9367 - DNA, 405 bp, Homo sapiens
tggtgaaactccacctctactaaaaatacaaaaattagcagggtgtggtggcatgcacctgtaatcccagctactcgggaggccagggcaggagaattgcttgaatccaggaggtgaagcttgcagtgagccaagattgcaccactgcactccagcctgggcgacagagggagactccatctcaaaaaaaaaaaggccttttctggttttttgggggggggataaaagggggaaatttggtaagggggctttccccggtttgcttttaaaaaagggctttgatgggccgggtgcgggaactaatgccttgaacccaaactttgggaagggccggggggccggctccgaggtcggaaaccaacacctcctgtttacccgggaaaaccccgttttacacaaaaaaaa

SEQ ID NO: 9368 - DNA, 602 bp, Homo sapiens
ttacgttagaataatgtattattttagcccttcatacagcatttctgtgaaaattcattctaagtaactttccactttttattgtacttccttggtttgcattattgcatttattcttgtctaaatgtatcttccacactaatttgcttatatttattatgtctcccttcactagaatgtaaactcaagagagcaggaccttgcatgtcttaatgacatatctaaaatagtatgtggcatgtagtaggtatgtaataaataattttggataaatatataataaaagtgcttaatataagtgtcatatgttccattaagaaacagagcgaaggccgggcacggtggctcatgcctgtaatcccagcactttgggaggcccaggcaggcggatcacgaggtcaggagatcgagaccatcctagttaacacggtgaaaccccgtctctactgaaaatacaaaaaattagccaggcgtggtggcaggcgcctgtagtcccagttactcgggaggttgaggcaggagaatggcgtgaaccagggaggtggaggttgcagtgagccgagatcgcgccactgcactccagcctgggcgacagagagact

SEQ ID NO: 9369 - DNA, 572 bp, Homo sapiens
agtgaagtagatctccacatgctttcagggtttttgttgcccctggtactggagcagagaactattatcaggagtaaattttatgacttcaatctaggttgtgaatttgggtcagccattttaccatttaaagtctccacttcttgttcttaaacaaaacaaaacaaaacaaaaaaacagaataagtcaaagaggagatgagaggtagaggaacttgaaagtgctcacttttaaagctagcttctggacttttcttatttcatcacttgatggttttgtctactttccatgaattctaaattttatggtgggtttggaagaaacatgtcttctatatatgggcagatccaggttttgtggagcttgagccttaagcaatgttggaaaccctctttaaggaaaagaggccgggcgcggtggctcacgcctgtaatcccagcactttgggaggccgagacgggcggatcacgaggtcaggagatcgagaccatcctggctaacacggtgaaaccccgtctctactaaaaatacgaaaattagccgggcatggtggcgcgcgcctgtagtctcag

SEQ ID NO: 9370 - DNA, 536 bp, Homo sapiens
ggcacgagataccatagtcccagctacttgggaggctgaggtgagaggatcgcctgagcccaggagacggaggttgcagtgggctgagattgtgccactgtactccagtctgggtgacagagccagaccctgtctcaaaaataaagaggattctgagtttgtatagtgagggcttgcagaaattttgaaacttattttgtaagtttacaatgaatttgtacatgatgtgctcatgtcttgggttgagtatcctagacatgattttttcatttgctgcatattaaacatttgttggttgtagtcggtatttcttaaatagaagtttgtcaatattagattagtttcaagaaggacttagctcaggaaaaggatagttatttctgtggttctcagctttgatgcctacagagattctgatttaaattgctggaggagggcccaggcatacattttttaagtttcccaagtgattctaatttacatctagggttaaaaacagccaggcgcggtggctcatgcctgtaatcccagcactt

SEQ ID NO: 9371 - DNA, 234 bp, Homo sapiens
agcatcctaccctgaaacaggcctcatctctggacagtagctatgagatgacacattttctcattgtacaagcaatttgatgtggaaatctttgttacttgaaacaggcattttaacatataaaatgtgattcccactgaccactggcatccccagattctttggtttacctaaaagtatatataagaaaagtgtatgcctgatatctcgttgactccattacaaagaaacatt

SEQ ID NO: 9372 - DNA, 571 bp, Homo sapiens
ggcacgcagagtcactgaccttcatccttcaccctggtcctccatggtgcagcagcatctcatgggccttgtggctgtcagagcccgtggttggaaccccgtccactggtcccaaacctggaggggcagctgcagatgaggtttagacctcctggtgtctccgtggattctgagtgcccaggaggggaggggagggggtggcatcctggcctctaggataaatgcctggagtatagggcagcgccacgggcacttggagaccctgtcctgcgcatctgccaagcctggcagtttttagagttttttgaaatgttttgatactttttgatacaatttgctaataactgttttgtagaatgcctgccggggttttccacctcatccctttcctccggccccttgatttgtgctggacaacaaatggcagcaccaggacctcgcctcatgtggctttgtcttggatcttgcccttctccatcgctgatgtgatacagctctagaatttcgtgaagttgcatgcaaagttgcatgcagcccgtgggtatgactgtctcaggcccccagctcattt

SEQ ID NO: 9373 - DNA, 482 bp, Homo sapiens
cccctcctcaaaaccaactgcgaaaatgtcctctttttatccctgccttaccccatcagctctggcctttttaaaaacatttgttgttctctagtgaagcctctatcaccttctctatctgagaactgaccaatggaaattcataactttatctccagaaatcccagaggcctaaaaaaattaagaggattaatgggaaacttgcaagaaagtgacaacctcgatagaagtgacacatctgatttaggatggaaaaaggttagtcaataaaaatcaggccgggcgcggtggctcacgcctgtaatcccagcactttgggaggccgaggcgggcggatcacgaggtcaggagatcgagaccatcccggctaaaaacggtgaaaccccgtctctactaaaaataccaaaaattagccgggcgtagtggcgggcgcctgtagtcccagctacttgggaggctgaggcaggagaatggcatgaacc

SEQ ID NO: 9374 - DNA, 244 bp, Homo sapiens
  misc_feature 165: n = A,T,C or G
cgacagaagggtacggctgcgagaagacgacagaagggtacggctgcgagaagacgacagaagggtacggctgcgagaagacgacagaagggtacggctgcgagaagacgacagaagggagtctagagctgggccgggcgcggtggctcacgcctgtaatcccancactttggaggccgaggcgggtggatcatgaggtcaggagttcaagaccaatctggccaacatggtgaaaccccatctt

SEQ ID NO: 9375 - DNA, 368 bp, Homo sapiens
  misc_feature 225, 228, 231, 232, 233, 235, 241, 243, 244, 245, 253, 265,271, 272, 302: n = A,T,C or G
ggtggcgcaatctcggctcgctgcaagctccgcctcccgggttcacgccattctcctgcttcagcctcccgagtagctgggactacaggcgcccgccactatgcctggctaattcttttgtatttttaatagagacagggtttcaccgtgttagccaggatggtctcgatctcctgacctcctgatccgcccgcctcggcctcccaaagtggctggaataacagncgngannnancactcncnnncaggcttntgtatatttttntatatnnccaaaatttttaattatactacaaactganaacaaacacaaccattcatctctaattaatatactggttatatcccaaaactacacgccccggccg

SEQ ID NO: 9376 - DNA, 330 bp, Homo sapiens
taggcatagctattttatcatattgaggtactacagctcttgaaagtagcaaagaagtaagaatgacacagttcatatcaaaaattaaagaagtatggatactttcgtggggatcaaaggaaactaaagaagcgcttaaaacaatcacaaatgtcgcagtgtaaaccatcatgaagaactaaataattgtttaatatagaaaccggccgggcgtggtggctcacgcctctaatcccagcactttgggaggctgaggcggacggatcacgaggtcaggagatcgagaccatcctggctagcacagtgaaaccccgtctctactaaaaatac

SEQ ID NO: 9377 - DNA, 601 bp, Homo sapiens
ggcacgaggttttgctgcgttcctactgtctctatgttctcctgcttgccatcaatggagtgacagagtgtttcacatttgctgccatgagcaaagaggaggtcgacaggtacaattttgtgatgctggccctgtcctcctcattcctggtgttatcctatctcttgacccgttggtgtggcagcgtgggcttcatcttggccaactgctttaacatgggcattcggatcacgcagagcctttgcttcatccaccgctactaccgaaggagcccccacaggcccctggctggcctgcacctatcgccagtcctgctcgggacatttgccctcagtggtggggttactgctgtttcggaggtattcctctgctgtgagcagggctggccagccagactggcacacattgctgtgggggccttctgtctgggagcaactctcgggacagcattcctcacagagaccaagctgatccatttcctcaggactcagttaggtgtgcccagacgcactgacaaaatgacgtgacttcagggaagcctggacacccgaggcacctggaccagctatgggtagttctgtgggtggacacattctgtgta

SEQ ID NO: 9378 - DNA, 481 bp, Homo sapiens
cctccccagtcgctgggattacaggcgcccaccaccatgtccagctaatttttgttatttttagtagggatggggttttgccatgttggccggtctggtcttgaactcctggcctcaggtgatccacctgcctcaggctcccaaagtgctgggattacaggagtgagccactgcacccagccacgtccctcttttaaagacccttatgattagtgggcctacccaaatgatccaagataatatccctaactcatcagccttaattttttatcttttatttttttgagacagggtcttgctttgtcacccaggctggagtgcagtggtgtgatcatagctcactgcagctttgacttccttggctcaaatgacccttccacctcagcctcccaagtagctggattactgatgtgcatgaccacacctggctttttgttttgttttgtttttgagacagagtctcactctgttgccccaggct

SEQ ID NO: 9379 - DNA, 587 bp, Homo sapiens
ggcacgaggcggagttggacatcgggcagcactgccaggtggagcattgccggcagcgagattttcttccatttgtgtgtgatgattgttcaggaatattttgccttgaacacagaagcagggagtctcatggttgtcctgaggtgactgtaatcaatgagagactgaagacagatcaacatacatcttacccatgctctttcaaagactgtgctgagagagaacttgtggcagttatatgtccttattgtgagaagaatttttgcctgagacaccgtcatcagtcagatcatgagtgtgaaaaactggaaatcccaaagcctcgaatggctgccactcagaaacttgttaaagacattattgattccaagacaggagaaacagcaagtaaacgatggaaaggtgccaaaaatagtgaaacagctgcaaaggttgcattgatgaaattaaagatgcatgctgatggcgataagtcattaccacagacagaaagaatttactttcaggttttcttacctaaagggagcaaagagaagagcaaaccaatgttcttttgccaccgatggagcattggaaaggccatagac

SEQ ID NO: 9380 - DNA, 563 bp, Homo sapiens
atggcttggtgaccgacagtttctgaccatgtttcactgctacaaagagggttatgctgcattaatctgtcctcatgggtgacggacaggatttcaccccaccacaacctattgaagccccacttctctgacttcagagctgtccagggcccaggctatgaggcagctgtcgagaggtcccacgtacaggttgggagcaccttttctcaagaaacttacaggacagctcctggaactgaggcctacatgacaatggagaattcaggctttgtttcacttcttaaaaaagaagtccagttagatttatgagtatgtccatgaacatgcagaaatataactaatttctgaaagtactgcatacgtgagtgctggttcgtggatgtcagtatgatgccacctgtgtgaggctatcaacattaggaagatgaaaggcactcctgaaatacaagtcagaacgggggcaagtgctggaagagatcaacgaaatgtcacccaccaaccccagagcctggcagaaagcagctcgcccaggagggccagtcgggttctgtgccagcttccct

SEQ ID NO: 9381 - DNA, 642 bp, Homo sapiens
ggcacgaggccgggtgaaatcgtaggacagtgaagatgctgctggaattgtccgaggagcataaggaacacctggccttcctgcctcaagtggacagcgcggtggtcgccgagtttgggcggattgctgtggaattcctgagacacggcgcaaacccaaaaatctacgatttttttgccagaaaactcaatgtgagtagtgacactgtccagcatggtgtggaaggattaacgtatctcctcactgagagctcaaagctcatgatttctgaactggatttccaagactctgtttttgttctgggattctctgaagaattaaacaaattgttgcttcagctttatctggacaacagaaaagagatcagaacgcttctgagtgaattggcaccaagccttcccagttatcataaccttgaatggcgactagatgtacagcttgcaagtagaagtctcaggcaacagattaaaccagcagtgactataaagctacaccttaatcaaaatggagatcacaacaccaaagttctgcagacagacccagccaccctgctccatttggttcaacaactggaacaagcattggaagagatgaagacaaaccactgtaggagagttgttcgcaacatcaagtagtaccagt

SEQ ID NO: 9382 - DNA, 594 bp, Homo sapiens
tggacgtttctcatagacaaggaactaatttctgtgattactactcctgggattccctaactcagaacacacattcaggtgcatctgccacagggtcattctaagggtgtgcttaagttactgctatcagggcacttgccctacagtagtgtcaggcattttgcctgtatttgcatccactgtgtctcagctaactgcgtgtgtttggccaagttatttagtaataccttgtagggttaccaggagcagctaatgagactgtgtgtaaaacgagccacctctgtggcctggaataaagtggagcttcattggtgtcagttcttttcttttcttttttcttttgagacagtctgttctgtctcaaaaggtctcattctgttgcccaggctggagcgcaatggcatgatctcagctcactgcagcctcaacctcctgggctcaggcaatcctcccacctcagccttctgagcagctgaggtttaggcatgcactaccaagcccagctaatgtttgtatttttttgtagagatgagggtttcaccatgtcgcctaggcgggtctcgaactcctgaactcaagcaataaaatgattgt

SEQ ID NO: 9383 - DNA, 349 bp, Homo sapiens
atgagtgactagctatttacaaaagagcgatttagactcgtgcctcacagaatccaccaaaataaattctacccgtattaaagggttaaggatataaaattaaaccacagaaaattagaagaaaatgaaagacatgttcaatctggatagcagaggattttctaaagctaaaaataacaaatgcgtcattctaattttccttaataggcgtatgttattcttaaaggcatttattattcctattattccttaaaggcatacattattcagaaaaaagcaacagaagatctaacaagggaaataattactgttttagttactttaaaatttaaatccttggccgggcgcc

SEQ ID NO: 9384 - DNA, 113 bp, Homo sapiens
ggcgttacttggattcctctgtgaggaacagcaaatctctgaaaagtgacttctatcgttatgacattgatacaaacacatggatgttactaagtgaggatactgctgctgat

SEQ ID NO: 9385 - DNA, 346 bp, Homo sapiens
attagggttcagtttatcactggacattcaggaggcaagtcaatcttttttatttccttataaaattaactcttcaaaagctgttaaacagagagttatcttaatttttattgcagtaggaggaaatatatttaaaatatttgtagatttatagcaaatagagactcgttatttaaaggttaaataacaatttgttcttttgttgtttttgccagtttagggcagtagctgcttttgtcataaatatcttcctaccacatcaaaaatgctgcttttaaaatttttgtttataaattgagaaggaattttctctctataagtttctgtcattgaacagatcaccatt

SEQ ID NO: 9386 - DNA, 300 bp, Homo sapiens
  misc_feature 8, 15: n = A,T,C or G
cccccgcncgtgcangggacagctgtcctcacaggaacagccctgggacctacaggacttcctggggtttaccctcagatcacccatgaggttagaatcacaaagcccgggagtcaggagacacagggcagctggagggaggtctttactgaggctactgaggcacagcagccccgtctagaggcctccctgagaggcacttcctgaggagtctggtggattttgagctgctttttaaacaaccttctccttagcatagacactgacactgaagggaaagaaagcaaatggtctgttctt

SEQ ID NO: 9387 - DNA, 340 bp, Homo sapiens
aaatgagataacaagagtgctttacttcatttgattttggggaagatgaaataatttatgccaagagcttatagcatagtgcttggcacagagtactgttcaatactgatgtttaatcaatgctgctgctatcattattatttttggaaaaaagggaaacaaatatggaacttaaatagttcataagggcatagcctctagcagcctctacattccaggtagggggcagtgaaaaagagcaggtggaggtcaggagttcaagaccagcctggccaatatggtgataccctgtctctactaaaaatacaaaaattagttgggcgtggtggtgggtgcctat

SEQ ID NO: 9388 - DNA, 341 bp, Homo sapiens
  misc_feature 118, 130, 140, 145, 147, 150, 155, 157, 181, 188, 209, 226,231, 236, 246, 255, 274, 284, 308, 316, 319, 320, 322: n = A,T,C or G
ggaggctgaggcatgaggtttgcttgaacctgggagatggaggttgcagtgagccaagatggtgccattacactccagcctgggtgacagagcaagactccatctcaaaaaaaaaaanacaccaaagatnttattaatcnctgancnctnttttntntcaattataagtaattgaaaattntaatcancctcctatttaattaattaanaattgatttaatgattnagttnaaaangttaaattcnttttaaaanaacccattacatgttaacncaaatagcangtttttattttattttattttganacaaagtntcnntntgttgcccaggctggagtg

SEQ ID NO: 9389 - DNA, 449 bp, Homo sapiens
acttttgacttcctggggtccttcttcagttaaaaaaaaaaattaaaaaattaggccgggcgtgggggcacatgcctgtgatccacccacctcagcctcccaaagggctgggattacaggtgtgagccactgtgcccggccttgactaccatattttaaatttactggaggacttttttgttctcttcttttttctttttttaatagcatcccgctcttatttcaaaataaaaaatttttaaggtatgttgagtaaaaatctatagagcaatgaaaatgcaagaccaatagctatgggcaccaaatgggcaatcttcttatcataatgttgaggggaaaaagccaggtccaccaaacacatgctgctcatttatccaaagtttggacacaggcaaaacaaaactagttggatcgtgatgggaaacattagagaaatgcaaagacatgac

SEQ ID NO: 9390 - DNA, 613 bp, Homo sapiens
aatgacttaaagtatatgggaggatacacataggttatttgcaaatactacactattttatatgagagacttgagcattcgcagatttcggtatccacgggaggtcctggaaccaatcccctatggataccaagggactgctatgtattacaaagccacatgctttggaattacttcagtgttccttctattttcattaacactgatatctagtttaatatgaaaaggaacttgaaatcttgaaaattagaacatcgttatttttttctacttgcaatggaaaatctattttgcttttttgcttctaggaaaatattctgattatgatatgtgatatgttggctactcaaagtcagaacttttcaaagtaatcagtaaattgaatcaacagaaaaatattcattaactcggggatgcattaataaagtttttaaattcaaaatgtatagaaaaatcaagcttagtaatactttaatattattctaccaatgtattttttttaattaagacttctgtatgcagcagggcatggtggcacacctgtagtcccagctactagggaggctgaggcaggaggattacttgagcccaggaattcaagcctgggcaacat

SEQ ID NO: 9391 - DNA, 256 bp, Homo sapiens
agaccagggagtaggctgctgggctggtccaggcaagaggtaacagtggacaggaccaggcggagtgagaagaggtcagatttggaattattgtgatcagcagacagctcttacctggggtgtgagggaaagaggagccccagaggactcccctgtttttgcaactggaaagcaatggtcagccatggcagggttttgtcctggcatcaagacaagcgagcccttggctgggcacaatggctcatgcctgtaattc

SEQ ID NO: 9392 - DNA, 568 bp, Homo sapiens
gctgtgatcggtatcctacagccttaccctcgtgtcctggatcttttccttccatttcctgtgtacagcctttttggggacactgccgttaccccactctagctagcatagctctgtctgtaggtgctccataaaggtgataggactgaccacaccgtcacctttcccggaaacccaagagggagcgttccacagagggagcgtgtagtggggggaactgttttataaattaatccgtttattgaaaggttcacaaggacaaagaggcaacagcaagagtcaggcacagaaataaaggacgcagaagtagaagtgcgccttggacctggaggactcttccagagtgtttatcacttggtgacctggtaggagggctgcgagggctctgttcaccctcagcaagggccacgtgtggggaggattccatggaagtctctgctgagaggggatatgataaccaccagagcaccagtgcttcttacctgtacttaccaagtggcaggctgtgtgccaactcctttatacacgttgtctcacctaaaccttagaatcccttttttatagctga

SEQ ID NO: 9393 - DNA, 592 bp, Homo sapiens
ggtgcggggacaactacgaagatggcggttgcgcgcttggcagctgtggcggcctgggtaccttgtcggagctggggctgggcagccgtccccttcggtccccaccgtggcctcagcgtgctgcttgcacggatacctcagcgggcgccacggtggctcccagcttgtagacaaaagacgtcactctcattccttaatcgaccagaccttccaaacctggcttataagaagctaaaaggcaaaagtccaggaattatcttcatccctggctatctttcttatatgaatggtacaaaagcgttggcgattgaggagttttgcaaatctctaggtcacgcctgcataaggtttgattactcaggagttggaagttcagatggtaactcagaggaaagcacactggggaaatggagaaaagatgttctttctataattgatgacttagctgatgggccacagattcttgttggatctagccttggagggtggcttatgcttcatgctgcaattgcacgaccagagaaagtcgtggctcttattggtgtagctacagctgcagataccttagtgacaaagtttaatcagcttcctg

SEQ ID NO: 9394 - DNA, 63 bp, Homo sapiens
gagccttctcaatagcacagtccctgtcccttaaatataggttgtgtgacttctatatatgca

SEQ ID NO: 9395 - DNA, 624 bp, Homo sapiens
ttttagtgtagtagtcaaagcattaatttctcacattgcaatttccttcaaagacataaatacaacctttctaatgactccttgttcatcaagatacctcttcaaattattctatttgtttcattcagtatattatctgtgtataccgatattacactcttttctttttttgagatggaatctcattctgttactgatgctggagtgaggtggcatgacctcggttcactgcaacctccacctcccaggttcaagcgattctcctgtctcagccccccaagtagctaggactacaggtgcacaccaccatgcctggctaatttttgtatttttagtacagtcagagtttcaccctgttgtccaggccggactcgaactcctgacctcaggtgatccacccaccatggcctcccaaagtgctgggattacaggcataagccaccgcacccagcctgatattgcactcttggattttgaacactgaatatctttttgaaagattacacctctttacctcttcgtgcttcagaaattattttccttcaagtgttctaagaggctaatgaagaatgaagtcatgttttatcacttttgtccttaaagatttcagacatgctgaaactg

SEQ ID NO: 9396 - DNA, 531 bp, Homo sapiens
tgcagtggtgcgatcttggctcactgcatcctctgcctcccaggtttaagcaattctctgcctcagcctcctgagtagctgggactacaggcgcccaccaccacacccagctcatttttttttgtatttttagtagagatggggtttcaccatcttggccaggctgatcttgaactcctgacctcatgatccacctgcctcagcctcccaaagtgctgggattacaggcatgagccaccccgcccagcccggccgtctctttttctacagtagaatttcttttctaattttttgatctcacaagaggatgtcctggaattcagtagaatttctaacattgtcactggttttcctgaaagtgagatttatctcattagacatgtttggtataaatacctcctctgtttgctctactcccaaccaggagggatggttgcttttatacagaccgcattctggaaccttctttacagatacccagcccttcacgggcatcccatcagtaggcgattgctatagtttgaacttgca

SEQ ID NO: 9397 - DNA, 647 bp, Homo sapiens
tgtgctacattataatacctgtcaaggagcacttggaaagtgagaataaatcattgcgagcacattactcagtcttggttagtcagggaaggttgcacagaggagaaatctaaaccttggcacttctgaagtcacctttctgaaaacattctggtaactgttagatcccttgttgtagctattcatatgttctgtgtggttaaacaaggttcacagtgggccacctggcctttggaacttggctgaagaggctgccttcagttcatcctccccacccccgttttcaaaacatgggtttccatgtgttcgttgtaaattaggaaacataaccatgttttgaggcttcatagaaaacaaacgtctggggtcacacaggttaaaggaggaaccaaattcagcactatcactgttctattcggcaggcaattctggggccttcctgtgtcccaggttctgtactagttgtttcaggactttgggataaacacaaactatccctgccctcagggggattaaggtcaggtgtacaaatgactctaatgcgaggcaaggctggattcagtgctggaagaggagggcatacctaacgctacgggaattcaaagaggaaatgatcagaatgaggagggagagatgggtcattccgg

SEQ ID NO: 9398 - DNA, 648 bp, Homo sapiens
actttctgctttgccccctccctacctctatgctgatgaagagccagccatgcctccagcccttcctgaggccaccacatgatcttgcttattttcccattccaggaggtcacctgcagggctcctcccacctagccacaatggctagtcccgctgcctccacagtggccctgcagccccatcccagacccactgcacggggtcacaagcttgtgcagggtggacagagcagtagctcatggcagacattccttctgttcatctgttgcagggaaaatggggtgaggcatgggaggggttcccagaatcccagaaaggcagaaggagttgagatctgagacagagtaggctttggagactccctccacagaccactctcccaggggctaggttaatgggcctgctttgggaagctggggcaggtgaatcacctgaggtcaggagttcgagaccagcctggccaacatggtgaaacctcatctctactaaaatacaaaaattagccaggtgtggctgcacatgcctgtagtcccagccactcgggaggctgaggcacaagaatcacttgaacccaggaggtggaagttgcagtgagccaagatcacgtcactacactccagcctgggtgacagagtgagactctgtctc

SEQ ID NO: 9399 - DNA, 308 bp, Homo sapiens
cctatcacacccattcataaagatcttgcgtaggtgatttgggtttaccatttttgtctaaacttttcctcatgtgagttctggataatggactccgatttttttaaaaatggtaaaactaattgaacatatcagtcatttgtagttggagaaaaaattgacttgctttctatatgttaagtctagaccattttgccctctttgtaaaatgtgatttgtttttgtatatgtttagtaattttatgagctatttataacttactgtgaatgatcagagaacagggttcttttttttttttttaaatggt

SEQ ID NO: 9400 - DNA, 456 bp, Homo sapiens
taaacagcatcatatagtgtataatgaattacaatttgttattatttaacggtgcaattagaactttttttccccacatattggtacctgtaagttaatatcatcctctgtaattattatatagcaatctttagataaactgatttattagttgcctatcaatttatacgtagtaccagggatggatataaagaatagaaacaggtacagctgtggagaatgcaaccatttaagagtgggacagaagttatctctgcagactgtctggagaataaagaaacaaaggaacagaagctacttggaacagaggtgttgatggaaatgaagaaatagaagtccctaaaaggggtcaggtgctgtggctcacacctgtaattccagcactttgggaggctaaggcaggtggatcacctgaggtcaggatttcgaaactagcctggctaacatggtgaaatt

SEQ ID NO: 9401 - DNA, 222 bp, Homo sapiens
ggtaagtgaacgctttacttcttcatctattagaaaattattctctcaccagggtgcggtggctcactcctgtaatcccagctcactcctgtactttgggaggccgatgcgggcagatcatgaagtcaggagttcgagaccagcctgaccaacatggtgaatccccgtctctactaaaaatacaaaaattatccgggtgtggtggcacacacctgtaatccc

SEQ ID NO: 9402 - DNA, 586 bp, Homo sapiens
atatgactataaaatctatcttcatctgtagggaaggtaatgaattagcataaatgccttcataatccagtctctctccctcccctcttttctaataaaaatgcagagagaacactgtgaagctcaagctgcctctaaagaaagtagagatttacagaacataacctcacaagatttgttgatgaattatgaaggaaggacatttattttgagaatcatgagcattataatatttattgaggattagaattttgttatgtggaggtgctactacctcctcatgagccacttctgcactcaatctcagtaagaagaaaatgattaatttgtaaaatattaaattatcatgattttttcacttttctgtcggttttttctgttgatgtcaggtagcttatctttagtctttatgattaaaaaatgggagaaagatatcatattaaaaatgcagaggctgggcacggtgactcacacgtgtaatcccagctttgggaggccgaggtgggcagatcacctgaggtcaggagttcaagaccagcctggccaacacagcctaacaccatctctactaaaaatacaaaaatta

SEQ ID NO: 9403 - DNA, 528 bp, Homo sapiens
  misc_feature 410: n = A,T,C or G
atatttttaaaaggacaaatttcaggacactttccatctgagttcataagaaggtcctcttgagtatccttcaaagttaaaaccctctccccttcagattaatgaaaatattaggatgcatagaacacaatgggcactggtgatatggcccatggtagctgaattagattgagtataaatgaagtcttcacataatagcaaagaggccaacagaagaaaggccagaaagccacttgaaactcatgtccatggaagaccaaatgaagttgatttaactgttcccttagaaagatattatcccattgcttagccctcaaagtgttcatactgctactttccttctttatatcaccagttctgggagcaaacctcctgaaagaatggaagtatagactgtaaacacaagactngtgggtacagcaaaggggctctgatgctctagttgtttgtgtctagatactgtcaaatgtcccttgtgatgcacaattgcccttagcggagaaccattaaccaaaataaatgaaataa

SEQ ID NO: 9404 - DNA, 638 bp, Homo sapiens
attttaacagcaaatatctttctttcttagtgatttaaatcagttgactataccttgcttaaatccagtttctcacaaaatagaataaacagcaaatggttttatgattgtagcaaatgattcttaaaaattttccctttgataaatattgtttctacctatgtagacataatgtggcgatttggagagtgacattagcttaggatcaaataggattccatgactgagaacagaaggaagattctttctttcttttcttttttcttttcttttcttttcttttcctttctttcatggagttttacttttgttgcccaggctggagtgcagtgacatgatctcggctcactgcaacctccacctccaaggttcaagcgattctcctgcctcagcctcccaagtagctgggatttcaggtgcccgccaccatgcccggctatctttttgtatttttagtagagacagggtttcaacatattggccagactggtctcaaactcctgacctcaggtgatccgcctgcctcagcctcccgaagtgctgattacaggcatgagacactatgcccggacaaggaagatgttttcttaagtttcacactggcacttgaccttttatgaattcacggagtctcgggt

SEQ ID NO: 9405 - DNA, 328 bp, Homo sapiens
acactttgaccactttggcagtaagaaaatctatttgcttactccaatcttcattaaatttatttaaccattgaatttttttgctccctaccccctacaaaacgcctattaaacgcttcacagttgacttatgctaataggcaataagggtgtgacccaggagaggctatatacatatgggcacatacattacatattcagaaaagcattcagaagaaaacgctcatagaattttagaaattataattccttggctgggcacggtagctcatgcctgtaatctcagcactttgggaggccgaggtgggctgaccatttgaggtcagga

SEQ ID NO: 9406 - DNA, 122 bp, Homo sapiens
caaatgaaaagctgatggctcagagaagttaaatgacttgcccaaggtgactgagccagtaggccacagacaggctccaaatcccagtctggaccgattggatgggcattcctgggtgggcc

SEQ ID NO: 9407 - DNA, 246 bp, Homo sapiens
ccctctgggaggctgaggaggtaggattccttgagcccagcagtttgagaccagcctgggaaacatagggagacgctgtctctataaaaaataataattacaatttaaaaaaaattgatgaagataggtgaaggttatatgacctttcactacactattcttgaaatttctctgaaggtttgaaatttatcaaaataaaaaaattgagaaaaaattttcaaactgccacagtcaataattgaattc

SEQ ID NO: 9408 - DNA, 580 bp, Homo sapiens
ggcacgagggctgacggataaaatgaggaagccaacttcactgtatcctcaatgcatggagacatgccccacaaagagcgggagtccatcatgaacgtattccggtcgggcgccagccgagtgcttatttctacagatgtctgggccagggggttggatgtccctcatgtgtccctcatcattaactatgatctccctaataacagaaaattgtacatacacagaattgggagatcaagtcgatacggccggaagggtgtggccattaactttgtaaagaatgacgacatccgcatcctcagatatatcgagcagtactattccactcaaattgatgagatgccgatgaacgttgctgatcttatctgaagcaacagatcagtgggatgaaggatactgttcacctgctgtgtactcctgtttggaagtatttacatccagattctacttaatggggtttatatggactttcttctcataaatggcctgccgtctcccttcctttgaagaggatatggggattctgctctcttttcttatttacatgtaaataatacattgttctaagactttttcatta

SEQ ID NO: 9409 - DNA, 482 bp, Homo sapiens
ggcacgagccatcttcaagagatgactttacagagtttggaaagttactaaaagataaaattacacaatatgaaaagtcactatattatgccagttttttggaagtcttaattcgagatgtgtgtatttcattggaaattgatgacttgaaaaaaattaccaattcactgactgtgctttgcagtgaaaaacagaagcaagaaaagcaaagcaaagccaaaaagaagaagaaaggtgtggttcctggagggggattaaaagccaccatgaaagatgatctggcagattatggtggttatgatggaggatatgtacaagactatgaagacttcatgtgacattttatcttttcttggtgtcatctttatgttgcccacaatcccttgaacatgtagcacaacttcctttcctttcagttctgccaaatgctacaatcagaagtgcagtatcttttgtgctgggtatttaaccccttgacactt

SEQ ID NO: 9410 - DNA, 103 bp, Homo sapiens
ccttcctccattatcagtactttcaggtgtctcactacagattagaatggcccactgctgtcttatctgctgagatctttgctatttttagttcattaaacac

SEQ ID NO: 9411 - DNA, 579 bp, Homo sapiens
gctcttaggatacaaaacaagacagggaaattttatctggtattggtttcagggacccgtagcaaacttggtaactgaccagctgccaggcttaaaatgcgagcttataggagccgtaaacccacgttctatccagtgatacctctctttccattatagagtgacacagaaagacaaattcttagcacaaattgcaccagatatgctacattctaaggctagtctcacaaatcctctttttttctattaatcaaacttttgcagaggagacaaacagtgacgtttaacattccccctaccctcaccctccaccacacatacacacacagagagagagagagagagagggagagagaccagaagcttgactagtaagaatttcttaggccaggcacggtggctcatgcctgtaatcccagcactttgggaggcctaggtgcgtggatcagtttgagaccagcctgaccaacacggagaaaccctgtctctactaaaaatacaaaattagctgggtgtggtggcacatgcctgtaatcccagctactcgggaggctgaggcaggagaatcacttgaaccca

SEQ ID NO: 9412 - DNA, 563 bp, Homo sapiens
cacaatttaggatcgtgccagatcacccaacaaaagatggctaatacgctgaaagcaggtctcttggcaaaaacaggagtatgaagaatgtggacgtacatttccaattgctcgtgggaggccaggtgcagtggctcacgcctgtcatcccagcactttgagaggccgaggcgggtggattacttgaggtcaggagttcgagaccagcctggcccacacagtgaaacctgtttctactaaaaatataaaaagtagccgggtgtggtgacgcctgcctatagtcccagctactcaggaggctgagacaggagaatggcttgagctcaggaggcagaggttgcagtgagctgagattgagccactgcactccagcctggatgacagagtaaaactctgtcacaaaaaaaaaataaaaaataaaaaaaaacacaagaaaacaaaaaaaaacccaaattgcttgtaagagacccctgccagcatagaaacatttacccatctaatgattattcaagacctgggaggaaatgaaggtgttttatttgcataccaaattcaattaacta

SEQ ID NO: 9413 - DNA, 599 bp, Homo sapiens
taaagctagaagatttatcacgcagcaagttcaacctcaggaattccatataagtccacaagcgcatgtgtctaaaaactgttgagtaagtaaattcaatgatgaaaactgtaatttatatcaaggatgagaaatactctctttgtaggtctattgtcaatgactaatatatgaagaattaatgcagttgatcatctaaataatgctacacatgtctgtttccattggcctgtggacaagaacatgtgtcagtaaaaaaaagagttttgaaataaatctcagatattatgattgtttcattttctctaataaaatgtgaacatttattcattcttggaaaataattttgaatagaggtatattcaggtatatgtgttatattcctttgttaactttataggcattagtttcattaattaaatataatgtggctttggtggaatgaaaaaacactagcctgaagctgaactggtcacttttcagttttgtgtttggtgggtgtggacagacatgatgtaattctttggagaattgagacaacttgggagatttacagggcacatgtgattgtatttccattagtgaaattgtcacacatt

SEQ ID NO: 9414 - DNA, 103 bp, Homo sapiens
gcaagttgctttttccatctcagcttcagttcgcccatctggaaaatggcaataataccaagcatctggcagcctgaggatgaaataaaaatcacagaacctt

SEQ ID NO: 9415 - DNA, 516 bp, Homo sapiens
taatttctgtgcccctttactcaaaaatagtacaagacaaagaaaatgaaaacagaaacaaactccaaggtccatgaaaccagaaactaatcctgaaccatgctaacaaaatagaaagcttatcaagtgattataaaccactctgcatataagcagcatataagtccaaatgcctgcagagagtcctgtgggactcagaaaagcacagggactagagcaagcttgttcaacctgaggcctgtgggccacatgtggcccaggacagctttcaatgtggtccaacacaaattcataaactttcttaaaacattacaaggttgggcgcagtggctcacacctgtcatccctgcactttgggaggccaaggcgggcggatcacaagaggtcaggagtttgagaccagcctggccaacatggtaaaaacccgtctctactaaaaatacaaaaattagccgggcgtggtggcacacacctgtggtcccagctactcaggaggctgaagcacaagaatcgctt

SEQ ID NO: 9416 - DNA, 300 bp, Homo sapiens
aattccgttgctgtcgcatcagccctgctttctcccgctccgtgactttgcatcagttgtcatgaggatgattaaataatttagcacttagccccctgctgtactccttggcctggatcatgaccacaccgaaggagtgcccaccagcaagagacctggagacatccccaattcctgcaagcagaatctgggatgaacagtctgcatgcctctcgccacctgtcccagggattccctgttccacaagacacttgggatctgcttgtcatgcatcatgcgtaactaatagtgcagaggaat

SEQ ID NO: 9417 - DNA, 145 bp, Homo sapiens
taaagatgaggtttcgccatgttgcccaggtgggtttcgaactcctgagctcaaacaatgcactcacctcggcctcccaaagtgctgggattacaggtgtgagccaccggacccagcctacacttttttgaggacatgtatgtcc

SEQ ID NO: 9418 - DNA, 327 bp, Homo sapiens
ctgggtgacaaagtcgcaaggttgtgtctcttacctgcccacaggtgcacgtcgtcagccccaccgcctcactgcagcccccaaggttaccgccagccgccgaggggtgggaacggcagggtgatgatatcaacagccaagaaccccctgggcttgtccactgctcaggccgtcccagcccccggggaagcaggtccaccactaggcccattcgacagatagcagcacaatcaccgtcaccacgactggagaatgacatgtcccagcacctagtgccaggccctcttccaagggcttgcatttgcttatccatttaacccccagcag

SEQ ID NO: 9419 - DNA, 590 bp, Homo sapiens
tgggcacagacgtgagtgagtgtgtgggatgaggaagaaatgtgtggaagttcttgtgtgatggagcaaaagttcttaagtgcagcaggtgaatttgctgacattgcgttgatttgttgggatagggattgaggaaagttggtagaagtttagaataatcactgagggaaaaggacagggtttgatggggagactagagagaaacatgaagggttgcctgtccaggaaagttggtgtccaccaaagttggagtctatgaatatctaaagtcagatattcttgtgatcgtgatatttattcagcttttgttgagcttagtagtttagaagtacaggaggtggatgattccattgcttaaaggtttggttttataaaagttctgtcagaaggatgaaagagcaagagacttgaggttaaaatgttccaagagtgtttgaagaaatgaactatgttattctaaagatgtccatagaggctgggggcactgtggctcactcatcccggcaccttgggagcccaaggcaggaggatcccttgagcccaggagttcaagaccagcctgggcaacatgatgaaatcctgccactacg

SEQ ID NO: 9420 - DNA, 481 bp, Homo sapiens
ggccttctgaagcagagggaagcctatcagagtaagctcaggtgggcctggtcagcctcgccgagctctcatttccactctgcccacagccacagagggaatgggttgcctggagaggtagcgagtgctgcatcagtgcaggtattctcgcacagattcgacaactgcgtatcagcctgtaggtgagggaatagttaggcttgatcatccagaaagttccttttgaccctaaaagtctgattcttgtgattctagcctttggcaaaccacagataaccagtctctcctcctatagtatagggttcttattacgattattgaccttgtgatgacaagggtcacaaatccaggaggctgtgaagcccctgaaattattacttttttcttccttttttttttttttttgggttttttaaaacctaaatctggaaaagaacccccttaaatttttttcccaatttgggggggttgccttttggcc

SEQ ID NO: 9421 - DNA, 460 bp, Homo sapiens
gtttttaatggaacaaaactattttgggcatctttctatgtcaaatacacaaacttacttcattctcttagtagcaacacaccattccactgcgttcttaaatatatcaacgttctctttaactctgtaaaagcttcattaaaattttaattataattgacttaaattgataaattaatataggggagaatttacactttaaaaatacttagtatttctttttttttttaaatttttttaagacaaattctcactctgtcatccaggctagagtgcaatggcacaatctcggctcactgcaacctctgcctcctgggtttgagtgattctcccacctcagcctcccgagtagctgggactacaggcacatgccaccacgcctggctaattgtttgtaaaaatatttatttttcctatcaaggaacatggcatatctttccatttatttaagtcttctctt

SEQ ID NO: 9422 - DNA, 614 bp, Homo sapiens
ggttgaaagtaaggatttaatgtttatttttccaaatggatagacacttgtcaacaatcctttattacacaacccatcttttgcccactgtttggaaatgcatgcttaagtttgtatataaattagtttgtttcttgacttattattttgtttcactaattaatctatttctaagtgtattcatttttgattgctgctgtaacaaattgtcaatagctaagacaacactgggcccggtggctcacacctgtattcccagcactttgggaggctgagacgggcagatcgcttgaggtcaggagtttgaaaccagcctggccaacatggcgaaaccctgtctctactaaaaatacaaaaattagccggtgtagtggcgtgcacctgatatcccagctactcgggaagctgagacaggagaaccgcttgaacacggtagacagagattgcagtgagccgaggtcaccccactgccctccagcttggacgacaaaagtgagactccatctcaaaaaatatttatatagctaagacaatttttgaaaaagaagaataaggtgggaggaattgctctaccatatttcaatacttcttatatagctacaggaatcaagact

SEQ ID NO: 9423 - DNA, 605 bp, Homo sapiens
gtaaacacctgggaactagaaatctgagaaagaggacaacacccaacaccacctaactatggccctcgatacagtcatttaacttaataaccttccgtgagagtaaggtcattatgaaatatgctcggttttacacaaagctttaaaaaaagccacataaaatagtatatgaggtcacctctgattcctatgtaaagaagattcctcctcccttccctcattcattgttctccacactctactccacacctcccctcaccctgcaatccaacttatcaaaagtttaattttccctttccaaaagcaatgtacttgaaattcctattcttagttatgtgcattttggtttcctctttgattttcctttttttccaggtttcctgttgataccaacatgaatctcaagggcttccctttgcttcttttggaaaaaaataaagaaaagagactgatttagagcctatagggtggaaaatcacagccaggaaaaggcaggcatagcatgcagcagttcagagacagggctcacccgcccatctcttccatcagccacctccctggtagggcatcccttggaacagaagccagcaatggtcctgcaggga

SEQ ID NO: 9424 - DNA, 578 bp, Homo sapiens
ttactaaattaaggattattatagcagatacaattctatatcaacatgtccctagagaaacagtggaagtaactatagcagaaaattttaaagcactgtaaattatactgtgccagttatgaagaatttattttcaattgtataatacataaatgatttaacaaaatatatcatttaattgttttaatttttgttatccctaaattattataaaaaatcttccaatcttaataatagaattttgtctttttaaattcaaaatcctattttaagcaatttggaaatctgtaaaagaagcattcactaaatatgctctatgctttctacttgtaaatgcattgcttgtaaaatattgctcattttagttgctgatctctagtgactcacacttgtccttctttgtaggagttcctatgtagtccagatttactgagtgcgaaaagggagcagctacattctgttctcatcaacaagctaacttagtataggtggctaatgttcagactatagcatttcagagtgagggaagatcttcagagaagaggccagctggaaccatttgttgcttatcacacatc

SEQ ID NO: 9425 - DNA, 636 bp, Homo sapiens
gaattatttgcatctcatcactggaagtcccattgaacagcactactctggtttttgcccttgcttcacatagcgtggtgcagaaaatagcaattctgaatcacttattagaactggagtcttagatctcacccagaccaactgaatcggaatctgcgttatatataacaagattgccagggcactcagtgcatgttaggatttgagaagcgccgctgcatagtacacatccaccatgtttagtaacccagtccttcagtgatggacacctaggttcccttcactttgagcgtgccacttatgtatctatacaagactcctcttgaccattcacacaggagtgggaccaaggggcctaaaggcctattcttaatcaatttcaccgaatactggcaagtttttgtctaacaaagaagggttcgaccaggtgcggtggctcacgcctgtaatcccagcactttgggaggccaaggcgggcagatcatgaggtcaggagaccgagaccatcctggctaacacggtgaaaccccgtctctactaaaaatacaaaaaattagccgggtgtggtggtgggtgcctgtagtcccagctactcaggaggctgaggcaggagaattgcttgaacccgggaggctg

SEQ ID NO: 9426 - DNA, 215 bp, Homo sapiens
ttgtaagttggtttcaggctctgttgaataaaagtgtttgaatctttttttctctattaatatttcttggtagtacatatggtcaaatgtttattaaagaggaaaaaactggtaagctttaaaatgctgttaaaagttttggaaacttccttgacagaaatttcatttttggtgttgttgaaggttaacttaaaaattatgtgtgtgtgtgtgtg

SEQ ID NO: 9427 - DNA, 565 bp, Homo sapiens
ggttgagtggtcttgggcaagacactgtccctctctgagcctcactttccccttctgtggaataaagggactggaccatcctaactcatgttttttctacagagaggacctctgtctacagccagacttgataatgaattccccaggagtccaacctctggccctaaaaagggggttcaaggaaatcctcataccccacctctttcaacagcactggccaatggcccccatgctgcaggtaaaaacatggccaaagatatggatgaaacaaaatccaatccagccaggcacggtggctcacgcctgtaatcccagcactttgggaggccgagacgggcggatcacgaagtcaggagatcgagaccatcctggctaacacggtgaaaccccgtccctactaaaaatacaaaaaaaatagccgggcatggtggtgggcgcctggagtcccagctactcgggaggctgaggcaggagaatagtgtgaacctgggaggcggagtttgcagtgagccgagattgcgccactgtactccagcctgggcgacagagcgagactccgtctcat

SEQ ID NO: 9428 - DNA, 554 bp, Homo sapiens
  misc_feature 384: n = A,T,C or G
tttggagcaagtaatttttctgctctgaatctgtttccttatctgtaaaatgaagccgatatctacctcttaggtttactgtgaggataaatggaaatgttgccagtgaagcaacctgatttagtggctggtacatcataggtgatcatttcattgatccttaatgcagccatttaacaaatgtctatgggccagccatttgccaataagcaagcatctggctcccctacatgttacgttctagtgggaaaaatgggcaacagaggtataaatacaaaataaatattttgtatgatgacaaatattttaataacatgtgttctaaaagtaaaacaggttagtagggggaaaaagagtgctacagaagatgaccaatctggcggngcatgttagctcacatctgtaatcccagccctttgggaggctgaggcgagtggatcacctgaggtcaggaatttgagaccagcctggccaacatggtaaaatcccgtctacactaaaaatacaaaaattagccgggcgtggtggctcatgcctgtagtcccagctactcg

SEQ ID NO: 9429 - DNA, 507 bp, Homo sapiens
  misc_feature 359: n = A,T,C or G
gaggtcaagagttcaagaccagcctggccaacatggcaaaaccctgtctctactaaaaaatacaaaaattagccaggtgtggtggtgggcgcctgtagtcccagctacttgggaggctgaggcaggagaactgcttgaacacaggaggcaaaggttgcagtgacctgagatcacaccactgcactccagcctgggcacagagtgagactctatctcaaagaaacaaaaaagataacctagtttttactgtttcttttgcattatatgttagatttttcatgtacatttatgggtttgttgtagtcttaaatttgatttttatataattaaagatctatatgattgtatgcagccctcanaggggagctttgttccaaaagtttatctataaatcatagtttgtggactgctgtagagaaactactataaattgtgattgaataggtttccagtcaccccacaacatctatttcatttcacaatgtggatgaatttagtttatacttc

SEQ ID NO: 9430 - DNA, 464 bp, Homo sapiens
cttaggttagacctgcactttctaatataatagccactagtcgcatgtggctactgagcacctaagaagtggctagtcttacttaacatgtgctgcaaatgtaaaatacaaactggatttttgaagactttgtgagaaaaaagttatgctgattccatcttgaaattatattttgggtatattgagttaaatgaattattaaaatgaattttacctatctttttacatttctaaatgtggttacaattttaaaatcacacattaggctttcatgtgtggttcccatgtttctattagatagtactgctacagtttgcaggaaatctaggggatgtggaaataagtgaaacaattgcttcatttataaagtgagataggggtctcactatattgtccaggctgggtctcaactgctggattcaagtgatcctcccaactcagcctcccaaaatgctgggatcaca

SEQ ID NO: 9431 - DNA, 327 bp, Homo sapiens
ctcagcctcccaagttgctgggattacaggcatgtgccaccgcgcctggctaattttgtatttttagtagagacggggtttctccatgttggccaggctggtctcaaactcccgacctcaggttatcctcccgcctcagcctcccaaagtgctgagattataggcgtgagccaccgcacccggctaccttgacattttctaacctagagtcaccttaaccactgtcgtctccctctggaatcccctctagaagatccccttaatttataccactctgtctcctggcattggccacattcctgtcttcagatatcccagggactcacc

SEQ ID NO: 9432 - DNA, 361 bp, Homo sapiens
caaagattaaagacccatgggccagaaggtaccacagcttttatcttccctttaagaaatatttgatccaagcacttatccttctttaagtcagttaattagagctcttttttttaatagacattacacactcaatacatatataactacacagacaggcagaagatccagtagctataagattttttgtttgccatctcctaattggattattggcctctgggtggagccctttaagagcaagggtaggaaagcatgtagtttctagggcctaataaacaggtatagctgacaaagacagactttgacagggatccatctgcctgtaatttctggggctccatgaggaaaacaggtctct

SEQ ID NO: 9433 - DNA, 527 bp, Homo sapiens
ggctgggagaggggcacccgcgcacgggagcagccggtgggaactcaggggcgactcagagggatcagcctgcaggtcacagcccgggctgtggtcccatgggctctgtgctgcctgtgtgcttgcgaagttaattacagccacacacaaactcactgcaaattgttcccagttagaactgcaaattcactggaacaaggagtgctaattacattccacttgttcccactgcctcttgttaatattccaacagctgcttcagcaagataatgatggctccagccgaaatgattgaacagatagatttaaaaatcagtactggctgggcgcggtggctcacccctgtaaccccagcactttgggaggccgaggtgggtggatcacctgaggtcaggagttcaaggccagcctagccaacatgatgaaaccccatctctactaaaatatacaaaaattagctgggcgtggtggcgttcgcctgtagtcccagctactcgggaggctgaggcaggggaatcacttgaacc

SEQ ID NO: 9434 - DNA, 472 bp, Homo sapiens
caacggcacctacctggtcagcttcactctgttctgggagggccaggtctctctgtctctgctgctcatccaccccagtgaaggggtgtcagctctctggagtgcaaggaaccaaggctatgacagggtgatcttcactggccagtttgtcaatggcacttcccaagtccactctgaatgtggcctgatcctaaacacaaatgctgaattgtgccagtacctggacaacagagaccaagaaggcttctactgtgtgaggcctcaacacatgccctgtgctgcactcactcacatgtattctaagaacaagaaagtttcttatcttagcaaacaagaaaagagcctctttgaaaggtcaaatgtgggtgtagagattatggaaaaattcaatacaattagtgtctccaaatgcaacaaagaaacagttgcaatgaaagagaaatgcaagtttggaatgacatccacaatcccc

SEQ ID NO: 9435 - DNA, 569 bp, Homo sapiens
atgagatcttttggcggtctaatagctattaaaatttcaaagtgatgatcataaatgatgttttgagataatctataacaataataatgtggcatgaaaatatctgatttctatgggtgacaacttcacagattctgccaatcctaagagatgctaaatttttgttaaaagttcatgaaaatgagatgcaattcaagttgacagaaccctgtgaattctatccatggatccctttaggatctgtgcattacaggtaaagaacacttcctttacagcattgtaaaccagtgcacgaatgctcattagacatgtataatacaataaagttctgctggctaagagcactctagaacattggaagcagggagatgagggtaggagaattgcataaacagcatagtctctggagccagattttctgggttcaaattccagctccacctcttactatttttgtgatcttgaacaagtgacttaacctctcaacactatttcttcaacttttaaatggcaataatagggccgggcatggtggttcatgcctgtaattccaaggaggggaatttgga

SEQ ID NO: 9436 - DNA, 491 bp, Homo sapiens
aaactggtacaccccttctggagggcaacctgacaattataccaaacatatgtatatccttcgagccagcaatttcatttggagatattcactcaaaaaagataaatataacgctgcatatcagcattatgtagcataaacctggctgtatatcataagtacctaaataatctcactcatcactattaataagctaaaggttttactttgaacaaactgatagagggaattgtttagccttcagaaatttttaattaaatcatatggaaatgaaagtttgagaataaaaggaaagcagcgtaatagctaaatggagcaaaaggatcattaaaaatttttctcaaaggtagaggaaatcaaatttgataaagggaataaaaatagagtcagtgaaaaggaaaatactcaaaatgataggaagaaggaggatgcaatatcctagagcagtggttacttacataggtgagttattagggaggcttttttttttt

SEQ ID NO: 9437 - DNA, 343 bp, Homo sapiens
catctaaaagatctctggttggatggaaatcaactgtcagaattacctcaggtaagtggtaatttcacagtgtctccccaaaacataaaacagcaacaataagctttgtgtatttcctgctgccacataaggtttgctataaaaggatcttgaaaaccaaaaacattgattgaaaaggcacatttggaaaaaacatattgagcatgcatcattctccattgccatataaaaactgaaaacctcaacccaccatttgtaaatatagtaaatatttcctttagtttgtaaaatctgtattttattgtgtccttgctacccatatagcttacttcaagcccagcag

SEQ ID NO: 9438 - DNA, 514 bp, Homo sapiens
aggggtcctgtcaacagtcagtttatttatatatgcattgtttacaaaatacagcagtctgtttttaagataagggggaaatggtatgaaaaccactgctgtagaaaggagaaagaataagctataaaagcagtgcaaagagaagcattcattgcaagggttctaaatcagaatcataactgatgcctctgtgaaaaagaaggcaactcagaaaaaactgcagggcagccataggaaccccaattaaacttcaagtagaatattctatctcataagcatgaaaacctaaataaaaataatgagtcagaacagaaatcttttgcttgctgtcaagtaaagaatcaattcgtggccaggtgcggtggctcacgcctgtaatcccagcactttgggaagctgaggcagatggatcacctgaggtcgggagtttgagacctgcctgaccaacatggagaaaccccatccctactaaaaatacaaaattagctgggcatggtggcgcatgcctgtcatc

SEQ ID NO: 9439 - DNA, 548 bp, Homo sapiens
agacgtcgaggggtgggcagtggatccgaccagagctgaactttagaaaagatctgttgcttggataaggaacagattcggttgctcaacccaacctgcccctatcgccaatgacccagctcaacgttctctctggtttagaggaaaacaacaggacgttaggaagtaaccagatcagatggtcagaggtggatctagggggagccgggacactctctaacgctcctccagcaggagatgtcctgggcggtgcctagaggaatgtgatggcttcacgcatgtggaagagcctagcgagtgaggctccctgcagctatggatgtccactgcagcctcatgtcctggcctcgccctcccagtatgagcttggaattttcttaaacaagaaatttccagtgttggccaggcgcagtcccagcacctttggaggctgaggcgggtgggtcacctgaggtcaggagttcgagaccagcctggctaacatggtgaaattctgtctgtactaaaaaatacaaaaattagctgggcctggtggcgtgtgcctgtag

SEQ ID NO: 9440 - DNA, 500 bp, Homo sapiens
cttgtccccaaaacataatttccctgctgtatttatctcaatggaatttagaagtagcgtggattatgtcaccctgagagttatttcttgtgtccactaaaagagaaaatgcacagaagaacgtgtctatcttaccgagaccactcatacagtgttggcaagaggacagtccccagagtctcaccatataatgaagctaatcactctatgaattatcttaattgaatttgaatgtattgctactgagtactatgggaagagcggccagtaaggacgcggtattttcccacagcattcagttagcaatgcattcaaatttaattaagatcattcatacagtgattagctttcttcgacgacagaaggcactggggatgtccgtgctacagttgcctgcttttggtctgcctaagataggcatatctactttcacaggttgtctcttgtattgagtacaggattgtttgatccatccttaagtattatcctgagatgtgctt

SEQ ID NO: 9441 - DNA, 396 bp, Homo sapiens
ggagaaatccacagtgataacattttgtgtatttccttccagacatttttttccctctacatgtgtcagcacttcccagatgtgatgatggtatttgaaagagcatgatctggaaatcctgagccgtgctgccacaagaaaatggatgcacagaggacaaggccaggcagcgcaggtcttcattacactgagactttgcctgagtcccatggtgccccagtgccctggcctgggcacatcagcactgccttctgtccaggccccatgagtctcagatggtggaccctggtgacggaaggctgggtagatgccatggacctttcataggtcatagccacagctgagcacttggtgtcttactactcagtggagaggagaagtgtgctgaagggtggt

SEQ ID NO: 9442 - DNA, 359 bp, Homo sapiens
aggatagaggagcatatggaaatgccatctctgaaaaataccattacagaataggcaacaaccttgagttagttggatacaaggaactgggccaaatagcctcttgaaactactttctgctcctcccttcttaccgtcctttcttcctttcatgcatttactgcaggtaacgcatgatacaagtttttttaggagaaagaaatgtggagcccaaaacattgctaatatagaaggaatcaggcttaatttagcatgtttcaaagagccgtgtccaagtcatccaaataaagaccttatttggcaaggtcagctgccctttaaatcaaccctcacaagttaaggtattgtatatggtactc

SEQ ID NO: 9443 - DNA, 450 bp, Homo sapiens
  misc_feature 395: n = A,T,C or G
cctgtgtttcctgttttcttgaaatgaggcagcggtcccaaggtttgcagagtgttaggattaagatgtgtaggttgaccattcctgccgacgtttgccagtgtgttcaacttggctttattggtttgttccttgcttgataaaaattgtgcatcgcagccctgaggaaacgtcccaggtttaagtattagggctttgatgtgcagctgggtaatgtttacctttatttgtgaaaagctaaatccagagtcatcacttgagaatcaagtcactacaataaagatgtttgaaaatgatttttaaaaaaatgttatttactatctcacgacactttggtaggccagtaaatttctgagcctatctaaacagtgagactggagatacattgtgcattntatatcctgttttttatctttttctcttaaacttatttacatcaatataataaag

SEQ ID NO: 9444 - DNA, 453 bp, Homo sapiens
gtgggtctgagtgtggccatataacggcactctggctaatgagacatgaaaggaagtctgtggggtgtgcagggagggtgacagtggggactcatcctcatcagaagacagagacttccagggagactgccctttccttgtttcccttcttcctgccttgaatgcagatgtgacagttggcgggtcagcagccattctgtagtaatgagatgataaggatgacaaagagattgcaggaaatccacccctgccatcatcaaggcaagcgttactgcctcctgatttcttgttatggaagaaagattaacgcctatttttcttccctaaaccactataaattggatttttctttgacctgacaccaaacacattcctatagaattcactgccacacagccgagtaaatgtttgcttttacctggcttttacaactctctgagcttcccaccatct

SEQ ID NO: 9445 - DNA, 286 bp, Homo sapiens
gagttgtcagtatataggaatgctaaatgttaatagacacatggatttcattatactgtttcgtatttgatttacgtttttcataataaagcctggacgcagtgactcacacttgtaatccctgcactttggaaggttgcggcaggaggattgcttgagcccaggagtttgagaccagcctgggcaacatagtggaactctgtccctaataataaataagtacataaataaaaatttgtataatgaaacttttttttaaaccataggaagccgggtgcagtggctc

SEQ ID NO: 9446 - DNA, 438 bp, Homo sapiens
gtttcaacatgtgaatgtgggggaggacacaattcagtccacagcgggtactgtaagactctgggaattaccctgaactagtttattccaagcaggtggccctgagctgtgcttcctttaaaatctatttgtagccttaccagactatattatataaactcctctccacatggccacctctaaaacttcctcagcattttcagaacttaattttgtccaaatgcttcaagtttcttccagatgtctgccatctcccagatacagctacttagcaaaatcagagacattccctgtcatggagacacggcccagttcccatgtggttccagggaagatttggtcaaaacattgcccatttctacacagtgtctaaatggaactagcacccaatggttaaagaatattctcagccagggaccgtggctcacctctgtaatc

SEQ ID NO: 9447 - DNA, 547 bp, Homo sapiens
ggtgagagatagagtaaaccttaatttggatttcagagtagagagtctatcttcttggctatatccacctgatataaaatttctgtcaagatgagcccaggataggtgaaggagaaggtctcagataccatggggtctctgtgctcttattaagttttagtagatttttaaaataacttagttttgttaattaggacgatttctagggacattaagtggttgtgattttaaatgtttttatgctagttaggcatttttcacaagggagtgtctctgtgaaacactacatgtcatcattcttaaagaaaagcactctagtttggtttgtaaaaatgagcatgtatgcaaggaaaaaaaaattatcagacattaaacattatacatagttttaattgcattgatgggagtgggagttttgcattttcacatcttacataatggatgaacagagaactttagttcttagtaagaaaacaaaaacattgaaccatggatagaacagtggggagctctcttttgaacaacttgtaggttgatgagtaaatca

SEQ ID NO: 9448 - DNA, 461 bp, Homo sapiens
aattggttccaggacctcttgtgaataccaaagtccatgaatgctcaagtccctggtataaaataagataatatttgaacataacctacatacatgtttccatatactttaaatcatccccagattatttattatacctaatataatgtaaatgccatttaatttgttatactgtgttgttttgggaacaatgacaaagaaaaatgtctgcacatgttcagtacaggtgcaattatgtctttcaaaatatttttgatatatagttggttgagtcatggatgcaggacacacggatttgagaggatcaactgttctcccttggttaagctgccaattatattattttccttattccatatgcccttggcaataattcttttgtttcgtttttgagatggaatctcgctcgctctgtcaccaaggctgcagtgtaatggcacgatcttggctcactgcaacct

SEQ ID NO: 9449 - DNA, 560 bp, Homo sapiens
gtcgtatgtgaatctgtgaatccttataagaaatgtttattgttcaagaaagaagcctcctctggtggttgataagcaattctccacggcagagaaatgctaatgttttgttcttatgtcttgattgatgctttcactacttattcttcaggctataagacagaaggaaacacagtgttaccttctttcataattacaaattccaacacctctttctcccccccaccccctgtctcccttctacttctcatattaccttaaccatcaaattcaaatgcatctgaatttgtaaagttaatctttcaggttctaaaataaacctgtatatataatatctccattactaatgccatctccacatacgtacaagaaaatgtatagctctacattgtcaatccagacactaaattcattccaaatgtttttaaataaaaataatgaattgatttttatttatggcatgctgcatacacccatctttaagtttcaggtataactacatgcagaaccctcttgttgaaagtgcagagcaacattacagtggctaaatttcaaattaa

SEQ ID NO: 9450 - DNA, 645 bp, Homo sapiens
aatacttaatgagaaatatgttcttggaaaaatagaatatatacaagcaggataatcaagcaggacattctttttattatattatctttattattttggctctgccatgttagcaataataagtaaattctgatcaactaaaatgaaaaatgcataagatggatttaacagtagatttcaataggcaaaagaaagaattcatgaacttacagatagatttatttagactaaacaatttgaattaaaaaatgtgaaaaataaacagagccttagaaaactggaggacctcattaagggcactaatacatgatgatgggagtaaccgaagaagagaagagaaaaaggaacagaaaaaatattcaaaaaataatggttaaagttttcctagtttgatgaaaaatactaatctacacattcaagctcagtgaactccaagtcggataaactcaaagacgacacagacgtatcacagtaaaaatgctgaaaaacaaagacaaaaaatctttaaagcagcaacagaaaaatgactcatcatgtctagtaacattaatggctaaatttcattagaaaaaatgacccgggccgggcggggtggctcacgcctgtaatcccagcagtttgggaggccgaggcggtcggatcatg

SEQ ID NO: 9451 - DNA, 309 bp, Homo sapiens
aggtgcctgtagtcccagctactcaggaggctgaggcaggagaatcgcttgaacccgggaggcagaggttgaagtgagccaagattgcgccactgcactccagcctgggcgacagaatgagactccgtctcaaaaataaaataaaataaagagggggtaaaaaaccataattgtctaagaattgctctgaggattacatcagtgtaaggtaatgaactttactgaaatgtatgcaaaaaatatcactttcattatcattatcatcatcatcatcatcttcacctgatactttaaaaacttcaaatgaaa

SEQ ID NO: 9452 - DNA, 259 bp, Homo sapiens
agtaatagtgattattattatttaaagatgcaactacttctgcaccaatctaatagattacatttaaaatggaagcctttctttgaccttttggtctggactatggctgtacagtgtagcaaagcaaaaggaacatggcggggcaactttctaggcaaacacagcaggagcactacacttactttaagggccctggaaagaggactccaaatcagcatttctactcacattgaaatccaggtctatgtaagtattcttt

SEQ ID NO: 9453 - DNA, 644 bp, Homo sapiens
gttcgttactggtgaatttcaatgtagtgacatcatgttaaatgaatacacagagaatgcatataaaagtacaatccttacttgggccctggagttcgggaccagcctgggtaacatagcaagacctggtctctcaaaaaaaaacacaaaaaaacaaaaaaacactgaaatcacatgtttaaaatatgcaaaccaacttctaccaagttctaaatatacctttgccttctgaaggcttttttaaatactgcacacattttcaacaagcattcctttagtatttccattgtttagggtaatatttagttttctcccatgggacgagcccagatcaagccctcaacttgtcatgacaatgtttattcaggtaaaacaaacaaattgccctctaaaaagtattttctacagctcgaattacccacttacacaagttataacaactattaacaattttatcatttatatttgaagtcacttgctttgggggttttcactgagtgggagtagataactgagatatcctcaaagtcagagaaattctgtgattcaactgctagaggtcatttgatattaataatagttgaagttagtgaagcatgataatctccacattccatttatttacatcatgctcctgaatatat

SEQ ID NO: 9454 - DNA, 284 bp, Homo sapiens
aaaaagcagtcaggtgcaggtttcctatttccttaataagaaagtaagcaattctcttgcaggaggtacagctgggcactggaatgcctggtctcatgatagcattggtttggtcagaacccagtgcaataagcttgtcaagccatgggaatcagtgagaattctaagccccaaacagaaacaaatgaactgggtttttacaggcagtgccttcatctataactgcactcagagttctttggactcatatttttaagtcaaagagaatgcatgcttggagcacg

SEQ ID NO: 9455 - DNA, 484 bp, Homo sapiens
tgagcccagaggtaacttcagaatcctccctaacacaaaactccagcggtcactactgatgcaatacatgttgactatcacaaattcaagcccacctaaaagagagaagaacaaaagcagtgcaactggatagagagctatggctgaggccaactatgatcaaatttattgtctacgaaaacaagtaaccctggtgactgagagatttattaaataatcctttgggctttacatagatactgggtataataatcaaatagcataaaataccaaaatataattgtcaagatatactagggagtggtaaagatacggaaacatgttaaatattatctgtcatgtatattaaaagagatataggggtggaaaaccagtgctatgaaaaataagtgctaaaaacatggcaaagttcaggaaatggagggtccattgtggtaatctagagagctttcatatggatatactaaaacttaagacagacctt

SEQ ID NO: 9456 - DNA, 487 bp, Homo sapiens
taattcatttgaatcacttatgaattgatgatatacagcaattacttttcaaaattaattttttattaattcatgatgataaatacatagtattcctcagtatctattccaagatactgaggtcataatcagaagctaagctgggtgcagtggctcatgccagttatcccagcactttgggaggccgaggtgggcaaatcatgaggtcaggagattgagaccttcctggctaacatggtgaaaccccatctctactaaaaatataaaaaattagccaggtgtggtggcacgcatctatcagagtcccagctactcaggaggctgaggcaggagaatcgcttgaacctgggaggtggaggttgcagtgagctgagattgtgccactgcactccagcctgggtgacagagtgagactccatctcaaaaataataataataataataaagtaaaaataaaaataaaaaagtaatcagaagctaaagtaaa

SEQ ID NO: 9457 - DNA, 51 bp, Homo sapiens
gtaagccacctcctgtctcttcctccctccttctctttcatgcgaacacag

SEQ ID NO: 9458 - DNA, 559 bp, Homo sapiens
agctccccaagataagaacttggctgccagagggcattaagaactaagggcactaacatatgggctatacggaagtgagaagcgccaggaaaaataaccttgtacatctttccgtgctgggaccttgtactaaactgagaaagtattttcagctgagttacttggtgaggtttacaccctacccacctagaatccttgctgctcccagatattccctctctttaaaccaaatctctggttttttaaacccatttctacttaagcattcaactaatgaaatggtaaggactgtaagaggacttgagcaaactcactgaatggctgacacagaagtcttagaaggaggaccgggcgcggtggctcacgcctgtaatcccagcactttgggaggccgaggcgggtggatcatgaggtcaggagatcgagaccatcctggctaacaaggtgaaaccctgtctctactaaaaatacaaaaaattagccgggcgcagtggcgggagcctgtagtcccagctactcgggaggctgaggcaggagaatggcgtgaacccgggaagcg

SEQ ID NO: 9459 - DNA, 662 bp, Homo sapiens
ggaatgctgtcgggactgagcaggcaatggcctaaaaacaataaaaagccctactaaaagctggttttctttttattattatcctgtactgacaattcttagtaatatcagtgatgaaataaatcactggggaagacctctcccacaccagcccctagttgatatggcactgtgaaagcactccaatatctttctttctttttttcttttttgagacggagtcttgctctgtcacccaggctggagtgaagtggcgcaacctcggctcactgcaagctccgcctcccgggttcaggccattctcctgcctcagcctcccaagtagctgggactacaggcacccgccaccacacccgactaattttttgtagttttagtagagatggagtttcactgtgttagccaggatggtctccatctcctgacctcgtgatccgcccgtcttgtcctctcaaagtgctgggattataggcgtgagccactgcacccggcttccgatatctttcttaggaaggatacatcatcatttaaataatgaaagcaatatatattcactgtagaacatccagaaaaatttgaaaaaatatttttaggagagaatcaaaattcacattaactccaccacttattgataatcatagatctttatgtcattattactt

SEQ ID NO: 9460 - DNA, 526 bp, Homo sapiens
gcagactcctgggttcaaatgatcctccagccttggcctcccaaagtgctgggattacatgcatgagctaccacacctggtccattattatgaatttaaactgcaggctgatgattccagggtcccaaattcactgacagcaggcacgctggtcttgcacaattccccagagcagatggcccttcctacccatagaagcccatgctcttagctctcctacaaacctatccttagaaatacgaagtgctggccgggcgcggtggctcacgcctgtaatcccagcactttgggaggccgaggcgggtggatcacgagggcaggagatcgagaccatcctggctaacaaggtgaaaccccgtctctactaaaaatacaaaaaattagccgggcgcagtggcgggcgcctgtagtcccagctactcgggaggctgaggcaggagaatggcgtgaacccgggaggcggagcttgcagtgagccgagatcgcgccactgcactccagcctgggcgacagagcgagactccgt

SEQ ID NO: 9461 - DNA, 83 bp, Homo sapiens
gaaggagtgaaatggcatgaggcctgcgatgctctttaaaagatttcagcaaagagaaaaaaagtagaacacaataaatgaag

SEQ ID NO: 9462 - DNA, 265 bp, Homo sapiens
gtttccagctgacttgggaactgcaagtctgagtctaacagtttttggcttaaattctgagaatcaaatagaagaattttaaatacaagagtttgagattgggtatagtggctcacacctgtaatcacagcactttgggaggctaagaatcacttgagactaggagttcaagatcagcctgggaaacatagtgagaccccgtctctacaaaaaatataaaaattagttaggtgtggtggcatgcacttgtagtcccagctactca

SEQ ID NO: 9463 - DNA, 594 bp, Homo sapiens
tttattagacactttaaggaaatatgagatttggaacacagatgttcatcataaaacataatactgaaagtttgagaatgaccaaaacatccaaaaataaggaaagttataaattaagatttatccatataatggaatatgaaacaaatcatgtcttcaagaatttaatgacagaaaaatgtccagtggatagtagttttcaaaagctaggaaaactacattcagcatgatcccaattttatgtaacaaattcgtaaggaaggaaatttcttaacttacacatcaccagccattctttctaggttgtagaatgacaccagtgtgggttgtgggtttttgttttttgttttgggggatattttctgtccatttatgtcacttttacaattaaagaaacacgatagattcacttatgttatgaatctatattgtctgaaacttttttcttaaaaaaatgattttcttaggcttcttcactctctctgactttactagctctagtaattgacgtacttttcataacagttttaagtaatcaaacagttatatcacttcagaagtgaaaaactctttgtcttcaaagacatctctact

SEQ ID NO: 9464 - DNA, 667 bp, Homo sapiens
caaaggatcattggtttatgcaggaattaaatcaattgtaaagtcatcgttgggaatggtggaaagcagcagacataattggagtgggttggataagcaaagtgatattcaaaatttaaatgaagagagaatcttagctttacagctttgtgggtggataaagaaaggaacggatgtagacgtggggccatttttgaactcccttgtacaagaaggggaatgggaaagagctgctgctgtggcattgttcaacttggatattcgccgagcaatccaaatcctgaatgaaggggcatcttctgaaaaaggagatctgaatctcaatgtggtagcaatggctttatcgggttatacggatgagaagaactccctttggagagaaatgtgtagcacactgcgattacagctaaataacccgtatttgtgtgtcatgtttgcatttctgacaagtgaaacaggatcttacgatggagttttgtatgaaaacaaagttgcagtacgtgacagagtggcatttgcttgtaaattccttagtgatactcagttaaatagatacatcgaaaagttgaccaatgaaatgaaagaggctggaaatttggaaggaattttgcttacaggccttactaaagatggagtggacttaatggagagttatgttgatagaact

SEQ ID NO: 9465 - DNA, 329 bp, Homo sapiens
tgtatctatgtaaatgccttttgattctgcaactgcaggatactctcatcaaagacacagataaaaagcctctgtgtttccaaggccttgccctatacctaacacataatatgtccaaatggatgaagaggaggcaaggacaaggatgtgatgacaaaacattctgttatgcacttgtagcatttatgtttcttcctgggggattttataatactaaaagaatcataatataaagagatgattaaaaaaaaaatactgccgggcacggtggctcatgcctgtaatcccagcattttgggaggccgaggtgggcagatcacctgaggtcg

SEQ ID NO: 9466 - DNA, 178 bp, Homo sapiens
cacattcttggtctttccttttcaagatgagtgcccttttgtgctttgcaccccataggtggttattaaatacatgttgattggttggttggctgtttgtctggttagaagtggagagtcagagctaggtggaaatagcacttgcaaccattgcagctgctgttggaatgacacaggc

SEQ ID NO: 9467 - DNA, 652 bp, Homo sapiens
ggcacgaggtggggagggcaggtgctgcgccgcgggaggtcacagttcgaccttcctgttgctctctggagacttgacggcgggagctcgtgtaggccaccccatcggtagcccacccccttccccgaggctaagggaggcatgccgtggtagcggcggctcctggtcttacatgagtggcctgtgagaccaggcctgccattgacagtcctgccaagtctccgtccccctccatcctccccttccctctgactcttctcttttcccagcctacctctcctctcccctggccctgcccagccagaggaggagcccccccgaggagccacctgacttctgctgtcccaagtgctttaaagccgtttcaagctgtatagtttgcacacccatcccagtggaggggaaaggggataagtgtttcaaggcaaccttttctgcactttgctgcgaaaagcaaagggccttctatgaaggacaaaacttgcagaattgggtgtgtgggagagcaaaaaaatactgtagatcttcaaagagcatctccacaacccacagccttcttcccaatagtgttaactctgcatttttacagcgtagcatgtgtgtagtttttggctattactggtgtattatttgggggagggagggatgggga

SEQ ID NO: 9468 - DNA, 591 bp, Homo sapiens
ggcacgaggtcacaggatctcaaggcctgcctgttggtggccctggttccttgaagctgagggtcagaacctctgtctctggctgctgcctcagggcaggggcctgggacagcccattgcaggccaggtggtcctcccaggagactttgtggggccgaggagaaggcaaagctgccttgcatttgcctggtgcctgctaagccccaagtccatccctcccctgaacaggacgctcgcagggccctgcccgtcagaatgcacgtggagtcctctgaggttcgggggtgtgggttgcacttgagggaccatcttcctggagatcccgtagggagttccctacaggcaggacctgaggcccagccccaggacaccaccccaccttcccggggcttgggaatgttctgagcccagcttcctgtcgaagaccgccatcttgctcctacgactcctggtcaccgtggtcccgggcccttctctgaaaaggggcatccccagcccggagcgtgatggaccaatgcgagggcctgagcccgagggtgcggacagtaaaccgtttattactgtgtggacacagacaccgtggtgcatgac

SEQ ID NO: 9469 - DNA, 468 bp, Homo sapiens
ggcacgaggtagaattgtccctgggtcttaacaactcatttgtaactgatccaggtctcctccctctgcttcctcaaacccaggcttcgctgcctctgcggagttcttacctgtctctcctttccacccgggttccctggaggaagctaaactcagaccaaggccctgggctccccaggagttaaaagggaatacgctgtcccaagattctagaatgaagagtcaacgtagcccgagtggcttaaacctcctgtccttaaatgcaagaaatgttttctatcgagccctggacaggtgtctctgctggcctggggttttcaacaggtcatgcctgcctcagaccccagggacaaatgttcttccagctctaactcattctatgctttaagcttttgacctatctttgttttcccagtgccacaccaaatgctgcctggggatctctctttcttcctgagttcccatata

SEQ ID NO: 9470 - DNA, 516 bp, Homo sapiens
ggcacgagagagagagagagaactagtctcgagagcagttttttttttttttttttggcttggtttgaaacctttataaaaaaaatttccttttttttaaaaaataacaaacccggtttttggacgggaatccacccattttggccccgggatttttcggggacccttcggaaaaagctaaaatccccctttaaaggggggattgaaaacccccccaaataaaccttttaggaaaaccatttaaaggttttaagggattttggccccttcccaacctttttataatttgggcagaaggcccaacctttgggggcgattaaccccccaccaaggggcccatttggaaaaaatccagaatggggtttttggggcttggggccgcccttcctaaaaaaaaccttttttaggggaaaatcttttttcccgggaaaaaaattttggggatttttttttttttaaaaaccttttaagggggcccccccccccttcccccccctggaccaaaagggcaaaaaa

SEQ ID NO: 9471 - DNA, 562 bp, Homo sapiens
ggcacgaggtttggaagatcactgttttgtagttcgggtgtgttatggggccacagggaaggtaaatggtctcaattttcaggaagttgacatttgccttttctacttcatttccttaaacaaaaattgaaatatcagatgacaaatttaaagagatatatcccatataaaacctaaagttctatgaggctgtattgaacgatagagttaatttgcatcatcagatgttgtggccgctttgtagcatttgctaatctgtaacgcttggttttctcccccagatgagcaccatgccaggactgcccacccggccctgcttttatgacatagatcttgataccgaaacagaacaagttaaaggcttgttctaagtggacaaggctctcacaggacccgatgcagactcctgaaacagactactctttgcctttttgctgcagttggagaagaaactgaatttgaaaaatgtctgttatgcaatgctggagacgtggtgaaataggccaaagatttcttcttcgttcaagatgaattctgttcacagtggagtatggtgttcggc

SEQ ID NO: 9472 - DNA, 572 bp, Homo sapiens
ggcacgagtgacaatgttgtcctcctgttcatctgtgcaccacttgacagactgtagcttctcttgctctcgaccggccctgcattcttccgcaccctccctagctctgaaatcaactctcttcggtcgtatccaccttgcacccgcaagtcaagccgccccttgtagaaaaatccctccaccttccgttccccgctaggtcaaccccactgtagacaggaaagccaggccaggagagtccgaatgagaatttattgtgaatcgattcccaagctcccttccgggacaagtggtctgggacagggaggagcaacggccccagcgcgcaacgctctgcgcgttcctccgaatcccgtcggcttctcgacccacgcagagaagccccgggcttggcggctctagccccagcgccaaaggagacccgccccagggccgggcttggcctcctgcttcatgggcctggatgcagatctgcgtggctggtgcgtgcgcgcgcttctgggaaacagtcccgcgtgcaaaggaaaggggcaaaatggcacctaagcatcagatggaagcttactctctgc

SEQ ID NO: 9473 - DNA, 593 bp, Homo sapiens
ggcacgaggatctttcagaacctctgtgacataactcgagtcttgctatggagatacacttcaattcctacttcagtggaagagtcgggaaagaaagagaaaggaaagagcatctcactgctgtgcttggagggtttacagaaaatattcagtgctgtgcaacagttctatcagcccaagattcagcagtttctcagagctctggatgtcacagataaggaaggagaagagagagaagatgcagatgtcagtgtcactcagagaacagcattccagatccggcaatttcagaggtccttgttgaatttacttagcagtcaagaggaagattttaatagcaaagaagccctcctgctagtcacggttcttaccagtttgtccaagttactggagccctcctctcctcagtttgtgcagatgttatcctggacatcaaagatttgcaaggaaaacagccgggaggatgccttgttttgcaagagcttgatgaacttgctcttcagcctgcatgtttcgtataagagtcctgtcattctgctgcgtgacttgtcccaggatatccacgggcatctgggagatatagaccaggatgt

SEQ ID NO: 9474 - DNA, 587 bp, Homo sapiens
ggcacgagccagactccttcctcgaacccagagccttctcccatagtatctctttagcctcttctgccttctagactgtccctgcctccagggacaccatactcacctggccttttccaggagggcctcctagaccgaacgcaagtaagcacagcttctcctgagcccaccctctcctctacttcctccccaccattatttgtaaggaaactcttctctttactccccaacattctccatcccccttccttggctgcctcctcccttcttcttcccagcctctcctttctgcccggcacgggctttcccaccggaactcttggctcagaaatcagttgggacaaagcccctgtctctgccagtctggcctctatccagcccctcccttcccccaccctaccttttgtgaaagccttgggctggagggtggactaaggggggggagaataaatgggaggggctaccccttcctacccctggctatcagaagctctagaacccagaatattcctccaaagatctcgaagcacttacactctcataaaaaggatgtgttgtgacattgagaaatggagactgaggctcag

SEQ ID NO: 9475 - DNA, 379 bp, Homo sapiens
ggcacgagggtctgtggtcttacatgatgagtgccacccttgccaatttgccttcttcatcctcctcaccccctaagacttcttgattgcccttggggtctcaggacattctcttttccacctcaccgtgaatgccctggctcaggaccgacactttcctttccaaagtctgctttcagctaactcttggaaggaaatctctcccatgtttcactcaaaggtataaatgcctgatgaggcattacagcaacttatgctgaagttagttttaggtgttgggcatggagatcctgtcacaccttacagggtagctggctgtctcttcccatctctcggtccagtgaacccttagaaaacaatgccaagagtctcctagttt

SEQ ID NO: 9476 - DNA, 222 bp, Homo sapiens
ggcacgaggctaggaccttaagaaggagctcatgtgagtcaggaccctgaatgttaggcctcgttagctctatggttcatatgcttcttgaaccaagtcacagggcacttcccagccacattgccaggcaacaggactaaactacctccaaagcaagcagtcttttcagttttgactgagtgatgtgagaaacttcttttcttttcttttcttttttttttt

SEQ ID NO: 9477 - DNA, 208 bp, Homo sapiens
ttcgaattcggcacgaggactaagtcggctacagggagtccgcgcgctcggccaggcagcctctgacaatagcggcccagaaggcctctagagatatgccgagacgcattacatatggccgaccttgagaggaaacgtacgaggagcttgggtcactatgcgcacactgccaatagcacatggagaacgggctctatctcgccgaggg

SEQ ID NO: 9478 - DNA, 612 bp, Homo sapiens
ggcacgaggttgcttgggtggccgctaacaccaggctactcttattttagcttgctaagttgagatcagctagacctgctttcttttctcctcagtcttgcatttccctcaatacaagctgtagcctctttcctcgtttctagtctcagaaggaaggagagggaagccattctcctctagggactcttcagtctcatttagatgatagtccctttttttctacctccatattagagatggagctccttccttttcctgtttcttaatttttgtcttctcattcctgcttccctctcaccctattgccagttccaccaactagagtgaaagacttcctagccatttcattaaatctattctgtatccaccaggtggcagcatcttgtcatacgtgtcaggacttaggactgcggggtttaggttagatgtcacggaaaaagctagttctgtggtcaggcggcaccaatgagaaaggaatgcagaccctccagatgtatccttgggaaaagcagtaaaccaactaatatttattgaagacctactttgtcctctacatagggtagcttctgtcagggaatcttggttcttcccaagaaacactgattttctttc

SEQ ID NO: 9479 - DNA, 629 bp, Homo sapiens
ggcacgaggggaaaacacaaataataccattgaagagaaactgtttgaagctctaaccaagactcgactagtagaaagcagacagacatccaactatcaccgatgtgggagaacagataaaggagttagtgcctttggacaggtgatctcacttgaccttcgctctcagtttccaaggggcagggattccgaggactttaatgtaaaagaggaggctaatgctgctgctgaagagatccgttatacccacattctcaatcgggtactccctccagacatccgtatattggcctgggcccctgtagaaccaagcttcagtgctaggttcagctgccttgagcggacttaccgctattttttccctcgtgctgatttagatattgtaaccatggattatgcagctcagaagtatgttggcacccatgatttcaggaacttgtgtaaaatggatgtagccaacggtgtgattaattttcagaggactattctatctgctcaagtacagctagtgggccagagcccaggtgaggggagatggcaagaacctttccagttatgtcagtttgaagtgactggccaggcattcctttatcatcaagtccgatgtatgatggctatcctctttctga

SEQ ID NO: 9480 - DNA, 400 bp, Homo sapiens
  misc_feature 307, 362: n = A,T,C or G
gaattcggcacgagctgggccgtttctcttttttttccggaccccgcagtggcgcctaaagtctgcaaggaggaggtcgcctctgtgctgtgagtccaggaatctaaggcgagtgctgagggagaaaatgtagttgatggggcagagcagaaggggctgtaggtgggttggagggggaggggaacgggcagccaggcctggaccctggggagtgactcacccggagccgaagaccatctcagctttccctagcccagaaagggtgggactggctttatttctgcctgccatcacctcaaaatgccgngggacaaatcttacatattattattggtatttatttatggattttattttttttnggacagtctttgtctgtcacccgactggagtgcagtgg

SEQ ID NO: 9481 - DNA, 613 bp, Homo sapiens
cggccacgagggctccagagagagccatgtggagggacctaggccagcagctgacccagggctggtgactccaagatcatgactgccccagagaggatgtcagaggcaggagggccgatggcagttccacagatggcctcagagcacctgctctgggccagggccccccactgggtgctgagcagagagtggtgaacaggcccgggcagcaagctcaactctgcctgcacgtggggctctatcagctgctgacctcaggcctaccccacaccagctacatcaaaatctttgtaggtggaacctagccttgaaaacctttgtctatttttattttgtttgagacggagtctcgccctgtcatccaggctggagtgcagcagcacaatctcagctcactgcaacttccgcctccagggttcaagtgattctcctgcctcagtctcctgagtagctgggactacaggcgcgtgccaccacccccagctaacttttatatttttagtaaagatgggatttcaccatgttggtaaaggctggtcttgaactcctgggctcaagtgatgcacccacctcggcctcccaaagtgctgggattacatgcctgtaggcatga

SEQ ID NO: 9482 - DNA, 386 bp, Homo sapiens
  misc_feature 190, 205: n = A,T,C or G
cgttgctgtcggtttagcccttgttgcctgggctggagtgcagtggtgcgatctcagctcactgcaacctctgcctcctgggttcaagcaattctcctgcctcagccttcctagtaggattataggcgcctgctaatttttttatttttagtagagatgtggtttcagggtgttggccaggctcgtttcnaactcctgacctcangcaatccacttgcgctcatccttccagactacaggtgtgagccaccgcgcctggctaggaatttattgataaagatctttatgctaacctcaatatgagtgacaaagattgggggaacatagcctgatgaggtccttagaaaacgtgcccctgggaaaaggaatttatataaaaggcgatg

SEQ ID NO: 9483 - DNA, 389 bp, Homo sapiens
cgttgctgtcggggcaatctgagtacgatccctgttccaggcatgacaggtgattggctctagtaaaaactgatgcagtgacattattcttagtgttttcaaaggagagaaagctgaagaattcgtggccgcaggagtttttttttttttttttttttgaaaaaaattttttttttgccccccgggcgggggggagggggcgaattttgggttaatggaaccctccccccccgggtttaccccatttttctggcttaaccttttggagaagtgggaataaagggcccccccccccaccccggcttattttttggttttttaagaaaaaagggggtttccttggttaacccagaagggtctaaatctctggccctggggacccccccccc

SEQ ID NO: 9484 - DNA, 677 bp, Homo sapiens
ggcacgagggagcaaaggctttcgggagtgtgaggctgcatctgctggagcaaagggaaaccgtgggcttttccggccagatactcttgagctctgtgaccctgctcctgtcaccccaatttctccaagccagaggtagctttctcagagccccttggtggttctgtcctccaaatgctgctgttgggagcgggcttccagctctcagtgggcagtgcacctcctcctaaatgcaggcacttgctaggaagagtgtgagctggcgtcttctgttcaccctgcctagcagttgtcaccattcacaagtggcattatttatgttgtgctgctgtccagctgctaagatcccttcatctgcacaagccctggctagatatgtgtgaatgtgtggcatcatttcacttcagccgcccaattccatctctcctctgcagccagattcactggctgatgctcactgctcactgtctatccccacgaaatttagttttatcagtagtcttaaagtgttgatctcaaacaagtacattagaaaaatcatgtttcttctctctcatcttactttttcttctcagatttctcccttcctagaacattctctctgtttagcactaatgttcacctcgtattttttggaagtgcaaaaatctcaatttgtgtctgtttacagctctctc

SEQ ID NO: 9485 - DNA, 89 bp, Homo sapiens
tgatgatgaggaagctgaagaaaagcgccagtgaagaaatctatacgagatactccagccaaaaatgcacaaaagtcaaatcagaatgg

SEQ ID NO: 9486 - DNA, 85 bp, Homo sapiens
ctcaagcatcctccttcctcagactcccaaagtgttgagattacaggcatgggccaccatgcctggccccagactgagttttttg

SEQ ID NO: 9487 - DNA, 573 bp, Homo sapiens
ccatcaagtttttttaaaaagcttatgcagcattagaggaatttattttaatgcacatttatattcaacatagacattaattcagatttttacttgggataaaacaaattctagttttccctttgttttgaaattacttttaaaatatgtctttatagataaatataaaatatattaagcattttgaacagagcttagaagacaatatttagtactgtttctgaatatttctttatatctgaaggggaaaagccatcaaaatatgtgaattaaatacctaaaattctggttgtcaaaacgtcacacttaaccataactttaaaggtagaaaaacccttacaagtgaccaacccactcattggatagctaaggaaacacaaaactcaaataatttgctacacatcacagattggggtcttagtcttatgtcttctaactttataacggtatactatttttttcatgtttttattaaaatgttttcttaaatccttagccaaagatttttgtttgataagtcaaaaataaggtcttgtttactttgtttacttttttgtattcaagatttaactc

SEQ ID NO: 9488 - DNA, 111 bp, Homo sapiens
gtggagtctgtgatagccaaccaaaagctatccccttctcgcccagaaaagccacgtgctttgctggacgctacttgaaatctgaactctgcacctacatatgtagtaaaa

SEQ ID NO: 9489 - DNA, 385 bp, Homo sapiens
cgttgctgtcgcggccggaattcttcccgggattcctgggccgagagcgggtggctgagccgggacctcgcgtgattctcggaacccgaggagaagcggcgtccggggctatggctgtgactctggacaaagacgcttattatcggcgagtgaagagactgtacagcaattggcggaaaggagaagatgagtatgccaacgttgatgccattgttgtatcagagggtgttgatgaagaaattgtttatgccaaatcaactgccttacagacatggctctttggttatgaactaactgatactatcatggtcttttgtgatgacacaatcatctttatggccagcacgaaaaaaggggggttcttgaaacagaatgccacactaag

SEQ ID NO: 9490 - DNA, 623 bp, Homo sapiens
ggcacgagggcaggcagatcacttgagcccagaagttgagaccagcctgggcaacatggtgaaacctcatctctacaaaaaatacaaaaattagccagacatgatggtgtgtgcctgtggtcctagctactagggaggcagaggtgggaggatcacttgagcccaggaggtcgaggctgcagtgagctgtgatcgagccactgtactccagcctgggtgacagagcgagaccctgtcttaaaaaaaaccaccaacagggaaaggccaggacgacgaggagaagttggtatctttttgttagctccagagtttgtgctggtgaaagaaggttaggatgtagaaaagggatttagagacatacagtggctgctcttcagtattcttcaagggtccaagtgaagaactggaattttttcaatgacatgcaacagttgacctgtgtttcaggaagtatagccttgagctgagtctcagccatgtgggaccctcggaagcagctacagcttcttagtataggtcgagcgtcccaactccgaaaaccccaaattttggagcatttcagattttccgagttgggatgctcagccagtacgtatattgcaaatacagttgtcccttggtct

SEQ ID NO: 9491 - DNA, 84 bp, Homo sapiens
atgctccctgtcccatggagagggacccagcataggaaagccacatactcagcctggatgggtggagaggctgagggactcact

SEQ ID NO: 9492 - DNA, 603 bp, Homo sapiens
tcaggaggctgaggttgcagtgacccgtgatcgcaccactgcactccaacctgggtgacagagccactgcaaagcactctgtttagtcatggtttcttttatgtattctttcatgtattgaccttaaaaaagaatgtttctgaatatgcctttaatctgacaaaccaccaccttaatattcttttaaaatcagtttgagcctacagccatgccactgtgaatgtgtctgatctcatgtgatcatggaagctaaagtgagtttgatatgataaatatatgcaacgtaactttaaatataacttttaaaaatatgtttttaaggccagatatggtggctcacgcctgtaatcccagcactttgggaggccaaggtgggaggatcacctaaggtcaggagtttgagaccagcctggccaacatggtgaaaccccatctctaccaaaaatacaaaaattagctgggcgtggtggtaggcacctataatcccagctactggggaggctgaggcaggagaatagcttgaacccaggaggcagaggttgcagtgagccgagatcgtgccattgcactccagcctgggcaacaagagggaaactccatctc

SEQ ID NO: 9493 - DNA, 649 bp, Homo sapiens
ggcacgagaatgcttttgccattatacctaatttttgagaacagcaagccctatttgaccactctcttcagcctgtgtgttcctgctgttttgaagtaatcaaatgctgtgcatggtattttacctgagctgcaacctgttatggacttgaacttctgtttaagttgaaagcaagagtccctgagtataaaggaaaaacagcaaaacaaaaagcaaacaaaaaaaaactgcaaaagtctaaaatacccattggtgatgttttttaaaaaaatcttgctttcagctttcaggagttaatattctttgttttaatttgataattggatatggttgatttatattgggtttaaactgtggagctttcatgtttactgtaatttagtcttaaaatattttttacttagtaaccagtgcttttgataatgtggttggcaacaaaccagcaactatttagaagtgtcataagagttcattctttgagtattgggaaagttaattcagatcctactcaaaaagcatcttcacatattaaaagattcagacagggatctgtgtagaggagtaatttgcagttatttaacataaacctgatttgcagtgatctctaagtaattctgcaaaatccggtattactatgtcaagttattgc

SEQ ID NO: 9494 - DNA, 413 bp, Homo sapiens
agagcttggattcctaaagaccttatactggtcccaactgtaccacctaatcatgtgtcccttgagtttgtcacgtgacctttgctttcctctgaaaatccttttactcagtaggccaattaaacccatttataataattaataaaatcaatatgtttgacttcaagtttttcccttagttttatgattttttaaaagtattatccttttttggcatttaggaaggcatctatttttgttttaatggttactttgatgtaatactttttttttctgctcttgtgtattgattcccgctgtgagtgataaatcagtcatttaccttttcttccccctcctctctttattttccatcatataacttgaaatattatccttttttttttttttaactcccggaaaaacccggaaaa

SEQ ID NO: 9495 - DNA, 509 bp, Homo sapiens
ggcacgagccgggcccggccctggagatggtccccggcgccgcgggctggtgttgtctcgtgctctggctccccgcgtgcgtcgcggcccacggcttccgtatacatgattatttgtactttcaagtgctgagtcctggggacattcgatacatgttcacaggcacacctgccaaggactttggtggtatctttcacacaaggtatgagacagattcaccttgtccccgctgaacctccagaggcctgcggggaactcagcaacggtttcttgatccaggaccaaattgctctggtggagagggggggctgctccttgctctccaagactcgggtggtccacgagcacggcgggcgggcggtgatcatctctgacaacgcaattgacaatgacagcttctacgtggagatgatccaggacagtacccagcgcacagctgacatccccgccctcttcctgctcggtcgagacagctacatgatccgccgctctctggaacagcatgggct

SEQ ID NO: 9496 - DNA, 656 bp, Homo sapiens
ggcacgagcccaggctcaccctacggaaagagggggccctgctggccccacaggacctcatccctgatgtgctgcagagcaatgacgaggtgttggctgaggtgacttcgtgggacctgcccccgttgactgaccgctaccgcagggcctgccagagcctggggcaaggggagcaccaacaggtgctgcaggccgtggagctccagggcttgggcctctcgttcagcgcctgctccctggccctggaccaggcccagcttacacccctgctgcgggccctcaagctgcacacagcactccgggagctgcgcctggcagggaaccggctgggggacaagtgtgtggctgagctggtggctgccctgggcaccatgcccagcctggccctccttgacctctcctccaatcacctgggtcccgaaggcctgcgccagcttgccatggggctcccaggccaagccaccttgcagagtttggaggagctggacttaagcatgaaccccctgggggacggctgtggccagtccctggcctccctcctgcacgcctgccccttactcagcaccctgcgcctgcaggcgtgtggcttcggccccagcttctttctgagccaccagacagcactgggtagtgctttccaagatgctgagcacctg

SEQ ID NO: 9497 - DNA, 382 bp, Homo sapiens
cgtagctgtcgggagggtttgaaggagaccatcagctattgtgtgatatcagacaccatggtgatgtaacggatttacagttttttgaccaggaaagaattgtcgctgcttcatcaacaggatgtgtaacagttttccttcaccatccaaataaccagactctgtcagtcaaccagcagtggactacagctcactaccacacaggccctggcagtccttcctatagcagtgcaccatgtacaggtgttgtgtgcaacaacccagaaatcgttacagttggagaggatggtcgaataaatctcttcagagctgatcacaaggaagctgtaagaaccatagacaatgcagatagtagtacactccatgctgtaacctttcttcg

SEQ ID NO: 9498 - DNA, 565 bp, Homo sapiens
gttgctgtcgggtttggcctgtgggtttttaagtggttattgaattggtatcaggagatcctgaggctggtaggggaaggtaattctttctaagttacctctgtatttttcaagttttctataaggaatacacatacacccacatgcacacaccatagtttttatacaaacagcaataacaaaaccaaaaagatgcccctttttttgtagggataagaaatacatttgttttatacttctatgctatattttgctattcaaaatttagtgggcattacttaacattgtttctaattattttgtggctgctgtatgttttatgtgttgggagcccattgtattaggccgttcttggattgctataaagaaatacctgagactgggtaatttggttttttggttttttggggttttttttgagacggagccttgctctgtcgcccaggctggagtgcagtggcgcgatctcggctctatgcaacctccacctcctgggttcatgccattctcctgcctcagcctcccgagtagctgggactacaggcgcccgccaccatgcctggct

SEQ ID NO: 9499 - DNA, 582 bp, Homo sapiens
agacaaaatagtactcatgataaaacctacaaggaaatagacaatagaatgaggcagaggttgcagtgagctgagatcacacattgcactccagcctgggtaagaagatctcaaaaaaagaaagtgtcatcatctactagattggaaatatcagatattcttgagtctttcttctccctcatatacagttagtcatccagttcttcaaaatctcgttgaaatgtggcttcccctccagccagtctactgcctatcagtacttacctgtctgtgcattagcccccaccgacctctatcccaccagcatctccctgtggcgctgtgcagtctcgctgttggtcaccttcctcatcagaacaagcctgagtgtgccacactcctctccagaagccctgtggtcttgatagagagaggcaaatagggtggctcaaagaacagacttgaactagactgcctgggctcctgtcctccctccacaactcaccagccacaaataatgagaaaggtacatttgctagggaaaacatttaaatacaaatactcatcttgatgtgtttaaacatgttgagacagttctgtctg

SEQ ID NO: 9500 - DNA, 334 bp, Homo sapiens
cggggaggctgaggcagaaaaattgcttgaacccgggaggcggaggttgcagtgagccgagactgcaccactgcacttcagcctgagtgacagagtgagactccatctcttaaaaaaaaaaaagtttattctttcctgtggggtaagcagagctgaagttttaaaaagacagggggggatcttcattagggaactgggcaatgggcttctcatgttaacaatgttgacaacaacagccaaaaggaaaaatgtaaaaaccaaaaaaaaagctggcgcaggggctcacgcctgtagactggcactttggatggctgaggcggggattgcttgaggc

SEQ ID NO: 9501 - DNA, 432 bp, Homo sapiens
atacattatctgagcctacatacactttgtaaaaagtatacttccactgttcagaattagatgatggcacaaaacctgttgaggtcttcattcatccttacaaatgtttattatgctgagtgtcccaggtgactggatacagtggagtgaattagaaatttgaaattattgccctgaggggacctacattcttcttgttggagtgcgtctgtgtgggataaggtagacaaataatataggaaattcaaaaaattgtttcagaccatagtaagttctatgccagaaatgaatagtccatatgataagaggaacagacattgtgagatgttggatctataggaaaagaggaacagacgccatgttcaggccatggtgcatgtacaaaagacctttttctgaaatcagtgcaggcagtgagtggccaggtgtatt

SEQ ID NO: 9502 - DNA, 603 bp, Homo sapiens
gaataacccagaaatatttcttactgttgataatctgcagtttgcaagtgcagcgaatcttgtaggtagatttaccttgagtttttttgaaacggtagaattaatatattaaaacatatggtttttagttaaaataggatgttaaaggaatagagcgcacgaacaaaaaaactttccacttgaacccatgttgtttcatctgacagtgggtatggtgtccctggcaggatagggcttccacctcctgctggtgccggtaggacagggaagaggtggggaacactgtgtctccatctcccaagcatcttacctcccaagtcagatccctggcattgtttgaatacttgcgtgtttgtgtgtggggtgatgttttcctgagaatgtggcaaaataatagaaggtcccagggttcctcagtctgcagaccatagctgagtggtgtgtgcctctagccatgaggtgaagcataggtgaaattcagatccttaggaagacagacagactttgcaagttagtaagctaacttgctagaggaaacggtagactcctgtgctggctgccaactaaaaagcctttctccacagttctgttctcatgtacacc

SEQ ID NO: 9503 - DNA, 489 bp, Homo sapiens
ggcacacgcttcctggggccattccacattcctgatgtcccatgtcagaatgacacatatactgctaattcccctatgcgagctctgatgctccagctctctgccctcccctccccgctcccggcagcatggcagcagctggggcctggcctccctggtctgcctgggttctagcctgtgacaggggcccatagaaaaagcactgaggccgggccaggcacagtggctcacgcctgtaatcccagcactttgggaggctgaggtggatggatcacgaggtcaggagatcgagaccatcccggctaacatggtgaaaccccgtctctactaaaaatacaaaaaattagccgggcatggtgggtgcctgtagtcccagctacttgggaggctgaggcaggagaatggcatgaacccaggaggcggagcttgcagtgagcggagatggcaccactgcactccagcctgggcgacagagcaagactccggctc

SEQ ID NO: 9504 - DNA, 61 bp, Homo sapiens
tggtcaaggtcactccccacccactgggcctaccgctctgtaatgtggctgtgtgtctcta

SEQ ID NO: 9505 - DNA, 494 bp, Homo sapiens
agaaggggaagttagaaagaatgtggttggttagggcttccaggcttccaaatgcctggaagaaggtgagtttttatatcagctccagcatctgtaggaaagccggagaagaacactagcatccccagcatcccttctgtggagctgaacccctcagcctctccagataggggatccttgttttcatccctggagacccagccctcttgcaaatggctctccatagaggcaatgtctccagagagacttaattggcaatgcttcactgagcacagaaacctgggatatgacagttcctgctctttaaattgtcaaggaaggcaatgtgctctgaactgcagctgctgggagtgcagggggacccatcttagagtctcctccgccttccagcctctgcttctgaatgttctgggaacaagaaacagcaacagagaaatgaacaggtagatggagcacgatgagcaacataagctcaactagcctttttatggtca

SEQ ID NO: 9506 - DNA, 525 bp, Homo sapiens
ggtactcacaagttaacaaacttcaaaatgctatttgaaagggaaactaataacattaaaaagaggtcacagtactgtttgaaaatctacaaaggagtcatgatctttgttcaaggaagtaaaatattaaggaaatttgtgttagttgagttcttgactgaacatgtgctatgaatttctgattgtggaagctgcttcctattcgaaaataaaataaaactctcttggtatgcaaatgataagaatatgttttggtatctaacaatatctaaaagcaaactctctgcaaagtatcccagaatggtttacttaagaacatcctggctgaacttcaaagtagagcctactggaaaatatttacccagactatttgaaaagagatttgaaaagagagtttcattgatttccattgtccagctttatttcatggatttctatcatttgactgtattttttattatcagtatcattgccacaagaaagtattacagtcaagagatgataaataataatgatgatagtaat

SEQ ID NO: 9507 - DNA, 535 bp, Homo sapiens
gccactgcgcctggcccttgcttaattatttcaatagcactgtaacaaagatactattactatcccattttatagctaaggaaactggtactcagaggcctcagaactggtaagtcactaaatccagacctggctgactctgatgcccatgccctgaacatagcacttcatataataaggccagcagagataccagagaggagacctcgatctgggagtcatttacacagagggatagagtgtcaaaaatagaggggcagggctgggcatggtgactcatgcctataatcccagcactttgagaggctgaggcaggtggatcacctgaggtcaggagtttgagaccagcctgaccaacatggagaaaccccatctgtactaaaaatataaaattagctgggtgtggtggtgcatgcctgtaatcccagctactcgggaggctgaggaaggagaatcgctcgaacctgggaggcagaggttgcggtgagccaagatcacaccattccactccagcctgggcaacaaaagtgaaact

SEQ ID NO: 9508 - DNA, 587 bp, Homo sapiens
gatgggggaagaaccaagcccttttctttcacagctgggaggcaggtagcccagggcaaattttcaagcccgacatgccttccacctggaaacagactgggggttgttggggtgtgcatgatgggggtgagactggcccttcagtttgcgtgggagctgtgtgaggcctgtgactgctggctttcccccacttccctgacaactgcatgactcagcagaggcagccacaatcctcctaggtacacaactccagtgacctgggaatctcacccccatcccccacagcagctgcagcaagacctgcccaaggagagtctgagctcagacatgcctaggcctgcccccacctgatggttcttccctacccatcctggtagctgaagacaaaacgcatataatcttgggagttctagggcccaacccaccaccagtccctctccacactactagagctgatgctttctggaaagcatcacctcctggcaggaggccaaccagcactaaaatagaccattaaagcaccaaagctgaggacccccatggagtccattgcattcccctcaaccatcttcactggaacaggcgct

SEQ ID NO: 9509 - DNA, 337 bp, Homo sapiens
ctctgcctcctgggttcacgccattctcctgcctcagcctccacagtagctgggactacaggcgcttgccaccatgcccagctgatttttttgtatttttagtagagacggggtttcaccgtgttagccaggatggtctcgatctcctgaccttgtgatccgccgacctcggcctcccaaagtgctgggattacaggcatgagccaccgcgtccagcctctgattgctgtaccttttgacaggactcttgagtgttggttatgttgggcataaagtttattttccttagaattttacttttgagcattctttgtggccttgaaaggaaagggctact

SEQ ID NO: 9510 - DNA, 610 bp, Homo sapiens
tgggaccctgacatgtccatggagaggagctgggtgagggagactgactgtgagcaacccagaggagaaaggagttgggggactgtcatggcccatgccacaattgctgtacctcctacctgttctgacattgcatttggcaaaagaggggttggattctggggtgtgagaaagaaaaaaaatgtctctgggcattgagcaacctctctcagcaacagcactcctcagaaagggtaataatgtaaacattcacccattagaggaaaaaacttagcctttatgccaccctctccaccattaacaacattggcagccctattaaagtacaagtcagatttgtgtttaatgatcttgaaagtaaagtaattgcttgagtgttaccattcaaatgttcttagaagtgcagataatatttacaattggattgtcctttcggaaggggtaggcaggcagccttcctccgctatttgaagctgaggctggggagaagtgacttcagcaattggcttatgggtctaaaagctcagcgtttattttcgtttcttcttttcaatatcaagagactccagagcattagccatacctcattccttcaaggaaggagatgctg

SEQ ID NO: 9511 - DNA, 156 bp, Homo sapiens
tagtttaggcaatattaacaccttacatctgtaattttagcattttgaatacacagtttttaatgtacattatccattgggcagatccatagaacaagctaaaactttccagattcacattactttaaaaatattttgatttgctgggtgtggtgg

SEQ ID NO: 9512 - DNA, 553 bp, Homo sapiens
taagtaactttcatcctagttggaaataatcaccacatacttgcaagaaagactttatccttatcctcttgttctgtcttctgcttgaggctttggataaaggcaaagcccttttaagcccaagcaggacaaagtccaaatctgaaaattgcactatcctccaaaggtcttaccttccaatgagtcagataattttggatcattcccattaatgagtcatgctgaccaaatgtagtttttgtgtatttcttgctacaacttttaaatattcccttccttccctttctacatttgttgagtgactactgtggaaacaagactcagaaagttaacaggctcttgtataaaagtattttagtaatttaacaaactagtgttgctgggcgcggtggctcatgcctgtaatcccagcactttgggaggccaaggtgggcggatcacctgaggtcaggagttcgagaccagtctggccaacatggagaaaccccatctctactaaaaatacaaaaaattagctgggcatgctggcaggtgcctgtaatcccagctactc

SEQ ID NO: 9513 - DNA, 532 bp, Homo sapiens
gagatcggccactgcactccagcctgggtgacagagtgagactccgtgtcaaaaaaaaaagtcccaaactgtttggctttatttaggcagtaaatattctacttcgggatgacctgtcatggagccagtaaggcctctacaaatcacatcccaaacaaatacaactcagatgagcaaagtaaggcccagatgaaatgacatctcgatctcttctatggcagaaactcagcaagacataatgaaacaaagatagctaaagttcattatttaatgctctactcccaagagaattatgggactttaaggctactcactaacatacaaaattaccatgcagatatggggggaaagtccatgtccagaaaaaacttggtttgcaaaccttagaactatgtcattgcaggattatgtgtgtgtgcccgtgtgtgtgctcacaggctttgaagagttttatgagtatccattatccaaaatgcttggaaacagaagtgttttggattttagattttgaaatatttgcattatacttaac

SEQ ID NO: 9514 - DNA, 366 bp, Homo sapiens
ctccccacccctgctgcacacctacactgaaggaaggctatttgcagatgcagcaagaaggcagccatctgcaaggcagaagaagagagccctcaccaggaaactgataagtcagtcagtctgggactttcagcctctagaactgtgaaacaataaatttctgtggtgtaagcaactcaatctatagtagtttgttactattttgttatagcaaccaaagatgactaagccagacaggttatgtcactcgccaagtgtcttggtctgtttgtgctgctataacaaaataccttagactgggtaatttacaaacaacagagatgtatccagagatccacagttctggaggctgagaagtctaaaatc

SEQ ID NO: 9515 - DNA, 359 bp, Homo sapiens
ggcacaagggcaagtttgggcacgagtttctggagttcgaatttcggccggacggaaagcttaaatatgccaacaacagcaattacaaaaatgatgtgatgatcagaaaagaggcttatgtgcacaagagtgtaatggaagaactgaagagaattattgatgacagtgaaattacaaaagaagatgatgctttgtggcctccccctgatagggttggccgacaggagcttgaaattgtaattggagatgagcacatatcttttaccacatcaaaaataggttctcttattgatgtaaatcagtcaaaggatcctgaaggccttcgagtattttactatttggtacaagacttgaaatgt

SEQ ID NO: 9516 - DNA, 300 bp, Homo sapiens
tgcggtgcttggtgtggttgtggagcctgtccctgcgcgccttgctcccgttgagccacgctgtctggtgggtgattctctgccctgagccaccaccctggactggcccagtctccagagctggcacaccctgcctgttttctctttttagacacaacagccgcagtttggccagccactaagtcccaccagctgaggtccgaggaaagcggggtgactcatttcccttgtccagggcccgaggagagtgaggtgtccagcctgcaaagctattccagctccttggtgttggtttgcaat

SEQ ID NO: 9517 - DNA, 624 bp, Homo sapiens
cgaattcggcacgagccaaggcgcagccgattctgccccctacgattggttcggggacttctcctccttccgtgccctcctagagccggagctgcggcccgaggaccgtatccttgtgctaggttgcgggaacagtgccctgagctacgagctgttcctcggaggcttccctaatgtgaccagtgtggactactcatcagtcgtggtggctgccatgcaggctcgctatgcccatgtgccgcagctgcgctgggagaccatggatgtgcggaagctggacttccccagtgcttcttttgatgtggtgctcgagaagggcacgctggatgccctgctggctggggaacgagatccctggaccgtgtcctctgaaggtgtccacactgtggaccaggtgttgagtgaggtgagccgcgtgcttgtccctggaggccggtttatctcaatgacttctgctgccccccactttcggaccagacactatgcccaagcctattatggctggtccctgaggcatgctacctatggcagcggtttccacttccatctctacctcatgcacaagggcgggaagctcagtgtggcccagctggctctgggggcccaaatcctctcaccccccag

SEQ ID NO: 9518 - DNA, 512 bp, Homo sapiens
ttttgaactatcaactagatctgggaagatagaacaggctgtatcagattgccttgtttacaaagtgtcatcacgaaaagtgttcctctaggaaggcataatatgtggcctgatggatttgatgagtagattgtaaaagggttgggattctggcagaacaagaagagataactaattagtggaattaactgagaaaagagttcattagcatgttggctattagactctaataaaaatgggtgtgaaaagatgggatttggacctagaggcagtcttagagccataatcctttttttctccttttgtgaaagtgacaggtacttctggtctgagtccataaatcagctatatctaaatggaaaactatatcccactgggatggtaatcacccttttgatagaaaggttagaagccagattcttcaacagaaatggaacttatcaatttaattaagattcctcaacagtagatttttaggtcagtggaacccctgtgtaaagcgatgtgctact

SEQ ID NO: 9519 - DNA, 438 bp, Homo sapiens
tcagcaaggtgaaaccctgtctctactaaaaatacaaaaattagccaggcgtggtggcgtgtgcctgtagtcccagctacttggggaggctgaggcaggagaatcacttgaacccggaggcagaggttgcagtgagctgagatcttgccactgcactccagcctgggtgacagagcaagactccatctcaaaaaaaaaaagaagatggaattagctgagtttcatggctgcttgggaggttttttgcagacaaagactccctctctcacccagactggagtgcagtggcgtgaccctaactcactggagccttgaactcctggtctacggtgatcctcctgcttcagcctaagtagctgttattggcatgagccactgtccctggctcacatggctgcttaaatggaagagttagcagttgagactgagaaacatgaa

SEQ ID NO: 9520 - DNA, 397 bp, Homo sapiens
gaaaccccgtctctacttaaaacacaaaaaactagccaggcgtggtggcgggtgcctgtagtcccagctactctggaggctgaggcaggagaatggcgtgaacccaggaggcagagcttgcagtgagccgagattgtaccggggggctccagcctggacgacagagagagactctgtctcaaaaaaacaaacaaacaaaaaaaaattgtcaacttgtcctgaaggagcaaaaagagtaactgaataactctgatatttttcttcaatcctgattcaatcacttattctttcagaaaacagaaaattttaagaaatggcatttactggacttaaagacttactcatcatcttcccataatcccacctccagaaaatcaccattaatacttccatctac

SEQ ID NO: 9521 - DNA, 603 bp, Homo sapiens
tattaaattttccctgtccaaatttctgcggtgatttctgtcccttgcttgaactctgatacaacatctaaggacgctttggtctttgattcttgtctttgaaagacgatggcaaggataaaggagttgtgtgtgtgcgcgtgcgcgcgtgcttgccattaatacagacttaaaagcagcagagtagcagagtggctagtacagggtactccagccagattggctttgccacttcctagctatgtgccctggggtgaggggagttgcctcagtgtcctcatctgtaaaatggagatagagtggctagaatatacccagttaagtttgaatttcagaaaaatcacaaataatttcttaatataagtatatcctaaatattatacgggtatccttcctgtattcttatttgcgaaatctgacaagactagtattacatcataaaaggttaaattaaggccgggcgcagtggctcacgcctgtcatcccatcactttgggaggctgaggtgggtggatcacctgaggacaagagttcgagaccagcctggccaacatggtgaaaccctgtctctactaaaaatacaaaaaattagctgggcatgat

SEQ ID NO: 9522 - DNA, 253 bp, Homo sapiens
gagacagggtctcactctgtcacacaggctggagtgcagtggtgcaatcataactcactgcagcctcgacctcctgggctcaagcgatcctcccacctcagcctcctgagtagctgggactacaggcatgagccaccaggcctggctaattttttttctgttttattatattttgccattctgcaccttcatgaaataatttttgttgttgtttttgtttttgttcgtagatacagtgtcttcctatgttgcc

SEQ ID NO: 9523 - DNA, 568 bp, Homo sapiens
gtccagctgatggaattttaggagactgcttgagaacattagttggaaacataaaggagtacactaggaagtgtctctggattccacagtcaccgggagccagggtgccctgtttgacttccgcctccgtaacactgtgttttgcactctccccactctgctttatataccagtgtctcccagcctgggctgcatcttctgaggtgactctcaaaaactttttaaagttactgacgacttggtctcaccttcagagattctggttcaatgggtctgggcgggtctgggcattagtatttcttaagagcccgccaggtggttctaatgtgcagctgggttgaaatccgaactttgtagttcttgggacttctttaccacctaaccgagtggccagtcttccggaaccagaggagcgcgtcactccgcagattctcccaagtggatcaacttgggatcacttcagctcctgcatagatgacaagactatgaaagtagaaactaggcctggcgcggtggctcacgcctgtaatcccagcactttgggaggctgaagtgggcggatcacctg

SEQ ID NO: 9524 - DNA, 458 bp, Homo sapiens
ggcacgaggccacatgggagcagtccatgcatgacagcctctatcctacaaggcctatgagtatggattgggggggccaaaaggaaaaagctccatgtgcctctttgtctgcgtgggtcagaagaattgtgcacgcagattagcaggccaaggtctgagccacagcagcatttttatttcagattttgataactgtttatatgtgttgaaaaccaaaatgacatctttttaaagcttatccataaaaaaaaatagatgtcttttatagtggaaaaacacatggggaaaaaaatcatctattttgatgcagcatttgataatgataaaacacctcacacctcactctttatagtgcacaaaatgaatgaggtctgggctaggtagaaaaagggtcaatgctatttttgtttttagaatcattaccttttaccagcttttaaccatctgatatctatagt

SEQ ID NO: 9525 - DNA, 597 bp, Homo sapiens
acaggtagaggccactttggtaccattgtattccccaatccaacccaaccactatacatacacacacatacacacacacgtgcacacacacacacacacacacacacatcaattgttaacaaggacaattttagagtataaccaattagtaaagatataattttactaagtagaacagggacctaaaatacaataataacagaaatagaaagcaaaaaacaaaagtaaacctcaacaattattacttatggacccaagcactctgcttaccattttacaaacatatctcacatgttctttacaacattctcacaagggcaatatttatatccttaatttacagaagaggaaagtgagacttagagaagaaaagcaattttccaatgtcaaatttctgcttgtggcaaagccaaattaaaacttaaatattattaggccaggcgcggtggctcatgcctgtaatcccagaactttggggggccgaggtgggtggatcatgaggtcaggagatcgagaccatcctggctaacacggagaaatgccgtctctactaaaaatacaaaaaattagctgggcatggtggcgggtgcctatagt

SEQ ID NO: 9526 - DNA, 80 bp, Homo sapiens
caggttctgtcctgggccctggaaggtaaaggtaaagaaaaggaagatggctgggcttggtggctcacacttgtagtttc

SEQ ID NO: 9527 - DNA, 105 bp, Homo sapiens
gtttttacagattgattttgttgttaagtttcattttctcttttttaagtgctttttttggataactgttaatagctacttagttggttattaagtaaagttaaa

SEQ ID NO: 9528 - DNA, 248 bp, Homo sapiens
ggagtgtctacataaatcatttggaattcttctaaacacacttgtctgtcctctgccatttatttatgcggaattattattattattattatcattattattcagaggtagatatattcttgaaggaatgattatttaaaaaatcacagcatcccaatactttggttcccaaagaaatagatatgttcacattatgattaaagactgtttttgaacttgctctaaaaaatatatggtttctacattgc

SEQ ID NO: 9529 - DNA, 151 bp, Homo sapiens
gacttgggctgaggagccgccgcgtcccctcgccgagtcccctcgccagattccctccgtcgccgccaagatgatgtgcggggcgccctccgccacgcagccggccaccgccgagacccagcacatcgtcgaccaggtgaggtcccagctt

SEQ ID NO: 9530 - DNA, 464 bp, Homo sapiens
ggcacgaggttgccatactcttgcatacacaatcggttatctagtttttgattgtttgtgtgtatggtgtgtgctgtctctctgaccagatttcaggttcctgaggcgagcctgcagctcatactgctcatctgtcctctcctgtggtgggtgctcagggcctctcactgttagttactccctcctttctgcccagttctgcactcaactagtagaagcagccatcctttccccaagcaggaaattgtagtggtcgcccttaagagcagtgtgagggcagaagattaagggaggggaagagtccctggaactggaagaaggtaaatactttgccttgagagggcgccgaatcattttaccaaaatagtaaatggaaaaagtgtcaaaggttgggactagttttaaaaacacatatagccagtagacacatgggggctgtttaaataaaaacatttttttacccg

SEQ ID NO: 9531 - DNA, 375 bp, Homo sapiens
gagagttgtaatggcccgactgttgagtgagggggagcaggggatcccaacggcttgcgctgcctttgcgcagcagccggcgggcggccacgtcgcggcctggctggggagttgtaagacgttcatcgccgtgttatccttgagtaaagaagcgggcttttgccatgttgtccaggctggtctctactcctgggctcaagcagtcctcctgcctcagtctcccaaagtgctggaattacagggaatgaactctggaagcccagccagggacaatgcaccttcacagagattctgcactaatctgagtgaaggtctaaggtttggaatctccccctcatggagagaagctttgtatggctgtcatgcttaaacagt

SEQ ID NO: 9532 - DNA, 135 bp, Homo sapiens
ggacgcttttcatctgtcccgctgcgtgttttcctcttgatcgggaactcctgcttctccttgcctcgaaatggaccccaactgctcctgctcgcctgttggctcctgtgcctgtgccggctcctgcaaatgcaa

SEQ ID NO: 9533 - DNA, 178 bp, Homo sapiens
ctacgcttgctgtttgcgctctctgaaagggacaccaaggctgtgatttacaccaactgtcgagcactgcttctccatggagaaactagaaaaactgcttttggaattatctctacagtgaagaaacctcggccatcacaaggagatgaacattgtcttccagcttccatgaaagact

SEQ ID NO: 9534 - DNA, 366 bp, Homo sapiens
accaggacagaactttccccaattacagggtgactcacagccgcattggtgactcacttcaatgtgtcatttccggctgctgtgtgtgagcagtggacacgtgaggggggggtgggtgagagagacaggcagctcggattcaactaccttagataatatttctgaaaacctaccagccagagggtagggcacaaagatggatgtaatgcactttgggaggccaaggcgggaggattgcttgagcccaggagttcaagaccagcctgggcaacataccaagacccccgtctctttaaaaatatatatattttaaatatacttaaatatatatttctaatatctttaaatatatatatatattttaaa

SEQ ID NO: 9535 - DNA, 414 bp, Homo sapiens
ggcgttggtgtcgaaaccgttgagtttctaaatatttatttattctaacaaaaagcaatgagtacggggggatgacacatttaatgaacacaattttattttttttctgtaactgtgcttgttgaatgtcaatcatatttaaagggaatgactttgaagtaaaaccttttttcttgctactgaaaaaaatggagttgttttgggtggtaaagtgttaaggaatagggacagctggtcacacaaggaactcttgaaggccacatgtgaaaacctgtcacttgcacagaggccagtcccactaaggtgaccagagtgggctccaagcacaaactgccattggctatagatgggactgtgtccccccaaaattcatgtgttggagccttaaccctcaatgtgatggtatttgagatg

SEQ ID NO: 9536 - DNA, 433 bp, Homo sapiens
tctctctcagctagaaggttaggcattgcaaataccagtggatagggtttttcttagctttaaccccagcccatttcaaccccctctttgccctttgtatattcttttgaaaatatgatccagtagtgtttatgaatgtgtgttgtgtaaaatttagagattgatgttaaacaacagaattaaaggacaaagctgtcttttttgttggaattggggatgggagagcagctcaaagtgggaaatatggagaaaggagagacattgtggaaaagaagagataaattgaggggaaaaaaagaggatgaaaaaatgaagagagagaattactgatgtgcttcacacccacacctcctctccaacttcacagtaacagaggcaatgtcactatcttttacctgacaagtgctttaccagggagttgtgcctggcatcg

SEQ ID NO: 9537 - DNA, 369 bp, Homo sapiens
  misc_feature 90, 118: n = A,T,C or G
tggccaacttttatctgacattcttgctacaagtaaatatgaagaggattactacgaggatgatgaggaagatgaccctgatgccctganagatcctctctatcagattgatctgcangcatatctcacagatttcctctgccagtttgctcagcagccctgctacataatgttttcaggccaccttaatgacaatgagaggcgagttctacagaccatcggcatctaaaaaggggagcctttctacatttgctccttctgggccagccgcaaaccattttgcagccctcactggccttgagatgcactttcttctcaacctaaagtggcatcttgacccttggcccttggcctcggcagtgacactga

SEQ ID NO: 9538 - DNA, 397 bp, Homo sapiens
gcagcacctgctcaggaagttggtgggcttcgctgggcgcacacggcccacctggcactcaccagcctccgggctgcccttggcaggtgccgtccacactccagcactcagggaggggcggtgcacatcctcaaaaactgaccacactggcactggcgcccaggtggtgagtaggcgggctgtggtctgcagacagaagctttaccctgtgcacatacgaggagtaactcatttgagtgacgtcactggactgcggcccttagagcctcctgacgcggaggtgggcctttcacttctgccttttgcatgtgtgaatgtgtgtgtgtgtgtgattttagagatactgttttaaaactgcgtactcaaagcattagttaattaactaggaagtatcgtc

SEQ ID NO: 9539 - DNA, 346 bp, Homo sapiens
tatctgaagtttttttttttttagttgcagtttaggcttccagagccgtatcagtctttatataaatctgttgaataatcgtttcttctaaaatcaaagtaaatttcttgtccatgtttaaggagggaaaaggaatttgggtatatgtaattttgctagtacttatggcttcaatctaaaaatgtttatgatggaccaggcacgggggcttatgcctgtgatcctaccactttgggagacccaggcgggcggatggctcattgagcacaggagttcaagaccagcctgggcaacatggcaaaccccgtttttaccaaaaatccaaaaattacctgggcatgggggg

SEQ ID NO: 9540 - DNA, 451 bp, Homo sapiens
  misc_feature 181, 183, 369, 419, 451: n = A,T,C or G
gtcgtggaggtggatctggcaattttatgggtcgcggagggaactttggaggtggtggaggtaattttggccgtggtggaaactttggtggaagaggaggctatggtggtggaggtggtggcagcagaggtagttatggaggaggtgatggtggatataatggatttggaggtgatggcgncncctatcgcggcgcccctggcccttgcctcctggcctgctatcctggcggcgcgcccccctgtctcccccacgcgcttcgccctggtggtacccggaggatttcactcgaacgtcctccacggcctgttgccgccttgtccctttcgcggcctccctttctcctggggcccattctgccggagaatngactatctctcccccctgacactagcttccgtcactccctgaccccgcancctatctcttcctcccaccggggccccccacn

SEQ ID NO: 9541 - DNA, 426 bp, Homo sapiens
ggcacgaggcagcctggcctaacgtggctgcagtctccattactgggcggaagcggagccgggtagcccctgccgagccccaggaggcccctgattccactgctgcaggaggctcagcctcgaagcggatggcgctggtgctggaacgggtgtgcagcactctcctgggcctggaggaacacctgaatgccctggaccgggctgctggtgacggcgactgtggcaccacccacagccgtgcggccagagcaatccaggagtggctgaaggagggcccaccccctgccagccctgcccagctgctctccaagttgtctgttctgctcctggagaagatgggaggctcatctggggcgctctatggcctgttcctgactgcggctgcacagcccctgaaggccaagaccagcctcccagcctgggctg

SEQ ID NO: 9542 - DNA, 428 bp, Homo sapiens
gatcctggacatccaaatcatcctcttcacgcttctcagaattcagcgagaagagagaggatgactgcgcgagaagaagctagcttacgaacacttgaaggcagacgacgtgccaccttgcttagcgcccgtcaaggaatgatgtctgcacgaggagacttcctaaattatgctctgtctctaatgcggtctcataatgatgagcattctgatgttcttccagttttggatgtttgctcattgaagcatgtggcatatgtttttcaagcacttatatactggattaaggcaatgaatcagcagacaacattggatacacctcaactagaacgcaaaaggacgcgagaactcttggaactgggtattgataatgaagattcagaacatgaaaatgatgatgacaccaatcaaagtgctactttgaatga

SEQ ID NO: 9543 - DNA, 424 bp, Homo sapiens
aacttgaagctcaggtcaagcaagtagaacatgaaaatatgttaagccttcgtcataattctagaattcacgtgagaccctcgcgtgccaacacactagcaacttcagacgtcagcaggcggaaatggctgattccaggtgcagagtattccatctttactggccagcctctggacacccaggacagtaacgtggataaccagctggaggaaacctgtagcctagggcaccgttcacctctggaaaaggattcttcacctggaagttcatcaacaagcttgttgataaaaaagcaaagagagacttcagacacgccgatcatgagagctttaaaagaacttgatgagggaaaaatatttaaaaattgggggacacagacagagaaagaggacacctcaaatataaatcctcggcaaactgaaac

SEQ ID NO: 9544 - DNA, 566 bp, Homo sapiens
cccaaagtgctgggattacaggcatgagccaccgcacctggcccttgaacactgtatctaaggataaacagtcttattcacatcagagggggcagaatactaactgactaatttgtggaaatactggagctaaacatagtgcctaacacctcctatgtgtatgaattcccaagtctgaacagggcacaagtgaggagagagaaagggaggggaggaaagagaaagggccaggtgcagggaggagataaacacagacacagagaaagacagagaatggcttatcaaattaaaataagaagaataattataatagttacaatttattaaggtggtcttgtgtatcaggtattttatatataatgttttgtttaatactcacaaaaccctctaagatagaaattattactccagatgagaaaactgagattcagaacagttcatgacaaattcaacagggtctatggctgaaatgggattcagtgtgactccaaacccatgtttttccaaagaggccatactacctcccatgaacacaggtcagacaaacaaacagaaattctcagctg

SEQ ID NO: 9545 - DNA, 453 bp, Homo sapiens
tattcaataaactacataagatattgaaaactttgttataaaataggctttgtgttaacataggctttacccatctgtatgttagtgtaagtgttctgagcatgtataagttaggctaagctaagctatgatgttcaattcattaggtatattttatacatttcaacttacaatattttcagccagcaacatgtttattggaacatagccccattgtaaattaagaagtatctgtataggtacataaagtgaattcagaaatcatgggaatgttagttttgtatgtgtgttagtgtgtgcatgcacaatgcatgtgtgggtttaaaagaaaattgagggttctaagataaatataacaaggatttataagacttaacagtgagaaaaaataattacaaaatttccaattttaaaaaaattgggctaggcatggtcgctcactcttgtaatccc

SEQ ID NO: 9546 - DNA, 348 bp, Homo sapiens
aatgctcactattccccctccttggttttggattttaagtcattggaagatggtccccaatccaaagttataaagggattcattcatatttcttctggttctcttatgattttaatgtttacatctaaatcttgggcccatttggaatttgtttttgtgttctggcgaacagattcagttttatttgtttccaggtggtttcctggttttaccaacaccatttattaaaaagcccatgcttacctcactgatgtaaggccctctttatcatatgctaaattccactatgttttggtgtacattttggggctttgtttcctgttccattgacctgtctactcatatgtg

SEQ ID NO: 9547 - DNA, 582 bp, Homo sapiens
gtatatattcaagcaactaagactcactctgacagttgtttactacatcagagtaattccattcatagggataaggatcctactgcatagaaaaactttaaccaaaggccaggcacggaggctcacgcctgtaatcccagcactttgggaggctgaggcaggtagatcacctggtcaggagttcgagaccagcctgaccaatatgatgaaaccctgtctctactaaaaatacaaaaattagccagacgtggtggcatgcgcctgtaatcccagctacgtgggaggctgagacaagagaatcacttgaacctggaaggtggaggttacagtgagccaagatggtgccattgcactccagcctgggctacaagaacaaaactctgtctcaaaaaacaaacaaaaactttaactaaacatcatgtctctcaaaacaatgctgcaatactgactcagagaagttttaatgcttggggccagtaatctctgttaccttggcctgactattcttacctggtctactgcagagccaatggaacgagttttctttacaggtccagggggaccatcaacaaactgtcggct

SEQ ID NO: 9548 - DNA, 446 bp, Homo sapiens
cgacagaaggggtgtgtatatataaatgcaaaaatagatgtgacttgccactggtctgtgggactcaaaacaatccacctgtttggaaatgtctgttgctgctattgtagaagtttctttacgatataatttgtttgttgcttggtgctgggctacaagaatgtaagcatttttttttgagatggagtttcactcttgttgcccaggctggagtccaatggcatgatctcagctcactgcaacctctgcctcctgggttcaagcgattctcctgcttcagtttcacaagtagctgggattacaggcatgtgccaccatacccagctaatttttattagcaaagacagggtttcaccatgttggccaggctggtcttgaactcctgacctcagatgatccgcctgcctcaacctcccatagtgctgggattacaggcatgagccact

SEQ ID NO: 9549 - DNA, 500 bp, Homo sapiens
ctttaaggctaacagcctaatatgccaaacaaatgtatactgtcaggccatttacctggcgatgccggagccctctgggcacatgcatatatttatatcagtacatgagatacatgctgaaatgttattgcctacacgctttaactctttactctcaaaattcagttcttgaatgtaaaataaaaagaccttacaattctgctttattaaaggcttacttcctgaaggcagaaatcagacaaggaaagttaagaactgttgtaatcacaaaaaattaccttcttcaatattactacaaatacattgttgtcctattcaccatcaataaagaaactacaaagcatacaacatttttaaagaggagggtgtctgtaacaggtcttctaaccctgtcattcattcctttttctactattccatgttgctacagccttcctgtttccctttttatcaacattttatttaaaaatttttcaaaaatataacaaagtttaaagaat

SEQ ID NO: 9550 - DNA, 413 bp, Homo sapiens
ttgaagcgattctcctgcctcagcctcctgggtagctgggattacaggcgtgcgccaccatgcctggctaatttttgtatttttactagaggcagagtttcaccatgttggccaggctggtctcaaatggacctcaagtgatctgcctgcctcagactcccaaaatgctgggattacaggcgtgagccaccgcgcccagccacccatgccctctactaaacagctcttggagatggtagaattacggtgctggaaaggaccttggttcaactttgtcattttagcaataaggaaatgggggactagaggtggtaggatcagccctcattatataatcgcccatacatcgtaatctttactgtttaaatgagtaaaggcaaatataaagaaagtaatttttttttttttttttt

SEQ ID NO: 9551 - DNA, 602 bp, Homo sapiens
aatgtacatcttatagctaccaagacttgctgctggtgtgaatgttcaggtaaaagagagagaaatcaagaatggctctaggctgggtgcagtgactcatgcctgtaatctcagtactttgggaaccgaggcggatggatcacttgagctcaagagttcgagaccaaccagtctgggcaacacagcaagactctgtctctccacccctcaaaaaaagaaaaaaggaaaggcatgactctgagggtaaattctaggaaggcatgtggggtgggaaatggggccagcggtgtgattaaagaatgtacatggtagtagagggatgcagatctagataatattgaaaggccaggacttggacttctgggaatgggaaacatgatagaattatctgtaattttccagaatcaatgactagttgtttttttaaaaaaagaattatctgtaattgtgttttttgagacggagtctcactctctcgcccaggctggagtgcagtggtgtgatctcaggtcactgcaacctccacctcccaggctcaagcgattctcctgcctcagcctcctgagtagctgggactacaggtgcccgccactatgcccggc

SEQ ID NO: 9552 - DNA, 340 bp, Homo sapiens
aggctgagggaggagaattgcttgaacccaggaggcggaggctgtggtgagtcaaactcctgccattgcactctggcctgggcaacaagagcaaaactctgtctaaaaaaataagataaaataaaataaggatggcgggtagatataaaggagcacgtggatattcagtggacacaaaaggcttgtcataccatggtagaagagtgtgatccaaacctttccctcatactctgaattctgtagccatgtcccacttctgtcacctcctgtatgatctatgcttacacacatgattttgatgagagcacattgaagtgcccccaaccactcacacttaaca

SEQ ID NO: 9553 - DNA, 324 bp, Homo sapiens
ctgccagagtcaccacttgctgagtgattaggcctccgagaaagcaaggcggctgggggacatgcgaacacgacgagttcggctgtgcctgccttctcctcactgcccaggtgtgttctgcggccaagcgtccgagtgctcttatcttcagtgcctatcatgcacatacgtaacccacaaatactgactgaattagaattagggttattagggttatgacttagggaaatctttcaatgtccttggcttctatctcctcatttgtcagatgaaactgaaatacaagcaatgccttataaatttgttgtaatggggccatgcatg

SEQ ID NO: 9554 - DNA, 331 bp, Homo sapiens
aataatggcctgttaaagacccagatgtgtgcactgtctcaggttggctctttaagttcctggactaagaatctccataaagccatacaaactttaaatgagtcacccactagcacacatggcatcactccttataaatggttggcaaggcctgtaagacatgtcccacaaactctcggggttacctcaaagacactgagccatgctcctgaggcagatggtgagacatgctcctgagaacaccagtggatctgccaagcagtgatggctacagggacctgaagctgagctggaatatgcctccatactggattagttttatagtactgga

SEQ ID NO: 9555 - DNA, 266 bp, Homo sapiens
tttagtagagacagggtttcaccgcattagccaagatggtctcgatctcctgacctcgtgatccacccgcctcagcctcccaaagtgctgggattacaggcgtgagccactgcgcccggcctcaggtttcccctttcaacccacaagggaggtccctaagaatatggccccaggctggccgcatcaaagaaggcttgggtaggaactgttacaagtctgactctccccctcaaagaccttattagcactgggcgtggtggctcacg

SEQ ID NO: 9556 - DNA, 396 bp, Homo sapiens
agaagatagattttttttaaagatttatgaactgcgagtttggaaaagcacatttaattctagcatgtgaaattgttcgatttattttcccaggatctttgtcagttggttaatgctgatgctccttattggctagtgggcatgacagaaatgactcggacgtttggcctcgaattacttgagtcagtcctcaatgattttccgcaggtctttttacaagtaagccatttatagtatcttgtgacaaagttaatctgaattgttttacagatatttttaaagaaagcaacgtgtattttttttccaccttaaaagtggcaaagaggccagagttggtggttcatgcctgtaattgcaacactttgggaggctgaggtgggaggattgcttgagccc

SEQ ID NO: 9557 - DNA, 544 bp, Homo sapiens
ttggggacagcctcctagagaaggtcgttgagctggtcttcatggatagaggagtggcatctagaaaggaaggagggatgcaccctcatcccaggcagaggaaggaggaaaggacaggagggaattgtaagagggaaagaaccatagctatttctaagtgaccagagcaaaaggtgggcagtgacaatagcaacagagaagactgagagctagaaggacccagtgtccggttttgttttgttttttaaattaaaaaaaaaaagtttttgggggccaagtgcggtggctcacgactgtaatcccagcactttgggaggccaaggcaggcagatcacctgaggttaggagttcaagaacagcctggccaacatggtgaaaccccatctctactataaatacaaaaattggctgggtgcagtggctcacacttgtaattccagcactttgggaggccgaggcgggtggatcacctgaggtcaggagtttgagaccagcctgaccaacatggagaaaccccatctctactaaaaatacaaaattagct

SEQ ID NO: 9558 - DNA, 414 bp, Homo sapiens
aatgtgtaatctgctgctgttgagtagagagttctaggaatgtttattagttcctttgggttgatggtggccgattcttccataaccttacagatgttatgtctcccagttctactgattactgacagaacagtgtccttgactgtatattgactatatttatatatacagactcttctattattattgtggattaaaataattttgtagccgggcgcggtgactcacacctgtaatcccagcactttgggaggcctgaggcaggtgatcacgagatcaggagattgagatcatcctggctaacacagtgaaaccatgtctccactaaaaacacaaaaaattagctgggcgtggtggcacgtgcctgtaatcccagttactcgggaggctgaggcaggagaatcacttgaacct

SEQ ID NO: 9559 - DNA, 76 bp, Homo sapiens
tagaattccaagggaataaaagaggaaccaacatttgtagattttgccttctgtggcggaactcattcaatcttca

SEQ ID NO: 9560 - DNA, 551 bp, Homo sapiens
tttcccacagtggtaaaatcttactctaaaaaaaagctaaatttagaataattacaatgatatgcatgttaagtcacttaggtataatctacacagcattaaaaaagatctttggggaaagttcaagaaaaatctctgaaaattaataatgtgtgatgtttttgctaaacattttaacagactgatattccacgccattgtgagttaatttatatcctgagcaccaaaaatgttgtcattgtaataaatgatgtgtactctgtaggacaatataaccacagtgttcagtggaattaatagcagcgtttgtacaacgtgtgaaaaagagaaaggaaagtgaaagctctgtagcctttattcatagaaaggcaatttttaaaaatcacccagaaatgtgcagccttgtgcatctattgtttaatccaacactctaccaaaaatagttacacagtgccaggccctatgcttggggctgggaatgtagcacatagaacacagttctttccgaactgcaggtagccgtgaagtcaattaaagagtcatcattggca

SEQ ID NO: 9561 - DNA, 589 bp, Homo sapiens
agttacttgctttttaaatagctcaaaagtttttcatccttttaaccaaagttgccaaatctaaagcattattccttttggtcatcaagtagaggaatggatgaatatatttcagtttgcttattactaaaatatgttagtaatagcatattttattcaaatcactgcataatagctctgtcttattttccattttcatgacaaacacacccaaagctcagctcactgtatttactttcttttcatgatactgtttgctaagttttttctgtttgcttcaccatattttgaacaattttctattaaactaggatattttaaaagtttgccttttcaggccgggtgtggtggctcacgcctgtaatcccagcactttgggaggccgaggcaggcggatcacgaggtcaggagatcgagaccatcctggctatcgagaccatcctggctaacacggtgaaacctcgtctctactaaaaaaaatacaaaaaattagccgggcatggtggcaggtgcctatagtcccagctactcggaggctgaggcaggagaatggcgtgaaccctggaggcggagcttgcggtgagccgag

SEQ ID NO: 9562 - DNA, 513 bp, Homo sapiens
tctctggctgactttttggcaggcccctttgccattacttgagtgcctcagtttccctgctcttacgttagactagtgcgtcaaagccagtgtccctaggggcagggaaagagaaaagacattagctcgctaagtttaacagctgattcttgtatcttccagctgtctacgtttgttttcaaaacattcaatgagtcacagcaactcagagagggtttatgacagtttgccatttttaggagaactgtataacccaaatgatgaaggtcagatttgaaggagttggatctctaataggaatctgaagttttttttcttactgtcatgaagaaaggtcctgataacaggatggtaggattaggatttagatccagcccagtgtcggggtgaacagtgactaaaatgtgattccccaagagagcctcggcgatgacagtttctggtcctggagtctatgggttaacccctgtagcattagcccccgtcacagtgacatcagaataagaacaggct

SEQ ID NO: 9563 - DNA, 559 bp, Homo sapiens
aaccgtaagtacccaggtgtgtgctgcgttgctctgcccgtctgggatggttttcagcaccgctgctttgtgggagttgagtaagggaaaataaagagccaaaataaagccaagtctgagagtagcccccagaagcatgcactgtggagtcctgaggctgtagagaggccgtcacccagctttcaaggagccacattaaaacaagcttttggaaggtgatttgtcactgtttctcgagaacttttctgtttggcttagaaactccactttggggatttaagggaagaaagagaatttggacaaaagcaagagaaaagatatttatcggctgggcacggtggctcacgcctgtaatcccagcactttgggagtccgaggcgggcagatcacgaggtcaggagatcgagaccatcctggctaacacggtgaaaccccgtcaccactaaaaatacaaaaaaaaaattagctgggcgtggtggcgggtgcctatagtcccagctacttgggaggctgaggcaggagaatggcatgaacccgggaggcggagcttgcagtgagc

SEQ ID NO: 9564 - DNA, 437 bp, Homo sapiens
caactctgaaggcattcctgttttaatcaagctagcacacttttactagcttatatttactgaaatttatgccagataacatgaaaccgtgaaaaacattataggttactttctatctttctaagtgtgtaaaaaatattttacataagtgtttctttttctttaagcctattaaataaaaaattttacaatttaattttggcaataccatgagtagtatagggaaatatcacatacacataacataatacagacatatgtaaacatacaaactcaaacagatcttatagattttatttaaatattttagccatgtgacaggcataatgacacaaagctcactaatgcattaaagaatatctagagctaatttttttttctggccatgccaatgaagcaagattacttaccttgatggttaaagcttttgactactg

SEQ ID NO: 9565 - DNA, 63 bp, Homo sapiens
ctgggaaaggaacataattgtgatggggtgtgtgtgtgtgtgtgtgtgtgtgtgtgtgtgtgt

SEQ ID NO: 9566 - DNA, 320 bp, Homo sapiens
cttgtggcccttttccatctcttctgggagctgcctttattctgagccagctctacacttaaaggggcgtttgttctattttatcccgaattcctaaatgttttgtggagacggaaggctttttaagatatctagtctaccatatctccaggaataaaaatgatttctataaatttttaaaacctatgtaaagttaaaagtaaattaaaattgaaaacaattatatttgttcattccctatctgttcttgcatgaaatgtattgacacgaggatgccacatcatggaaagagaattctttgcatatgaaagcattaggag

SEQ ID NO: 9567 - DNA, 603 bp, Homo sapiens
agccagccacctagctacccttgactactgttcatttctgaaacttgtttctctagaacttttgttcattcttaaagcgaaccaagatatttcaaatacatgaatttttttacttaagttagctaaagtcatatttggtagttttcaccatgaaatctatggtctgccaccccaggtcttccataaggcaacccacatggtcctaccttctgtggagcacagtcattgctgcattctgaaagcccctgggttaaacagatgtttctcgagagcagctgatatcagctaggtaaggagcatcaccatcatataattaacaagatgtgcatgtatcttaacagtcaattttaattttcaaatcagagcctactaacacaaaagaatctcccttggaaagaatatacacatacatataactagctagctagatagacagacaatcagactgattgattattcattcaacatttattgtgttcttattatggaccaaacttcttaggtcttaggcataaaaagacaaagaagataccacccctccctttcaggagctcacaatcttggtaagagactgaaatgtgatcgggttatggcaataacttt

SEQ ID NO: 9568 - DNA, 346 bp, Homo sapiens
gtgatatgccagatgttacaacaccaaatgggttgccattcaattctggatttaagctaaatgaactggttgactaactggattgatttgtcattagacttacatgtttctaacttcttaaaagcatactttaattttcatctcccttatatgccattgtgtgaatactgggtaactctctacattgtaagcagattttaagaaatctgcatttaagagatttttgttcaaaagtagatttaattcacaaaagcctatatagtttgtcgttattgctatatgatttttccaggcagacctgtgtaaaaataatttcaggcagtgggaagagcatgtgcaaaatcag

SEQ ID NO: 9569 - DNA, 536 bp, Homo sapiens
aattgaaataaaatataaaatcatttaaatgtttaaccatgttaaagggagcatcatgacccagagcgttattcttagaagttgccagccttataaagacccatcagggtaagcaagtctagggacaagcagttaaaaatgaagcacttctaactatgtacctcaaggtgaaatagattttatagaaaaagccatatatgataaaaatctaaactttcagaactagatgactttgatggatggctttacaaaatgatagctaatataacataattcaaaatcaaatgagtttttaaaatagagcatctgggccgggcgcggtggctcatgcctgtaatcccagcactttgggaggccgaggtgggcggatcacgaggtcaggagatcgagaccatcctggccaacacgctgaaaccccgtctctactaaagatacaaaaaattagccaggcgtggcagtgggcacctgttgtcccatctactagggaggctgaggcaggagaatgacgtgaacccgggaggtggagcttgcagtga

SEQ ID NO: 9570 - DNA, 544 bp, Homo sapiens
ggctgaggcaggagaattacttgaacccaggaagtggaggttacagtgagccaagatcatgccactgcactccagcctgagtgacaaaagacgagaccatctcaaaaataataataataatttctggcttcttctgcagatgaaattagataatctttggaaaggcttacacatagtaccagatgttgtaaaatttactaattaataggaattaattaatgaatgccaaggggcagagccacacttcctatgatagttccttgctataaggtgctattttgttctctacatttactccatagtaagcttttgtttgagaaaaaaaatgccagtttggtgcgtagtagatacgcagaggctgagaaaggaacagatgacacaataacacaatggtaacagaatgtataatgcttccctctcaacttggttgatttgttttttttacatttacttggaccaaacaagcaaaaatacatgctccccagaagaacagaaataaggattttctttgggaggtggaggcgggcggatcacctgacattag

SEQ ID NO: 9571 - DNA, 466 bp, Homo sapiens
aaggatttcactatgactttatctcccaggatatttaaggtttggtctcattctctaaatgtacttaaaacaagaccgttggacttacattttgttaacataacaaaaatgtatttatcatttcagagatttccgcatattttgcaactggctcctcaatgacataccattttcaagaacattacactttaagtgaaaactccagctctctcgtttcttcattatacagagatgtaacattgaccagagaaatgatcacactgagcttccgaaccacacgatctccgagcttattgctgtatgtgagctctttctatgaggaatacctttcagttatcctcgccaacaatggtgaatatcttttgtgtaaagaaaaagagaaccctgagttagaaaaataggactgtaatgacatgggtcttttcagcagtcaaactacaaacgatgagagaaaactgtatgccct

SEQ ID NO: 9572 - DNA, 401 bp, Homo sapiens
tagaggattacaggcgtgagccactgtgcccagctgttttacatcatttttttaaaaaaattattttttatttttttgagacagggtcttgctggtgcctaggctgcagtgcagtggcacgatcatggttcaaggcagtctcaacttcctgggctcaagtgatcctcctgccttggcctcccaaagtgctgagattacaggtgtgagccactgtacccagtctgttttacatcatttttaatggctgacttttccagttgtaactgcaccataagttatttatttaatgtctttactggtggacatttttactattttcagttttttcctacacttatcaatgaacttcattgtggatacatcttgtagactcatcgcttctttttttttttttgaaaaaa

SEQ ID NO: 9573 - DNA, 466 bp, Homo sapiens
gaggtcgaggctgtagtaagccatgattgcaccactgcacaccagcctgggtctcagaacaaaaaaaaagagagaaaatgcaattatcgtccccagataagaaggattacctttgtcacaactgcgaagtaattgctttggtacggaaacagcacacagagccataaagcaggttaaaaaacacttctgtgacttcctaaatcctctcttgaatacatctctgagttctggcctagggacagcagtttcatttctggctctaaaatttaggtatataacaaaacacaccagcacagaaaaacttcaagaatactatgaatgagtgccataaattcagaacaaacaaaataacttgcactctaaaaagtcttacaaggccaagtgcggtggctcacgcctgtaatcccagcactttgggaggtcaaggagggtggatcacctgaggtcaggagtttgagaccagcct

SEQ ID NO: 9574 - DNA, 198 bp, Homo sapiens
ttgtttgagcttctttaagatagctgttttaaagtgtttagtaagtctgctaactgatctttcccaggaacagtttctgctggtttatttattgatttttgaataggctattcttccctgtttctttgtatagtttgtgatgttttgtcaaaaactaaacatttgaggccaggggcagtggctcatgcctgtaatccc

SEQ ID NO: 9575 - DNA, 576 bp, Homo sapiens
caccaccacacccggctaattttttgtagtttagtagagacgggttttcactgtgttagccaggatggtctccatctcctgacctggtgatccacccacctcggcctcccaaagtgctgggattacaggcatgagccaccgcgcccggccaaaattcacggtggtttttatctgagatgtccgcatcacacatttcctcactgctcttgaggttccactgacaatcagaagaatttcaatttttacattaattttgttttgttactgctttggggaggcaactggagatgattcaacatttattaaatcaactctttgggattaatgggtgttctcttcttctgaaatacaatgttctgttctgttttcatgaggctccaattgaaaactcattcctgcccctgtcctcatttccctccctgggtctgtgaacagctttctgaagagacagagagaagtgagctagctctgggagtaggcagtggaagagcactacagtgctttccatacctagctgaaaaggacctgtagaaaatctgcagacacatttatgatcagggacttctttcccttcct

SEQ ID NO: 9576 - DNA, 183 bp, Homo sapiens
agagtggtgatggatgcacagctttgtgactatactaaccaccactgaattgtacactttaaagtggtgacctttatggtatgtgaattgtacctcaataaggctattattagaaaaaagccactaaagtttttagacataataataatatataacttgtatgtttcttgattcaaataaacc

SEQ ID NO: 9577 - DNA, 445 bp, Homo sapiens
aagtgctgggattacaggcgcccaccaccacacccagctaatttttgtatgaaaggtaattttttttaaagccagaaaacacagaagtgaaaatctctttccagtccaggcaaaagaagggcatgtattcacacattcattcattttggtagagcgttggtcacgggcacagacccagctgccccactgcttattagccccatcgtttcccagctaggtgacctttctgccttggtttccccacctataaagggggatagtaacagtacacctatcctctagtcaattccagtgaaatgctcagaacagcatctggcatgtggttcttgctcaattcatggtatcttttactcggaccacaacttctaaagcttaaaattaggttagataataagaaacatccagaatgaggccaaaatgaaaccagggctgtcctggaaaatct

SEQ ID NO: 9578 - DNA, 567 bp, Homo sapiens
tcccatcgccacaaatgcaatatgtttggaactaaactcatcatctggccatctgtttcattcctggttttgtttactagttttaacgcctctcttacttgctcatcctgtcctcctttgcctgcagtttaggaatactaccactaggtggccatattgggttatactttcttgcattctaagccagaagctggctttcacaaatattcaagatggtgggtgggccacctcagagtttcacccaaatttttagcaaaaagaaaacatgatagttttttttagtgtaaacattttatgccctaataaaatccttaaatatcataaactttctaaactcatttttaaggataattttgtgggccaggtgcagtagctcatgcctgtaatcccagcactttgggaggtcgaggtgggtggatcacttgaggtcaggagttcacgaccagcctggccaacgtggtgaaacccccgtctctactaaaaatacaaaaattagttaggtgtgatggcgcacacctttaatcccggctactccggaggctgaggcaggagaaccgcttgaaccca

SEQ ID NO: 9579 - DNA, 261 bp, Homo sapiens
ttgaaaggcaaggtaagaggattgcttgagcttgagtctgaggccgcagtgagctatgaccacaccactgcaccccagtctgggtgacagcgcaagaccccaactccaaaaagaaaaaagaaaaatcacaaagaattgcatggcagagtgcctgtctttcacagctttaactgctgaaggaactttctttttttttttttttttaaaggggggggagaaaacaaatttttggtaaggaattttttgccccaaccccccaaa

SEQ ID NO: 9580 - DNA, 285 bp, Homo sapiens
tgtttttgatttcatgcctagatcttttggttttaattcacataaaatagatgacacatgttttctgtgttcactggaattttttaaatcaacaggataatatatattctgtgaaaataaaataaaagcaatgacaatgataatatctcatgtgttttagagttcttcaagggttttcacatgaattacattatcatgattgattttcatttaaaacatgaaaacaaaaacctgtgaggtaggcagggttaaggaaaaaatttaaaaagctccattgtgtataat

SEQ ID NO: 9581 - DNA, 593 bp, Homo sapiens
ttgaactcctgaccttgtgatccgcccacctcggcctcccaaagtgctgggattacaggtgtgagccaccgcacccagcctgccaattattacttctaaaattcttcctaaagggtggccaaattagttttcactgacttctgtttaaaaattcaataagactctgaactaaagactttgagtgaagagaaatgatacattgtacatttaaaacctgtgtcttttagacatacagccaaaaagcatatgaaaaagtgctcagtatcactaatcattagagaaatgaaaattggaaccacaatgaaataccatctcacacaagtcagaatggctattatatgaaaaagtcaaaaaacatgctggtgaggttttggagaaaagagaatgcttatacactgctggtgggagtgtaaattagttcagccattgtggaaagcaatgtggcgatttctgaaagaacttgaaacagaattaccattcaacccagcaatcccattattggctgtatacccaaagggatataaattgttctgctctaaagatacatacacacgtatgttcatcacaacactattcacaatagaaaagacata

SEQ ID NO: 9582 - DNA, 564 bp, Homo sapiens
aaagtcatcataacttccttcactcagtttctgtcttcttccagtcagggatctagtagcttgactattcttcattggttccctttcatttacaggtcacccaacaagacaaaccacacaggtaatctcttctgatccctgccatcgccaagagtcatttcctgccctcatcactttctaaattctatccaattcccagaatatccatgctccttctcactgtccctcattcacataatgcctaaaacactattcctgctctttgcctgatgagcccttactcacttgtcaagactcagatcaaattgtcaagactcagatcaaattgtcacctcttctgggagggcttcctcaacctctctaagtggagttaatcatctctgctcccacagtgtatttttttgttctctgttagtgattttcttatttaactgtctagctccatttctacattggtagtcctgggatggcagattttagtcatcttagtatcactacctggagcctggtctatacttgatgtttaagaaatataagtctgggtgcgggtgcagtgactcattc

SEQ ID NO: 9583 - DNA, 453 bp, Homo sapiens
aagttagaagactgagtaagaggtcgaaagggatgggagttatgtgtagggactgaaaacaggtttgggagagcttaatgtttgcttttatactatgactcttcatgttttctcttcaaccatcctaaagaagtctgataatggaaaggcactcgctctgcagtggccaggacaaactttgtacaaaatctgtcatatgatgaggagtaggaaatgaaagaaacggataggaaatattcaggaaaatggagtataagaagtgtgatccagttatgggagggcactggagaatttacaagcattacagtgggaagttttattccttagtggaattgcaagtaacatagtgccttaagaaatttgaatcatttagcttatgtacttaatctgagtcatttctgacaatgttatctaacttcctcttcccccaattcaatttaaaaaccacacatt

SEQ ID NO: 9584 - DNA, 312 bp, Homo sapiens
tctaattatttgccttttaaaaattacaatctggccgggcacagtggctcactcctgtaatcccagcactttgggaggctgaggcgggtggatcacctgaggtcaggagtttgagacagcctggccaatgtggtaaaactctgtttctactaaaaataaaaaattagttgggcgtggtggcgggcgcctgtaatcctagctactcgggaggctgcggcataagaatcacttgaacctgggaggcggaggttgcagcgagccgagatcatgccactgcactccagcctgggtgacagagtgggactttgcctc

SEQ ID NO: 9585 - DNA, 639 bp, Homo sapiens
ggcacgagcagcctcccaagtgttgggattacaggtgtgagacactgcgcctggctatattttactatttggaaatcacaatgcatcttaaaattgatggcttcttgcaaccactttcaaccaggtgcctgtcatgatttagtgctagcatcaaggcaggttagttatgaagaaatagagtgtgtgtttatatactcacacagttagaaatcgacccttttaaaaattatttctttttgaaaataatgtcagttccatcagaactaatgcattgataactaaatgtctgtggttccttgtcataggtctacacctgacctctctattttgtgcacataggggattcgtaatatcactgttcagtcagtcattcaccatctagtgatcatcattctacatgattgcactttttcaaaggcataaaaagccaacagttgcactcttaataatcaactgtaacacaaagcagagtactttgggagttttaacaggatatattattggtaactggctattatgccactccctctgggtgccacatttgcctgttaaccaagaaatgtagacatggtgccttatcccaacatttctgaaattatatctcaaggaatcaccagtgcttactagtacttgacaatg

SEQ ID NO: 9586 - DNA, 662 bp, Homo sapiens
ggcacgagatcacctccttcaaggacagagtgccctcacctagggccagggggaggttcagagccacactgctagccaatttgtttcaagaaaaattcttggtaggctgctgccagcagaagtgctgcctgttgaggcctgtcactgaatggtaaagatctgtggccaagaaccccaaagggccagattctaatccagatccatcactgcttgctgtgagacctcgggcaagattcttagcttctctgtgcttcactttcctcgtctgcgaagtctgtatgcacagcacaaagtggttgggaagactggtgggattccggcaggggtggagctctgcagactgagacactcagttggctgttactagtgggggctgccatctctaaatctgcacctggtattttcctgccttttctgcaaagcccccagggaaacagcctcagaactcctcaaacacctccctccccagatccctgttttccattccctactgccaaagacagcggagctatgaggttgtgccttgcctcggtccacggtgggctcctggatggctgggcactgatggggagctgcatgaataactgcctgggctgggggttgcccagtctcagggctgctgtgtagtctccaggctgtgttggtagcatcaactagcagct

SEQ ID NO: 9587 - DNA, 597 bp, Homo sapiens
ggcacgaggtgatttcctagtagtgggtagcattagaaaactggcatcagcctccctcttggacacggacaaaaggtattgcggcaaaaccacctctagaaaagcatggaatgaagaccattgggagcagactctgccaggatcgtctgatgaggaaatatctgatgaggaagggtctggagatgaagattcagagggactgggtctggaggaatatgatgaggacgacctgggtgctgctgaggaacaggagtgtggtgatcacagggagagcaagaagagcagaagccactctgcaaaaacaccgggcttcagtgtccagagtatcagtgactttgagaaatttaccaagggaatggatgaccttgggagcagtgaggaggaggaagacgaagagagtggcatggaagaaggggatgacgcggaagactcccaaggcgagagtgaggaagacagggctggagatagaaacagtgaggatgatggtgtggtgatgaccttctctagtgtcaaagtttctgaggaagtggagaaaggaagagccgtgaagaaccagatagcactgtgggaccagctcttggaggaaggatcaaacta

SEQ ID NO: 9588 - DNA, 526 bp, Homo sapiens
ggcacgagccgtcctgcgcggttgttctctggagcagcgttcttttatctccgtccgccttctctcctacctaagtgcgtgccgccacccgatggaagattcgatggacatggacatgagccccctgaggccccagaactatcttttcggttgtgaactaaaggccgacaaagattatcactttaaggtggataatgatgaaaatgagcaccagttatctttaagaacggtcagtttaggggctggtgcaaaggatgagttgcacattgttgaagcagaggcaatgaattacgaaggcagtccaattaaagtaacactggcaactttgaaaatgtctgtacagccaacggtttcccttgggggctttgaaataacaccaccagtggtcttaaggttgaagtgtggttcagggccagtgcatattagtggacagcacttagtagctgtggaggaagatgcagagtcagaagatgaagaggaggaggatgtgaaactcttaagtatatctggaaagcggtctgcccct

SEQ ID NO: 9589 - DNA, 611 bp, Homo sapiens
ggcacgaggccgggcggaggccggggcctcggccatgttcgcggggctgcaggacctgggcgtggccaacggcgaggacctgaaggagaccctgaccaactgcacggagccgctcaaggccatcgagcagttccagacagagaatggtgtgctgctgccatctcttcagtcagccctccccttcttggacctgcacgggacgccgcggctggagttccaccagtcggtattcgatgagctgcgggacaagctgctggagcgagtgtcagccatcgcttcggaggggaaggctgaggaaaggtacaagaagctggaagaccttctggagaagagcttttctctggtgaagatgccgtccctgcagcccgtggtgatgtgcgtcatgaagcacctgcccaaggttccggagaaaaaactgaagctggttatggctgacaaggagctgtatcgagcctgcgccgtggaggtgaagcggcagatctggcaagacaaccaggccctcttcggggacgaggtttccccactcctgaagcagtacatcctggagaaggagagcgctctcttcagtacagagctctctgtcctgcacaactttttcagtccttccccca

SEQ ID NO: 9590 - DNA, 59 bp, Homo sapiens
ggcacgaggagagagagagagagagagagagagagagagagagagagagagagagagag

SEQ ID NO: 9591 - DNA, 607 bp, Homo sapiens
ggcacgagggaaagaaggaccagccccttgaccgttctggctggggaattgtccacgaggaagcctctgcacttccacacatggcacagttctgcctgtgacctgccgcctaagctttactggaattcaggttttgagactgagatgcgtgttcgtatttttccacttatctgtcttgtcagctggccgacttctctgtgattggttttttaagtgccgggtgaattttggacctctggatgtgcagcaagtttttatgcaataagccttcctttcaggtctctaaaagctcctgctctgatctgtggtttaacactgtgcagggctgtggagctctgagagacctgaacccctacccatcccctgcacctccctactctccctgccgaggcgtccatagcatttccctaataaatagttttatcagggacactccatggggtggcttgtctctgccccaaacagggtcttcacgttctaactgcagggaagagactggttactagcgtaaagctgacaagttaccagttcacctgatcagaatgtattttttataaccaccatcattccttgtctcttcagtggaagatattctttcctgtttccc

SEQ ID NO: 9592 - DNA, 630 bp, Homo sapiens
ggcacgagatcaagtatgcccgctttgaagaaaaacatgcttattttgcccatgcacggaaagtgtatgagagagctgtggaattctttggagatgaacatatggatgagcacctttatgttgcctttgccaagtttgaagaaaatcagaaagagtttgaaagggtacgagtgatttacaagtatgccctggacagaatttcaaaacaagatgcccaagaactctttaaaaattataccatctttgagaagaagtttggtgataggcggggtattgaagatatcattgtgagcaaacggagattccagtacgaagaagaagtgaaggcgaatccacacaattatgatgcatggtttgattacttgcgcttggtagaaagtgacgcagaagctgaagccgtgagagaagtctatgaaagggccattgccaatgtcccacccattcaggagaagaggcactggaagcgctacatttatctttggatcaactatgcactctatgaagaattggaggcaaaggatcctgagaggacaagacaggtgtatcaagcctctttggaactaattcctcacaaaaagttcacatttgccaaaatgtggatactgtatgcacagtttgaaatacgacaga

SEQ ID NO: 9593 - DNA, 553 bp, Homo sapiens
gactaagaatccttgtggacaggaaaagtggtgtttgtatttattatcctcctaacctaacctctggctcaatgcctgacacaaagtaagaattgtttcaattaattaaaaatgaaaactggctgggtgctgtggctcacgcctgtaatcccagcactttgggaggccgaggcaggtggatcacgaggtcaggagatcgagaccatcctggctaacacagtgaaaccccgtctctactaaaaatacaaaaaaattagctgggcgtggtggcgtgtgactgtagtcccaactgcttgggagtctgaggcaggaaaatggcgtgaacccaggaggcagagcttgcagtgagccgagatcacaccactgcactccagcctgggcgacaggcactccagcctgggtgacagagcgagactccgtctcaaaaaaacaaaaaagaaacaagaaatgaaaactcaagctaccaagatacttagaagtttcagagctttatgaagacataaaatgctaaaagtgaagtaagggtagaaaaggaatgcctaccaatgtggga

SEQ ID NO: 9594 - DNA, 555 bp, Homo sapiens
atttcttagcatatgctccctttttgatcttctgccaatgtttccatcttattatattaaatatgatatatgaatgtaatttaaattccatatacttgagcaaatatgagacaaaattccctttcatgttaatatttaatccaataaactatcacttgactttttgtaactatacatcatagaacatacatatctctcagttatatctcttaatctagttttttgggttaatgtatatatgtgaaaatttatattttaactcaaggtaaaagcaatatattaaacaagtatgggaaaatacatatgagaaaaagagtgcatttccttttaacaatgttggtcatgtaattaaaaactaatatgtaggaccgggcgcagtggctcacgcctgtaatcccagcactttgggaggctgaggcgggcggatcacgaggtcaggagatcgagaccatcctggctaacatcgtgaaaccccgtctctactaaaaatacaaaaaaattagccgggcatggtagtgggtgcctgtagtcccagccactcggtaggctgaggca

SEQ ID NO: 9595 - DNA, 359 bp, Homo sapiens
ccagaggagtcccccaccaacaattagcagaaccagtgccattttcaatacatcaagatcaacatcctacactgaacattcttagtgacccatagtctgggtgaaggtcattacactctcagggatttgaattagaacacaggtaaagctaaagaaagtgggagaagaacttggaattagaaaaagcccagttcaaagataatttgtattttactgacatgttcagcatagcatgaactctggctctgccgaacgtccagtctgcctcatgtacaaaagtttctgatccaggggccgggtgtggtggctcatgcctgtaatcccagcaatttgggaggccaagacaggcggattatgag

SEQ ID NO: 9596 - DNA, 53 bp, Homo sapiens
tctaatgtttaaatcccataaagctaagtttcccgttaaagggaagtgctttg

SEQ ID NO: 9597 - DNA, 639 bp, Homo sapiens
ggcacgagctgagatcaagcccggggtgcgcgagatccacctgtgcaaggacgagcgcggcaagaccgggctgaggctgcggaaggtcgaccaggggctctttgtgcagttggtccaggccaacacccctgcatcccttgtggggctgcgctttggggaccagctcctgcagattgacgggcgtgactgtgctgggtggagctcgcacaaagcccatcaggtggtgaagaaggcatcaggcgataagattgtcatggtggttcgggacaggccgttccagcggactgtcaccatgcacaaggacagcatgggccacgtcggcttcgtgatcaagaaggggaagattgtctctctggtcaaagggagttctgcggcccgcaacgggctcctcaccaaccactacgtgtgtgaggtggacgggcagaatgttatcgggctgaaggacaaaaagatcatggagattctggccacggctgggaacgttgtcaccctgaccatcatccccagtgtgatctacgagcacatggtcaaaaagttgcctccagtcctgctccaccacaccatggaccactccatcccagatgcctgaagccactgcagggcagggcaggcagggggggcttcccgccctcctgcagc

SEQ ID NO: 9598 - DNA, 493 bp, Homo sapiens
gatttgagagtctcctcccattttctcactgagtaccctgtgatcattacactctttctctgctgcatccctgctgtctcagtgcattggtctgttactgagcagtgggcatatgaatctgttgatcccataacactcttggtcccctgctaagggtttgggcttaatgtcttccagggacaggagatgatgtcttgagtacaatgcaaggagttgtataaagctgggagcattaaagggctgaacctcagtgatagagtataccagaaaaatagtttattcccaagatctgggaaacaaaaggggagcttgtcagtttctgcttggcctatgagaggacagagaacctccttgggttatagtgactacagggtttacttgtggctttaatttatattacagatttttttttttgacagtgtcttgttctgtcacccaggctggagttgcaatggcgtgatctcctctcaccacaacctcctcctcctgggtt

SEQ ID NO: 9599 - DNA, 358 bp, Homo sapiens
cgttgctgtcggaagcgatgtgctcactgtgtgagcaagttcactgttgcctacagggctggaatggtagaagactcttgaagcttaactcattccccacaaggcatgcaattttttccccagtattttattgactggtttgatggttcaggcttcaggtctgtaggggagtgcataggaagtgattgtggccaaaacatgtgagtaaatgcaacacccaatggtgagcaaaggtcccatccttgacagaggtggctggaggagctctcagtgagttgcatcgagattttttttttttttttttaaaacaaagttggttttttgtgccccaggcgtgaatacaagtgcttaatctccg

SEQ ID NO: 9600 - DNA, 223 bp, Homo sapiens
acgacagaaggatacggctgcgagaagacgacagaaggatacggctgcgagaagacgacagaagggacctgaggtcgggagttcaagaccagcctgaccaacatggagaaaccccgtctctactaaaaataaaaaattagccgggcgtggtggtgcatgcctgtaatcccagctactggggaggctgaggcaggagaattgcttgaacccaggaggcggaggg

SEQ ID NO: 9601 - DNA, 321 bp, Homo sapiens
cgtctgctgtcgggccgcaggagttttttttttttttttttggttttcccaaaattttttggaaccaaacccaagtgggggggatcctgggggaaaaaaaaaacccgttttaaaagttttcaaaaacccttttaaaaaggttttttccccaaaatttttggggaaaccaaatttttttttaaactttttttaaaactttgggagaaggggggtgggaaaaaactaaacttttttccttttccaaaatttttttggccccccgaaaaaccgcaaaaaggcccttaaaagcggtttttttaaaaaagggattttttttttttt

SEQ ID NO: 9602 - DNA, 483 bp, Homo sapiens
ctcggcgtcgccccgcgtaccgtcgcccggctctccgccgctctcccgggggttcggggcacttgggtcccacagtctggtcctgcttcaccttcccctgacctgagtagtcgccatggcacaggttctcagaggcactgtgactgacttccctggatttgatgagcgggctgatgcagaaactcttcggaaggctatgaaaggcttgggcacagatgaggagagcatcctgactctgttgacatcccgaagtaatgctcagcgccaggaaatctctgcagcttttaagactctgtttggcagggatcttctggatgacctgaaatcagaactaactggaaaatttgaaaaattaattgtggctctgatgaaaccctctcggctttatgatgcttatgaactgaaacatgccttgaagggagctggaacaaatgaaaaagtactgacagaaattattgcttcaaggacacctgaagaactgag

SEQ ID NO: 9603 - DNA, 420 bp, Homo sapiens
gttcctgtcggggctgcagcggcgggagggagcccagtggaggcgccctcccgaagcgccactgcccatgctgaccacccagccctccggctgctgatgtcatgagtaacaccactgtgcccaatgccccccaggccaacagcgactccatggtgggctatgtgttggggcccttcttcctcatcaccctggtcggggtggtggtggctgtggtaatgtatgtacagaagaaaaagcgggtggaccggctgcgccatcacctgctccccatgtacagctatgacccagctgaggaactgcatgaggctgagcaggagctgctctctgacatgggagaccccaaggtggtacatggctggcagagtggctaccagcacaagcggatgccactgctggatgtcaagacgtgacctgaccccc

SEQ ID NO: 9604 - DNA, 262 bp, Homo sapiens
gcccaacatgttacttggccaaatgtttttgtgcagtgtaccccctgtacagctgtatgtgattggccaaccttatctcttatctcccatagcagccttaatgtctccttgttaactctcatctcacttaaagttacttgttgaatgtctctcattcttgctagagggtaaactccctcagatatggcatatacttgtcatatttattccaaggacataacagtgccaggtacctaatgggctttttatgatgtttattatt

SEQ ID NO: 9605 - DNA, 475 bp, Homo sapiens
ctacatcagccgctgttctgtgtgtgaggccccggccatcgccatcgcggtccacagtcaggatgtctccatcccacactgcccagctgggtggcggagtttgtggatcggatattccttcctcatgcacacggcggcgggagacgaaggcggtggccaatcactggtgtcaccgggcagctgtctagaggacttccgcgccacaccattcatcgaatgcaatggaggccgcggcacctgccactactacgccaacaagtacagcttctggctgaccaccattcccgagcagagcttccagggctcgccctccgccgacacgctcaaggccggcctcatccgcacacacatcagccgctgccaggtgtgcatgaagaacctgtgagccggcgcgtgccaggaagggccattttggtgcttattcttaacttattacctcaggtgccaacccaaaaattggttttatttttttctt

SEQ ID NO: 9606 - DNA, 393 bp, Homo sapiens
aaaatgagtaggagatgactgagagcttaaagtttgggagtgtcaattaactcagcattcttttaaaaaacgtgtcatatattacagcattttcttttatttgaagtgagtaaatgtatctttttaaattccttagtaatttttgagcactccatatgtataaagcatgtgaatatttggtagcattttacaaatgtccagagatttgtgagagttcctgagatcttcatagggggcccacaaagtttagtattacttttcacggtaatactaaagtgtattttgcctctttttactttttctcttaatagcatacagtggtaactgaaggctaatagtatgtgtgtttatgtgctttaaaaagttcgtggttttggccaggcgcagtggctc

SEQ ID NO: 9607 - DNA, 115 bp, Homo sapiens
tcagtttgtttattaaaataagatgtctaatcctctgttataatttaagctataactgttgattgttatgttattaataattggttttcaattgctaaaatataagaatatttga

SEQ ID NO: 9608 - DNA, 400 bp, Homo sapiens
caaagatctgaaccagctgattaccatcttggtcacttgagaactcaggtctgtccaataaacaccctaatccaaggtggtgttaaatacatatatatatatttttactttacgtttatttattttgaaaaatttcaaacctatagaaaaattgaggcagtaccatagtcttagtccattttccattacttagaatatccaaaagtgagtaatttataaagaaaattaatttatttcttacagctatggaggccaaggtcgaggggacatatctggtcagcgttttgccatgttggtcaggctggtctcgaactcctgacctcaaggcctgccttggcctcccaaagtgctgggattacaggcataagccaccgtgcccagccacctctgagcactttag

SEQ ID NO: 9609 - DNA, 354 bp, Homo sapiens
  misc_feature 342: n = A,T,C or G
agttaagcagtctagttcttcggcctcatactgtcactgtgggtttgtatacgtagaactttgttgtacctttttaaaataaaacctgaagccttagatatgtaaattgattcatttaaacttactttctttttttttctggagacagagtcttactttgtcacccaaggctggagtgtgcagtggtgtgatcttagctcattgtggcctcaacctcctgggctcaagtgatcctctcaactcagcctcccggttagctgggaccataggtgtatgccaccacaccccgctaattttaaaattttttgtagaggcagggttttgccatatgcccaggctggnctcaaactcctg

SEQ ID NO: 9610 - DNA, 513 bp, Homo sapiens
gtaacaggcaacttaataagcagttaatatgtattattatatttaatgtataaagctttaaatacacttatacaaatttgaagaactcagggcaccctattcctctgctcacagatatctattttaaagtcgacatgagtaagtgataaattcatcaatataaaataaatgtaaaaatatttcaaagtgattcatttgtaccagaccatttaaaaagaggggataaaatagtatcaatggggaagggcatggcgggtcaaacctgtaatcccagaactttgggagaccgaggcaggcaggtcacgaggtcaagagattgagaccatcctggccaacatggtgaagccctgtctctactaaaaatacaaatattagccaggcttggtggtgggcacctgtagtcccagctactcaggaggctgagtcaggagaattgcttgaaccagggaggcacaggttgcagtgaaccgagatcgcaccactgtactccagcctggcgacagagcgaggctc

SEQ ID NO: 9611 - DNA, 311 bp, Homo sapiens
agactggcaccgaaacagctcctcgtttctctcaaagtgaacatataattcatagagggttaacaaaataatatcgtgaagtttttcccctttaaatctctagcggtggcggggcgcggtggctcacgcctgtaatcccagcactttgggaggccgaggtgggaggatcccttgaggtcaagagtccgagaccagcctgggcaacatcgtgaaaccctgtctctacaaaaaattagctgggtgtggtggcacaggcctgtagtcccagctgctccggagggtgaagtgggaggatcgcttgagcctgggag

SEQ ID NO: 9612 - DNA, 648 bp, Homo sapiens
aacactaacccacagggaggatgagagaggaaagtgcctcctctggctgaaactgccaggatgccctctacttctaaaaacatttggtattttccatagcgcgtttctataacaaaaaatatgtgctagttcccgttagctggaactgacatgtggaaggggccaggtcttgtggggcctggccaagactgcccccctgtgtacagcaagggaggacctgcggttccaccagagccagagcagggccagaggccgcaggggcacctctgagctccaacaaagccagcaacaccccataccgccgaacagacagaaaggcgggccaggggccctccatgtcctgaaagacccagcacagcactgtccatttcacaccaggattcttccaacatgagaaagcaataacctttaatattcacgtgctcattcaacttaactgggggcgggctcagtggctcatgacagtaatctcggcattttgggaggccgatgtgggtgggtcacttgaggtcagaagttcaagaccagcctggccaacagggcgaaaccccgtctctactaaaacatacaaaaaaaaattagccaggcattggtggtgtgctcctgtagtcccagctactcgggaggctgaggcaggagaactgcttg

SEQ ID NO: 9613 - DNA, 179 bp, Homo sapiens
cttagcacaacacagaaaagctttaaacactcttacctttgactggaattacacacacacacacacacacacacatacatacacacacacacatacacacacacacactagggctttcccacatttttgtgatgcatccttaaaaataacacacatctctgaaaagtgaatgtgggggg

SEQ ID NO: 9614 - DNA, 601 bp, Homo sapiens
actgagtaatgtagtatattattttttcttcacagtgttgcattattttatatgttaacaagtagtagcttaagtaaccgtatgttttgtagctgaggaaatacctgcataatgatccagagtgttttaggagcagtatatttcaattatttttcaaatgtgatttttcaaaaaaagtctgtgtgaaataattgcaaaggatgattgtgaaacagaagaattttaaaataggaataagaataaatctgagttgagtagtttttactgtgttttgatgtatatttgtatttgtgtttctcttcttgaccatctattatttaaaatcatttctcacataaattaagaaagacgtactgagttcttaaatggttttgatagtagacatttcctttggagtacatttgtcatttcttgtactgcagtaaatgtgttttgagtcatgatgtctttaatagtaccaatttaggccgggcgcggtggctcacgcctgtaatcccagcactttgggaggccgaggcgggcggatcacgaggtcaggagatcgagaccatcctggctaacacggtgaaaccccgtctctactaaaaatacaaaaaaatta

SEQ ID NO: 9615 - DNA, 448 bp, Homo sapiens
ttaggaaaaaccaattcttcttaaatttagttcatctttctttaaaagaacattaaatgtaaccattttgtcagatccatgtattttggagcataaaatgtatgctgttgtgaccaataaatatattatatggtaattggaattaactccacaccatagtatgcattgttatacatactgtgtacctaattatgtatagcagtgtagtctcaattatatctgaaagtaattgtgactaacaagtatgctttgccttatttccacatttaaactacctgttaatataagggatttgtagtatcagcttgttgagcaatgactttgaatctagttttcagtgatcagaagcagcagttatttgagtgtatgaatggaatgatgatcactgtgctataatgtactgaaaccaccatattacagaaatatttactacatattttccatctgt

SEQ ID NO: 9616 - DNA, 502 bp, Homo sapiens
ttgagcacctgtgatgtgtcaggtctgcacgaggatctaggaatacagcaggaaacaaaagagccagcccctgccctaggagtttatgagcaagggggagagacagattcaaaaaatattcccataagcatataattacaagctgtgataaaacgtagaaggaaaaagtacagggaataactagagattatataataacaaggggacccaatatcccagtgagggtggggccgtgtgtgttcaagaaggctgaggcatgtttgagcatcgatgtggaggaagagttaactaggtggctcttcttctagcagaaggcattggttgcaaatgagtccaggaaaagggacgaaggcatcttccaggaacagaagagcagctgtgaatggggcttaaaggatgggggacaagtgtgagactaaccccggaaaggtagacaggggccagatccacagggctttgaggccaaggtgtgatggcaacagggatctactgaaaatcttga

SEQ ID NO: 9617 - DNA, 618 bp, Homo sapiens
gtggtttccctccagtcttgttcattattcaagtgactctccttggtctagcaacaggctaggaggtaactatgacattttgttcaggttaagcaggaagaagaaaacaaaatctacattctcttttttatattttaaacacaagccaacaaataatttggaaagacccatgattagacagggaggattttatgctccttcaagagtaattgagattgtttaattgtatggaggaatgagcatatctcaaggggaatcgagaaggtataatatttggatgacagaatcattaagaactggctttgcaccctggctacaccgttgcacataggaaatattagggtgcaggggtgcatgcctgtaatcccagcactttaggaggttgaggcaggtggatcacctgaggtcaggagttcaagaccagcctgacaaacgtggtgaaaccccatctctactaaatacaaaaaattagctgggtgtggtggcacatgcttctaatcccagctacttgggaggctgaggcaggagaatcacttgaacttgggaggtggaggttgcagtgagctgagatagtttcattacactccagcctgggcaacaacagtgaaattctgtcac

SEQ ID NO: 9618 - DNA, 545 bp, Homo sapiens
gactgctgtagtattatggtttacagtgtttaccattttgtttaacaatattctactctagaaactgaaacattttagatgttaataaaacatctaaaatcatactatgatttacttctccaaaatacaaattacatcacaagtaagcctccatgcaatgacatttttatctttatggagtgtcatcaatatcagttaaataaatcagtgcaattgttcctaaggagaagtttagcttccacttcaccactaaaagccaagtgcctatgatgcagatgaatgcattgtacaatatatttcaatcaagtcacagactcacttccccactatccatgaaatataacaaagggctaagaaacattaaaaaatgatgtatcaaacttcccacaaaccaaaagacaggaagctattgaataatctgacacttggattacatttttattatcattaaaatgtagcaaaggggccgggtgtggtggctcatgcctgtaatcctatcactttgggaggccaagacaggcagatcacttgaggtcaggagttcg

SEQ ID NO: 9619 - DNA, 593 bp, Homo sapiens
  misc_feature 485: n = A,T,C or G
ctgggactacaagctcataccaccacacctggctaatttttgtatttttagtaaagatggggtttcaccatgttggccaggctggtctcgatctcctgactcaggtgatctgcccgccttcgactcacaaagtgctgggattacaggtgtgagccaccacacctggccagcctgtgagagctttaaaccatgagatagacatatggttttgcaaaagtttctacataaatcagaatggttcccagaacagaaaggctcctctgtcactttttttatctggttgcttaaccataagatgccaacccaattaacagtcacacccatatttgcattatatctgtttcatatgttccgtgtaactgcctcctttcaaagtgttggtatatttttcaagtcaactggaaccaaaagtatagagaaactgaatgcaagccagctttctgcatatgtgacagtgtaagaatccaggttgtatagatgggttnttgtttgacacagatgtttctcccagtaaagagaggataaggagctggaactcgtggcacagttccctacaaaataattaattgatcatgtctactaattaaaatttc

SEQ ID NO: 9620 - DNA, 199 bp, Homo sapiens
ggaatcaagaaaatctctgaacacttatataactgctgataagactgtacattagttcagcccctgtgaaaagcagtttggaggtttctcaaagaaacaaaaatataactaatattcaacccagtaatcccattactgggtatatacccaaaagaaaataaattgttcggccgggcatggtggctcacgcctgtaatcc

SEQ ID NO: 9621 - DNA, 70 bp, Homo sapiens
gctgttgtaatcaaataggacactggttgtaaagctgctttgtaaactctaaatgtccattctcaatccc

SEQ ID NO: 9622 - DNA, 630 bp, Homo sapiens
ccatgggtcctttgtgtcttgcagaacttttttcggcaggtgttgtttacatatggttcagagcttaaagaacagctgtgttccaggccagggcagaaagcacaggcctgtctgggaggggcatcatcactcctgcctgcctgcccaaccgacctgtcggtggactgaatgggccaagtgttcagaagtccttgggaagaggatagtgtcctgaatcataatgtggtattttctggttttttgtttgtttgtttgtttttggtaaaatgttaattgcagaagtatacaggttattttatttatttatttatttttttttgaggtggagtcttgctgtgttgcccaggccggagtgcagtggcatgatctcggctcactgcaacctccacctcccaggttcaagcaattcccctgcctcagcctcttgagtagctgggagtacaggtgcatcccgccacgcctggctaatttttttttgtattttagtagagatggggtttcgccttgttgcccaggctggtcgcaaactcctgagctcaggccatctgtccacctcagcctcccaaaatgctagaattacaggcgtgagccactgcgcctggcccatacaaaaaaaaaaaaaaaaaaaaa

SEQ ID NO: 9623 - DNA, 632 bp, Homo sapiens
ggcacgagagaaggataggaaggaagcatgaaagagaatagggagaagtgaacagggatgcagagcgaatgccagtttcagccaactccaaggacagccctggagctggaatggcctttagagctgccccatggtgacagaggtggccaggcttctatacccctacgtggatcactcactgtgcttgggcaccttgggaaagggcatggctttgagcaaaaggctctctgcagctgaggcaacccctaaaagggctgacggctgaagtctgtctgctgaccactgtcccagcagctggggcttgttagtccttcctcaaagggggatccagatggcatgtcacagtgtctaccgtaaatgctcactgaatccagctgcaatgcaggaagactccctgatgtgatcatgtgtctcaccctttcaagctgaaagcaacagtacagacgatgagaccgacgatcccaggacgtatcagaaatatggttacattggaacacatgagtaccctcatttctctcatagacccagcacactccaggcagcatccaccccacaggcagaagaggactggacctgcaccatcctctgaatgccagtgcatcttgggggaaagggctccagtgttatctgga

SEQ ID NO: 9624 - DNA, 637 bp, Homo sapiens
ggcacgaggaaagttttgccttggaagtacaagaccatgtcttccagataccagccccagattaccttcagcattggggcccagctggagacaacgttgatcataatgaaaaggactgtgttttcaagaaccatactgaggatgaatccctagagggaattcagcccccagtgggggagcatggtttgaatacgcccttctctgtgaggagaagctgggattcattgaatgaggatgtggaaacagaagttctaagcatctgctttaatgagaagggtcctgttcatcccatgcctgtggttgactcaggaaacaggcaggaggatacccatggctccgatggagatggggatggggagattgtggacgaggatgcagcggtggcggaggcccttgcagctttagaagctgctactgcaggagaagatttggatgagactgattaggggaggggatttgcacagggaggtaagctggtgtcatgctgagcatgcagacgcatttgctccctggatgcatagcaggtgattctgccagcatgcaccagtgcagccttaccagttgtttacatccagcatctgttctgattgtcagcatctgtcccatgctgcttgtcacatatctggagtttcactct

SEQ ID NO: 9625 - DNA, 534 bp, Homo sapiens
ggcacgagcttagccatccattgtgtctcaaaactgttttggaggtgaataactgtgaggcaggatggagaaccttttgctctcccatccagaagggcacctaaccaggcccctggagcagacaaaaggagcaggaagtcaatcacttcgatcccagttctctgaagcccaagaagaaaacggattttccttcgttttggttcggaggcctagtagagaatttggattccaccaagttctcttttttcaaaaaaagtaaacggtccagagcagacaaaaactgtggaaacttgaggcctgggtagtagtggttttgtttgattttgaggctttaaagagataaggagacggtggtggagctccgccacgccgcgtggctctcacttccacgccgaggaagaccgaccggcccctaggtttatcctctgggagcccccggcccaatcagcccccttcaggccttgggagtcaccccgagtcttatcttctgtccccttccagcaagtacccgggcataaacgggcagggctgggc

SEQ ID NO: 9626 - DNA, 312 bp, Homo sapiens
ggcacgagggggcccccacgcaaactcaaattccctgagcctcaagaggtggtggaagagttgaagaagtacctgtcgtagggagatttgggtagaagccctcatgctgagctttgtgtccctggtgatgttggaacattaatgatggaacatggccaaacttcagtcatgatcctgaaaccatggcttcaggatcatgactgaagtcatggtttcttccctgccagaaatgaaggttcagttatgaggcaaccctctagtaaggcattgtaaaagttactggatttggtttaataaaagttgaaataaagt

SEQ ID NO: 9627 - DNA, 504 bp, Homo sapiens
ggcacgagcctgagacttagaatcagttcagctgcagaaaacccaccttttgagttcacaccattagtgaatagcaccatgctgaaacatttcacagcttccaactctgggaaataatggagagagtttaaaaatgtaaaacttcagttagtttggggctgaacttgcttacttgaaaaatctggtgctaggcacatatatctgcctctcctttgtaaataccactccaatattattctttactattcagatccaagcttcatgttctacttgttcttcatgttctttaaatcatttgaaagttgtcaactgagagaaacatttcagaggggggaggcttttggcactggtgataaacatccctccaagagaaccgtttggggttctcttctatttgtggttggtggtttttattcttttaaaaacagctttcattgttgtttactttttgtgtaatacaaacaaaatgtaggaatcatagtttattgatttcaaatggctgac

SEQ ID NO: 9628 - DNA, 339 bp, Homo sapiens
ggcacgaggagagagagaactagtctcgagagcagttctctctctccggcacgaggagagagagagaactagtctcgagagcagtttttttttttttttttttcccccccctttgaggggttaaaattccctttttttttttcctaagtgggactaccctttttaacccccttcgggaaaccaaaaaccggaaaccctttccgggaaactttttcaaaaagccacccggggtaccaagtcactggggggaaaaccgggttcaaagtttaaaaattcattaaaaaagggtttttgggacctggcaaatttttttttgcccccgtaaacccttttttgaca

SEQ ID NO: 9629 - DNA, 59 bp, Homo sapiens
ctgacctgcctgggtccaaaggtcagtgtgtagcatcagcctgtgcatctccagcctct

SEQ ID NO: 9630 - DNA, 354 bp, Homo sapiens
ggcacgagatgactgagtgtataccctagttaaaatgatcaggggagacttaactgaaaggggtaattgagctagatttgaaggatgaggagtagcagactagtcaaagaaagggagagaagaacatacctaaacatctgatcaccagtgactgagaaagttatcaggatcaagtggaaagagaaaggactagcagagttacaggttagagaaacaggtaaaggctactatggacggcataatagttgcatcccatgttttgtctcttaagaacagttgcaaactattgaaggttttaaagctgtgtgttgggccgggtgtggtggcttgtgcctgtaatcccagcactttggg

SEQ ID NO: 9631 - DNA, 235 bp, Homo sapiens
aaaaaacagttatgtgagcagtttcacttggaggttcacatggggtggcagcacacttaacatctaacacaccaggttcattgtgttcataacacttgtcatttactgtaacaacattttttcataggagagtaaatagcccttcagcatgctcattcatgaaacagaagaagctgtacaagtgaagacaagggctttttatgcaagttttgaaagataggtatttattttttct

SEQ ID NO: 9632 - DNA, 358 bp, Homo sapiens
  misc_feature 17, 358: n = A,T,C or G
cgttgctgtcgattcanaattgggatgggggttggggtgaagcacacttattatcttcagttgcagtgatttcaaatttaagattttttgttgttggtttgaactgtccccttagtttcttgttatttccaatttgttctgcttagtcattacttttaattcttttcttactaaaattttatggaggttgggggaagggagttagcatcactaacctgacagttgttgccaggaatttgctctgtttactgctagtatattagaaatcctagatctcagaatcacaatagtaataaacaacaggggtcattttttcctaacttactctgtgttcaagtgtggaatttctgtctcccan

SEQ ID NO: 9633 - DNA, 460 bp, Homo sapiens
tcaggtctcttggctttgccagggcccaccggagaaaactgacgacccgtttctgtaatccttatgggagaccaaccttgtgcctccgggagatccactctcccacctggaaacgcacgggaagccaagcctccaaaaaagcgctgcctcctcgctccgcgttgggattatccggaaggaactcccaacggaggtagtaccactctaccctccgcacctcctcctgcatcagccggcctgaagtcgcaccctcctcctccggagaagtagagaaataaatttctcccaccctaaaccagtctttgagtgattgcagtatgactccatttccctggtgcattcatataatagttcacctggtgaaaacaatgaagattatttacaatgctaccctgctttttctggtgtcctgaacctggaagttgtgctttttaagtcttatgatgtaatcagcacgatt

SEQ ID NO: 9634 - DNA, 603 bp, Homo sapiens
tatctcagagagtactgggattctgaaagtgaaaggtttatacccagtaaaagtatgggagtgctggaccaagctaacatgtacaagaagaaatatggtatatatttatggaaatagataatgaaaatgctgaattgaagagcaaagtttggacaatggagaatttttcagtttatcaatattggtgcactcttccatgaaggagtatttaactctgtgataagtaccctggaagaatgaagttatattacgactatgttggagcttgggcactagaagcatgctgaaagtgttttccactttaagtgaagtagaaatgctaagaggtggccgggcgcggtggctcacgcctgtaatctcagcactttgggaggccgaggcgggcggatcacgaggtcaggagatcgagaccatcccggctaaaacggtgaaaccccgtctctactacaaatacaaaaaattagccgggcgtagtggcgggcgcctgtagtcccagctacttgggaggctgaggcaggagaatggcgtgaacccgggaggcggagcttgcagtgagccgagatcccgccactgcactccagcctgggcgacagagcgagactc

SEQ ID NO: 9635 - DNA, 205 bp, Homo sapiens
accatgttaggcaggatggtctcgaactcctgaccttgtgatccacccacctcggcctcccaaatgctgggattacgggcgtgagccaccgcgcccggcccctgacttccatccttaacatgagaagctacaaacacacattgtaaaagtgcatgaatataacgataactgatgcatggtgaccatctttgccatctaccacatt

SEQ ID NO: 9636 - DNA, 393 bp, Homo sapiens
cgttgctggcggtaaaatatcattttatctcatactgttagtaggagcttcttaactactacccattcttaactttaagaagcatagaatttaaaatatagaacgaccgcttgtatggcctggatctgggcacttaaccttactaagtttatctcgtgtaaactgaccttgctaactcacgtgaggcttaaataatacaatgtggaagacttcagggcacatttttggttttttggtttttgtttgtttcttgagacggtgtctcactctgtcgcccaggctggagtccagatgcacaatctcggctcactgcagcctcctcatcctgggttcaagcagttctgccttagcctccggagcagctggaattaggtcgcccaccaccacgcccgg

SEQ ID NO: 9637 - DNA, 372 bp, Homo sapiens
aaaaacgggccgccgccgccaagaagtataatatgcgtgtggaagactacgaaccttacccggatgatggcatggggtatggcgactacccgaagctccctgaccgctcacagcatgagagagatccatggtatagctgggaccagccgggcctgaggttgaactggggtgaaccgatgcactggcacctagacatgtacaacaggaaccgtgtggatacatcccccacacctgtttcttggcatgtcatgtgtatgcagctcttcggtttcctggctttcatgatattcatgtgctgggtgggggacgtgtaccctgtctaccagcctgtgggaccaaagcagtatccttacaataatctgtacctggaac

SEQ ID NO: 9638 - DNA, 410 bp, Homo sapiens
  misc_feature 395: n = A,T,C or G
cgttgctgtcgaaaggacaaaaccctgactcccagtgagtctgaggccaaagctgaaaacagaacccaagaagcttaattcctgacctcagttccaatcaaacagcacgaattgtggtggacctccagctgtgctcagatggggggacacaatattggcagtaccctcttccttgccctccaggctgagtgccagtgtgggagcgtgctcatgagagccctgcacaagcgggttttgagcacatgctacgctctagccccgtggaagcctggactagttagaggcagagaacagctcaggacagacacctccctgcagagccaaacagagtgcagcgcctgcctcgctgggccatcctgagagctggggccttcccaggaaagagggagctcggngggcaccaccccatc

SEQ ID NO: 9639 - DNA, 130 bp, Homo sapiens
gaaacggtttcaccgtgttagccaggatggtcttgatctcctgacctcgtgatccgcccatctcggcctcccaaagtgctgggattacaggcatgaaccactgtgcctggcctgtttttcctctttttga

SEQ ID NO: 9640 - DNA, 518 bp, Homo sapiens
cttttgaaaaaagggtgccttactgtgccccagaccaggacaatcagtatttctggggaatggagcctggcacacacacatttcttaaagctcccttggcaattctgaggagtggattacatgttgtatgtagctcgtaacgaaagaaatcttgtctttgctctcagacccccatttcttactcatctcatgagctccttcgagatccagaaacagttgcatatttcattagtaaatcagttccagagtcacattttatttcacaagttagtccattaaaagtttcctgcagtgaggaaatagccagaaagaacactccacccctcctcctttttataactatagggtctggctcgacagaacaggagcatcgccatcttggacaagcccctcattctaaagttcaccttaataaaaaactgcctaaattcaaactgcatcagcctaatggctaaggtcagcatgaccataaaccacaaataacatctccaaccggaaacattcgaaactcctcctcg

SEQ ID NO: 9641 - DNA, 371 bp, Homo sapiens
cgaattccgttgctgtcggtgaatccaaattaagggatagtccacaaaataactgacaatattctttagaagtgtcaatgtcatgaaaaaacaaagactgaggattcgtcccagattgagagactaaggggccacgaggactaaacacaacatgggaccctggactaggaaagggtggtgagtgggacggtcagcaggggtgagtgggacggtcagcaggggtgagcgggacggtcagcaggggtgagtgggatggtcagcagggcgtgcatgaagggtttgctgggtgatcctgttgtatcagtggccattctctgatcattgtacaattgatcactatcctcaaagctaactttttttttttttaaaac

SEQ ID NO: 9642 - DNA, 362 bp, Homo sapiens
aatctaacgcatttattctttgacaccttttcatggccaattgagaagtggtacccagaaagacagtaatgcaacttagaaatgtatggaaaattgataatgttgagatcttaattgaggtgaaaataaccaaataacgtgtggagggacattaggaccattttgtagtattgacaaaagatacatgacacatagccttccatccaacaactctgctctaggattctagctcacagaaatacaccagggagcaaaggcataagagtaacattgtttattgaattataactgtagaatcatatgaaatgacataaaaagatatgtattgtaatgtggaaaaagtaaaatgcagaacaatatta

SEQ ID NO: 9643 - DNA, 425 bp, Homo sapiens
gttcactatgtaagtcaaaatatcgaagagggatatacaactgaaaagtaaaagttcagctttctttcctttctcctacttctataatgtgatcagactagataaaatatctctgcttttcaaaattactctctagctggctcttgaggaaaaaaaatgggggcaggaggagctggagccttcccttatttatacaagccgatgaagaggtcctagacttttggagagtcacagcaaagaaagacaaccagtcacctgatttaaacagacactattttcaggttactgaatctagatttctaggtccagtctctgaacagaaaaaaccttttagaaaaactctttgctctttacctgggcatggtggcttcatgcctgtaatctcagcactttgagaggctgaggtgggaggatcgcttgagtcc

SEQ ID NO: 9644 - DNA, 584 bp, Homo sapiens
acatattataatcaaactctacagatctaagacaaagacaggatcctaaaagcagcaagacaaaaaaagcaagtaacatatacggcagttccaatatgcctagcagcagatttctcaacagaaatcttacaggccagggaagagtggtatgatatagtcaaagtgctaaaggaaaaaaaagactgtcaatcaagaatactgtactcagcaaaactgtcattcagaaatgaacatgagataaagactttcctagtcacacaaaatctgagggagttcatcaccaccagacctgtcttacaagaaatgctaaagggtgttcttcaagctgaaaggacactaatgataaacacagaaacatctgaaagtataaaactccctggcaaaaatacgtacatagctaaatttaatttataatactctgatactgtaatggtagcatttaaatactgaatgagggtgtgtaaatcacgtatctttagtagggctaaaagataaaagtattaaaattaataactacagcaacttgttgatggatatgcaatataaaaatacttaaattgtgaaattgaaagcacaaaatattg

SEQ ID NO: 9645 - DNA, 319 bp, Homo sapiens
  misc_feature 319: n = A,T,C or G
ataaggtttcgtattaaattctctttcagacgaaatgaaaaccttcgccggacaacagattgagcctctctttcagttctcatggctcatagtgtttcttaccctgctactttgtggagggcttggtttattgtttgccttcacggtccacccaaatcttggaatagcagtgtcactgagcttcttggctctcttatatatattctttagtaagtctttgctttttatctttttcaaaaatggagaaaacgttaagattcatagataaagaaaaaacattttctttatctgtcttttaaaacctgtatgtgattttcan

SEQ ID NO: 9646 - DNA, 140 bp, Homo sapiens
ggctgactggaattaattaaactaacctttctttgccttactacgtgcttaccacagtgaaagtaccctccctagccaggcggggtgacttatgcttataatcccatcactttgactgactgaggcaggtgaatcacctg

SEQ ID NO: 9647 - DNA, 419 bp, Homo sapiens
acaaagcctgctaaataatgggagaacaataagtagtagctattttaatattcttattgaagtattattagatagaattttattagaatgcaatggatctcaattcaatcagaaacaccatctctactaaaaacacaaaatatcattatgtttaaaactttatctctgtagttaaatgtaacattatcaccaaacagaacctgaatttgttttctggaagctatttcatcactaaacgagtaatgtaaaatgttaattgcagcctgccccatgttttctgcccctattaccaagggcaatcacctacttcacttctttgaaaagccaaaaatctcaatatagtgaagatagctgtgggtaaactgagcttaacttttaatccacacttacttcttctggtatagaaagccattaaatag

SEQ ID NO: 9648 - DNA, 514 bp, Homo sapiens
taaggtagtgttatatgcaaacgcattaagacgggaaataacacaaaagaaaaaaatgagtcattctaggtggaatgtaccttacaaagaattgggtaagatataaacacggtttatctcattggacaatgacacatcatgggcaatgttaataatctgaggctttaataaaaatagaggataattggagagttttagacagaagagtaaaataatcactatgtttttttataagtacctaattgtcatgtaaagtatattcttggccgggcgcggtggctcacgcctgtaatctcggcactttgggagaccgaggcaggcggatcacgaggtcaggagatcaagaccatcctggctaacacggtgaaaccccgtctctactaaaaatacaaaaaattgacgcctgtaatcccagcactttgggaggccgaggcggggggatcacgaggtcaagagatggagaccatcctggccaacatggtgaaacccagtctgtattaaatatacaaaaatt

SEQ ID NO: 9649 - DNA, 174 bp, Homo sapiens
gtctttggctagcatcagaaataagagactaatactcgctggaaaatacattttaaacattaataggttaatttattagcttgtaagtagtgtaaaagaaaacccctcacctgacattgtacagaactgttgaaaggctagatgcagtagcctaaataaaacacctggcactga

SEQ ID NO: 9650 - DNA, 583 bp, Homo sapiens
gcatgcccctagggaggtgggtgtgatcagttttttaacaatttttaaagcttaaggattcattaggaaatttgaggcttgttataattggacagtaacatcaaaaaatcatctacagggagtagtttttttcttttttttttctgagatgaagtctcactctgttgccaggctggagtgcagtggtgcgatctcggctcactgcaacctccgcctcccgggttcatgccattctcctgcctcagcctcctgagtaggtgggactacaggtgcctaccaccacgcccagctattttttttttgtatttttagtaaagacagggttgcaccatgctggccaggctggtctcgatctcctgaccttgtgatctgcctgcctcggcctcccaaagtgctgggattacaggcgtgagccactgcgccacgcccagggagtagttttaaagttaattttaaattgctggtaagtaagaaacgcattctactctggctgaagagcttacagcccccccacttgcaagtacccctgaccacagcacccgtgccctcggagctcccctcacccacaaactcagctcctccc

SEQ ID NO: 9651 - DNA, 552 bp, Homo sapiens
ccctccctctcccagtagattagttcatcatatgctcatttcttcaaacctaggcattgaaataaccttctgttctctctccttttaatcctttcttcctggtatccattctgcagttttcaatggcacctcaaccaccaggaatgttaagaactgatctacagtacttcccttaacacagacctaattatgtcacttcctccaaccccaaagatgtagtctaatgggggagacaggcatatagatacataaaaatgtgtgtgtacatatatgagtacatattcacatgggcacatgtaaagtattaatactaagggaggataaatcagaagccaattcattttgcctgccataagccaaagaaagtttcacatagctgatgatagctaggtgaaataatgcctagaaaacaaatttaaaggccgggcgcggtggctcacgcctgtaatcccagcactttgggaggccgaggcgggtggatcatgaggtcaggagatcgagaccatcctggctaacaaggtgaaaccccgtctctactaaaaatacaaaaaa

SEQ ID NO: 9652 - DNA, 212 bp, Homo sapiens
gtttctttttcccttttttgagtttctgataaggagccaggttagctctccttacatgttggcaaagatggtccctggatgctcctatagaaagcattctataggcttagcaacattagcagcaagagagtttctgagagttcttatgcaaggaactctctgactctctgagcctggatcacatgcccacccttgagccaattactgtgccc

SEQ ID NO: 9653 - DNA, 351 bp, Homo sapiens
ggacttggatcaaactactgagcctagggaagtgaccactaccccattttaaggatcaggaaaaggaactgtatgtgggacacgatggctcatgcctgtaatctcagcactttgagaggccgaggacaggtggatcactagaggtcaggagtttgagaccagcccggccaacatggtgaaaccccgtctttactaaaaacataaaaattatctgggcatggtggtggctgcctgtaattccagctacttaggaggctgaggcatgagaaacacttgaacccagaatgtgggggttgcagtgagccgagatcgtgccactgcactccagcctgggcaacaaagagagagtct

SEQ ID NO: 9654 - DNA, 398 bp, Homo sapiens
tgcaacctccacctcctgggttcaagcaattctcttgcctcagcctccagagtagctgggattacaggcacataccaccacacctggctaatttttgtatttttagtagaggtgggctttcaccgttggccaggctggtctcaaactcctgacctcaagtgatccactggccttggcctcccaaagtgctgggattgccgacgtgagctgctgcacccagcctaacatttgagaattcttaaccagtccaattcttggggtatcttggaacttatggggaatttttacccatgatattaaagttattagaaatctgtgttcacaagtgttttttaaggtccttttcattctttcatgaatcttctaagagacaccatattctaaaattttgcatgctt

SEQ ID NO: 9655 - DNA, 590 bp, Homo sapiens
aaaccatactcctttacaaattatagaggtgctctgtgaaataggtgctactcagctttcacaatagcactgtcaccaccagctatgctaagcaccccacctttttttctttttttttctttcttttctttttttttttaagcagctgcatccttctagggatgagccgtttttgtttctaaattttctgtcctaaataataatccagtctgactggatataagaaatatggtaaataatagtacctagcatacagtaggggtcctataaatatttgttgaaagaaatttaaaaaagaatggctttcctttcttttctttttttgagacagggtctcactctgtcacccaggctcactgcagacctggggtcaagcaaccctcccacctaagtctcccaagtagctggcactacaggtgtgtgccaccatgacctggctaatttttaaaactttttgtagagatgaagtctcaccatgttgcccaggctgatcttgaactcctgggctcaagtgatcctcccacctcagcttcccaaagtgctgagattatagcatgagccactgcacccagcctgctttaactttttat

SEQ ID NO: 9656 - DNA, 415 bp, Homo sapiens
ggttacataattaaaggggagctctcatttatttatttatttatttattttaattttattttattttatttttgaaacggagtcttgctctgtcacccaggctaaagtgcagtggcgtcatcttggctcactgcaacctccccctcgcggggtcaagccattctcctgtctcagcctcccaagtagctgggactacgggtgtgcgccaccatgcctggctaatttttttggtgtttttttagtagaaacagggtttcaccatgttggccaggctggtctcgaacgcctgacctcaggtgatccgctcacctcggcctcccaaagtgctgggattacaagcgtgagctactgctcccagccctcatttattctttatgctttgttacaacttattttgaggaacatactgttggac

SEQ ID NO: 9657 - DNA, 386 bp, Homo sapiens
atgaaacagcctacaacttcagataaaatataattatcaggtagattaaaaataagcatgtttaaaatgagaagtcataaaagaagtataataataataacataacagaataagacgtcaaaaagattagactgagctacataggaaatcaaatataactcagaaatttaaaaattatcatttaaagcttactatgttaaaccaaagattatatattaccaaataaataactaatgaatggaaagaaagatctgaggaatcttcagaagcctgtgcagagagatgaagagacagaacatgcagaggaagggcttactgacaaggagtgtggactgtgaaggaccaaccatatctattagatgttcaagacatgataaatgaggact

SEQ ID NO: 9658 - DNA, 372 bp, Homo sapiens
taagctagaatttgaatgatgaatagaagctacctggttttagggaagggaaatttgtattccattataaggaattccttattcatttaccaatttatttattcatttattcatcacttttagatgtagagattcagcagtgaataaaaagacaaaaatacattcatttttggagcctactttctagctaagggaagatggacaattaagatagcaatgtactatgtgtactatattttaaaaaacaaggcaaagaatgttggagaattaaaattttaaacaatatgtgcaaaaatcttgagtttgaagtactaggggttgagaaaaggtcactgtcgctggcgcttggagacagaagaggagagtaggaga

SEQ ID NO: 9659 - DNA, 631 bp, Homo sapiens
tgtagattaacctgaaatctcagcattttgaaacttcaatgcctaataagattcaataatttcttcaggtggaataaactagttcccagagataaaactaacctattttgtattgttttcagaatacagtactactggccgggtgtgggggctcacacctgtaatcccagcgctttgggaggccaaggtgggtggatcacttgaggccaggagttccagaccagcctggccaacgtggtaaaaccccatctctactaaaaacacaaaaacaattagccaggtgtgatggtgcgcacctgtaatctcagttacttgggaggctgaggcaggagaatcacttgaacctgggaggcagaggttgcagtgagccgagatggcgccgctgcactccagcctggtccacagagcatgactgtcccaagaaaaaatacacacacacacacacacacacacacacacacacacacacacacatagtactattacaagactatttcatacttgatatgtgtttcatattaagcacattgggagggtagaacagatcactgtatacttttcccttctaaaaaacacacactgagatgagtcaggcataatgactcatgcctgtaagccctgtactttggca

SEQ ID NO: 9660 - DNA, 432 bp, Homo sapiens
attgcaagttcatcaaggtctgttcagttggttgcagcatgctcctaacaaaacttaagtcatagatttcattctatggggcaatcttatctgcaatacacaggataggcaaagacatactgcatttctaactccaatcaattaaacctaagtactggattcagtgtatcactgttgctacaaaattactcaagctctatgttctaacaataagatcagaggtatcataaggtatcacagtttctagagactctgagtttagaagaagaaacctactgaaggaggatttatcaatgaaatcatcttggataaaggcctaatgggatcaagaaaaaattgttaagtgaataaaaaattacagtagccacatgcattgaaaaagacaatgaataggttgggcacggtggctcatgcctataatcctagcatttt

SEQ ID NO: 9661 - DNA, 235 bp, Homo sapiens
aagtggagagggcagccctcagtagacactgaacctgctgtcaccttgatcttggactccctagcctccttaactatgagaaagaattctgttatttataaattacccagtcttgggtattttgttatagcagcacaaatgaactaagacagccctagctacaaatcacactatttgcataggctatatggtgtgacccaagaccccatcatagatcacactgttagcataaact

SEQ ID NO: 9662 - DNA, 545 bp, Homo sapiens
tcctgcctcagcctcccgagtagctgaggtgcccgccaccacacctggctaatttttgtatttttagtagagacgaggtctcaccatgttagccagggtagtctcaaacttctgacttcaaatgctctgcccgcctcagcctcccaaagtgctgggattacaggtgtgagccaccatgctccgcctgccctgttgtttatttacaaccgctgcctgttttctccagaactctagcccccaccccatttgctataagactctgggagagagaggaaggggaacagaccagagggcaagaagccctctgtggttgggggtggagacaggggcactggatacaggttcagacaggtggtcacttgaaaccagtcattcacggtcaccaaattgtcacagacgtcaaacgcatgtggccactcagtatgtgtgacccagccttggccccagagtctggacatgtcagccaaattcagtgtgcagtatgagtcccagatgtggctatacaaggtcatggacatgcatacatgcacatccagcttccacac

SEQ ID NO: 9663 - DNA, 97 bp, Homo sapiens
gctggagttgtcctgatggccagtagaggtggctgttgatagaattgaaagcttagggccaggcatggtggctcacacctgcagtcccagcaccttg

SEQ ID NO: 9664 - DNA, 214 bp, Homo sapiens
gaacatcacttggctgcagtgagctatgattgtgccatgcactccagcctgggtgacagagcaagaccctgtctctaataagaaagaacaaagaatttcataagtaatacttattcattcactattattaaattctagcattttcttctatctgcttcagaatttcgtttattaaaaaataaaatataggctggtctcggtggctcatcccaac

SEQ ID NO: 9665 - DNA, 440 bp, Homo sapiens
agaagtgtaactgacagataaagtgctttaggtatgaatagacagggagaagccagatggaaaagcagagttataaatacatatgaaacttacaactccacaagataaacatattctttcttaacatctaaggatattttcaaaatatataatcattggtcaggcacggtggctcatgcctataatcctagcactttgggaggctgaggtgggcagatcacttgaggtcaggagttcaagaccagcctggccaaaatggtgaaagcccatctctactaaaaataaaaaaattagctgagcttaatggcgtgtgtctgtaatcccagctactcaggaggctgaggcaggagaattgcttgaacctgggaggcggaggttgcagtgagctgagatcccgccattgcactccagcctgggggacaagagcgaaactccgtctc

SEQ ID NO: 9666 - DNA, 313 bp, Homo sapiens
ttttattctgttctgttgtaattatttgtttctctggacctaagtgaatctcttgaagaaggtatatcactgactagaagctaatatgaaagggaaaattagaaaattcaaaaacatgaggatattaaataacatattcctggaagactgatgggtcaaagaaaaaaaatcaaaaaattggccggacacagtggctcacgcctgtaatcccagcactttgggaggccgaggcgggcggatcttgaggtcaggagattgagaccatactggctaacatggtgaaaccccgtcactactaaaaatataaaaaatt

SEQ ID NO: 9667 - DNA, 470 bp, Homo sapiens
  misc_feature 254: n = A,T,C or G
cctgaatgcatttctactacctgttgactaacaagtccttaaccagcaaaagaatcttattcactgtgtatctccctattctgagctacaattctaaaactgtcccgaatagatgtctttattttcctctggtcaatttcatatttgaacttaaggctaaatgtctatacgtgtgtgagtgtgtgtctgttggtatgcaacaatgaaatgtgtatgactatttaccaatatcgaggtcctattccaggtatcanggatgatcagactttactctttaagttagctttcgctgcaagacttgctctggccaataaaactgagcaaaaatgatgtgtgtctcatttttgctatagtgttgaagaatccatgtgtgggcctccatggttttccccactgttactgaattctatgacattctaaatggaagaggcttcatcagcttgggtctcagagtagaaatgacatgaatc

SEQ ID NO: 9668 - DNA, 446 bp, Homo sapiens
agttagcaaataatggggagaaattatgaatatatagtagacacaaaaatattgataatatacagcacacattttttataaaattaccaagatacaattggactaaatgaatttctgaatattatgaaacataattatctaagatcaatatcaaacatcatattgcttctcgagtataaagacatttttaataaggccagaacaagacagtggtatctgttccaacattattaaatattctacctagtgtagagaaataaatataagcagaaccatacatgtatgatcatttaatatatgataatggtggctcaaccaacttgggaaatacgagtttttcaataaaggaatttatacaattgtttatttgtaaatatatgtcaatgtgtgttttgtgtgtgtatatagttaaacctcttcctaatttcaaacatgaatatgaattc

SEQ ID NO: 9669 - DNA, 510 bp, Homo sapiens
agatcacttgaggtcaggagtcacagaccagcctggccaacatggcaaaaccctgtctctactaaaaatacaaaaattagctgggcgtgatggtgggcgcctgtaatcccagctacttgggaggctgaggcaggagaatcgcttgaaccaggaggcggaggtttcagtgagccaagattgtgccactgcactccagccttggtgacaagagtgagactctgtctcaaaaacaaaaacaaaaaaacgctgaagagcatcaagagcgagggaagagcctgacctgggggctgagtagcaccaagtcaacgctgttggccgacagcccttgccccgctagcaggtttggcctcaagcttcccagcctacccagagtgaggaatccaggagacccccacagggccacatcttagaagtcagggccagaagcaagcctgtcccaaccaacttgccccgaagactgcaggggaaatggctgaacagaatgagaaaaaagcagaatggagcccgacg

SEQ ID NO: 9670 - DNA, 137 bp, Homo sapiens
atggcacatgcagcgcaagtaggtctacaagacgctacttcccctatcatagaagagcttatcacctttcatgatcacgccctcataatcattgtccttatctgcttcctagtcctgtatgcccttttcctaacact

SEQ ID NO: 9671 - DNA, 482 bp, Homo sapiens
cccaaagtgctgggattacaggcgtgagccactgcgcccgaccggttcacattattaaaataaacttaaatgttatatagatgttattaatgaaagcccaatttaaaataagaagcatgagccaggcagagtagcttacacctgtaatcccagctacttgggaggctgagatgggaggaatgtttgatgccagaaatttgagatcagcttgggcaacatggtgagatcctgtctctcaaaaaatgatataaaataagaagtatgagttgaatatataccattagtatgggaatgctaagggaaggttctgactacttactacactatagcgtaaactattacagtcagactaacaggagcaggaattctgactagttttggttagttgatttttaaaaatttatttatagcaaagaatgaaaaatttatttagatactataaacacttactttttaaaaaaatatataaataggcattaatt

SEQ ID NO: 9672 - DNA, 70 bp, Homo sapiens
gctctctaaataacaaagcccacttaattctagtatttggcctccacagccttatatggagatatgaaag

SEQ ID NO: 9673 - DNA, 318 bp, Homo sapiens
tctcctgcctcagcctaccgagtagctgggactacaggcacccaccaccctgcccagctaatttttgtatttttagtagagacaggatttcaccatgttggccaggctggtctcgagctcctgacctcaagtgatccgcctgccttggcctcccagagttctgggattacaggcatgagccatcacacccggcctgggactcttcttgcagtgagccagggccatgggacccttcaaaagttgctccaccctaatccccaaaatatctttttctcccgcctgtcccaagtacctggcatcatactatatgggtcaact

SEQ ID NO: 9674 - DNA, 80 bp, Homo sapiens
gtgtgtgtgtgtgtgtgtgattgaaagtaaagtaaaacctgacactctggccaggcgcagtggctcacacctgtaatccc

SEQ ID NO: 9675 - DNA, 494 bp, Homo sapiens
atagaaattacagactacactagagatatttcataccttcaggttatttgtaaagaaatggcaaatattacctttatcatttttgacatttatgttaaatgagataataatcactgctatttgaaacctgtcatataggatttgagtctgtctgctggtcaggaatatttgcctcaccccaggatttaaagtacttctagaaagaagccaaaggccgggcgtggtggcttactccttgtaatcccagcactttgggaggccgaggtgggtgaatcacctgaggtcaggagttcgagaccaatctgatcaacatggagaaaccccatctctactaaaaatacaaaattaaccgggtgtggtggcgcatgcctgtaatcccagctacttaggaggctgaggcaggagaaccacttgaacccgggaggcgtaggttatgatgagctgagatcgcgccattgcactccagcctgggcaacaagagtaaaactccgtct

SEQ ID NO: 9676 - DNA, 386 bp, Homo sapiens
tgcagggtctggtagcccacatcaagcaattttatcctaaaatgcatggggaaatattaaagggttttaagcaggagaagagcatggtcatatgctgaaaagatttttgtatcagaatagaggagttgtcagctgtcagtgtgtcagggcggaaaatagtaataagttggtgcgaaagtgattgccgtttttgccatacatactattaatggcaaaaactgcagttacttttactcactatattactttgactagggtgatggcattggaaatggagagagataaatggatttggaatacgtttaggaggtatagttaatagagttagggaaaggattgggtacgacagctgaaagaaagtacaaggggtgggtgaaaagtgactc

SEQ ID NO: 9677 - DNA, 500 bp, Homo sapiens
caaatacattacatgaaagaggtggggctatgaaaaattatctattattagctagacgtgaatttgtttctaaaatgagacccatggactctggagctgggagaaagaaccagacaactggtaagcatgggtcctgccaggtggggcagacttgtggaagtccctgttcattgggaggaagcattaggagagctctgagagatgaagagggagtgacaaaaggaaggagagcaaaaaaagagaggcagaagaaacaccaaaaccaaatgtttcctctttaaaaatgtttgcttcggtcaggcactgtgacttatgcctgtaatccccgcactttggaaggctgaggagagaggatcacttgaggccaggagtttgagaccagcccgggcaacatagcgagacccctgtctataaaaaaacttagaaaaattatccaggccgggtgcggtggctcacacctgtaatcccagcactttgggaggccgagactggcagatcac

SEQ ID NO: 9678 - DNA, 72 bp, Homo sapiens
gcattgttcctcctgggtgtaagggttaagtcagccctgcttgaaagaaatacatcaaaatgtgtattcttt

SEQ ID NO: 9679 - DNA, 635 bp, Homo sapiens
accactgatccaagcaactggttctcccttctccactgggctacagctctgagcttctgcacaaagagtggagtctccatctttaaatattctgcttatttttcaatttgtcattatactaagaggtcatgtgtgtggattacttactttgtgctgggcagtatgctaaattctttatacatggtaactctttatgcttgtaacttcgtgaggtatcacagtcctcatttttacagatgaaacttcagcccagaaaggtaatttgcccgaacagcaaattctgaaactggaattggtggctctggtgcccaagcttgcatatttagaccaggcatcagtaatagcctcagttttgtttattgctttgttaagccttagttttgaagcacttgttaagtgcgaggctccatgtagagtgtataaacactcaatctctgtgtgacgacagctccaaggagcagtccagcaagttctgtctggccaaatctagacctggttttgattaactttgttcatgatctctagatcactctgctctatgcttgaacctgtatgcttgagtcaagcttacctctctgatgggtgaagaaaatgatatttcactgttatattaattttatttttcttaccacaaa

SEQ ID NO: 9680 - DNA, 400 bp, Homo sapiens
attgcaaactgatcctatctaatatagaacctttgattcaccatccgtgtcccagaaataaatctatttctcctacagtcttccatatctcagtaaatggcaccaacatccaaccagttgttagaataaaatctagatgtcacccttatttcctctcttagcctcattcttcatcgaatccgtcatcaactcctatcaattatacctctaaaatatatctcatgtttttctcttcatcgctattgctaccaccctatccaagtcactattatctctcaacagtactacttcaacatctatctaattccctatttccaagccactcctccccaccccaatagtcagagtgatcttttaagaatattatcggccgggcatggtggctcacacctttaatccc

SEQ ID NO: 9681 - DNA, 401 bp, Homo sapiens
tagcagtgaaatttattatcatttgtattaagaagagatgactattagatgccatgccataaccaactcttctccattagattaggaggaccaggcctgatactgaatattggaactgttggcaagaaaatgaaagttcgtgactgcttgagttatttttaaaactctagttgcatggctgttatgtctcaaatactatataattatccctagttactggtatctttagcatatttgaaaccatccatatgtgacctaaagccacacagctatattaagacatttttgaacaatcaaagcaaatgacactttaaattaaaacaaaactaatatgaagcaactactttaaaaaaaaaaattgggaccaggcacggtggctcatgcctggggggccgaggcag

SEQ ID NO: 9682 - DNA, 578 bp, Homo sapiens
tatcagtgacctaacaataactctataataatagcttacagtctacaaaacatacacacacaagaagtagtgcaacacagagggtaagagtggagctttgaggtcagctgggttggctgcggactgtggccccaccactgtctagttgtttggctttgggcaagctagctaacttctctccacattagtttctatccagccttataaggttgttatgaatattaagtgagatgatataaacaaagagctcagcacagtgcctgggatatagtagatgtgcaacaaatgtcagctattggtatttttgaaatcatctactcatagcaatctagtatctagctgcaagactgtgcagacactgcacagggacagagtagcagcagacaattgaaagttgactgtgaggccgggcacagtggctcaagccggtaatcccagcactttgggagcctgaggctgacggatcacctgaggtcgggagtttgatactagcctgaccaacatggagaaaccccatctctactaaaaatacacaattagccaggcatggtggtgcatgcctgtaatcccagctactc

SEQ ID NO: 9683 - DNA, 538 bp, Homo sapiens
  misc_feature 333, 367: n = A,T,C or G
taatcagcagataaaagctcagatggtcagaaacatatagaactataatgccatctccaaagtattgcatgcatacaaatgacgttcaatccgttgaatataatggagacacactatttcaaaaattaagttcttctttcttgagctttaaaagtatacacatttacccaaatgaattaaaaacatgcacacaaatatttatatcaaaagtgtacatgatttccaaaacttggaagtaaccaagatttacttccatgggttagtgcataaattaactgtgatacatatatactatggaatattattcagcaacagaaataaatgagctatcanaccacagaaagacatggaggaaacttaaatccangtggctaagtgaaagaagccaatatgaaaaggctacattctatatgatttcaaatatatgacattcaggaaaaggcaaggctgcagagacagtaaaaagatcagctaggtgcagtggctcacgccactttgggaggctgaggcaggtggattatctgaggtcaggagttca

SEQ ID NO: 9684 - DNA, 575 bp, Homo sapiens
gcggtggctcacacctgtaatcccagcactttgggaggccagagcaggcagatcagtaggtcaggagtttgagaccagcctgaccaacatggtccaactccatctctactaaaaatacaaaaattagctgggtgtggtagcacacacctgtagtcccagctactcaggaggctgaggcaggagaatagcttgaacttgggaggcagaggtcgcagtgagccgagatggggccaccgcactccagcctgggcgacagagtgagactccatctcaaagaaaaaaaacaaaacttatgttttgaaagtcatgatataactaagtgagaaaggatgggatactaaactacacaaaattataacttagtaaataaaacaaaatcaaaataaaaatgaaaatacgcatcttaaatatattactattacaaacaaaaaaggtttaaacatattgactttattaaaaacagagtttttactatacttctagaatacaacttatgaaaataatgaaaggtattacaatgtttaaagatacaagttttaggccaggcgccatgccccacacctataatccctgca

SEQ ID NO: 9685 - DNA, 347 bp, Homo sapiens
aggtatagaaaatgaacaaagtatatccctgatttttgcttacatcttttctgagtaagacattttgtgcttacatactatggattagttaatcattggtcagttaaatacaaaacatcatttcgatctggtagcttagcaacacttaaaaaaaaatcagctaatgcttagcaaaggtttccactcaagatattagattatgaaaaacttcctgcttaacaatagtaattccttgcagagtttatttgacttcattcaaaaccattcaccaatactagagttaggtgccggggtttcatatttccttttagcacttttagtgtttggttttatcagaatcccaaatc

SEQ ID NO: 9686 - DNA, 538 bp, Homo sapiens
  misc_feature 234: n = A,T,C or G
gcctcccgagtagctgggattacaggtacctgccaccacactcggttaattttttgtatttttagtagagatggggtttcatacattggccaggcttggtcttgaactcctgacctcatgtgatctgcctgtctcagcctcccaaagtgctgggattacaggcgtgagccactgcgcctggcccaattcataacatttaggtatgggatggagtgtgatatgggtgtaatgtangcatgggggatggggagggaatgagaataacattaagagttttccatatttataacagatcctaaaaattaaaatgcaaagcaatttagaatacattgataagtaaaaagaagaaaataaaattacctaataatgactgagaacaattttatgtctaaccaaatattttttatttgtatttatacttattattttcaaactgaattaaaaatctcatcaatgtacgacaaattcatttccacacacatatatatacatttagattattttatacacacacacacacgcacacacacaaaaaata

SEQ ID NO: 9687 - DNA, 61 bp, Homo sapiens
aaactgagttctagccgggcgcagtggctcacgcctgtattcccagcactttgggaggccg

SEQ ID NO: 9688 - DNA, 534 bp, Homo sapiens
tgagccactgcgcccagctgactctctgtctcttaatattcgtttattccattttccaaattaataggaattggcctgcacgtatgactgcctaggataaaaaatacacttccagccgagcatggcggctcacacctgtaatcccagcacttggagaggccgaggcaggcagatcacgaggtcaggaatttgaggccagcctggcaaacatggtgaaaccccatctctgctaaagatacaaaaaattagccaggcgtggtggcgcgcacctgtaatcccaggttcttgggaggctgagccaggagaatcgcttgaacccgggaggcagaggttgccgtgagccaagagcgtgccattgcactccagcctgggcaacagggcaagactttgtctcaaaaaaataaataaaagactgggcgcggtggcacacgcctgtaatcccagcactttgggaggccaaggtgggtggatcacgaggtcaggagatcgagaccatcctggccaatatggtgaaactctgtctactaaaaatac

SEQ ID NO: 9689 - DNA, 594 bp, Homo sapiens
cgccttgtataccattagaggtttttaaacagaggagtaacaagataggacctgcattttagaaaggcaattccccaaaactaggactgtgtggacaacaggcccactggatcttcccatctcaaagtgaagctgagggttcagcttctaaaatagccagctcttagtcatcgcattcagctccacagttgatccagccaactgagctgcagagctgctctagctggctgcctatgagaagtggaaggaaagagaattggagcaactatcaggttaataaactctgtggagagagccaaaccaaatttccaaggccccacgattagtttgtctaaatgaagcacaacaacataatgctgataggcctgacttcctttagtgttaatggaccttacagatcttctctaacttctgggctgtggccttgtctgtcttgtttaccacaatatctctagtaccagcagagggcctgccaatggtacatgttgataaatctatgatatgaatgactagtcacttgttctggagctctgggtaccccaagcttggctgaatgctcccacaattgagtctttcattattaattaaagaagt

SEQ ID NO: 9690 - DNA, 483 bp, Homo sapiens
cttcagcagatctctggagctgtatgtgcagctctgttatctggcattctgtctcacaaattctagtttccctgcgcccaccaaagaggcagtcatgttgtttacctcatttgtttttcctctctcagggtcacggttctgcaccaagtgttgtccaatacctgagaagttttccccctcatgtgttttgtccagttttcttattgtttatgattggaggacatttctcatgcagttacttttttatgaatgaaagcagaggtcaggtggcacaattgaacactgcacagaaagaagagaagagggaggctggagaaaaacattctatgaagtttaaaacatgattaccggccaggtgtggtggcttatgcctgtaatctcagcactttgggagggtgaggtgggcagatcacctgaggtcaggaattcgagaccagccttgccaacatggcgaaaccccgtctctactgaaaatacaaaaat

SEQ ID NO: 9691 - DNA, 64 bp, Homo sapiens
gggctctgcccaaagatgcccacagacttaagacccctgggctttaaaaattcatgtgaattgg

SEQ ID NO: 9692 - DNA, 400 bp, Homo sapiens
tcgaattcggcacgaggctgcacgtggatgcgcacacggacacgaccgacaaggccctaggagagaagctctaccacggggcgcccttccgccggtgtgtggatgagggtctcctggactgtaagcgtgtggtgcagattggcatccggggctcttccacgaccttggatccctacagatacaaccggagccagggcttccgggtagtcctggctgaagactgctggatgaagtcgctggttcctctgatgggggaagtcaggcagcagatgggagcaaacccatttatatcagctttgatattgacgctctggatccctgctatgcgccagggacagggacaccctgaaattgctgtctcacttctaggcaggctctggagatcatcaagggcttgcaa

SEQ ID NO: 9693 - DNA, 432 bp, Homo sapiens
gtcgagtaaatttcttggtaaatgcagctggtattaacagggatggtcttttagtaagaacaaaaactgaagatatggtatctcagcttcatactaacctcttgggttccatgctgacctgtaaagctgccatgaggactatgattcaacaacagggagggtctattgttaatgtaggaagcattgttggcttaaaaggcaactctggccagtccgtttacagtgccagtaaaggaggattagttggattttcacgtgctcttgctaaagaggtagcaagaaagaaaattagagtgaatgtagttgcaccagtgacaatacttgtatggagtttattttgcacatttgcaagtatatgagtgtaatcttgggactggaactgcaaaggcttcagaggatttgtacacacagatatgacgaaagacttgaaag

SEQ ID NO: 9694 - DNA, 391 bp, Homo sapiens
ggcacgagggaaggctcacagggctgaatcttgaagaatgggggttctcagggttacagagaaggggaggacattctggacagaaatggaatgtgtgaagatattgtgtacttggagattgcagatgtcgtgtggggctaaacattcttgttcagctgcaagaacatctgaaacctgggaaggctgtgggaaacataaagaactagatgtataatattttcagtttttttttaaattagtaactattaatagagtagcacaaattaattgggtgcttgttctggaccagatactgtgctactactgtgctaggtcctttgtttttttaaacatggggtctcactgctgttgccgaggctgaagtgcagtggcacaatcacaactcaccaca

SEQ ID NO: 9695 - DNA, 585 bp, Homo sapiens
ggcacgagcagacgggcatttgtaccagggtctcacaccatgtgcatgtctagtgaaaaagtcatgaaacgattctcttttaaaaagagggagcccacggcacggacgcttcctccgtctctgaccccatgagccgacctctgactgagggaggccactggcacccagcgggcctgcgtctccttcgcgagctgaattcactcgtctcttagatgttttttctggtgcttcagttcacactaacgttttagaaacactatttgaaaaagccctttgtgcagtcagaagggtgtgtacgcagccccgtgaaagccctggagcactgggaccttttccttgtgctccggagctgttggcagaggtgagtggggcgggcagctgcccggggcacagtccgctcttgtcttctttccttagcgcttgcttcaggaatgggttaaggcctcctttcctcactgctggtagagctcagctgatgagtgcctgctgttccccaggtccccgtgggcacgctggtgaaggagggaggcagagttgtggccgacctgtcttgcgtgggagatgagtacattgccgcgctgggcg

SEQ ID NO: 9696 - DNA, 579 bp, Homo sapiens
ggcacgagagagacattaaaggagtcatttgacggctccgttcgggcaaggatagttactgaccgggaaactgggtcctccaaagggtttggttttgtagacttcaacagtgaggaggatgccaaagctgccaaggaggccatggaagacggtgaaattgatggaaataaagttaccttggactgggccaaacctaagggtgaaggtggcttcgggggtcgtggtggaggcagaggcggctttggaggacgaggtggtggtagaggaggccgaggaggatttggtggcagaggccggggaggctttggagggcgaggaggcttccgaggaggcagaggaggaggaggtgaccacaagccacaaggaaagaagacgaagtttgaatagcttctgtccctctgctttcccttttccatttgaaagaaaggactctggggtttttactgttacctgatcaatgacagagccttctgaggacattccaagacagtatacagtcctgtggtctccttggaaatccgtctagttaacatttcaagggcaataccgtgttggttttgactggatattcatataaac

SEQ ID NO: 9697 - DNA, 671 bp, Homo sapiens
ggcacgagggctcacgcgggaggggagtaaagggtggcggtccgggcctggagttcagtgggtgcagcctgcttgcgagctgaggccagacaggggggcgcctacggacggaaaagaaaagttgattacaaacgggaccatattttgcttcgaaatggaaccagcagttagcgagccaatgagagaccaagtcgcacggactcatttgacagaggacactcccaaagtgaatgctgacatagaaaaggttaaccagaatcaggccaagagatgcacagtgatcgggggctctggattcctggggcagcacatggtggagcagttgctggcaagaggatatgctgtcaatgtatttgatatccagcaagggtttgataatccccaggtgcggttctttctgggtgacctctgcagccgacaggatctgtacccagctctgaaaggtgtaaacacagttttccactgtgcgtcacccccaccatccagtaacaacaaggagctcttttatagagtgaattacattggcaccaagaatgtcattgaaacttgcaaagaggctggggttcagaaactcattttaaccagcagtgccagtgtcatctttgagggcgtcgatatcaagaatggaactgaagaccttccctatgccatgaaacccattgactactaca

SEQ ID NO: 9698 - DNA, 331 bp, Homo sapiens
ggcacgaggagagagagagaactagtctcgagagcagttttttttttttttttttccgggagggaaaaaaaacttttttggaaccaaaaccaacccttttttttaagttcccccaccccaccccaaacctctttttttccaaaaaggaccccagggcccaaaaaaggtggccttattttaaaaaaaaaggccatttttttcttgggggggctaaccaaaagccttttaaaccaaaaccagggcaacctggtcctttaaaaggagccggctatatttaaccaccaaggggaagcctagggccctcccaaagttttttaaaggccccccggaa

SEQ ID NO: 9699 - DNA, 268 bp, Homo sapiens
ggcacgaggaagagaactagtctcgagagcagttttttttttttgtgactttggcatctgaatattggggcttcttgttaaaccggtaaagtttaaaaacctaaggagtatgcattgcactttagggctaacttttttcttcattaactttatgggtaaataggcaccatattttttttgaaaaacattaacccaaattgctaatagctccatgttacggcttttttccacacgttccaaattgatttagggaaaagcaaaaatggaa

SEQ ID NO: 9700 - DNA, 616 bp, Homo sapiens
gtggagtgtctggggtcccgcctcaacgacatcagtctgggagaacctgacctcctggccccaggggtgcagtgtgaacagacagatcgcttcaatgtcttcctgctgccctgccccaacctggacgtgtatggcgagtgcaagctgcagatcacccacgagaacatctacctctgggacatccacaacccccgtgtgaagctcgtctcgtggcccctctgctcactgcgccgctatggccgggatgccacacgctttaccttcgaggctggccggatgtgtgatgctggggaaggactctataccttccagacacaagagggggagcagatttaccagcgcgtccacagtgccaccctggccatcgcagagcagcacaagcgggtcctgctggaaatggagaagaacgtgaggctgctgaacaagggcacggaacattactcgtatccctgcacacccacgaccatgctgccgcgcagtgcctactggcaccacatcactggttcccagaacatcgccgaagcctccagctatgctggtgaggggtatggggcagcccaggccagctcggaaacagacctcctcaacagattcatcctgctaaagccaaagccca

SEQ ID NO: 9701 - DNA, 394 bp, Homo sapiens
ggcacgaggtctgggctaattagtccatttgggcttaggaaaacagtggcacctatttctgagatggtcttttactaacactgtgcattgcctgcatcttcctgtgcatggctttgtttgctcctatctgcaggttggtgagccccacagggcaggctgtactatgcactgtcatagcccaggaaagccactttcagaccaggtggcttgctccagaacccaaggctagtaaggggcaaagctgggtctagaacttcaactttctctttttctactccacgatatgactgacatttaggtttgcacacagcagcgttacatctatgggttctaatttaataatgataaataatttttttttctttttttttgagatggagtctcgctctgtcgc

SEQ ID NO: 9702 - DNA, 602 bp, Homo sapiens
ggcacgaggttttctcgtgtggtattcaagacttcttttcttctcctggacttcaggctgtttttgtacaagagcgcatactcatttctttctctctttttcaaatgtgactaaatcacacttcccagggacaccaagctgtttctgattgcaactgtaacagcctgtgtaccagctgggatttttgtattaagcagctctatggggctactataccagcagaaaattagaagtcttgctctaaaaagcattttcagcaaatacttgttttgttcttaaagtttttactgcctcaatttgtcagctaatggatcagaagtgattgggactgcctggagcttttttcagttatggtcttagatgtgagtcagagaatattatctattgagtttcacccacttctctgcccctgtgcttttacagactgtccttatttttctaggctgatgtggtcatcaagttccctgaggaagaagctccctcgactgtcttgtcccagaaccttttcactccaaaacaggaaattcagctatgctgggactcatgtatgtctactggactcagctcaacatgttccagaccttgaagtacctggccatctt

SEQ ID NO: 9703 - DNA, 679 bp, Homo sapiens
  misc_feature 531: n = A,T,C or G
gcctctcagacccggcccacgttgagagcctgcaggagaaggcgcaggtggccctcaccgagtatgtgcgggcgcagtacccgtcccagccccagcgcttcgggcgcctgctgctgcggctccccgccctgcgcgcggtccctgcctccctcatctcccagctgttcttcatgcgcctggtggggaagacgcccattgagacactgatcagagacatgctgctgtcggggagtaccttcaactggccctacggctcgggccagtgaccatgacggggccacgtgtgctgtggccaggcctgcagacagacctcaagggacagggaatgctgaggcctcgaggggcctcccggggcccaggactctggcttctctcctcagacttctattttttaaagactgtgaaatgtttgtcttttctggtttttaaatgatcatgaaaccaaaaagagactgatcattcaggcctcagcctcatcctccccaggacccctgtccaggattgagggtccaattctaagacacgccttgntcttcacaaccctaacttgacctgggggatgggggggttgctttcctgcattgatgacaaaggcctggcgcggcaaaagggtggtccagggccggggtactccggggccggcggatctttgaacgtacctatgtagaccttctgtgcg

SEQ ID NO: 9704 - DNA, 540 bp, Homo sapiens
ggcacgaggccgcttgtgctgcagccatggtaaggctggaatccgtgccgtgatccagcggcatcgcagctcgggcaaggaaagccggctgtcagggttctggaaacgtcctgccctgagggcctgcgactttctgtatggagccttggatcgcgtccctggaaagggacaccaaagatttccaattccggagagcgggcccgaggaagggtcactgctcgggcgcacgaaagctgtctaaggcttgggcgtatatggggaactctggcttttgccacgcacttttgggaatgggcaggagacctgcttcctctctccagaggttgcattttcccaagcttgaacgcttcatgtgcctactctgcaggactgaggagtttgctctgtggtgtgaaaacctaaggaatggggggcgggtgtcttgccacttgtgtgacaggcttaacctttttgtatgaagttcgtttgccttatcggccttactgtttgatagtttactgtgtctgatttcttcccccgtactttttcaactagtctcta

SEQ ID NO: 9705 - DNA, 611 bp, Homo sapiens
ggcacgagtaatgacccaattacaagttctaaatgcctgtaagattggaggttattggaggattcttgaatttgattatgagatgaaacttctgaatcatgtaactcagcttgtggattctgaatcatggtcttttggtaaagttcctttgaacacatgccttcaggaactcggaccattggagccagaggaaatgatagaacactgtcttaaatgttatgggaagaaatatgtagatgaaggcgaagtttattttgagttggatgctgataaaatatgtagagcagcagcacgaatgctacttcagaatgcggtgaaattcaatctcgctgagtttcaagaagtgtggcagcagagtgttcctgaaggaatggtaactagtcttgatcagcttaagggtttagcgctggtggatagacactcgagaccagaaatcatatttttgctgaaagtagatgatttacctgaggataatcaggaacgttttaatagccttttctctctaagggagaagtggacagaagaagatattgctccatatattcaagatttgtgtggagagaagcaaaccataggtgcattactcactaaatattctcgttcttcgatgc

SEQ ID NO: 9706 - DNA, 610 bp, Homo sapiens
ggcacgagatgacttgccctttgttcctagctctgtgcctggcctcagaggagagccttggtgcacgtttgactttttaatctttatttgaacctgttacacaccgtcacccccactgctctgcttgccacagacatggaaggttcactaaggccttaaggcactcatgcaagctcacaagagaaagaaatctgtaaggcatgtagaatttggactcaatcatgttggtctttaatgtgcctagagcaatggaatgggcactttgggggcggtggaattcaagacgctctggctgaagattcagaagtatctggtaactctcttttccttctgggcatcctctcctctgttctaatcctcccttacactcattcctggtccattgtattctgaccacatccttaatcatggtcaaaactattgagtcctgggcacattggtcatgaaggaacaagaaggcaatgagagactctcatgccaaccactgccctgaaagccctgctgttcagacagcaaaggggccagcactggccaagctcttatgcttgctctgaaaccttcttgggaggagtcaatagggtctccttttgaaagtgtccctggccttttg

SEQ ID NO: 9707 - DNA, 519 bp, Homo sapiens
ggcacgagcggtcgcggagctgcggccagctttgggagggccggccccgggatgctacacacaacccagctgtgcctatgcggacatcacgctcgccatcaagtttctgtttgagcgtgtggagggcatctccagggctaccatcattgatcttgatgcccatcagggcaatgggcatgagcgagacttcatggacgacaagcgtgtgtacatcatggatgtctacaaccgccacatctacccaggggaccgctttgccaagcaggccatcaggcggaaggtggagctggagtggggcacagaggatgatgagtacctggataaggtggagaggaacatcaagaaatccctccaggagcacctgcccgacgtggtggtatacaatgcaggcaccgacatcctcgagggggaccgccttggggggctgtccatcagcccagcgggcatcgtgaagcgggatgagctgttgttccggatggtccgtggccgcccggtgcccatccttatggtgacctcagg

SEQ ID NO: 9708 - DNA, 372 bp, Homo sapiens
cccacgcgtccgaaaatcttaaaatatatgaattccatgagataagagatgaagtatgaggtaagaatactatgtctaagctgaaaaggtacctcattaagatatagacagaaataaaataggagggagatgaaacatatgaagtatattgtgaaatttaataatgcattggaggcagtaaagaacagagtcattgcttcctcaaagaataggtaaaatgaagaacaaactgatggagacctatccaaacacagaggataagactaggaaataaaaataacaaaagataaagtactagaaatagagatcagaaaattaaaagctatctatgggtcatatgtctttttagtaagaactcagaataactacaac

SEQ ID NO: 9709 - DNA, 313 bp, Homo sapiens
ctgcttgagcccggaaggcagaggttgcagtgagccgaaatcacgccattacactccagcctgggtgacgagcgaaactccgtctccaaaaaccaaaaagaagaaaagaaaaaatttgagggatcccttgtcctggaagtggctgaacttgggggtggtacaggggagacaactgatgggcctagcggggtccgtgcacaggggccggtgtcactgtgctgggctgttggaaatcccctgactgctcgctggccaaggtctgtgaatgggaaacagactgtgtctgggagtgtgggggctatgcattctccct

SEQ ID NO: 9710 - DNA, 383 bp, Homo sapiens
cgttgctgtcggaatggcatatatctaatggaaaaacctataaacggcctcctatggaacttaaaacaaaaagaaaagtaataaaggaaatgaatatttcattctggaagagcattgaaaaagaagaggaagaaaagaaagcacaactcgaactgtccagtaaaattaacaacactctgacagaatgtctgaacctcatcgaagggggtgtaccttctaatgaaatacttaacatattgtccagcattcctgaagctgaaaaatttgctaaattctggatctgcaaagcaaagttgttggcaagtaaaggcacctttgatgctattgggctatatgaagaggccagtaaaaaatggggcacaccaatacaagagttgcggaat

SEQ ID NO: 9711 - DNA, 527 bp, Homo sapiens
tctacgggaaaataagtaaaacctgcccacatgcttgtgatggtattggaatatttcagtcctttgagaagaacacttcactttgaaccttacgggctattttccagactgtccaaatatgatttgtttcctctcaccatcatttccagtaccctgtcccaagtgtttgaatatagacattgatatgccctgatttttgctctacttcagaaaggatcggggatgtagtttagccctctaggagcttggaactaatttgtttgtctatttcttgtttgcttccaagttgcttattatgtgttacaggtagcagctacagctgaaggccatggtgaattgctggtgatgtaaatactcccagccctgactgatcggccttgtttaaattttaaggattagtaaacaggttgctgctggagctacttctgcttaggctattaggagaataaatgttgaaggaaatggagtccaattcggggcttactggctttgacagtacgaggaagcttttcagtgccacacgtgtc

SEQ ID NO: 9712 - DNA, 514 bp, Homo sapiens
ggcacgagcagctactcgggaggctgagacaagagaatcacttgaacccagaaggcagagattgcagtgagctgagatcatgccactgcactccagcctgggtgacagagtgagactccatctcaaaaaaataaaatattgtggtattggcacaggagtggacaactaggtcaatctaggaacagaccttttggaacttgatatacatgaaatgactcaaccaatcagtgaagacagggtggatgttcactgaatattggagaaaactgaactcccccatacaaaagaaaacagatttccactttacacacactcaaaattaaatttcagattaaatactaggatatttttaatgatttattaaatttttttttggtagagacagggtctcaatatgttgctcagcctagtgtcaaactcctagcctcaagcaatcctcccttctctacttctcaaattgctgggattacaggctgagccaccacacccagcctgatatttatttttaaatatc

SEQ ID NO: 9713 - DNA, 566 bp, Homo sapiens
tcattgaaaaaaatgggaaattacgatatgaaatagatactggagaagaaacaaaatttgttaacccagaagatgttgccagactgatatttagtaaaatgaaagaaacggcacattctgtattgggctcagatgcaaatgatgtagttattactgtcccgtttgattttggagaaaagcaaaaaaatgctcttggagaagcagctagagctgctggatttaatgttttgcgattaattcacgaaccgtctgcagctcttcttgcttatggaattggacaagactcccctactggaaaaagcaatattttggtgtttaagcttggaggaacatccttatctctcagcgtcatggaagttaacagtggaatatatcgggttctttcaacaaacactgatgataacatcggtggtgcacatttcacagaaaccttagcacagtatctagcttctgagttccaaagatccttcaaacatgatgtgagaggaaatgcgcgagccatgatgaaattaacgaacagtgctgaagtagcgaaacattctttgtcaccttgggaagtgccaact

SEQ ID NO: 9714 - DNA, 78 bp, Homo sapiens
gagagagagcttaagtgaaggcagtttttatggcgttttgtagtaaattctgtaaaatactttggtttaatttgtgac

SEQ ID NO: 9715 - DNA, 60 bp, Homo sapiens
atctgtcaatgaacatgaactgagttcttcaactacaggttgaaggataattaaactttt

SEQ ID NO: 9716 - DNA, 431 bp, Homo sapiens
gatcctcaatatcctaactaactggtcctcaactcaagcagagtttcttcactctggcactgtgatcatgaaacttagtagaggggattgtgtgtattttatacaaatttaatacaatgtcttacattgataaaattcttaaagagcaaaactgcattttatttctgcatccacattccaatcatattagaactaagatatttatctatgaagatataaatggtgcagagagactttcatctgtggattgcgttgtttcttagggttcctagcactgatgcctgcacaagcatgtgatatgtgaaataaaatggattcttctatagctaaatgagttccctctggggagagttctggtactgcaatcacaatgccagatggtgtttatgggctatttgtgtaagtaagtggtaagatgctatgaagtaagt

SEQ ID NO: 9717 - DNA, 422 bp, Homo sapiens
ggcacgaggaaaaactcaaaagcttgtcactgcagcttcagcaggatggagataatggggacagcagcaaaagtactgagacaagtgactttgaaaacatcgaatcacctctcaatgagagggactcttcagcatcagtggataatagagaacttgaacagcatattcagacttctgatccagaaaattttcagtctgaagaacgatcagactcagatgtgaataatgacaggagtacaagttcagtggacagtgatattcttagctccagtcatagcagtgatactttgtgcaatgcagacaatgctcagatccctttggctaatggacttgactctcacagtatcacaagtagtagaagaacgaacgcaaatgaagggaaaaaagaaacatgggatacagcagaagaagactctggaacg

SEQ ID NO: 9718 - DNA, 427 bp, Homo sapiens
tcaccctgcatcaaaacacatggagcagactgctgagccagctcaggggaagcggagagaccccaggagtgacggtgagaatgcaactcacttgtcattacacaggatatggcagatcggatttgaccaacaaaatggggaggaactgatccagatgtggaatgtgacagagaatcccttcccactgccatggaacatttataaaaataatcatacgttaatcaatgaagaaagggagccacacatttaaaaaagcagaaatcgtacaggccacttcctcagataaccattctaactagggtcaaattatacatcaggactgaaaccacaaacatataggaaataagataaagtcttttggtttttttgagacggagtctcactctgtcacccaggctggagtgtagtggcgcgatcttggctcact

SEQ ID NO: 9719 - DNA, 573 bp, Homo sapiens
ggccctcagtgggcatgttccggtctcccaggtgacaccaacgggtcccacagagaccagcctcatctccgtcctggctgatgccacggccacgtactacaacagctacagtgtgtcatagagctggaggcgccccgtccggtcagccctcgcgccctctccttcctgtgccttgagtggcagaggagccgtccagccacaccagctttcctcccaccgctcagggcagggaggtctgaactgcggccccagagcctttggcctaagctggactctccttatccgagtgccgcctctatccccttccccacgttccagcccctgcagcccacattttaagtatattccttcaagtgagttttcctccagcccctgagagttgctgtctcccagtggaatgttcactgacgtcttttcttggtagccatcatcgaaactaatggggggacagacttgatagccaaggtcccttctggtccagttttctgatttagggttctctcaagattaataaaggaagatggggaaatttgactcattaatgagctcgctaacctacgatctggtgataat

SEQ ID NO: 9720 - DNA, 399 bp, Homo sapiens
cggggaggctgaggcagaagaattgcttgaacccgggaggcggaggttgcagtgagccgagactgcaccactgcacttcagcctgagtgacagagtgagactccatctcttaaaaaaaaaaaagtttattctttcctgtagggtaaccaaacctgaagttttaaaaaaacagggggggatcttctttagggaactgggcaattggcttctcatgttaacaatgttgacaacaacagccaaaaggaaaaatgtaaaacccaaaaaaaaagctggcccaggggctcacccctgtagtctggcactttgaatggctgaggcggggattgcttgaggccaaaagttccaaaccagcccagccaacatggcaaaaacctcgtctttagtaaaattacaaaaatt

SEQ ID NO: 9721 - DNA, 70 bp, Homo sapiens
agcaagcagcaaaccagctacaagtggaccttctagtgcagttgttcctaatacctcatctcggaaaaag

SEQ ID NO: 9722 - DNA, 514 bp, Homo sapiens
gatacaactaaagaaagagatacacaatgacctagatatatgagtgaagaaattatccagaatgtatcacagagaaggaaatgggcaaaaagaaagagggtaagatatatatttataaacacacacatacacatattacataaaatgagaaagtgacatgtctttcattagttttccaagagcagaagggaaaaataatgggaaaggaatagacaatatttgatgagataatagttgagaatgtttcagagctgataaaaagcaccatgacaaatttgagaagctgagagaactgcaagcagaataacgtaaagaaaatatgcttctagagacatcatagtaaaatgaagaacatcaacaacaaagaaaatctcttaaaagttgccagagaataaaagattaccttcaaaggagctgaggcagttacaatgatagctgactatacaggggcaaaaatggaagccaggaaacactggagtgatatctcaatgtgctggaaaaaatttgccaatct

SEQ ID NO: 9723 - DNA, 585 bp, Homo sapiens
aaaccgcttgagcatcctcctgtgaaaaggaatgaagaggctcaagtgcatgacaagcttaactctggaatggtttccaacatggaaggcacagcagggggagagagaccttctgtggtaaacggggactctggaaagtcaggtggtgtgggtgatccccgtgagccattaggctgcctgcaggagggctctggctgccacccaacaacagagagctttgagaaaagcgtgcgagaggatgcctcacctctgccccatgtctgttgctgcaaacaagatgctctcatcctccagcgtggccttcatcatgaagacggcagccagcacatcggcctcctgcatcctggggacagagggcctgaccatgagtacgtgctggtcgaggaagcggagtgtgccatgagcgagagggaggctgccccaaatgaggaattggtgcaaagaaacaggttaatatgcagaagaaatccatataggatctttgagtatttgcaactcagcctagaagaggcctttttcttggtctatgctctgggatgtttaagtatttactatgagaaggagcctttaacgatagtgaagctc

SEQ ID NO: 9724 - DNA, 510 bp, Homo sapiens
catatggtttcaagttttgatgcaaatctgaaggtgaggcattcaatttgaataaaagaagaacaaagtttgtttaaattaggccaattcaaacttgttctgtgaaatgaatgtactgtctttattgtttcttttcctttatgttgtccatagctttttgcatattctcttagaatcacagaactttgaacttgagaggatctatacaaattatgcatttgactcttctcacacagggggcttcttaaaactatagacttctgaacctcttttgcaaaaattataattcagctcatgaggaatggtcccaataatctgaattttaaaaaatgactcagggctgggtgcagtggctcatgactgtaaacccagcactttgagagcccgaggcaggtgaatcacgaggtcaggagttcgagaccagcctgaccaacatggtgaaaccccatctctactaaaagtacaaaaattagctgggcgaggtgtcacacctgtaatcccagctactca

SEQ ID NO: 9725 - DNA, 579 bp, Homo sapiens
cagcctcctgagtagctaggattacaggcacgcaccaccatacccagctaatcgtttgtatttttagtagagacggagtttcaccatgttggccaggctggtctcaaactcctgacctcaggtgatccacccgcctcggcctcccaaagtgctgggattacaggcgtgagccactgcacccagccaatagatgatgaggattctataaatgagtattcatgtaaaatgcctagaataatcttgaacacggtgaagtcattccaaggtgggcggctcggcacgagaatgatgaaagggccgtctgctgggaaagcagggactgttgaatatcagagtgagtttggctggctgagcaggtgcatccttcctggccctggctctaggagctctgccttcccaggtagtacagggttctctagttaggtggtttttgagaagctgcaattctcagctggacaccgtgggcttagagtaggaggtgtaaaaagttaatgcaagctctaggatgtcaagcattgggtgggttgcaggaataatgtgagaggaagctaaaaaaaggtatgtttggggccgggtgtg

SEQ ID NO: 9726 - DNA, 610 bp, Homo sapiens
  misc_feature 491: n = A,T,C or G
atgcctcattataagttaaaagagtgctgtagcatccctgtacaatttgggcaagtgtttctctgcctgtggatgtgtatttttaatagcaaccagtgcagtctacttgtctattctgaaagttcattaccattcttttaccttccctgtttagagtatcgtatttcctgtacttttaattttggtatttcttagctcctataaagggtagcaggtggcctcttttggagcctgaattctattcatgtgcaagtaaattcagagagctatcttgtctcttctgtagcccctttctagagggagctgatttcagtggtgggagattatttgatgtctcttcttgtttggtctctagtgattccattgaacctgcatctgagactgtgggtcttgaaataaaaatcctgtttatggagaaatgttcaagatggttatttcatcacctataaactattaggagtttatgagaacctacatttagcacaacctanaactgaagttatctctttaagttctcacgttattttgtatattaagattcaaaaccaaaatatcattggtctaaacattgttagaatagaaccagactatgccaatatcactaatatag

SEQ ID NO: 9727 - DNA, 579 bp, Homo sapiens
ttttacgaatttcatctagagtgtgtctggtatatctatgcatatgattcattttccatgttacaatgcaagctgactcttattgaaatagacggctgggaggcagcatgatggagtgaaaatagcatgcacgttcaaatctgaaagatatgggttcaaattcttactcttctctgttatttggagaaagtcatccacctcctgtatagtacttttcttggctttaaaatgaatagatgtcttgaggatattactgttctcaattaaatcaaaatttttgcaaaaaggtctgacactggccgggcgcggtggctcacgcctgtaatcccagcactttgggaggccgaggcgggtggatcatgaggtcaggagatcgagaccatcctggctaacagggtgaaaccccgtctctactaaaaatccagaaaaattagccaggcgtggtggcagatgcctgtagtcccagctactcgggaggctgaggcaggagaattgattgaacctgggaggcggagcttgcagtgagcagagatcgcgccactgcactccagcctgggcgacagagagagactccgtctc

SEQ ID NO: 9728 - DNA, 508 bp, Homo sapiens
taatgccctcattttatgttgtgaattttagaaagaaataacaattaagcatcagtcaattaccttcacttaggagaggagaaagaaagcatagccctcagacagactggggaggcaggagagaattatgcaaaacaggaggtttactaaggtcctatagatacatgcctgggttcttccaaaaataccttcacccaccctcagatattgggcttaggattctaaagtattgagctcagttcttgtggcaacaggacgtaagattctaaacagtcttggtttgaaatggaataagattatgtggaattgctttaacaaggcatgtgaacaagttgttcttcactggcaaccctttccctccacttttgcttcctaagatgtaaagccgtggttggctgaaatgattttttgcataggtgtgcctaaatattgtggaacacaacagcatttgctcgttattaaatgtgtcagattcactatcttctactgtttattttcaatgctacat

SEQ ID NO: 9729 - DNA, 419 bp, Homo sapiens
atttgtgagtttttcattgtgctttaagaaattctcatagtggaattaggaggactttggtttatccacaaatgctcaataacttctaggtactacttatccttccctttcgtaatccccctttaaagaatacacatgtgcacaggctgagtgtaaatgtgctttcccaagacagatgccataagtggcacgtgggaaaactgaaatccttttgtttttcaagggacagggtgtgaaatattagttctttttctcttttatcagaagctagttttgagttgaaagtggcataagccggacgtggtggctcatgcctataatccaagcactttgggaggctgaggtgggtggatcacctgatgtcaggagttagagaccagcctggccaacgtgatgaaaccccatctctactaaaaata

SEQ ID NO: 9730 - DNA, 461 bp, Homo sapiens
tacggctgcgagaagacgacagaagggtttcactaccaaaatatatgaaagaactctaattaatcggctttaagaaaaagtgcttgaatcaagtattttatcagaaaaataggaactgattcaaatgtcttttagttcacatgactggtaagtatttggtaaataaaactagtttgttggtttaaggaaagcagccatctcttctaccagcaaaaatacccatgtattttaacttgagggttttacaggctgtagaaacgatgaacaaataaataacttgagttgatagctagctttttaaaataagctactcaagcataattattaagaatgaataaattggctaggcatggtagctcatgcctgtaatcccagcactttgggaggctgaggtgggcagatcacctgaggtcaggagttcgagaccagcctggccaacatggcaaaaccccgtctctact

SEQ ID NO: 9731 - DNA, 443 bp, Homo sapiens
gaatcaacaaagagtggtttaaggccattactgagaggcacagagctaccactaatgaaggtggtgcgatggcatagagaagccttctgaacaactcagctttcaacatgtgcaagaattactttgacaaaaaaattacaattttctaatttaaaaaaaaattactaagttattgggcttatctaggctctagattgggggatatgaaaatcatttcaagtaattatctcatagtatttcatcccactgactacaaggctacaagagaaacctcccttgggagaaaatgaagaaaaatatttaatagggaaacagactaatacagagagactgccagaagagtggtctcattcaggtatatgatcagaaattttaattcctaaaaggcatcttcatgaagagaatacgtgtatagacatttttaaaaataatataaaagctgg

SEQ ID NO: 9732 - DNA, 488 bp, Homo sapiens
gttcacgccattctcctgcctcagccggagtagctgggactacaggcgcctgccaccacacctggctaatttctttttctatttttagtagagacggggtttcaccgtgttagccacgatggtctcgatctcctgacctcgtgatctgcccgcctcggcctcccaaagtgcagggattacaggcgtgagccactgcaaccaaccagaacagttcatcttaattaggcttttgtatttcaaactctagtagtattcttgtagtgaatttctacaagattgttccaacacaaacctaacattaatcaaattttgattgtccctttgtagcattaagattagatatttaatagcagaagctagtgaagccattagaaggataaaaggtatccttagatttgcacagctggcataaaagacagaaataatacatcagtttcttgccgtcaggttagtacacttcctagtatttcacatttgacactatattc

SEQ ID NO: 9733 - DNA, 543 bp, Homo sapiens
tcagcatcatcctgataccaaaggctggcagagacacaataaaaaaaaaagagaattttagaccaatatccctgatgaacattgatgcaaaaaccctcaataaaatactggcaaacagaatccagcagcacatcaaaaagcttatccaccacgatcgatttggcttcatccctgggatgcaaggctggttcaacatactcaaatcaataaatgtaatccatcatataaacggaaccaaagacaaaaaccttgatttttaaaatgtggatctatttgactttttatttcatgtaagaatcactgttaggaatatgaaagtatatttcagcttaaatatagtgacattctgctaccctatatttaaattgaacctaaattaaacttgtattaatcagtatctgtcacatgaactctaccagctccctttcacctaaacaaacagtcacacacaacgaaatagaaatcttttctcagccaggcgcggtggctcatgcctgtaatcccagcactttgggaggccgaggtgggcggatcacaaggcca

SEQ ID NO: 9734 - DNA, 162 bp, Homo sapiens
  misc_feature 94: n = A,T,C or G
ctgggactgacagcctgcagggtttccttgggcgcggccccaaaattgccttcaaaacaaacccgggacggttgaaagccttcgaaccgtgcangggatgcctcgggccctggcccttcgcttcctctcttgtgttatggaaataaaaacaaataaaactac

SEQ ID NO: 9735 - DNA, 571 bp, Homo sapiens
ggcacgagattgaattttctgataattgaagcttattaattgtctaaaattatcttaagatattttctgatgtacatcattttaaaatgagttgcacacatttctattctgtttcaacatattcaatataattttcgctcttgttcatctgttggtattcattatataattcagacgtggtctcaggtctggagacatgtgaagttattgctcctacactgagtgtttccatgtcattatgccttaatccttatttagacacagctatgataccctctttacaacataaaggataagcaaaaggatgtataaatgtatcctgggctggaaagtggcattattgactggccattggccatcagcaaaggggcctgagtggaaggatatgaaaggatgggtgtaatgtagatgacgggttgatgggtgcagcaaaccaccatggcaggtgtatacctatctaacaaacctgcaggttctacacatgtgtcccagaacttaaagtatagttaaaaaaaaaaaggatgagtggtgagcacagctgacacaccccacgaatatctggggggctttg

SEQ ID NO: 9736 - DNA, 564 bp, Homo sapiens
ggcacgaggcgccatgttaggacgaaggggaaggaggagaagcgcttaaagcggcgggagcggtgcgggagaggggttggacccagggctgaggcaggcccccccctccctcccgcctcagtggatcatgcccagggcggcagcggcggcggttgcgggggggaagtgactgggcggtgccggcgccggagacgatgccgtttccagttacaacacagggatcacaacaaacacaaccgccacagaagcactatggcattacttctcctatcagcttagcagcccccaaggagactgactgcgtacttacacagaaactaattgagacattgaaaccctttggggtttttgaagaggaagaggaactgcagcgcaggattttaattttgggaaaactaaataacctggtaaaagagtggatacgagaaatcagtgaaagcaagaatcttccacaatctgtaattgaaaatgttggaggaaaaatttttacatttggatcttacagattaggagtgcatacaaaaggtgctgatattgatgcgttgtgtgttgcaccaagacatg

SEQ ID NO: 9737 - DNA, 564 bp, Homo sapiens
aagttacacttaaacagtgatacatagattgccagataatctttggaagggctttgattaattaggcttcagggaaattgtgaataaaaacataaatcttgcaatagggtaggggaaagaaaataatcccactcctgaagtgatgaaatgaagagtggctagagaggagaaaagaaccaggacaggtgatatattagcaactgtcagtgtgaataatccagggtatgacatttctaatttagcctcacatttaaggtcatttctgattcaacctcaaatgatccttctagcctactgctcccctaaatattaatatattctttgtgccagtcacagtgtattaacatttccctgaaaacatcttaagcattttttttaacctatgtgacttttgccttcttccatctcaaccttttaaaatcttacctacctgtcccttacttcatcaaatgtttctaattatttagaaacaacttctaaatttcctaatatatatgtatatctgagttgagtatgtatgtgtcataactaaattagagctaaaatattcttttattagtatga

SEQ ID NO: 9738 - DNA, 476 bp, Homo sapiens
tagaactcctgtagatgtgtagaagagtgatgggaaagagaaaggactgatgtccttcttttcattgaaaaagatattgtttaggtcctacaatggcttaggtatggtttgagactctggggttacaaagcaaagaaaacctggcctctgccctgctcagagaacagcagggatacagcatgttagcaaataagtatatagtgtggaaaggtctgtagtcaatagcagtcattttgacaataggaaaaggaatgtgtgaaacttctgggtctgtgtgtgtgttggggttggtgggtcaagggaggggatccaaagatggtttcactaagaagggaaaaacaccggacctgagacttgaatgcaagtagaattttgccaggcagatgatctgttcttccaggtagataatccatcctgggcagacaaaaccaggctgtagaaggaacaccatgtgtggagcaatagaaatatctcat

SEQ ID NO: 9739 - DNA, 300 bp, Homo sapiens
ctgcgacccctcggaccagtgcccgccccaggcccgctggagcagcctgtggcacgtggggctcatcctgctggcggtcctcctgcttctgctgtgtggtgtcacagctggttgtgtccggttctgctgcctccggaagcaggcacaggcccagccacatctgccaccagcacggcagccctgcgacgtggcagtcatccctatggacagtgacagccctgtacacagcactgtgacctcctacagctccgtgcagtacccactgggcatgcggttgcccctgccctttggggagctgga

SEQ ID NO: 9740 - DNA, 576 bp, Homo sapiens
gggcacgaggctcttctctgtgccctttatccgcacttcccagctcacagcactgacaaccggtatcatctccaggctctccggcacctctatgtgctggccgcggagcccaggcttctagtgcctgtggatgtggacacaaacacgccctgctatgccctcttaaaagttacctacaagggcactcagtggtatgaacaaaccaaagaagaattgatggctcctacccttcttccagaactccatcttttaaagcagattaaagtaaaaggcccaagatactgggaactgctcatagatttaagcaaaggaacacaacacttgaagtccatcctttccaaggatggggttttatatgttaaactccgggcgggtcagctctcctacaaagaagatccaatgggatggcaaagtttgttggctcagactgttgctaacaggaactctgaagcccgggctttcaagccagaaacaatctcagcattcacttctgatccagcacttctgtcatttgctgaatatttctgcaagccaactgtgaacatgggtcagaaacaggaaattctggatctcttt

SEQ ID NO: 9741 - DNA, 461 bp, Homo sapiens
ggcacgagctgggcttggcaacgagggactcggcctcggaggcgacccaaaccacacagacactgggtcaaggagtaagcagaggataaacaactggaaggagagcaagcacaaagtcatcatggcttcagcgtctgctcgtggaaaccaagataaagatgcccattttccaccaccaagcaagcagagcctgttgttttgtccaaaatcaaaactgcacatccacagagcagagatctcaaagattatgcgagaatgtcaggaaaaaagtttctggaagaaagctctgcctttttctcttgtaagcatgcttgtcacccagggactagtctaccaaggttatttggcagctaattctagatttggatcattgcccaaagttgcacttgctggtctcttgggatttggccttggaaaggtatcatacataggagtatgccagagtaaattccatttttttg

SEQ ID NO: 9742 - DNA, 475 bp, Homo sapiens
gtgttgcccaagctggagtgcaatggcgtgatctcggcttactgcaacctctttctcccgggttcaagcaattctcctgcctcagcttcccaagtagctgggattacaggtgcatgctaccacgcccggctatttttttgtatctttagtagaaactaggtttcaccatgttagacaggctggtcttaaactcctgacctcagatgatccacccaccttggcctcccaaagtgctgggattacaggcatgagccactgcgcccggccaggaatttattttaaggacataatttaataggttcaaaaatctcatattcatgaaaactttttgaaacctataatagcaaaaactaaaaatgaggttaaatgtttactaatagaggaaggcttagtaaatcatagtaagtaaaaatgatgaaatatgtagccattaaaaataatactttacaggccacgcctataatcccagcactct

SEQ ID NO: 9743 - DNA, 351 bp, Homo sapiens
ttttagttataagccacccaatttatgtgttttgttataagatcccccaatggactcagacaatttggctggccagttctggctctgggtctcccatgaggctgccatcgtacatcagccagggctgcagtcatctcaaggcctgactgggggcatcttggaggctggataccacaagtacctaccatgagccaggtggtgtacaagtaatatatagcaacaacaatcataatgtacaattggaagttatttcatgtttactatgtgtccaaatgttaagtactttccctgagttacctcctttatcttcataaaaaccctacaaatttggtctggttatcatctcattga

SEQ ID NO: 9744 - DNA, 89 bp, Homo sapiens
cgcaacttctgcctcccgggttcaaatggcacttcacttgttaatgtcacaaagtgccaccgggtgcagtgcctcatgcctgtaatcct

SEQ ID NO: 9745 - DNA, 350 bp, Homo sapiens
tcgggagcagaagaaggaggaggagatgaataggtgaaggagaggaggaggaaaggagaagagaaggaggaggagaaaagaaaggagtggagaaagaggagaggaggagaaaaaataggaaacgaagaggagaagaataggaggaggaaagggatgggagaaaagaaaaaggaaaagtaggaggagtagaaaaagaggagaaggaggaagaagaaagagaaggaggagacgaaaagaatgagaaaaagaggagaggagaatgaggagaaggcgtagaagaaaagaaggaggagaggataaagaaggagaagtagaggaggaggagagaagaggaaaggaggaggagagga

SEQ ID NO: 9746 - DNA, 427 bp, Homo sapiens
ttgcccaggctggtctcaaactcctgggctcaaactatcttcctgcctcagcctccaaaaatgctaggattacaggcatgagccaccacacctagcctcaaatagttgtcttaacaaataaatggttgaaacctgatatacgggaattagggactctgttttgtgaactgttcatttctggagtcaaaatggctttgatggtgaatttggttatctaacaattgtttccagaagttaggggttaagcagagtgcaccacccacaggccaccttacctgtcctgccttggcgttctcacagacaaaagcttcatagaatctggggaactctggagcattgtcattcacatctaagactttgattgtgacaggaacacttccaacctgggagggattgtctaaagggaacacaaggaaaaccaaatctg

SEQ ID NO: 9747 - DNA, 275 bp, Homo sapiens
atatctcatatactccataaatatatatacatactctatccacaaaaattaaaaataaaaaaatagtaacaaagtttttctaaatttaatagtgttttagaaattaaaagagacccaagaataaaaggaaaggtgaactaagagagatatagggtaaaaagaaatataagagaaataagctatgtaagagatacaggccgggcgcggtggctcatacctgtaatccaacactttgggaggctgaagtgggtggatcacctgaggtcaggagttcg

SEQ ID NO: 9748 - DNA, 247 bp, Homo sapiens
agacagtgttccaccatgttggccaggctggtctggaactcctgacctcaagtgatctgcccacctcagcctcccaaagtgctgggattacaggcatgagctgtgacacccatcgtgtctaatttttgacagataaaatgatttcatgatccaacatttccttaccagtgagggatacaataaaataccaattctcactgggcctttacacttctttttttttttttttaaaaaaattttttttttc

SEQ ID NO: 9749 - DNA, 250 bp, Homo sapiens
ctaccattttaaattaatttagcattggtctgttacaaagtgcatataatttagattcagaagaattgggcttcagttatacttttgtcactttctcaatatgtaacctaggataaatcgctccctctttttcaaatttgatgtgtacaaatgtaatatgaagtacttggcaacgtcaggaacatttgataaggcaaggtatataaagatatgtgtgtagccaggcacggtggctcatgtctgcaatccc

SEQ ID NO: 9750 - DNA, 331 bp, Homo sapiens
catttacatatacttgaaaatcattgctattaatttctaatttattttctctttttgtcagataatacacttcgtaggatttgaaaccttttccgtttgttgagacttgttctatagcacaaaatatagtctaatttggaaaatgttctgtgtgcatttgaaaaggatacacatttgaaaaagacatgctattgttgaatagagtgtcctatcattatctgttaggttaaagcgctgacaatgttatttcagggttctttgtagattagcttatttctctttctagctccatttgcttttgcctaacatatgtaaaattctgatattagag

SEQ ID NO: 9751 - DNA, 430 bp, Homo sapiens
ataagcaaaaggcccagtccctgtcctcaggagctcatggtccaagtcaaaatcacataaaaacatttgagtcccctttgaaatgagtattgttttcttgaacaaattttcaacttgctgtagtttttttcctgatcactttcatcctgtctttccaagatgggatatgtttatttagaaattacttcacctgggacagctgcttctctcttttgctcaggcccgtagcactgcaggatgggcaagtgtcgtggacctcatactgctaggagtctctgtagtcaccaacaagatcagaagtggcatgataaacagtacaagaaagcccatttgggcacagccctgaaggccaacccttttggaggtgcttctcatgcaaaaggaattgtgctgggaaaagtaggagttgaagccaaaaagccaaattctg

SEQ ID NO: 9752 - DNA, 323 bp, Homo sapiens
gctcataaaactgctgataggaaagagttataggtctcactgttcaagaggcttgggttttaaagtcatattagcctcaagagataaggtcttggggtccttaagagtccagtggttagaaatgagatgtctgcagttagacctcttaacatcatcacggatatatttgtgtttaatcccagcactttgggaggccgaggcgggtggatcacctgaggtcaggagttcaagaccagcctggccaacgtggtgaaaccccatctctactaaaaatacaaaattagctgtttgtggtggcgtgcacctgtaatcccagcaacttg

SEQ ID NO: 9753 - DNA, 404 bp, Homo sapiens
cgttgctgtcgggagacttgaggagttgctgaggtgccacgtgtacctgggcacgaggatatgatgtttcagcttctccgaggtctggactttcttcattcacaccgagtagtgcatcgcgatctaaaaccacagaacattctggtgaccagcagcggacaaataaaactcgctgacttcggccttgcccgcatctatagtttccagatggctctaacctcagtggtcgtcacgctgtggtacagagcacccgaagtcttgctccagtccagctacgccacccccgtggatctctggagtgttggctgcatatttgcagaaatgtttcgtagaaagcctctttttcgtggaagttcagatgttgatcaactaggaaaaaacttggacgtgattggactcccagg

SEQ ID NO: 9754 - DNA, 514 bp, Homo sapiens
  misc_feature 473: n = A,T,C or G
tgaaaaagaaaatgaagaattcacagggcaactaaaagtggctaaagatgttgaaaaactcattggacaagtggaaatctgggaggcagaagccaaatctgttttggatcaagatgatgtggacacctcaatggaagaatctttgaagcatcttattgccaaaggctctatgtttgatgagcttatggcaagaagtgaagatatgttacaaatggatatacaaaatatttcaagccaggagtcctttcaacatgttctcacaactgggcttcaggcaaagattcaagaagctaaagagaaagtccagatcaatgtggtaaaactcattgcagcgttgaagaacttaactgacgtttcaccagatttggacatcaggctgaagatggaagaatcccagaaggaacttgaatcatatatgatgagggctcagcagttactggggcaaagagagagccccggtgaactcatttcanaacacaaggaagcactaataatttctaatacaaaaagtctg

SEQ ID NO: 9755 - DNA, 413 bp, Homo sapiens
aaggacccgtcctgggaaagaacgtcataaaatacgaaaaatgtgttagaacactttattttcccagccgctttcaaatatatttttatcagtggttcattgttaaagaaggtgtctatactttaaattttcagttttttgcagggaatcatggagctgagaatttcacagatactttataagccatagtacatgagcttaataggctgtgttttgtttctcatcagttaacataatttttgtctattcatttaaaaatttgttggatccctagactaagttgaaatgtatttctaatagtaggcaattttaattttcatgtagttgtttaattgttctctaattaatggaccaatgaaaaatgagttcatgtgtgtgtgtgtgtgtgtgtgtgtgtgtgtgtgtattctacc

SEQ ID NO: 9756 - DNA, 371 bp, Homo sapiens
  misc_feature 9, 10, 11, 12, 13, 14, 15, 16, 17, 18, 19, 20, 21, 22, 23,24, 25, 26, 27, 28, 29, 30, 31, 32, 33, 34, 35, 36, 37,38, 39, 40, 41, 42, 43, 44, 45, 46, 47, 48, 49, 50, 51,52, 53, 54, 55, 56, 57, 58, 59, 60, 61, 62, 63, 64, 65,66: n = A,T,C or G
  misc_feature 67, 68, 69, 70, 71, 72, 73, 74, 75, 76, 77, 78, 79, 80, 81,82, 83, 84, 85, 86, 87, 88, 89, 90, 91, 92, 93, 94, 95,96, 97, 98, 99, 100, 101, 291, 292, 293, 294, 295, 296,297, 298, 299, 300, 301, 302, 303, 304, 305, 306: n = A,T,C or G
ggcacgagnnnnnnnnnnnnnnnnnnnnnnnnnnnnnnnnnnnnnnnnnnnnnnnnnnnnnnnnnnnnnnnnnnnnnnnnnnnnnnnnnnnnnnnnnnnnnctctctttctttctccctccccccccgggcgcgctcatttatctcgtctcttatgtctctctctctgtgtctgtgacagacacactctttttcatatagcgcgctcccttttctttgctctcggggggggtctctctgtacgcgtgtgttctctctccagtgagtgtgcacgcctaggtgagagagagtnnnnnnnnnnnnnnnntgtgtgtgaattttatatatttctatatctctcactctctgggtgtcacactctccgtgtgtggg

SEQ ID NO: 9757 - DNA, 331 bp, Homo sapiens
gaattaattattccaatcagaaatggaggccttacctcatttgggcaaagattagtgctagttattgaagatttactaataaatgatctgttaaggaatttagttttttttggatatgttgttttggttgttgaaaactaaggtataattataatagttattttttgaagatatgtttggctagccatcaattagaagttagagagtttgtcctaacagataagctataaccctcacattttaaaacatgcatagtgaacaatgaacaaaaacaaattcaaaattttactaatgtaaagctgtatattgtgattgttaaaacacttttttt

SEQ ID NO: 9758 - DNA, 440 bp, Homo sapiens
ggcacgaggctgagagtgcttgatacacccttgaatcccctcttatatgatgccccagcccaggagagataaaagcatcagcaccatgagattcacctgcctctggtcgttagggaacaatggaggcctgcgatttggagttaaactctcagtgatctctgtgttgacaacaccaaagctagaggaatccattaggatgtgggcatggttttcccggaaggctgactgatcagttctgcaaatgtttgcaagtacagggcagaatttcatccagcctcagaaccttgagccaagactcagcatcagcaaagccaaaagtttcatttctttgactgtgggagtgctagtcccaacctttagatggccattcagttttaagttcaataagcattttgattgagaaatactttgctgaggagtgaaaagtccttggctttgaa

SEQ ID NO: 9759 - DNA, 154 bp, Homo sapiens
ggcacgaggagagagagagagagagagagagagagagagagagagagagagagagagagagagagagagagagagagagagagagagagagagagagagagagaggggggggggggggcctctctctctctctggggggcgcgccccccccccc

SEQ ID NO: 9760 - DNA, 324 bp, Homo sapiens
tcctccccgctcatgtgccacacctgccatattgaaccgtctctgcactaatcttctccacgggcacggagtggagggaacgtcttgggaaaggggagagcttgacctccatctaggattcttttatctggagaaaaagaacactcttgaactatgcaatgctccgccctgaaaggcaagctaacgctaacttcccaggtgacagtagcaggaacaaggaagggtaatgtttccatgacagacacttgcttcccttgggacaagtcccagaagaactacctgaagcaccaaagctccccaccccagcctggtggcagaggaagc

SEQ ID NO: 9761 - DNA, 257 bp, Homo sapiens
tggagggaaattcagatcatctaaacccttcagcccttcactggacagaagaggaaactgaggctccatctgcatgacgttcccagagtcacggcacaaattcatggaagaagcagcaggaaactcagttctccagtctgggtccaatgtgtgttttagaaatatctccacagggttaatgactcaatttttcatgcatgattgctagtaatgacaatcatgttatgtttgtttctgtagctttggaaatcactcct

SEQ ID NO: 9762 - DNA, 379 bp, Homo sapiens
gtttctgattgttttcatcctgatactgtagttcactgtagaaatgtggctgctgaaactcatttgattgtcatttttatctatcctatgttaaatggtttgtttttacaaaataataccttattttaattgaaacgtttatgcttttgccaacacatcttgtaacttaatatactagatgttaaggttgttaatgtacaaaaaaaaaacccttatactcacctgcgttttcatttgtttgacatttgtctattattggatttcattatcatatgaacttgtcagtgggaaacaaactgtctaaaaatttttctcttacgtttaacatacaatcatgtgaaatttaggcagagttcgataaattactggcaaaaacaaa

SEQ ID NO: 9763 - DNA, 445 bp, Homo sapiens
ggcacgagcccaccaagagctgcatagagcacgtttagctagagtaggagtttgcagtgctcatatgggaaatgctgctgctatacttttaggaatttctgagtgcaatttagaaacatctagcacacttgaaacactgcgtatcattttcctcactcatgaatatagtcatcagaattcataaatagtttacctgagccctttaacaacctcaaataggccatatttctctctctggttgatggcatggaccctacaggaaaaaccacaccttaccgcttctgaccagcatcactacaaaaaggagtgctgaagccaatcaccatgtaagcaagataaaagcaaagggggtcttgcctgcccatctctgttccatacattcttaccaggcactgagagtcatggggagtttaagactccatcccacatactccttttgaaactg

SEQ ID NO: 9764 - DNA, 215 bp, Homo sapiens
gtttctccatgttggccaagctggtcttgaactcctgacctcaagtgacccacctgcctcagcctcccaaaatgctgggcttacaggtgtgagctactgcgccaggcctaatatctttttttttttttaaaacaaatttttgttttgggcccaggttgaatggcaggggggaaatttgggttaattgaaccctccgcctccaaggttaaaaaaat

SEQ ID NO: 9765 - DNA, 523 bp, Homo sapiens
ggcacgaggtgatccgcctgcctcagcctcccaaagtgctgggattacaggcatgacccaccgctcccggccttgttttccgtttaaagtcgtcttcttttaatgtaatcattttgaacatgtgtgaaagttgatcatacgaattggatcaatcttgaaatactcaaccaaaagacagtcgagaagccagggggagaaagaactcagggcacaaaatattggtctgagaatggaattctctgtaagcctagttgctgaaatttcctgctgtaaccagaagccagttttatctaacggctactgaaacacccactgtgttttgctcactccctcactcaccgatcaaaacctgctacctccccaagactttactagtgccgataaactttctcaaagagcaaccagtatcacttccctgtttataaaacctctaaccatctctttgttctttgaacatgctgaaaaccacctggtctgcatgtatgcccgaatttgtaattcttttctctcaaatgaaaattta

SEQ ID NO: 9766 - DNA, 453 bp, Homo sapiens
accattctgtttttcactttcagtttagtattcaataaactacataagatattgaaaactttgttataaaataggctttgtgttaacataggctttacccatctgtatgttagtgtaagtgttctgagcatgtataagttaggctaagctaagctatgatgttcaattcattaggtatattttatacatttcaacttacaatattttcagccagcaacatgtttattggaacatagccccattgtaaattaagaagtatctgtataggtacataaagtgaattcagaaatcatgggaatgttagttttgtatgtgtgttagtgtgtgcatgcacaatgcatgtgtgggtttaaaagaaaattgagggttctaagataaatataacaaggatttataagacttaacagtgagaaaaaataattacaaaatttccaattttaaaaaaattgggct

SEQ ID NO: 9767 - DNA, 444 bp, Homo sapiens
gtgcactccagcctgaaccagtactttatgtgaaggggagaacaccctgaattgggtcagcttctccaggtatacaaaggatttcttgaagtaatacaagatgattgaatattatactgatggacaatctcaaagtataaatttaccaccactgcaagtgaaaatccctatgagatttttcgggagtgaaaggtaggtgagatcaataaaattattttttaaataacacaaagtaagtgctagctgctcaatagcattttggggttaagcacgtaacatgcattaccttatttaatccttaaaaaattttaagttcaaatttaggcttagaaagtttaaataatttttcaagggtcacatggctgtgaggaattggaactccaacatagatctgaaggccttgttccaaaacctgagatttttaaaaaccgtgctgtatattgc

SEQ ID NO: 9768 - DNA, 290 bp, Homo sapiens
gtttctccaagtctccaggttcatgatgcatatcatcatcatttccaaatctcagagtttcctcaagagagggcaaccacatttgtaactgtcttctttctgtcaattaagtgtgtgtattaattactagggctaggtcttttcattcctttgcacgttttaagcaggaatgagatgaggcaaagcccatttgtaggttattttttagtttaactatgttaaattaaactatgttggtcaggctggtctcaaattcccgacctcgtgatccacccaccttggtcaaccaa

SEQ ID NO: 9769 - DNA, 556 bp, Homo sapiens
tggtgtgttatgtaatatttgcaagttccaacttgggaagttgaactttactgaactttaaaatgtagcaactacgtatggctgtattttaaagctatagtaacaactgagcatgttttcttgtgttttgtttttcaaaatgtattctgtgggataaagttgccactgagattttcaggtctctacaatgattaatttgaaaattttacatatggattttaaccattttttaaactgtaattagaatccactgtcaaatgtgttacagaaagtttagcccgttgagagatccccttcatactaacttgcaggttcactcagtttgggggcatgctttggggaacaaccttcttctgccatttacctttaatttaaaattgtgggccaggcacagtggcttacccctgtaatgccagcactttgggaggacgaggcaggtggatcacttgaggtcaggagttcgagaccagcctggccaacatggtgaaacccagtctctactaaaaatacaaaaaatagccaggcattggtggcgcacacctgtaatcccagctac

SEQ ID NO: 9770 - DNA, 426 bp, Homo sapiens
gcttggtaaccccttctgcatgtcttagattcacaggtagaacataccctccaattttttggacatctgtttctcatttctgctgaataatatgacattctgatggagaaaaagacaaaggaggcattttttccctattgcttcctttttacttaatttaaattatattagttaaagcagtctctgtgtgtgtgtgtgtgtatgtgattcaaacttttaaatcatagataaaatggcaaaatataaagaccaagtttttctcaataaaatgttattgcaacaggttttaaaaacacacaaatttctggctggggcacagtggctcacacctgtaatcccagcactttgggaggctgaggtgggtggatcacctgaggtcaggagttcgagaccagcctggccaacatggtgaaaccttgtctctac

SEQ ID NO: 9771 - DNA, 648 bp, Homo sapiens
gctggagtgcagtgacgcgatctcggctcactgcaacctctgcctcctggattcaagcgattatcttacctcagccttctaagtagctgggattacaggcgtgcgccaccacacctggctaatttttgtactttagtagatacggggtttcaccatgttggtcaggctggtcttgaactcctgacctcatgatccgcccacctcggcctcctaaaatgctgggattacaggcgtgatcccacaattaccgtgcctggccacagtttttatattatcttgatttagggcatctatataaaacaaataattaaataaaatcagtattttaaggtaagaaccttacattttgtagtctcaactgactcatatatcctgttttcgtagtccctctttttatgattaatgttatcttttcattattttatagttttaagcctatcttgtctaacatttctttttcagatggccaagtgtgatggttgtaaacgacagggtaaactaagcgagtccattaagtggcgaggcaacattaaacatttctgtaacctattttgtgtcttggagttttgtcatcagcaaattatgaatgactgtcttccacaaaataaaggtaaaattaaacttagctaatgggatttttatgtcagt

SEQ ID NO: 9772 - DNA, 605 bp, Homo sapiens
caaagacagtgattacattgacataacaaatgtccattggggcaggcaaatttctactgagtctaaaaagcattccaaattctaggagcaaaagttctgattttccttaaaatctttgcaaataaacagcaaagggtattctggatgtcttgtcaatgcaaattaggtttgatttagagaagttttaaatttaatcgcaatgaaaagattagttaatacatgaatctttttatgagaaaaaaatcattattctggataaagtcataattgtttgtttacaatattaagagcagacacctaaacatacaataataccaaagtattgagaaaattaccactggaacaccatctcaagttatcacaccatttacctctttagagccagttttgtataagtagttagaagtggttttggtttttttgctaaaattttactttgttttagtaatatctagggaatacttttaattccattaaaataccttcatagaaagtgttaatgtgtctaccatgccatatgtttatttttactttccccaagttaggtagatagagcaagtcctgctaccataagtttaaaattattaagacaacgggctttttta

SEQ ID NO: 9773 - DNA, 82 bp, Homo sapiens
ctgttgtcatggcggaggtggacggcacctgctactgagccgcccgcctgtccccacccctgaataaactccatgctccccc

SEQ ID NO: 9774 - DNA, 99 bp, Homo sapiens
gcaggataaagcatataacagcctctctatgcacactactatcctcaaggatatatctggaaggatacaagattattattcctctctcattctactggt

SEQ ID NO: 9775 - DNA, 516 bp, Homo sapiens
tacaacctctgtctcctgacttcaagcgattctcctgcctcagcctcctgagtagctgggattataggtgcgtaccaccactcctggctaattgttgtatttttagtggagacagggtttcaccatgttggtcaggctggtctcgaactcctgacctcatgatccacccgcctcggcctcccaaagtgttgggattataggcgtgagccaccacgcctggcctagttttgtttattaactgctaggtatgtgagactgttatatttttcaatatgctggttgcaatctaccgaattgattttatggccctctaattggtcgcatcctacaatttaaaaactactaccctaaagaaattccagcacatggctacagggcattcttcagagtagcaaaaatctgaaaacaacccatctatccatcaatagatcgaataagcaaattatactatgttcataaaatggaatatgatattgtagtgaaaataaatgaactactaatatctgcattaatatg

SEQ ID NO: 9776 - DNA, 387 bp, Homo sapiens
ttcccggtgttttttgagtgttactcttcaaaatggttacaaaactgcaaatattatggtagaaatcacatttgtcctttttaaaaaaaataaatgtttttggcaacaaatcgacattttacattattcccatataagatgaaatttctaagccagaatttaccatgagaaaaaccttaaagaaatgggccgggcatgatggcttatgcctgcaatcccagcactttgggaggccgaggtgggtggatcacttgagttcaggagttcgagaccagcctggccagcatggggaatccccgtctctactaaaaatacaaaataaccaggcatggtagtgcatgcctgtaatctcagctactctggaggctctggagcgagagtctcttg

SEQ ID NO: 9777 - DNA, 584 bp, Homo sapiens
agagtttcacactttaagggcactgaagatatagaatccaaaacaaaggcgggaagatgaaatgtgcagggtgtgtgctcagtgtacatttcacagccctgaaacttctcaattaaacaacttcagtttcgggccgggagccgtggctcacacctgtattcccagcactttgggaggctgaggcgggcggatcacgaggtcaagaaaccaagaccttcctggccaacatggtgaaaccccatctctaccaaaaatacaaaaaattagccgggcgtggtggcacccgcctgaagtcccagctactctggaggctgaggcaggagaattgcttgaacccagaagtcagaggttgcagtgagccaagatcgcgtcgctacactccagcctggcgacagagcaagactccatctcaaacaaacaaacaaacaaacaaaaaaccaacttcagttccaccactctaaacatagcaaggggaaacttcagttccaccactctaaacatagcaaggggaaacagtaatgcctataaaactttgcttaaaggccaggcacagtggcttatgcctgtaatcccagcactttggg

SEQ ID NO: 9778 - DNA, 577 bp, Homo sapiens
actccacattgacctcaatcactcttacccttcacattgtgtttgctctttttgcctcccacgctttagtcacttctttctcactttcatttcttctttctagtcttcctttatccactcctaacactaatctcgtagctgtagacttatctttttcattgtcctcattttttaagcataggtgaaataccggaattgatatagatttaatttaattttatctcctatgttatgcattattgagaccagaaagtagataaatcaaattggtcatacccaatcctttcctacaagatagtaaatgttttgaagtcacagactattgccatctggaatagtccttctttgtaacccagtataatctccacaaaaatgttatttttaaaaaatccctccactctttaacattctgatgacctgtaagctttcaagaagtcttcagtgaaaacctgtctctactaaaaatacaaaaaattagccgggtgccgggtgtcgggcgcctgtaatcccagctactcaggaggctgaggcgggagaatggcgtgaacccgggaggcggagcttgcagtgagccgag

SEQ ID NO: 9779 - DNA, 627 bp, Homo sapiens
  misc_feature 487: n = A,T,C or G
tttgcacgtctgtatctctttctagacggtgaggctctccgggccaaggaaagtaattcatccatcctggcattgccagcatctaggaacctggaacagtgaaggaacacagcaaagtttgctaaagaaactaatgaggctcctaatgagactaagaatgaattaatgcctcgttttcaaaccatctgtgagctgggtcactatgaaggtggatgatcccatcagttccatgtttatgtttatcttgttctcaaactcggtttcctgttccccacccctcactgcatgctgtctctctcacatacacacacacacacacacacacacaattacacactcacacagacccactttcactcacactcacacacactctcacactcacacacacatacgctctctcacatacaacctcacacacacacacatacgctctcacacaatctcacacttacacacacatatgctccctcacacacacactctnatacacacacacagacccactttcacttacactcacacacactgtcatacacacacatatgcactcacacacacccactcatgctcacatacacacacacactctcacactcatactcacacacacatacacactatagt

SEQ ID NO: 9780 - DNA, 568 bp, Homo sapiens
agacgacagaagggtacggctgcgagaagacgacagaagggacaagggtccagaaatagtacttactggaattcttcatgataaatgtggtacgccaaatgcaggaggtaattcaaaaatgttctcaaaagtattgttgtaaatggagaatggatttcttcaactggtatgtcattattggctaaaataagaaaattggagaggatgcctgacatttgctagaaccttccattttatttgcgcctggtatacaattcgaagaactgaatatatgcgcttatttcaaaatgctctgaacgtgtgtataagcgtccaaccaaaaatttaaaactccgtgaaagccaggcacggtggctcacgcctgtaatcccacactttgggaggctgcagcagcaaattgcctgaggtcaggagtttgagaccagcctgggaaacatggcgaaaccctgtctctaccaaaaatacaaaaaattagcccaggtgtggtggcgggcacctgtaatctcagctgcttgggagactgaggcaggagaatcgctggaacccgtgaggtggtggctgcagtgag

SEQ ID NO: 9781 - DNA, 621 bp, Homo sapiens
ccaagtgggagcttcaagttagtcctgcctcatatctgccatttttcctaaatggcaatacttttatactaaatatataagcatatgaatccactacaatactgactgcatagtgaatttatatcttcttctcaatatttgtcatcaattagtgtagacagctagtgggcctgaaagtaccgagctaagcttttcttagtttgaatggcccttaccaatgagtttaactacatccagtttttgttattatgtaatgttacattgaaccattttaggttataatgatgaataaagatatgcaaatgatgatgttgaaagtgccacaaaagtacaccaaggaggccaggtgcagtggctcatgactataatcccagcactttgggaggctgaggcaggtgggtcacctgaggtcaggagtttgagatcagccgggccaacatggtgaaaccctgtctctattaaaaatacaaaaattagctgggcatggtggcatgtgcctgtaatcccaactgctcgggaggctgaggcacgagaatcacctgaacctgggaggcagaggttgcaatgagccgagattgtgccgctgcactctagcctgggcgacagagtgagactctgtct

SEQ ID NO: 9782 - DNA, 271 bp, Homo sapiens
gaggcggagtttgctgttaggcaagattctgccattgcactccagcctgggcaacagagcgagactccgtatcaaacacacaaacactccatgacatgcagtttacctatatatcaaacctgcacatgtagccctgaacttaaattttaaaaaaagaaagtaaccatttttttaaaagtttaatatttcatctttcaaatttcttgaatattcatgtatttatgtaatacatacattttataataaaaagtccttatagatagaatattta

SEQ ID NO: 9783 - DNA, 377 bp, Homo sapiens
aacagccacactggaaaaaaatcttgccatgtatacaagtctattgcacatgaaagtctactgtaaatccacatttgagtggtaaacaataatgcttatagaggaaaatgtagaagaatagcatcatgaccttgggacaggcaaagtcttcttaaactagacacagaaagtaccaatcacaaaaggaaaacaccggataactgaactacattaaaattacgaagctctgcccatcaaaagatataattcagaaagtgaaaggacaagccagcatttacagtacatatacccaaaaaagtgcccatatctgtattatataaagaactattttgaggctgggcatggtggctcatgcctgtaatcccagctctatggga

SEQ ID NO: 9784 - DNA, 456 bp, Homo sapiens
tatgtgaagttcttgttaagatcttttgccatttttctactgcattcttccttgttttccacatggattttttttaactttattacattaaaacaattaaccctcagccttcatgaactaacttttttcaggtcaactagtatcttagttcatgttctgctgctttaacagaataccagatgctaggtaatttacaataaacaaatttatttgtttcatggttctggaggctgggaagtccaagattgagaggctgcatctggtgagggccttcttgatgcatcatctcatgatggaagggcagaagggtaagacagcacacacatgagagaaagagaagggggcaaacttaccttttgccaggaacccacacccctgataagagcattgatccattcttaagggcagagccctcatgacataatcaccctcttaaaggtcccacctctcaacatt

SEQ ID NO: 9785 - DNA, 447 bp, Homo sapiens
actattcatctctgaagcaagagagaagaaactgaaacgccttggccagaagcaaagagagactcaaagcataatgagatactgctatggtttggacgtatgtcttcctccaaaattcacgcgctggaaattaacctccaaggtgatgtaatgtattaagaagcaagacccttgttaggtaataggccatgggggcgccaccatcattaatgggattaacggctttataaaagaggcttcaggccaggcacagtggctcacgactgtaatcccagcactctgggaggctgaggtgggcagattacctgaggtcaggagttcgagaccaacctcaccaatatggagaaaccccatctctactaaaaaaatacaaaattagctgggtatggtggtgggtgcctgtaatcccagctacttgggaggctgaggcaggagaatcacttcaac

SEQ ID NO: 9786 - DNA, 397 bp, Homo sapiens
catgaggaaggaaaggaataagatcaggtcaagatgagaaagtgtaatgagaaaatgccattaaaacaagaagaaattcaggtaatcattcagtattgcctattaagggtattaataggctgggcatagtactcatgcgtataatcccagcactttgagagacagaggccggtggatcacctgaggtcaggagttcaagaccagcttggccaacagggtgaaatcccatctctactaaaaatacaaaaattagctgggcgtggcggcactcacctataatcccagctacttgggaggctggagaattgcttgaacctggaaagcggaggttgcagtgagccgagatcgcaccactgcactccagtctgggtggtagactaagactcagtctcacaaa

SEQ ID NO: 9787 - DNA, 507 bp, Homo sapiens
caactcaaatgaataggctattgagcatccatgtggaggccttataagaagtcgtgatgcattaaaattgttttcagattataactagtggcaatttggaaagtggataggaactaggaggagttgatggaggaaaaaccagacaaaaggccgtttcactagtcccactagacatttggaaggcttgaaatgaagtagtgacaataaggatagagagagggactagatatgcaaattagtcttataaaaattgacttgatttggtgctttgtgagatgtaaatattgaggctgacctaaaagttgaagaaaatattgacatgtctagtatgagtgactaggtgaatggtgatgtcttttaccaaaagaaaaatttctagggtgggataggtgggttcatgagcaggatgataaattcagtgtaaaaaaatacttatttttaacaaataagccataattctggtacaaaattttaaaagtatagaagaatatatggtgaaaagtaagt

SEQ ID NO: 9788 - DNA, 589 bp, Homo sapiens
tcaagattaagctagtatggcctcagatgagaagacacatggaaacttgagaaataaaagggaaagttaatgaaagatgttagtgaaatttcattcaccagcagtaatgggtgttcatgcatgttcctaagacattacaaaagttaaaatttaaactcatatgttaattcatagagaacttgatggcaaatttaagtcttcatagcaaatttaaatattaggaaaacatgagggtatgtgtgaaggttaacagagagtatgagagaaaaaaacactgattacaaacaaatatcagcaatatagcgaggtctcattacatgtaaactagtacatgcaaagaagtataaattgttgaattgtatagctggaaatgtcctctaacgcttccctcaggtagtaatttaggtagcgacataagggattatttaacccgatcacgatcactgaagaccctgtatcaggctaaatggagtaaagatgagggctagctctataattttggattttgaaagtccatgctccttatcccttttaagatttggataagaaacagcaaaactgaaaatcggtccatctatttactctccat

SEQ ID NO: 9789 - DNA, 217 bp, Homo sapiens
taccctatgctctttgactttttggttgttacagataaaaagagattactctgctgagagtactaattttacttaaaggtccttttggtttgcatattaaatatgtcattcagtctctcccgagttaaatagagtgtgccctcctgttactttgaagttaaatgaagttattttctgttttggtgcataagtaaatataatcataacttactttctt

SEQ ID NO: 9790 - DNA, 126 bp, Homo sapiens
ggaggcttcatggacaagtaggagtttaaacagaagaaagacaaggaaagattatttcaggaagtggtgggagtaattttagcataaagttggtaatgtcagaaaagtttgtgatcgctttttctt

SEQ ID NO: 9791 - DNA, 469 bp, Homo sapiens
cagtcctgtagctcatttagagaaaaatgccaaaaagatgaaatctgaggccctgtgaaagagagggcccacggcgtggcttacggtccctccataaatgtcagcaaagtgacacctgagatgtaagtgctccttcccctctctccatcataaaaaaaatatgggtgcaggccaggagcgatggctcacgcctgtagtcccagcactttgggaggctgaggcaggcagatcacctgaggtcaggagttcaagaccagcctggccaacatggtgaaaccttgtctctattaaaaatacaaaaattagttgggcatggtgacaggcgcctgtaatcccagctactccactcaggaggctgaggcaggagcatcgcttgaacccaggaggcagaggttgcagtgagctgagatcggaccactgaactccagcctgggcaacttgtggctcatgccacaccagccgtcccaaa

SEQ ID NO: 9792 - DNA, 347 bp, Homo sapiens
cgtttctttaattctcccaataactctgtaaacgaggtactatgattatcccattttcagactgaagcacaaaactggggcacagggtcacttgcgcaggcttacacagttagtaagtggcagaggcaagattcaaacccagaccacatgacttcagagccaaagcacgtaattgtggtgcaataccacctctctagttctggaattggcactagctgcttaaattggtgggaggtgggggtggttacagttttctaatgaattaagaatttgagatattggagaacatttccagccctaacactaaaaatgtcatgaaagccatgaccttacagacaatctcctct

SEQ ID NO: 9793 - DNA, 479 bp, Homo sapiens
taattgactttatagcagtagaaataatgaaagatacatttgctttcccataaaaatgtgattttagtggagaataacgttcctgaagggatgagttcccaaatgttattaatcaatatattatagcaatgagcataattaacaaaacaaattatattcctcagtattgttcatcacaaacctatctaaattatatatcaaataatcagcaagttaatacagaaatgaatagcatatataacatttatttacttttacttagactccagggagagggaatgtgctcagttgggaaagggttgaaggagggacatgagaagaaatgagttggacataagaaatttagaggccgggcgcagtggctcatgcctgtaatcccagcactttgggaggctgaggcgggtggatcacctgaggtcaggagtttgagaccagcctgaccaacatggagaaaccctgtctctactaaaaatacaaaa

SEQ ID NO: 9794 - DNA, 103 bp, Homo sapiens
attacacagtttgtagtattttgttataggagcacaaatggactaagacaatcctcataataaccgtctgtagcaagtttcattgttgtccgcgtttgaaatg

SEQ ID NO: 9795 - DNA, 625 bp, Homo sapiens
gaattcggcacgagccgcttctatgattcgtggaagtcggtgctgaggggccaggtttgcatcgtgctggtcaccgaactcatgacctcgggcacgctcaagacgtacctgaggcggttccgggagatgaagccgcgggtccttcagcgctggagccgccaaatcctgcggggacttcatttcctacactcccgggttcctcccatcttccccatcacttctcccccatgtcatcccagcccctccccattctcccccatttcttcccaggtctcctcaaatccctctccacaccccaccagctctccacttccattctcctccagcacacccgagtttccggtcccactctctcagtgtccctggagttctctccccacgacttctccacctacgttctctcccacttgttctcaggtcactcttagttcccctttctttcctccgtgcccctccacttcttccttcccctccaccacagcagcccccaacccctgagccatcccagcccagtgtggatgaactactcctacagcagcctgtgtttgagcagcgaggagtcagaaagcagtggggaagatgaggagttctgggctgagctgcagagtcttcggcagaagcactt

SEQ ID NO: 9796 - DNA, 58 bp, Homo sapiens
tctgcccagcactcaatatgagtaccagttctccatgtgctgctgagcttactgcatt

SEQ ID NO: 9797 - DNA, 583 bp, Homo sapiens
ggcacgagccccgcctcgggcaccgggaaactgaggctcgggcggcctgagacgccgtcaaggtcatgtaggtggtgggggcttgcatcttcgcctcccgactccatccagttcgtgtttgctgtgaagacggtaccgggtcaggggtggtgagagcgggcgggcaggtggacaggaaccccgtgcccttccctgtctgctgaacggaatgcgtggacctccgggggagcccagagtgcctcccttcacaccagtgagacgcaatttggggtcagcactcagggcaccggtggcctccagagggccggtcgatcttcgctttaactccagggtggtttccttgacgttgtcggcagtagataagaaggcctcttctgagctggtgaatctttaacctacctgaatctttaacctgcctgcggaacgacctgctcgcagactctaggccgcagaggccggccccagcgctctctcggagcacagcctgggtggttacggcgtgtgagattggggctggacagccgtgcgcacctagagtgttaaataaccattccgacggcacctcctggcactccctttcagt

SEQ ID NO: 9798 - DNA, 64 bp, Homo sapiens
atggctgcttcagggcagctgtcttttatggtcgcagctgtggggatgaaataagccccagttt

SEQ ID NO: 9799 - DNA, 469 bp, Homo sapiens
cccagagtgctgggattacaggtcttgctcttctttaagttgtgccagatatgatatgactgcatagtgttttcgtaagaataccattgggaaaatgagaagttttactgggctagttcttccatgatttgaggatgatattcagattataagataccctttgtctttcttacagtaatgaagtataagctccatatctgttccagagactttaacttgacttgcttcattcacaaagaacagagttcaagaagcagtgcatcctgtgagaagtgtgaagtgtttgtacatcactttaaatatattacttaatatattctaagttgctgtgtggagcagtatactgttgttttaaaaatgcaagattcagacaaattttaatattatctcattaaaataatttaaataatggtataaaatatctatatcattaaaataattttccatagtgtttagaaaccatgaaaaa

SEQ ID NO: 9800 - DNA, 654 bp, Homo sapiens
catggcgctggccaccgcctcgcctgtgggaggaaagcaggtgtgagggcccatcaggaggccatgccaacctctccccacagggctcacgagtcccgccccctccactcatttcccattcattttactccttattccttctacatttttaaacttcgaatttcagtgtaaagtgcagggaactgcctgcatcataagcttgatggactttcacaaaaggaacacacctgttttatggtacccaggccaggagacaggacattgctaatcccctgtagggtccctgggcccctcccagtctctaaccacaccacgctaaccactatcctgacttctaacatggactggttgtgcctggtttgtgtatgtggtaagatggaattctacagtatgtactcatttgcacctggcttctgtcacttcatactatgtgagagtcatccaggtggctgtgtggggagtagtctggtctgtctcatcgctgtatggtatttgttgtgtgactatgccgcaatctattcatcgtttctgttcttttagagacagggtcttgctctgtcacccaggctggagtgcagtggtgcagtcatggctcactacagcctcgacctcctaggctcaagtgatcctaggcatgcgctagcatgcctggct

SEQ ID NO: 9801 - DNA, 390 bp, Homo sapiens
  misc_feature 9, 10, 11, 12, 13, 14, 15, 16, 17, 18, 19, 20, 21, 22, 23,24, 25, 26, 27, 28, 29, 30, 31, 32, 33, 34, 35, 36, 37,38, 39, 40, 41, 42, 43, 44, 45, 46, 47, 48, 49, 50, 51,52, 53, 54, 55, 56, 57, 58, 59, 60, 61, 62, 63, 64, 65,66: n = A,T,C or G
  misc_feature 67, 68, 69, 70, 71, 72, 73, 74, 75, 76, 77, 78, 79, 80, 81,82, 83, 84, 85, 86, 87, 88, 89, 90, 91, 92, 93, 94, 95,96, 97, 98, 99, 100, 101, 102, 103, 104, 105, 106, 107,108, 109, 110, 111, 112, 113, 114, 115, 116, 117, 118, 119: n = A,T,C or G
  misc_feature 120, 121, 122, 123, 285, 286, 287, 288, 289, 290, 291, 292,293, 294, 295, 296, 297, 298, 299, 323, 324, 325, 326, 327,328, 329, 330, 331, 332, 333, 334, 335: n = A,T,C or G
ggcacgagnnnnnnnnnnnnnnnnnnnnnnnnnnnnnnnnnnnnnnnnnnnnnnnnnnnnnnnnnnnnnnnnnnnnnnnnnnnnnnnnnnnnnnnnnnnnnnnnnnnnnnnnnnnnnnnnnnnactgtgtgtgtgtctgttttctctctctctcttctcagtcacactttttttttgggacacaccctccatccgcgggggggtttttttcccggcgcgcgccctttttttttgtgtgtttctctgcgcgcctctcttttttctctctcttccccccccgcttannnnnnnnnnnnnnngcggggggggttttcgcgcgttcnnnnnnnnnnnnnctcttccgcccccccacaggggggtgctgtttattatctttctttctccctgagc

SEQ ID NO: 9802 - DNA, 369 bp, Homo sapiens
  misc_feature 345, 354: n = A,T,C or G
ggcacgaggcggtaccccgcatctcgctctggccgccccagaggttcgcggcttctggacctgctgtgcccctctccagcctggatcaggacggagaacacccccgaaacccacctcaccagcacagccggcggacccttccggaggtggccgcagagactagccaacttgcgcgcccgccgacccggaccacagctcccagcacacctcaagggcccacgcccgccaggactacaattcccggcgtcctccggaagctcaagtgtacccaggcgcggtgcctgctgggaattgtagttgacgttggtcagcacggaagccacaggatcccagcccggcctttgntggactgangtggcgctgagtgga

SEQ ID NO: 9803 - DNA, 402 bp, Homo sapiens
  misc_feature 7, 8, 9, 10, 11, 12, 13, 14, 15, 16, 17, 18, 19, 20, 21,22, 23, 24, 25, 26, 27, 28, 29, 30, 31, 32, 33, 34, 35,36, 37, 38, 39, 40, 41, 42, 43, 44, 45, 46, 47, 48, 49,50, 51, 52, 53, 54, 55, 56, 57, 58, 59, 60, 61, 62, 63,64, 65: n = A,T,C or G
  misc_feature 66, 67, 68, 69, 70, 71, 72, 73, 74, 75, 76, 77, 78, 79, 80,81, 82, 83, 84, 85, 86, 87, 88, 89, 90, 91, 92, 93, 94,95, 96, 97, 98, 99, 100, 101, 102, 103, 104, 105, 106, 107,108, 109, 110, 111, 112, 113, 114, 115, 116, 117, 118: n = A,T,C or G
  misc_feature 119, 120, 121, 122, 123, 124, 125, 126, 127, 128, 129, 130,131, 132, 133, 134, 135, 136, 137, 138, 139, 140, 141, 142,143, 144, 145, 146, 147, 148, 149, 150, 151, 152: n = A,T,C or G
ggcacgnnnnnnnnnnnnnnnnnnnnnnnnnnnnnnnnnnnnnnnnnnnnnnnnnnnnnnnnnnnnnnnnnnnnnnnnnnnnnnnnnnnnnnnnnnnnnnnnnnnnnnnnnnnnnnnnnnnnnnnnnnnnnnnnnnnnnnnnnnnnnnnnnncccctccttttttaggcctgaatacaaagtagaagatcactttccttcactgtgctgagaatttctagatactacagttcttactcctctcttccctttgttattcagtgtgaccaggatggcgggaggggatctgtgtcactgtaggtactgtgcccaggaaggctgggtgaagtgaccatctaaattgcaggatggtgaaattatccccatctgtcctaatgggcttacctcctctttgccttttgaa

SEQ ID NO: 9804 - DNA, 369 bp, Homo sapiens
aaaaacagcgttcagacccatatgtaaaggcctatttgctaccagacaaaggcaaaatgggcaagaagaaaacactcgtagtgaagaaaaccttgaatcctgtgtataacgaaatactgcggtataaaattgaaaaacaaatcttaaagacacagaaattgaacctgtccatttggcatcgggatacatttaagcgcaatagtttcctaggggaggtggaacttgatttggaaacatgggactgggataacaaacagaataaacaattgagatggtaccctctgaagcggaagacagcaccagttgcccttgaagcagaaaacagaggtgaaatgaaactagctcttcagtatgtgccagagcaagccc

SEQ ID NO: 9805 - DNA, 420 bp, Homo sapiens
ggcacgagcagctctccctccatcttcattcataggtctgcgctggggccgggacgaagcacttggtaacaggcacatcttcctcccgagtgactgcctcctaggaggacatttaggggagggcagaggcctgcagtttggcttcacggctggctatgtggacagcaagagtcgttttcgcggaagccgactggcagccaggcctgtcgggccccccgacgccgccccatttcccttccagcaaactcaactcggcaatccaagcacctagataccagcacaagtcggttaatccctgtctggactgagcctccgttggcttctgaactggaattctgcagctaacccttccacgactagaaccttaggcattggggagttttagatggactaattttattaaaggattgtttttttttt

SEQ ID NO: 9806 - DNA, 385 bp, Homo sapiens
atcgattcgtccgtgtcggggtacacccagcactttgcgacctgcggcccaacaagcgcggaggatggcggggaggaagccagcagcccctgtgtttactgtcgtcagaaaggtcttgtgttttggttttggggtttttgttttgtttgtgttttgtttggcttgtttgttttttaaggggaaaaaagtttgtaattatttcatccaaatctcccgttatatatctgtgaataataagagattttataatagctagaaaatgatgtatattttagtttgttgacaaataagtcatcatgatcacgaaggacactgagaaaaaataatttagaaccctggtttttgtgaatttttttggtttggggttcttttgtttgagaattgg

SEQ ID NO: 9807 - DNA, 402 bp, Homo sapiens
ggcacgaggagagagagagagagttatgatatagagagagagagagagagagagagagagagagagagagagagagagagagagagagagagagatagagagagagagagagagagagagagagagagagagagagacagagagagagagagagagagagagagagagagactttttttttttctttcttcttttcctccagctcaaggacattctctccctgttctacagctactgtttctctggactcttctcatctcctccccgcgttctttttttctccatggcggccccttcccctcctctttgatctttccttgcctggacctctcccacgacccgcttccttttctctccctattccttctccatccgccttttcctttcccttccttgtgtggg

SEQ ID NO: 9808 - DNA, 91 bp, Homo sapiens
gagcgggacgagaaccaccccaacctcatccgtgtcaacgccaccaaggcctacgagatggccctcaagaagtaccatggctggatcgtgc

SEQ ID NO: 9809 - DNA, 409 bp, Homo sapiens
ctggcaggctgtagccgagcgcgggcaggactcgtcccggcagggttccagagccatgggagcggaaaggaggctgctgtcgattaaggaggcctttcggctggcgcagcagccgcaccagaaccaggcgaagctggtggtggcgctgagccgcacctaccgcacgatggatgataagacagtttttcatgaggagttcattcattaccttaaatatgttatggtggtctataaacgtgaaccagctgtggagagggtaatagaatttgcagcaaagtttgttacctcatttcaccaatcagatatggaagatgatgaggaagaggaagatggtggccttttaaattatttgtttacttttctcttaaagtctcatgaagcaaacagcaatgcagtgagatttagagtg

SEQ ID NO: 9810 - DNA, 195 bp, Homo sapiens
ggcacgaggctatgcaagcagttctcattcttaatatcagctgagattggacaaactggcaactcttgcagatacttttatcatgtgtatgttagtgggactgttgatgtttagctgatttactcatactattgttgcttctcattgatggaagaatttttttttttagtgcattatcccggtcaatgtttgttt

SEQ ID NO: 9811 - DNA, 515 bp, Homo sapiens
ggcacgagaaaccacgtttctttgttgagctgtgtcttgaaggcaaaagaaaaaaaatttctacagtagtctttcttgtttctagttgagctgcgtgcgtgaatgcttattttcttttgtttatgataatttcacttaactttaaagacatatttgcacaaaacctttgtttaaagatctgcaatattatatatataaatatatataagataagagaaactgtatgtgcgagggcaggagtatttttgtattagaagaggcctattaaaaaaaaaagttgttttctgaactagaagaggaaaaaaatggcaatttttgagtgccaagtcagaaagtgtgtattaccttgtaaagaaaaaaattacaaagcaggggtttagagttatttatataaatgttgagattttgcactattttttaatataaatatgtcagtgcttgcttgatggaaacttctcttgtgtctgttgagactttaagggagaaatgtcggaatttcagagtcgcctgacggc

SEQ ID NO: 9812 - DNA, 602 bp, Homo sapiens
ggcacgagattgggctggaacaggatgactgctgtggctgctgtggccatgaaaactgtggcaaacgatgtgcgatgctttcttctgtattggctgctctcattggaattgcaggatctggctactgtgtcattgtggcagcccttggcttagcagaaggaccactatgtcttgattccctcggccagtggaactacacctttgccagcaccgagggccagtaccttctggatacctccacatggtccgagtgcactgaacccaagcacattgtggaatggaatgtatctctgttttctatcctcttggctcttggtggaattgaattcatcttgtgtcttattcaagtaataaatggagtgcttggaggcatatgtggcttttgctgctctcaccaacagcaatatgactgctaaaagaaccaacccaggacagagccacaatcttcctctatttcattgtaatttatatatttcacttgtattcatttgtaaaactttgtattagtgtaacatactccccacagtctacttttacaaacgcctgtaaagactggcatcttcacaggatgtcagtgtttaaatttagtaaacttctttttt

SEQ ID NO: 9813 - DNA, 158 bp, Homo sapiens
ggcacgaggagagagagagagagagagagagagagagagagagagagagagagagagagagagagagagagagagagagagagagagagagagagagagagcgcgcgtctgtggctctctctctctctctactctctctgtgtgtgtgctctcctctc

SEQ ID NO: 9814 - DNA, 553 bp, Homo sapiens
ggcacgagggcaagagattctccactgctatgggcctcacaagagccggatgggggttgccgaaaggcagcagaagctgaggtctcagtatttctttgactgcgcctgtccagcttgtcaaactgaggcacacaggatggctgcagggcccaggtgggaagcattctgttgcaacagttgcggagcgcccatgcagggagatgacgtgctgcgctgtggcagcagatcttgtgcagaatccgccgtcagcagggaccacctggtctctcggttacaggacctacagcagcaggtcagagtggcccagaagcttctcagagatggtgaactagagcgagctgttcagcggctgtcggggtgccagcgtgacgccgagagcttcctgtgggcagagcacgccgtggtgggagagatcgcggatggcctggcccgggcctgtgctgccttaggagactggcaaaagtcagccacccatctacagaggagtctctgcgtggtggaggttcgccacgggccgtccagtgttgaaatgggccatgagctcttcaattgg

SEQ ID NO: 9815 - DNA, 394 bp, Homo sapiens
  misc_feature 394: n = A,T,C or G
ggcacgaggttgcttttaagccaagtacatctagtttccctattaaaaatgtgtctgaatagcgattttgctttgccaccaaaaggcttttccctgagaacagtgaaggatgtatgtcattttgtggtggttgtatgtgtccttacatagaccttaaaaagagctcacccttccaggccaatgctgaagacacagctccgcttgggagcctgagaacccaggcttcccaggccagagtgtggcttcttaaacggcaaaggaaattcctttgagtcacaagccaagttttcgccctgtctcctgagaccatttccctacgctttgctgctgctgagagttacgtgaggcacttgttaaaaattcagcctcccaggtccctcccctcggagaggcn

SEQ ID NO: 9816 - DNA, 567 bp, Homo sapiens
  misc_feature 384, 476, 511, 514, 567: n = A,T,C or G
tcacacctgtaatcccagcactttgggaggccatggaaggtagatcacaaggtcaggagattgagaccatcctggccaacatggtgaaaactcgtctctactaaaaatacaaagattagccagacatggtggtaggcacttgtagtcccagctactcacgtggctgaggcaggagaatcacttgaacccaggagacagaggttgcagtgagccgatgttgcaccactgcactccagtctgggtgacagaggaagactccatctcaaaaaaaaaaagaaagaaagggacaggtattttgatcaaattaccacatgtgggaaaccggaaaaggagggcccaataaattaaatgaatagaacttctaacagggaggccggggaattngtgccttagctcagacactccatgggacactctgagtcttctgcaaaacagggacagcaatttgggtaaaaacaaacctttgcaggtgcggnggtgctcatgcctgtatcccacatttggaggctgngcngtggatatgagttcagagtcagacaccctgcccgatgtgaaccctgcttctan

SEQ ID NO: 9817 - DNA, 489 bp, Homo sapiens
  misc_feature 328: n = A,T,C or G
cgcccaggctggagtgcaatggcgcgatctcggctcactgcaagctccacctcccgggttcacgccattctcccacctcagcctcccgagtagctgggactacaggcacctgccaccacacccggctaatttttttgtattttttattagagaaggagtttcaccgtgttagccaggatggtcttgatattctgacctcatgatctgcctgcctcggcctcccaaagtgctgggattacaggcatgagccaccacgcccggcaattccttttatcttctaagaacctgactaaacacctcctccctttgagccctccatgtattgagnctatattatctctatttttccatggtttagcttagagctactgacattttactccatgagacaaacatttggcactggctggatattacttatctataggagaatacgctctaggagctggccacactacagtacttattgttctgatatgcaccctggcg

SEQ ID NO: 9818 - DNA, 572 bp, Homo sapiens
  misc_feature 522: n = A,T,C or G
ctgccaccacgcccagctaattttttgtatttttagtagagacggggtttccccgtgttagccaggatggtcccgatctcctgacctcgtgatctgcccgcctcagcatcccaaaggcttgggattacaggcgtgagccactgcgcccaggctttatttatttatttatttatttagagacacagtgtcactctgttgcccaggctggagtgcaatggtgtgacatagctcactgtagactcgaactccttggctcaagccagcctcccactttggcctcccaaagtgctgcgactgcagatgtaagccaccataacccacctctgttgttgttgtaaaggtaaaatttcagatctggcatggtggcttatatctgtaatcccagcactttgggagccaggtaggaggattgctgagcccggagtcaagaccagctggcaaatgcaagatcttgttacaaagcaaacaacaaaaaatttccaagccagcatgtggtccgcctgtatctacactttggagtanggggcagaaacctagtcagatttagatcgctaaccaatgtggaactgctt

SEQ ID NO: 9819 - DNA, 523 bp, Homo sapiens
taaggggtgagcccaagagcatcaaggctcccatcaacagccagtcctgtgagtgaggccatcttggacctgccagctcagtaaacccttttgctgaacacagcccaaggaaggaacccttgcaaaatgaaatcgtgtggtcagtttgcggggtggttattacacagcagtagatgattgaaaaggcccagtgtcttcctggggactgaaacacccacctcctgttcatgttgatacacggtgagcagcatatggatgtgggagtggtgttggttgcaggtgaggtagagaagcagtgaacagagcacgaagacctgatgttccagggtcgggagtttagacttgatcctaacagcggccataggcggatttaggcaagagagtaacgtggtcagattttcattttagaaagttactctgacatccatgtggaaaatgaacttgaaggtcacaaggctgatggagccaggaggaccatttgggaggtgattgtagtaatctacttacgagttcattacgagct

SEQ ID NO: 9820 - DNA, 229 bp, Homo sapiens
attttagaaaaaattatctatctatctatctatctatctatctatctatctatctatctaatatatatttaacctaaatagtacatactttcccccaacctttctgtatctccagagcaatagaagagatgtagtggaatcgaccagttgcctagcaacctgaaattagtgagacatcccccctttcactgatttgattttaaatcatgcttttctttctttttttttt

SEQ ID NO: 9821 - DNA, 581 bp, Homo sapiens
ttttgtcgaggatttctgcttgtttgttttgagacggaatctcgctctgtcacccaggctggagtgcagtggcacgactgaggctcactgcaacctccgcctcccaggttcaagtgattctcctgcctcagcctcccgagtagctgtgaccacaggcatgcaccaccacacccggctaatttttgtaattttagtagagatggggtttcaccatgttggacaagctggtctcatactcccaccctcggggatccaccccccttggcttctcacagtgctatgatttctcgtgtgagccatcacaacccacctggctcaacgggtaatatcctgtccctgtctgaatttgcaaaatagcccccgcggggctcttcaccctttaagcacctattcctcccggtttaggcctagaaatatttcaaacgcgtgatgttattcatcttacatgatcccccacatgccttcatcggtgggcaaagaaactttttacgcaaaacaaaaaataaatttgtgcggttttctaacccccacccacgggggaaacctttttcataaattataataaccggtgggtgcctcag

SEQ ID NO: 9822 - DNA, 503 bp, Homo sapiens
agaacaagtttaaagtttgtgggttttgaaaatactaccatggttggatgctttggttttgtgtcagcctgttcttaacctgtagtgtttaccatttaccttcccgtcaaatgtaaagggaaccttataaaacattatagacacgtatttggggtgtaccgtagagggagctgctactttggaaaggactaaatgtctttagttaaatcttataattagcttatagttttattaatttagaagtttagaattttataagttttagcataaacttgaatacagcaattttaatataaaagtattaatttgtaatttaagaacttggccgggcacggtggcttacacctgtaatcccagcactttgggaggctcaggtgggtggatcatgaggtcaggagttcaagaccagcctggccaaaatggtgaagcctcatatctactaaaaatacaaaaattggctgggcgtgcgccaccacgccgggctggtttttgtattttttgta

SEQ ID NO: 9823 - DNA, 397 bp, Homo sapiens
ccatatctccctaaagcacgaaatcctgctgaacccgcgctagttctgcccccacttgctcaacacggtgaaccagatgctcttcaccgaggtggaggggacctgcacaggtaagtatggctttgtaattgctgtcaccaccattgacaatattggtgctggtgtgatccagccaggccgaggctttgtcctttatccagttaagtacaaggccattgttttccggccatttaaaggggaggtcgtggatgctgttgtcactcaggtcaacaaggttggactcttcacagaaattgggcccatgtcttgcttcatctctcgacattccatcccttcagagatggagtttgatcctaactccaacccaccatgttacaagacaatggatgaggatatt

SEQ ID NO: 9824 - DNA, 218 bp, Homo sapiens
gaccacgccattgcactccaggctgctgggcaacaagagcaaaactccatctcaaaaaatagccgggcatggtggcgggcacctgtagtcccagctgctcaggagactgaggcaggagaatcgcttggaccggggactcggaggttgcagtgagctgagaccacgccattgcactccaggctgctgggcaacaagagcaaaactccatctcaaaaaag

SEQ ID NO: 9825 - DNA, 587 bp, Homo sapiens
cttgccattggtaccacctaacaaattggaggaaatgaaaagacgaatcaacaacattttggagaaaaaatttattctacttctagaatttcattactacaagtgcttagttcttggtttggtagatgaagtgaaatcaaaattggatatttggaacattaaatatgggagcagagaatctgtggaattattgctggaagactggcataaatttattgaagaaaaagaattcctagctcgacttgatacttcttttcaaaaatgtggagaaatttataagaatttggctggagaatgtcagaatattaataaacagtatatgatggtgaaatctgatgtttgtatgtatagaaaaaatacatataatgtgaagtccactctacaaaaagtgctggcatgttgggctacttatgtggaaaaccttcgcttactaagggcttgctttgaggagacaaagaaggaagaaattaaagaggtaccctttgagacactagcccagtggaatctagaacacgctactttaaatgaagcaggaaatttcttagtcgaagtcagcaatgatgtggttggatcatctatttctaaag

SEQ ID NO: 9826 - DNA, 511 bp, Homo sapiens
gtctttaaaggagtggctcatctttcctctccctggggcattttggtgtgggagactacaggggatgaggttaaaaagcttggtcggcaggtagaggatggggagagaggttagggccctgggaaaggtgggagatcagccagagacaggtttcccagaacagaatgtctggcctttgtggtgaggagggactgtggtatgagccgcagaagcgggccaggggtaaaccctcctgtgcgtccttccttcagcctggtcctgagggtgaccctttgatcctgggttctccaggtagggctgtgagctgtgagttggatccttttggtgaaatggtctctctcatctggcctgtcactcaatgtggaatagagtgagtgagttctatgggttctaagtcctgctctggaaccataagtaagttatcctctctgggcttcagtttttcatggaaagttgcgttaagaatctagtttaaggccaggcatggtggctcacgcctgtaatcccagca

SEQ ID NO: 9827 - DNA, 552 bp, Homo sapiens
ccctttccacatggtaagcactgagcccaatttcttctcaccccacagatggtccctcagagcagagatgtctaatgaaaggttcagattcagatcactaactttccatcttccactttttccagtggtggccatgttcccccgtttgccttcacaaaaaccttgtgaataatacaagccatatggactctgatttacagtttagaagatgagcagaggtgggtgtgagttgcccagtcatgttgctagttgttgaagaaactaggattgttctcaggtcttgggctcctggcccatagaccagtggctctgtgttctgatggggtattggggaggatttttacaaatgcaggttcctgagattgttcctggaacatctccgagtgggtgtgggttgtggccctgcgtgtgtgattttgcctatcccagctccggggtaccaccaaccactttttgtctctgtgggtttacctactctggatattttgtttaaatggaatcataccaggctgggcacagtggctcacgcctgtaatcctagcactttgggag

SEQ ID NO: 9828 - DNA, 396 bp, Homo sapiens
  misc_feature 68, 69, 70, 71, 75, 82, 89, 91, 92, 96, 101, 117, 130, 146,155, 160, 162, 165, 180, 185, 188, 194, 196, 200, 214, 215,224, 229, 233, 236, 238, 240, 245, 247, 249, 252, 257, 258,290, 299, 301, 303, 312, 316, 321, 322, 325, 330, 331: n = A,T,C or G
  misc_feature 333, 336, 350, 352, 359, 362, 365, 366, 367, 370, 381, 385,388, 390, 391: n = A,T,C or G
ggatacgcagacaattcctcaactgcagctccctatgggggagctctctaatcatctgatggtcatgnnnnttancgccttnacccttnanntgantcatnccttatgacatgactnctgccatttatcntgagatcttttatgtngcctttgcngaatncnttnttgctgaccctcctnattgnctntatgantngccntgtgggaacctatnntatgttatnaagtnactntgngnanagagncncngcnttatnnaagattgcctttgactcattgacccatttggnggaaaaagntnanctatttgcntggntaaannatnagctnntncgnatttttctgggccncnaacaacnaanaannnacngtcgtttttcnttgnccncnnggaaa

SEQ ID NO: 9829 - DNA, 402 bp, Homo sapiens
gtttttccatgtcgtcattgagtcattcaagttttatggctctggatatttgaaattattttggacacccaaatttggaatgtttctttctgaattgtgataacgccagaaaatttttgagatcagaaaagggcagtttatttgctttaaaataatacagcttttgtaggggactcgtgatacttgggcattatttcctctccacattaaaaggaaagcagtgggcaggaaagatgcatacagcacataacctcattacataatacaatgtttctttggaaccagtaggaatgagttgttctggaaaacaatttgtagaggttttatcacttttagctctttaagatttatcacttttaggccaggcgcagtggctcacgcctgtaatactggcctttggga

SEQ ID NO: 9830 - DNA, 631 bp, Homo sapiens
aaggagtgtggcttgaagtcttttgattctctttccaatgagatgtatataattatggaactgaaaactcacaactaaatggaagtcagaagtgatcatagagtgacagagtttgccaggggtgtttagagtcagtcctaggaggcaacctttaaacatctgtgagagtgcctagaaaacagggctcaattaaaggagactcaacaaagaaataaattacataatgaaatcccagttatttgcataaatttctatactaaatgatatacagaggtcccttacttaacctgtgatttaatgacctgaagtgtacctctctaacaaattaatctcgcataaggactgtttattattgtttgctacaaaataacttctaggcctgtaattccagcacttttggaggccgaggcgggcggatcacctgaggtcgggagtccaagaccagcctgaccaacatggagaaaccccatctctactaaaaaacaaaattagccgggcgtggtggtgcatgcctgtaatcccagctgctagagaggctgaggcaggagaattgcttgaacccaggaggtggaggttgtggtgagccgagatggcgccattgcactacagcctgggcaacaagagcaaaatt

SEQ ID NO: 9831 - DNA, 612 bp, Homo sapiens
tcaccttctgtctctccagtttgggggcagctgtttgacctgtgacttaacttctcttacagatctaagaaaagttgttgatttttcagtttgtttagctttttacttgctcttaagattgagtgacagatttttttttgcatttttttattgtgataaaatgtattaatacaaaacatttatcatttaagtgtacagttctgtggcattagatacattcacactgtgcaattaggactcttaaaaggaaaaagtcacatactgttagaagggtcatacaaggctttatagaaaggatttttaagatgagcttctatatatcaattaaaagaacatttcagtagaaacatgggcgtatggtatgataattaccagaagacaaatgcaaataagtgctgaacacaggaaaaaaataatcaacctctccaataatcagaaaaattgaagttaatcatcattaactgttgggggagtagctaccaaatttgataaaaactcaaaaattcgtaataattcagaaattgagaatagcggccgggcgtggtggctcacacctgtaattctagcactttgggaggctgaggcgggcagatcacgtgagctcagaagttc

SEQ ID NO: 9832 - DNA, 511 bp, Homo sapiens
tgcatccggaaggtggaggttgcagtgagctgaaatcacaccattgcactccagcctgggtgacagagtgagactctatctaaaaaaaaaaagaaaagaaaaagaaaatatcttttcctagtttattgtaaattattttattaaaagtggatggagaattaattgtatcatcagaaaaatatcttttaaaagaaaaggtatcacaggagccatccatctcagaaaagcaaggaaaaaaaatatgagactttcaatattaaaaatgaccaaatatttaaattggcttctctctctttcttttcattaactgacgcttaccattagaggagaggtgactctagggcctagcatattgctgaaaacacagaagggaataaataaattatgtatcgtcggaggttttttactggggagagagctgtaggtaattgttgcaccacacagatgctccctccaggactgaaggacttacccctccagctgctgggattatagttggctgacactctcc

SEQ ID NO: 9833 - DNA, 168 bp, Homo sapiens
aagacgacagaagggtacggctgcgagaagacgacagaagggatgtttttgtgttttatagttacagtaaacaatttgatgtcctacttttttttttttttttttttaaaagggattttttttttgtcccccgggcggattgggggatgggggggggcaattttgggt

SEQ ID NO: 9834 - DNA, 502 bp, Homo sapiens
ctgaatgggaaagaactcagagtctaacataagatctaaaaatcaacttaagtacttttataattctaccatatttttcttattttaggcaaaggaatttttgtccattcttcagctccagttttaaggagagtagtaggaactctgaagacagaggcagcagtaatcaggggagaacgatacaaagaaatgaagctcaaaaagacagcaccagagtcctctctggccagccgcaggcctggtctatgaaaaccctgagtggttttaggcatcatttcaccatcctaagattcaaaacaaatcaagcaatcaaaggcagggctgctaagtaagcagctgcacaagcagagcagtgggagaggtgaatgggaccagggcctcgctgctggggagaggaggaaggggtgggagactagatgggggtagcaaggggacccaagggaagtccaattaaaaagttttattggccaggcacagtggctcacacctgtaatcccagcat

SEQ ID NO: 9835 - DNA, 334 bp, Homo sapiens
ggcgtctacattcacggcggtcactccgtttctgtctccttttgtttggcacctgtcagtggatggaagatgaaagtttcaaagctcatggtaacagcagggttctctaccccaggggtttctacctgtgtctggcagtgccttaagaggatgatccagaggcttcggaggagggcgacgtgggaaggagcaggtagcccaagctcccatctcccacccaatcgttcgggcagcttggatccacgtaacatcttgtcattctaaatatgtcagatttaacttggaaaacaaaaaaaaaagaattccactcctaaaaaattttactaagaaatat

SEQ ID NO: 9836 - DNA, 423 bp, Homo sapiens
ggcacgagcaggcggcagaggttgcagtgagccaggatcgcgccactgcactccagcctcagcaatagagtgagactgtctcaaaaaaaaaaaaaaaaaaaacccgcccatttttaaaactccccggaaaaaattttttcagggcccctttttataaaaaaaaagggggtttttttttttgttttcccaaaaacccatttggggcagggtttgggggccggacttttttagggcccttaataatttgcttaaggatttgaaaaacggcataaccggggcattacccccttttggaaaaggggtaaaacctttttttttttagggccttttttttttaaaaaaggggtttaattttgccccctgggtaaaaaaccctgggaaaaacccgggtaaagggggggttaacccccggggcccaggggg

SEQ ID NO: 9837 - DNA, 561 bp, Homo sapiens
ggcacgagttcatttttaaaaagcttctccttattatgttgttgtttaacaacttaaacgctatctctagaccaggaataattatttgctatatattacagcaaaaaatatgtatgtataaatggactcattcaaaatatataaagaactcctattacaaagaaattgacaaacagcccagtatatcaatgaatataaaaatttgagaagatattttccataagaagatatctaaatgaacattaggcatgagaaaaccaaattttaggatatcactacacacctggcatagtttaaaagactgaaaatattaagtgtgtgggaatgtagagcaactggaaatggcctacatctttcatagaaatgtaaaacaatacaaatactttgcaaaactctgtccaacattttctacccattcaccaagcaactccatccctagctatagatacccaggaaaataagtatgtatcttcacagaaataattgtatgagaatattcatagttacttatgcacagtagttatcaagtaaacctgtctcccatcagaaaaatggatatca

SEQ ID NO: 9838 - DNA, 390 bp, Homo sapiens
cttattcccacctttctatcccatagaacactcttttttatcttccctgaaccatattgatgagataaatagggctgggggctgggccccgctggtcactcaacagagtatttcccttggccgagatggaagttttgtcccaatagatgagctgctgagtatcaacaaggtgacatttttctgctgcccatttgtgtcctggagacggtggtaccctgaaggcagaagccagctgccgcaagacagcaatgacagtccacctgccgacctgattcctgcatcatggaataaccacatggctaccttctatcctctgttcccaaatggtggtggcacttatcctgaagtcgtcaatgatttccctttgaaactactttattttactaattt

SEQ ID NO: 9839 - DNA, 596 bp, Homo sapiens
ggcacgagcaacaacaaaagtaagaggagcaaacaaaatgtatcaatttcagccgaggttttctagggcaaacactagaatattgtaccttttgctacctgataccttatcaatcaatatatattactgagcacttcgatgcaaggattccatcacctccccaacatgtgatatagaatagaagcaggtaaatgtttactaaatgaaggtacacagcgggcttttggagaggaaatagactctggcctccagccatggaataatttatactgtctcttgctaacatacctggagccgtttcctcattttgtgatccaaagagtaaacatgtaaaaccagccaatcttaggttatattcttgccatcctagagagtaagtgctccaggacatcagagtaagaagtctggaccaggggcaattctctttgtataatgtggattattgtttatgttcctatcttgtttccctgttagactgtgagctggagagtttgcacttttatgtgtcgttctaacactctcagtccttacagttcactgaacccagcagccagtcaaaaatctttgccactgttgaattgtaatgctgtacgttc

SEQ ID NO: 9840 - DNA, 68 bp, Homo sapiens
gatactttccctttcagtatcaataaatatagtatcagcctggcacagtggcttatgcctgtaatccc

SEQ ID NO: 9841 - DNA, 63 bp, Homo sapiens
atgtatctgatgcagctaatgtcatggtctatgtgggaattcccaaaggacagtgtgagcaag

SEQ ID NO: 9842 - DNA, 397 bp, Homo sapiens
ggcacgaggagagagagagagagagagagagagatatgagagagagagagagagagagagagagagagagagagagagagagagagagagagagagagagagagagagagagagagagagagagagcgcgcgcgcgcgctctctagagtgtgttttctctctcccgctcatttacgcccccccccgcggcgcacccccccccgggggggggggccctctctcttctctggggggagtttctgcgcacacacacgcgagagtctctgttttttttttgcacgcgctctcgcccctctgtctctctctcttttctctctctctcgcgcgcgtgggagactctctttgcgcgccccttttctcatgtgtctatgtgtttgcgcgctatattatagagctc

SEQ ID NO: 9843 - DNA, 611 bp, Homo sapiens
ggcacgagcttcctctacagctacagcttccacacagacgcagcattcgggaatgtccccgtcacctagcaacagttatgatacttccccacagccttgcactaccaatcaaaatgggagggagaataatgagcgattatctacatccaatggaaagatgtcaccaactcgctaccatgcaaacagcatgggtcagaggtcatacagttttgaagcctcagaagaggacctagatgtagatgataaagtggaagaattaatgaggagggacagcagtgtgataaaagaggaaatcaaagcctttcttgccaatcggaggatttcccaagcagttgttgcacaggtaacaggtatcagtcagagccggatctctcattggctgttgcagcagggatcagacctgagtgaacagaagaaaagagcattttaccgatggtatcaacttgagaagacaaaccctggcgctacactaagtatgagaccagcccccattccaatagaggaccctgaatggagacaaacgcctcccccagtctctgccacatctggtactttccgactgcgacgagggagtcgatttacctggagaaaggagtgcctggctgttatgg

SEQ ID NO: 9844 - DNA, 121 bp, Homo sapiens
tgtttttcgttggctctacaggtcttatcatggataataatgtaacactattatatactcactatgacacttttaagaatggaaaaactattgttacgcatattttatttttaaaaacttc

SEQ ID NO: 9845 - DNA, 408 bp, Homo sapiens
tatatcccctatcttccctttccactgccctcacctagtcttcaaccctgagtaatggggtgttcatagaactctaatggggtgataagatattttatagaagtagaatcttgatctgacctctccttctaattgggaacgtctatgttctaactagcagaaattcctcaaagtttctggcatatggaaaattttccctctatttttattcctttgatcatttcaatgtgaatttagaatgaggcaatttagaagcctgtcctcgcaaagccattttatttaaaaaccacaaaataacactttttttctgtgtgaagaaggttagaaaaaaaatgctcaagactcataattatatgtagttttaacattttttcataaaaggtttcaaatcccttgggaaactacatg

SEQ ID NO: 9846 - DNA, 442 bp, Homo sapiens
gaatactcgtgaataaactttgcaaaactatttgtaaagtactataaggaattctgagaagttactataagatagaaaagaatataggagcatgcccaagccatatatatgatgtttcacgtaatatgcttggtagacttgtaaaatattttagatgtggtgtaggaataaatctttgatgtaatttgtttttttgtatttgtttttgtttttgtattttgagacagaatctcgccctgtcgccaggctggaatgcaatggcacgatcttggctcactgcaacctgcaactccctggttcaagtgattctccttccttggcctcccaagtagctgagattacaggcacatgccaccacgcccagctcatttttgtatttttaatagagacagggtttcaccatgctggccaggatggtcttgatcttctgacctcatgatct

SEQ ID NO: 9847 - DNA, 58 bp, Homo sapiens
agatgttcatgaacaagaaccctcctgccaggcgcaccctggctgacatcatcatgga

SEQ ID NO: 9848 - DNA, 84 bp, Homo sapiens
ggacacagatacaggacaaaacatcagaacctcactgcggccctctgctcctctcctactcaacacttcatcagccctgatgac

SEQ ID NO: 9849 - DNA, 543 bp, Homo sapiens
  misc_feature 435: n = A,T,C or G
tacaaaagactacagaataggccaggcacggtggctcatgcctataatcccagcactttaggaggtcgaggcaggcagatgacctgaggtcaggagttctagaccagcctggccaacatggcgaaaccctgtctccactaaaaatacaaaaactagccgggcctggtggtgggtacctgtaatctcagctactccggaggctgaggcgggagaattgcttgaacatggcaggcagagttgcagtgagctgagatcgtgccactgcactccagcctgggggatagaacgagactctgtctccaagaaaacaaaaaataaaaataaaataaagactatagaatatataaacatagaaatataaaaattacatttatttctatgtataaaaacaaactggaaatgaaatttaaagataatcttttatgatagtctcanaaatattaaaaatttacacgataaatttaataaaatatatgtaagatttataccctgaacacttctgagagaaattatagagaatctaaataaatgaagagatgcacc

SEQ ID NO: 9850 - DNA, 508 bp, Homo sapiens
aaatctttcatgaagggagtgagacggctacctcttccattttatacacagagaaaattatttttgctcatctttcacctatggagtctaccactacttgaaaaccagcttccaacctctctgagttttcagtgaatgatctgaagaggaaaggactgaagcaaggaggttaggatgcagcatgcttattttcaatgtaatgtaattaattaattagaaatctgattcggaatgtctcctgtgtacatcagaataaaattactaataataaatataaaaacctaccatctctctcctcaaatactgtgtcttcatagaggaattgtctgatctactctaaaataatcagcacccaaatttattcattctctttcctctttttctcctttaatgtctttgtatttctcatctaaaattatataatttatttattcttcttatctactgccttagtcgctggaatgtaaactccatgaagactttggcattgtctacattttttactcta

SEQ ID NO: 9851 - DNA, 306 bp, Homo sapiens
  misc_feature 269: n = A,T,C or G
ttgccatttgtgtaaaaacagagggacaaagagtatgtgtgtattcgcttgtgtatacatgaaatattaccaggatacacaagacacagatattactaactacctctagaatggggaacttttgtatctttttgcgttttttgaattttgggacttgtaaatatactgcaatcaaagtattaaataaggaataaaatagttcaatttaaaagaattgagatggtactctactcatatttttctttttaaaaaattatttaagataccanagatcagcattcactaaatggaattaaacacactcag

SEQ ID NO: 9852 - DNA, 425 bp, Homo sapiens
gccgcatccacagccgagggcactatggcttctggagttacagtgaatgatgaagtcatcaaagtttttaatgatatgaaaggctcctgaaagtgcacctttaaaaagcaagatgatttatgctagctctaaagatgccattaaaaagaaatttacaggtattaaacatgagtggcaagtaaatggcttggatgatattaaggaccgttctacacttggagataaattgggaggcaatgtagtagtttcacttgaaggaaaaccattataaaatgacagtcaagtgccatctggatcttaaggagcttccatttctccagctcagtccattggaatagtattaggttttggttttttgttgtatttccccctttccactgggcccttccaacacaatgaatgaaggaaatatcatttatttaagc

SEQ ID NO: 9853 - DNA, 164 bp, Homo sapiens
aggttccccttcggctacaggaaggcaggaggggtgagtcccctactccctcttcactgtggccacagcccccttgccctccgcctgggatctgagtacatattgcggtgatggagatgcagtcacttattgtccaggtgaggcccaagagccctgtggccgcc

SEQ ID NO: 9854 - DNA, 371 bp, Homo sapiens
agcgacggtagctctagccgggcctgagctgtgctatcacctcccccaggagaccgttgcagtcggccagcccccttctccacggtaaccatgtgcgaccgaaaggccgtgatcaaaaatgcggacatgtcggaagagatgcaacaggactcggtggagtgcgctactcaggcgctggagaaatacaacatagataaggacattgcggctcatatcaagaaggaatttgacaagaagtacaatcccacctggcattgcatcgtggggaggaacttcggtagttatgtgacacatgaaaccaaacacttcatctacttctacctgggccaagtggccattcttctgttcaaatctggttaaaagcatggact

SEQ ID NO: 9855 - DNA, 514 bp, Homo sapiens
ggcacgaggtcaaacgtaagccttcctgacctctaagacctacctttgtcatgtacctttaccctcaggcaaggagcaatctcttctcttcctcttctaccttgctgtagcttctccccaaggatttatcacattctgccttgaatcatagggaacagcatgtgtagtggaatgaacacaggcctctgaatccaagatacgagtttaaatcccagctttggaggtggttacttaaagtctcagtgccttcattcttcttcctatataaagtagatattacaatatctaacttacagagtcattgggagctatacatgcagcgattgggtaaagcacctggcacatggcaagcgattagcaaatgctggttacttctacttctttctcttcccttttcccagtctatcataatttccttgagagcaggcaccatgtcttatttacccttgtatttcccacagtacttcccatagtgagttacccttagtaaatactcagtaagttgaattgaatt

SEQ ID NO: 9856 - DNA, 396 bp, Homo sapiens
ggcacgagggacagcagcttttctgatttacagagttcttcagatttacaaatggacaatgacatcacagtttttagcactgaagccagtctcatgctagtaacagtgggtgagccgctcgagggactgggttctgatgaatactggtatgaacggggagtctctgcagtcgccagacaaatcatactcagccccttcccccgtagagcaacaagtggttcttttagagttgactggcagcatttcctgtcgggggaggtggggtttgatggagttagaaagctcgcctctgtgtacattctctcctgggctgttactttctgtagacgcacaaaatcagccccaatgtttttaagggcatcttaaccaaggaagctggcttttgtgtcgccactt

SEQ ID NO: 9857 - DNA, 143 bp, Homo sapiens
tatgagattttttccagcctgtctcttaaactcctgtgacatcttcaatgatatgtgccctcagttgcagcatagcttctctgctgcctattgccattgctgtctcaaaagttgagtgaattttgaggcgtcttttttttttt

SEQ ID NO: 9858 - DNA, 111 bp, Homo sapiens
gctggaggcacaggtggagggcagggaataggaccggcaaatctatagaatcctaaagggagccaagagaagccacatgcaaatctccctccctccaaacaattctccctt

SEQ ID NO: 9859 - DNA, 203 bp, Homo sapiens
tagttgatgtgcccatctgccccacctctgcctggctgtacttgtagctagtacatgtatactatatatgtgcccgactgtttcattgtatgttccaggatggtcatgcctgagttttttttttttttttgggggggggaaatttcccttttttccccagggggaaggggggaaaaaaaaaaacggttttaaaccctaaaacc

SEQ ID NO: 9860 - DNA, 615 bp, Homo sapiens
ggtccaccccaagtctggcttctctcaggagggactcatgaacacgtgccctgagcacccccaaaatgacatcacacaagggcagaaaggagctgaagggggaacgtgaaaggcagaaagggagccgtggttgccaggcaaccagccctagcccacctttgtttgtttggtgacagcaactaaggtctggtcagggccgcttggccacgctcatgccttttcctctcaacagttgcttctttgagtcagggtgcagctctggtcacctggcggcctcttcagctcagccctccacaaagtgtgagcctgaaggaccaccctgaattgcccttgtaggacccagaacagctaccagcagaatcagattctcatggaccaactggtattcaaagagacaatctggaatgatgcgttctggcagaacccctgggaccaggggggcctggcagtgattatcttattcatcaccgctgtcctgcttctcatcttatttgccatcgtgtttggtttactcacttccacagaaaacactcagtgcgaagcgggtgaagaggagtgacctgacttgctggggactgagatggcagcaggggaggcgagctgacctgcccccat

SEQ ID NO: 9861 - DNA, 327 bp, Homo sapiens
gattataatcaagtgtaggcttcctgaattttgacatccttttagaacttgggtctggaattccagaaatgttaattgctgcttgtatttgttcttgtttgttttttagccagtatttgccctttctatccagccttatgaataatagcagtaaaatcacagtatcttggtcagtctttattttttccttttttcttttttaagagacagtcatccaggccagagtgcagtttgatgatagcttgctgaagcttcccactcctgggctcaagttatccttccattttggcctcctgagtagctagaccataggtatgcatcaccaca

SEQ ID NO: 9862 - DNA, 656 bp, Homo sapiens
cgcgtggacgcagcttgatgggggagaaagagctctgggagcagggcttagagcctcgtctcgcctcctgccaactcggtccggcaaggttccgaacctccctgagcctcagcttcctaatctggcaaacatgacgacaaaagtccttctcttttaaggttggtgcaaaaattaaatggccctttactgtatatttagagcacctggctcacggattagtcacctcgctcctgggctcaacagtgttcactgggtccttacagcatcacactgggatccttaagggcaaagaccaaaattagacctagcttaattcctggtgtgcaagtgctaagtgttatgaaatgagtgagtgacaggatgatccagctatgagaaataggagagagtttgcggtgggatagagactgtaccttctttttgtataagatgtttggcagttggggataacttaccggaagcaagcttaagatgcacacgaaatcctgaccaagaggatgtagaaattagatatatggccaagaatcagagaagcaaataaacagatctcaataaaatgtttagtttcgaggttagaggtgggatatcagggtaaccaggcaaaataactgatacaataaataactacatgacaaatcacttctctcacaacacat

SEQ ID NO: 9863 - DNA, 238 bp, Homo sapiens
ggaaaaacaatacaaatacaaaccacaatgcaaaataaatacaaaacagtacaaaaacaatacaaaacaataccaaaaaacaaaaaacaaaaaacaagcctcagtgactgtgggaaagtggcaggaattatctagaattggggtctcagaagaagagagttgggaaaaggcctaaaaactatatttaaagaaataatgggccgggcgcggtggctcacgcctgtaacgccaacacttg

SEQ ID NO: 9864 - DNA, 367 bp, Homo sapiens
tcctgccgagaggtagaataccgatgcattacagatagtagaagaaaaacagactttcaaatgcagtcatgcagtgcatggtaatattttggtcaacaatggatcacatatatgatgtcagttccataacattaaaatggagttgaaaatttcctatccctagtgatggcagcgccattgtaatgtagcacaatgcattattcacttgtttgtggtgatgctggtctaaacaaacctactgtgctggcagtcatttaaaagtatagcacataccattatgtacagtacatactatttgataatgttaatatacgactatgttactgggttatgtatttactataatgtactttttaattgttatttt

SEQ ID NO: 9865 - DNA, 435 bp, Homo sapiens
agatcacaacgcgttatcaactggatccaaaatttatcacgagtattttgtatgagaataatgttatcactattgatctggttcaaaattcttctcaaaaaactcagaatgatgtggacatagctgatgtggcttattattttgaaaaagatgttaaaggtgaatccttgtttcattctaagaaaatggacctgacagtaaatggggaacaactggatctggatcctggtcaaactttaatttattatgttgatgaaaaagcacctgaattctcaatgcagggtctaaaagctggtgttattgctgttattgtggttgtggtgatagcagttgttgctggaattgttgcgctggttatttccagaaagaagataatggcaaagtatgagaacgctgagataaaggagatgggtgagatgcatagggaactcaatg

SEQ ID NO: 9866 - DNA, 574 bp, Homo sapiens
tagtatacatttagtatacatttatttctctctgctcgtttttgctaaggacataatacaatagaaaatagtaagaaggttacgaaagatggagctataaagttgggtggtctagggactttaggactcaggaacaaacaccacagatgatgacccctccacccatcgtgtcagtgggaggagtggcatcaaatgacccaggacagcattgccctcaccctctggtgtggtggcagtagagactgcagggactgtagtcttacaattacagcccaatgatggcaagttgaatccattctcaccccaagtaggaattggagacagaatctaagaaagtagggagctagagaaaatcacctgaataggggccgggcacagtgcctcatacctgtaatcccaacactttgggaggctgagatgggcagatcaccggaggtcaggagttcgagaccagcctggccaacatggagaaaccccatctctaataaaaatataaaaattagccgggcatggtggcatgtgcctgtaatcctagctactcgggaggctgaggcaagagaatcgcttgaaatgc

SEQ ID NO: 9867 - DNA, 462 bp, Homo sapiens
ctcgtacttctttatactccttggctttattcttcttccttgcaaactgacttcctccatgtgatgggaaacatggctaatgatggggttcaggacacactatcccaaaacatggggccttagcatttgagaaaaccacagaagcaggaagtttactctctgaccttcccctcacccctatcccctaaatcaggtcataaaacctaggaaggatcctctaaccttcccctgaagcaagtcataagatcctcattcaagaagtgccctccttgtatctataaggaacattgtcgggctgggtgcggtggctcatgcctgtaatcccagcactttgagaggccaaggtggggatgggccacttgaggtcaggagtttgagaccagccaggccaacatggtgaaaccccgtctccactaaaaacacaaaaattagccaggcatggtggcgggtgcctgtaatccc

SEQ ID NO: 9868 - DNA, 508 bp, Homo sapiens
agtgctccctcccaagcaagcccttgagcccctcatctctggaggcttctcctccatgctgcctgcacccccaccagccaccagaaccccttcaggtatagacagaaacagattcagtcaaattccttggtgtcccaggtgacgtctggccaggggagccagcccctttaagttacactattgcatggctcacacccggaatcctagcactttgagaggctcaggcagaaggattacttgaccccaggagttccagaccagctggggcaacaacatagtgagactctatctctactaaaaatgaaaaaaaagattagccaggggtggtggtgtgcacctctagtcccagctactcgggaggctgaggcaggaggatcacctgagcccaggagtttaaggctgcagtgagccgtgatcgtgccaccgcactccagcctggacaatagagtgagaccctgtcttgaacgaacaggccaggcgcagtggctcacacctgtaatcccaggac

SEQ ID NO: 9869 - DNA, 457 bp, Homo sapiens
cgtcccccaggctggagtgcagcggcgcgatctcggctcactgcaagctccgcctcccaggttcatgccattctcctgcctcagcctccctagtagctgggactacaggcgcccgccagacgcctggctaattttttgtatttttagtagagatggggtttcaccgtgttagcgaggatggtctcgatctcctgacctcgtgatccgcccaccttggcctcccaaagtgctgggattacaggcgtgagccactgtgcccggccaatcctgacaatcttaaatgtggacttaattcttcaggtggtctgttgcgttctatgatcttgttgctttctagttaccattttttatatttattttcatttgcttctcttctctttctgctggtttggaaattagatgttttacttctggtctaaggttaagaaggacatctatttaaagtccaaagttggcc

SEQ ID NO: 9870 - DNA, 113 bp, Homo sapiens
aaaagaaaaaatatggccgggcgcggtggctcaagcctgtaatcccagcactttgggaggccaaggcgggcggatcaccaggtcaggagatggagaccatcctggctaacacg

SEQ ID NO: 9871 - DNA, 546 bp, Homo sapiens
catgaggctcatgagggtcagaggttagacacttacttctaccttccctcctaatattttaataattagcagaacaaggccgggcatggtgacccacacctgtaatcccagcagtttgggaggccgaggctgggaaatcacaaggtcaagagatcgagaccagcctggccaacatggtgaaaccccgtctctactaaaaatacaaaaattaccggggcatggtggcaggcgcttgtagtcccagctactcaggaggctgaggcaggagaatcgcttgaaccccggaggcagagattgtagggagccaagatcacaccactgcactccagcctgggcaacagagcaagacactgtctcaaaagaaaattagcaagacaggctgggcacagtggctcacacctgtaatcccagcattttgggaggctgaggagggcagatcacgaggtcagttctcgagaccagcctggccaacatggtgaaaccctgtctctactaaaaatacaaaaattaggccagacgtggtggctcacgcctgtaatcccagca

SEQ ID NO: 9872 - DNA, 450 bp, Homo sapiens
tatttagactactgaacctacacaggaattgggtatttacttttagaaatcagtgtccatctagtcagagcccaagtggaaatctcttcagattacctatcgaatagatatgaagagatatcgaataggtatgaatacatgtcaaatcctgtcttgacatgtattattgcaaataaaacttagagagctagtgccttactcattccaagcttagatatcctgatctacaaagtgtggttaatacgaaggttaaatgtgataatgcatgtggagtacttatcatgatgtctgctgaagacagtagtgggagttttatttgtttaccactgtattttcttcttctgttctactaccaagtgttgagagaatccctgtggaaacttacataatattttttcctctagacagacagacatgcacacctacccacacacacactcacacatacat

SEQ ID NO: 9873 - DNA, 418 bp, Homo sapiens
agcctgaccaacatggagaaatcccatctctactaaaaatacaaaattagctgggcgtggtggcgcatgcctgtaatcccagctaactcgggaggctgaggcaggagaatcacttgaacctgggatgctgaggttgtggtgagccgagattgtgccattgcactccagcctgggaaacaagagcaaaactccatctcagaaaaacataaaatgaaaaaattaaaataaaaaaagtaagtaactaacttgcacacagatttatagtcaatcagtatatccagtacctgggactcaatccctacggctccgagacgacgacagaagggagcctgaccaacatggagaaatcccatctctactaaaaatacaaaattagctgggcgtggtggcgcatgcctgtaatcccagctaactcggg

SEQ ID NO: 9874 - DNA, 471 bp, Homo sapiens
ggccaaatgtactatacagagcatctggaagaaagtattcttagcagaagaaagagaagtgcaaaggccctaaagtgaaaacacaccggtaatactcaaaggacagcaaagaggccagtgttaaatgggaaagggtaggaaatgaggtcagaagtagcacaggatactctgggccatcacaagggccttgaaatttgtctcaagtgtgataggaagccactggaggcttatgggtaagaaaatgggagaaatattatctgatcagaaagcagctgaagttatttgtataatagcagggtttgggagagagaggaaaactctgagctagttattaaagtcttgataatgagggatgactgggggatgggtaggtgagagcaatgagagacacagggtggcacagctaagtagaataggtctgaaagaagctagcactcaatctactagcactagtggattacatttatgcct

SEQ ID NO: 9875 - DNA, 464 bp, Homo sapiens
gaccacagaagggggttggaggcggaatactgggttttgctgcaaccggtttattttccttctgttttcacccattctggcacaatctggcgccatcgtccttcttgtgaggccaaccctgaaaatgcgaagcagatattctggaccaaaattgatgcgaatccaagaacctgccatgggtctccgggtgcggtctctgaaactggaggatatcgggaggaaagggtatggaagatggataaaacacggtgccttatgtgtgttgaagacatagtcgggccaaaaatatatgatttactgaaatgcgtgtcgtgttcttgcgctttatcttgcatctctccgatgcggagataatggggaagctcttggcatggttggctgtaagtatgtgataccggatgagcaggagtcaaatacgatgcgccgacttttaattcaaggaacccttttctgaaacactttgc

SEQ ID NO: 9876 - DNA, 373 bp, Homo sapiens
gcagatttaaaataaggccaagagctttagaattattttctggcttttccttctttgcattagtttgtttcttagtttgttttttaattgagacaaggtcttgctctgtcatccaggctggagtgcagtggtgtgatcatagctcactgcagcctcaaactcctgggctcaagtgatccttccatgttagcctccttagtagctgggactacaggtgtgcatcaccacacccagctaattttgcatcggttttacagcacggagtttaccatcaacatcacactccttggaaacaattatttatatagctttaagtaaactaaagtattatgggtatgacactcttaaatggtgagtgatatccttgtatttc

SEQ ID NO: 9877 - DNA, 126 bp, Homo sapiens
ggatgctcaacctgtgtagatttatcatttttaaaaatgcttccatctttgaaggaactttcatgtaatcctgttcagaagaatgtagaacgaaatttaaggcaggttcttcccataccttcatct

SEQ ID NO: 9878 - DNA, 314 bp, Homo sapiens
gtctgtgtaagtatactctatgatgtttgcccaacaaaatggtctaatgacacatttctcagaatgtatccccatcactacgtaatgcatgactaaataaataacatgaaacacctttgagaaacaagtctatgtctaatttatccttgtttgatttgtggcctcaagcacattaccttgtacatagaaaatgctaaatagctattgctgattgaatgtattcatgaatgaataagtgaagtttgaagtgatgacaagagatacacaggtttgtttgctttctttttaagagtaaaataatgcaatggaatatt

SEQ ID NO: 9879 - DNA, 463 bp, Homo sapiens
gcatggatattcatgacagctttcatttaaaaaaaagaagcttcaggagagtcattaagagttaggagcatattaataatagaagacctaaaatccatctcagttcaagatagatcaactggacaaaaacttcagtaaggctattgaggacctagattaacacaactgaaaggtagatcttagggtcatctattgcatataagagaatatacatttttgtaaatgcgcatgggatgctcatgaaagatgattattgaggtacaaagaaaactcttaaaaatttctcccaggccgggcgtggtggctcacgcctgtaatcccagcactttgggaggccaaggtgggtggatcatgaggtcaggagtccgagaccagcctgaccaacatggtgaaatcctgtctctactaaaaacacaaaaattagccgggcatggtggcgtgcgcctgtaatcccagttactca

SEQ ID NO: 9880 - DNA, 517 bp, Homo sapiens
tctgaaatgtaaatgactaggtagaataactcagagagaactgaagagagctgggaagtgggtgagattcctgagaagaggccctcagaaacagagtagaagtgactatgtgatacatgcttgataaagctccttgatccatccagcccctagttgttcatagccttagagtaggcagggagtgcagccaatggttttacacactcgcggcagaagttttgaggcagtggagaaagccagacctggagcaaatgatagcacagcagcaatctgtagggattgatgacccaggactggcacagataactgatgtcacagaagatgcctgcatagtcaggtgacagtcaggaaccagacatcactgtgccctgcaacatgggctaaggaatttagccaccatcctggggaaaagtggcagaaccttaaataggttgacatttttgttcctgttgttaggtaaaaattataggaaactattgttgtggactaaactcctgcactaagccccaacagatca

SEQ ID NO: 9881 - DNA, 597 bp, Homo sapiens
tgaataagtctcaggagatctcatggttttaaaaaggggagtttccctgcacaacctctcttgccttgtctgctgccatgtgagatgtgcctttcaccttcggccgtaattgtgaggcctccccagccaggtggagctataagtctaatgaacctctttcttttgtagattgcccaatcttggaatgtctttatcagcagcgtaaaaacagactaatacaaattcttactgatacttgtattctcttttaatcacaaaatagaacatttcccagagaagaaaatactatttcaagaaaatactccaagaatgtttctggtcatcctaaagtgatgttaacaatgacttctttatgtaaaaaatccctttctcaaactcataaactatgtaaatatgtatgataaatattaccttctgtgctagaataatagataataaaagatataatcaaaaataatacaaaaaggtcaagaatgcatcagaaaacttctttagtgacagatgctatctgaggaaatttttttattctggcatgaagagcccactaaaagtaacagacatggccaggcgaggtggctcacacctgtaatcccagca

SEQ ID NO: 9882 - DNA, 525 bp, Homo sapiens
acgacagagggcttgtccccaaaacataatttccctgctgtatttatctcaatggaatttagaagtagcgtggattatgtcaccctgagagttatttcttgtgtccactaaaagagaaaatgcacagaagaacgtgtctatcttaccgagaccactcatacagtgttggcaagaggacagtccccagagtctcaccatataatgaagctaatcactctatgaattatcttaattgaatttgaatgtattgctactgagtactatgggaagagcggccagtaaggacgcggtattttcccacagcattcagttagcaatgcattcaaatttaattaagatcattcatacagtgattagctttcttcgacgacagaaggcactggggatgtccgtgctacagttgcctgcttttggtctgcctaagataggcatatctactttcacaggttgtctcttgtattgagtacaggattgtttgatccatccttaagtattatcctgagatgtgcttttcattttggaatc

SEQ ID NO: 9883 - DNA, 144 bp, Homo sapiens
gtttgggaaccatagatttagttcatgtttctgaccctatagagagttaacaaattgatgtctcctaaattttcagtaaaactcagaggaactcctcccactgccattgtttgtagcttttaccagcgtgaacctacctgtgtt

SEQ ID NO: 9884 - DNA, 349 bp, Homo sapiens
aaatattgtaagattccacctccatgtactcttgcagctggaggcttgtcccagagctcacccagatggttttggcataaggctgcttgctcactgttcaaaaatatgacctaaaactgacagctaacaaagacattcagatctcactgctgctcagggctgtctcatccggcttctcccctgccccctcctttgcttccttgctggcctttgaccctgctgacccctcagctactgccctatttattgctccttcatctgagttcaccgccggagtattcgaacatgcctgcatttcctctcaacctacactgcctctgattccctagtatctggcttcatctttcta

SEQ ID NO: 9885 - DNA, 82 bp, Homo sapiens
ggaatcccacagccgagctataatcactatgcccaataccttgctgattccttcgctggggctgcctgataacatcacaacc

SEQ ID NO: 9886 - DNA, 567 bp, Homo sapiens
tacattttattgtggttggagagatcaaaatgcctaagactgtggtctaaagagaagccatcaacatgtacactgagaagctttcctttttagagtccattacagtatccttgctctttgagttgttccttcttctaggtactcataagtttaatatttctgagtctaactctattacaagctctatgatgaagttcaaccatggagtcatgaaagatggcttcaccattattgatatcaaaatgataactagtgatattctcgtcatattacccaaataaaattgtataaaccaggcagggcgcggtggcacacgcctgtaatcccagcactttgggaggctgaggcgggtggatcaccaggtcagaagtttgagaccagcctgaccatcatggtgaaactctgtctctactaaaaatacaaaaattagccaggcatggtggcgtgtgcctgtaatcccagctactcaggaggctgaggcaggagaatcatttgaaccagggaggcagaggttgcagtgagccaagatcacaccactgcactccagccagggcaacagagcgagac

SEQ ID NO: 9887 - DNA, 344 bp, Homo sapiens
taaacaatttagaaagtcatcttgggcccattggcagtatgtatcccattttgggaaaactggagtggtcaaacaagaacatttggggcaaatgggatgctttggcaggtcctaagagtggggaagctgaggcagctggttcagtgtattgctatgaactcatggaatatacacagcagagccaacctagagactgcctggaggaagcttcagaactaagcagttttgcctcttgtgacaaaagtatcctttgtactcccacgagaacacatcgaataagttaaacagactgagattgagtcagagattttccacctaaatactggcattatgcttacacaagt

SEQ ID NO: 9888 - DNA, 539 bp, Homo sapiens
tagagatggggtttcgcgatgtgggccaggctggtctcaaactcctgacctcaggtgatctgcccgctttggcctcccaaaatgctgggattacaggcatgaaccacctcgcctggctaataaataattttaaaagtgactattgtagagcgagactctgtttagaaataaaatacgatagaagagagaaggataagtttgttgtggacagtatttgcaaatgtggaataaaaatgctgggccctggaacttaagtgaggttgggaagtgaagataagagaagagagaaatggtgtcagatacagttgaagaactgagacagtgggagttcttgagtaagtgagctggaaggttaggaggtcatcagagaggcttcaaagaagctgcgtgtctgaaggaggagaggcaaggaacagtttggaaatggcaagtaggaaacctactataccccctggcccttaggagcctgaaatgtcaggggaaaagtaaagcagcttctacctcagaggactgctcaggagatgggctgctcagggaca

SEQ ID NO: 9889 - DNA, 600 bp, Homo sapiens
cgtggggctcagcccaacctcgaagcgctgagaaggcgcttccaaagtgatatccctggaatgatataatgatttccttaatacgtgagcatctttcaaaactaggaggatctggaattaagtttagaagtattaatcaaactcatgccactgacgtttctgtgtgtcaagaagtgcatgcatatttggtatttaacttcagcattttttttttgtttaaaagactacggccggccgggcgcggtggctcacgcctgtaatcccagcactttgggaggccaaggcgggcacatcacgaggtcaggagtttgagaccagcctggtcaaatggagaaactctgtctctactaaaaatacaaaaattagctgggcgtagtggcaggtgcctataatcccagctactcaggaggctgaggcaggaagatcgcttgaacccgggaggcagaggttgcagtgagccaagattgtgccaatgtactccagcctctgggtaacagagcaagactctgtctaaaaaaaaaagagccgggcacggtgactcatgcctgtaatcccagcactttgggaggccaaggcaggcagatcacatgaggtcaggag

SEQ ID NO: 9890 - DNA, 629 bp, Homo sapiens
gcagtggcgtgatctcggctcactgcaacctccgcccccaggttcaaccgattctcctgtcccagcctcccaactagctgggattataggcgcccgccaccacgcccagctaattttttgtatttttagcagagatggggtttcgctacgttggccaggctggttttgaacgcctgacctcatgatccaccagcctcggcctcccaaagtgttgagattacaaacgtgagccactgcgcccggcaattctaattattttcttaaaacacatctaagtcttaaatttttacaagctgaagacttgaggtttcttatcattcaacttgcatgagggggaagctttcagatgaagcttttctctgcttggagaaaaagctgttgctttcaatcctgccaggttctccaggtcaagttctctgtatttcctcctgatcatcacgctgatgtttctggctactaaggagctgggggtggcgatgagtgacgcagatatgaatcagactgattttcaagcagcagagtttaaggaaaatgaaagaactaggcactggaagtgactgattgctggccgattcattgttgtaatgataagctggtactggacaagtgatcacaggcctgatttctac

SEQ ID NO: 9891 - DNA, 512 bp, Homo sapiens
aatcccagcactttgggaggctgaggcgggtggatcacctgaggtcaggagtttaagaccagcctggccaacatggcgaaaccccgtctctactaaaaatacaaaaattagctgggcctggtggtgcatgcctgtagtcccagctacttgggaggctgaggcaggagaattgcttgaacccaggaggcagaggttacagtgagctgagatcacgccactgcactccagcctggccgacaagtggaaactccatctcaaaaaaaatagaatacaggtgggtttacaaaataattttatgaggaaaaagaccactaagaccataaaggaaaatactgccaagtttgacaacataaaggattttctaaggcttaaaaaaaattaataatattgaaaggcaaacaaatgggaaaaacatatgcaacaactgacaaagcattagcagtagttctatatataggaagtatatgaataggagtaaaatgaccaataaacatatgaagagatttcaatca

SEQ ID NO: 9892 - DNA, 669 bp, Homo sapiens
tgatctcagctcactgcagcctctgccttttgggtttaagcaattctcctgcctcagcctcctgagtagctgggactacaggcgtgggccaccatgcccagctaatttttgtatttatagtagagagggggtttcaccatattggtcaggctggtcttgaactcctgacctgaggtgatccacccacctcagcctcctaaagtgcttggattacagacgtgagccaccatgcccaacctaatactatgaactttctaagaaataataccaattatccccaatctattctaaaaacttgaagaggaaggaattctccctaattcattgtacactgatagtggggtaatgctggcattaccctggtatcaaaacagacaaggattattctgcattatcctgctatcaaaacagataaggatgccacatcaaaaagacaactataggccaatatctctgatgaacatagatgtataaatcttcaacaaaatattatcaaacagaatccaacagcacatcaaaaacaaaacaaaaacaacaacaaaaaaacccacaacatgttcaagtgggatttatcccaggaatgtaacaacggtttaacatctgtaagtcaataaacgtgatccatcacattaacagaatgaaggaccaaaactatatgatcatctccat

SEQ ID NO: 9893 - DNA, 687 bp, Homo sapiens
tagatgcacgatattacttctgaacaagagaaagaaactggtaggaaaatttattttaaaagtgttgaagggaaagaatcaagaccacagatccagatccggagattattttgctaaagaatagcaattgtgaggcatgaagtgggaggggggaagaagctatgaacttaattttgaggtttctgagaaggaagcttgagtgaattcacttcagatgcatttggaatgtttgcactccagaagatgagattgtgtgtgctctggagagtattggaagaaggaggtattactagatttggcgactcccacagtgactcattactcttctctgttactttcaggattcatagagatatgttttgttgatattatttatttaagtgagataaatttgaatatgaatccattggcttttttttgtaaaatttctgctttataaaatctgttagaaggctgggcccggtggctcatgcctgtaatcccagcactttgggaggccaaggcgggcagatcacttggggtcagcagttcgagaccagcctggccaacatggtgaaacccagtctctactaaaaatacaaaaattaattagctgggcttggtagcacatgcctgtaaacccagctactcaggaggctgaggcaggagaattgcttgaacccagggggcagagactgcagtgagctg

SEQ ID NO: 9894 - DNA, 486 bp, Homo sapiens
cctcccaaaatgttgtgattacaaatgtttgcgccaccatgcccggccattgtagtcatttatcctggtggattaaaactgaaccagggaggtaccagtcagtggcttcgttatcatcaaattgatgactaaggtcaaccttttagaatcttctagaataaatatgtcttacacctctaaccaaatacacaggtttttaaaaaaaacaaatctataacataggccgggcacagtggctcatgcctgtaatcccagcacttttggaaggtgaggcggccgcgtcacctgagagcagaagtttgaggccagcctgaccaacatggagaaaccctatctcaaaaatacaaaaattaggccaggggcggtggctcacacctgtaatcccagcactttgggaggccgaggtgggaggatcacgaggtcaggagatcgagaccatcctgggtaacacagtgaaactccgtctctactaaacatataaaacat

SEQ ID NO: 9895 - DNA, 501 bp, Homo sapiens
agccgggtgtggcagcgtgcacctatagtcccagctacttgggaggctgaggcaggagaatcacttgaacctgggaggcagaggctgcagtgagccaagatcacactactgcactccagcctgggcaacatagcgagactctgtctcaaaaaaataaagtgccagtgaagaacaaagggccaaggaaccaaaggggagcaggtaccctgggcagacaagttggctggtgagaaggtcagtaaggctacagcactatgggaggtagtaccaggactttcttgcatggcaaaaggggtctctcagaagcctggtgccaatgtaacgaaagcctgggggagccagggagacaaaagtggaggctgggacaggcatggtggctcacacctgtaatcccagcactttgggaggcagaggtgggcagatcacttgaggccaggagttcaagaccggcctggccaacatggtgaagccctgtctctagcaaaaacacaaaaattagct

SEQ ID NO: 9896 - DNA, 435 bp, Homo sapiens
gtgggagactttcttgtggatcggggtgacctttacattcattagatgccagtaaccacccctcctgccacacctccagttatgacaacccgaaatgtctccagaatgactccaagggacaaaaatcacagccccttgagaacccctgttctagacagatattggcccacccacctatggcacgctgcagctgtgaggcagatccagcaccgttgggcaggtctccactggctctgcagactcttgagtgtttcacctgaaaaaaacaaactggataggtcacgggtggatcgcctgagtccaggagttcaagatcagcctggggaacatggtggaacccctctctaccaaaaatacattacctaactggacatggtagcacttgcctgtagtcccacctacttgggaggctgagttgggaggatggcttgagcc

SEQ ID NO: 9897 - DNA, 386 bp, Homo sapiens
cgttcgctaccacgcccggctaatttttgtatttttagtagagatggggtttcaccatattggccaggctggtctcaaactcctgaccttgtgatccacccacctcggcctcccaaagtgatgagactacgtgtgagccaccgctcctggccaggttatgaattcttaaaaaaagaaggcaaaggatctagactttgtttttaaagttatctttaccgctaggactaaggcaggaggtctgtttaagacaagccaatctcttcttgttatcatctatccgccaaagacatcaaagttagtggtccaataaaaatcatcccaataatttcatcttttctgcaaactgatgtatccccactcaatacctagaacaatatctgggatac

SEQ ID NO: 9898 - DNA, 212 bp, Homo sapiens
gaggctaatgcagtggttcaggtgagcagtaaagagtcaagaacaagaacagaatcaatgggaaagagagctctgcttggctgggcacggtggctcacgcctatactcccagcactttgggaggccgaggtgggtggatcacttgagatcaggagttcgagaccagcctgaccaacatggcaaaacccgtctctgctaaaaatacaaaaatt

SEQ ID NO: 9899 - DNA, 65 bp, Homo sapiens
tttctctcttcttcctcttctaaattttgaattgctttatcctttacttttccatttgaaactca

SEQ ID NO: 9900 - DNA, 574 bp, Homo sapiens
ggacgccgaggtgggttccgggagacccgcgggtctggctgcgagagattgggtaactcaaggcgtccctggagtacactgaggataagtgtttgagaaatgctgtctgaaggaatgaagtcagtctatgacaacgtctctctgccgtgaatcattcctgcagatgaaaaagtgtgacttggcagctgatggagtctcgctctgtcacccaggctggagtgcagtggcgcaatctcggctcactgcaagctccgcctcccaggttcatgctattctcctgcctcagcctcctgagtagctgggactacaggcgcccgccaccacacccggctaatttttgtatttttagtagagatggggtttcaccatgttagccaggatggtcttgatctcctgaccttatgatccgccctccttggcctcccaaagtgttgggattgcaaggcgtgagccactgcgcccagcctccaggcctcagttttcttatgtgtaaatggggatgataaaacccggacctgcctatgaacggttcagttggatcaaagtagaatgagtgcagaagaagaagcatgat

SEQ ID NO: 9901 - DNA, 555 bp, Homo sapiens
caccacgcttcctgtacagtctatggaactgtgaacaaattcaatctcttttctttataaattacccagcctcaggcatttctttatagcaatgtgagaatgaaccaatacagataccagcaccaaagtgcctaccgtgaactttttcctacccaggaaaaaggaattctttattatcatcagcctctaaaacagggctttctgttacttgcctctgtatgaactccaaactgacacgctatctaatttatgctgagagcacagctagggaacatgcccaggcatgcggcttttacctactgagctggacaagattgtggaagtgaaagtaaaatttgaagattggatgaaagatgttaaaatcatgggaaggctgactaatttgagaatactcagacatctcataggtgaggaaaatgacagtattaacattaatacaaagaaggtgatcagtcaaaacattcctcacgagaaaaggtcctttggcaaatactttcctttaaagtaaatgaatataacaggccaggcacagggctcacgcctgtaatcccagca

SEQ ID NO: 9902 - DNA, 460 bp, Homo sapiens
aacagaagggtacggctgcgagaagacgacagaagggtacggctgcgagaagacgacagaagggtacggctgcgagaagacgacagaagggtacggctgcgagaagacgacagaaggaaggtgaccaactttgctataaaggtgttggaagtaggaagcattccaacttcctactgaggaaggttataaaatctgtaatgctagagatcttttcaggagccaccaaattgacaactatatatttgtgaatagtttaaaggtacagttttgcttacaataaggcaacaggactagttaatttatagttgtgacttgtgtgggtttttaatgatttttatgtttttaatgtgattttaatgtgattaataatatcttggctaaaatggatacagtgacaaatagtatataaaaatttgcagccgggcgcagtggcttatgtccgtaatcccagccctttggg

SEQ ID NO: 9903 - DNA, 541 bp, Homo sapiens
ggcacgagcagaagggttggaagttgagcctagaacagtcaggggcttaatggtcacacagcaggatctgcggtttggggcctagggactggtagtgaaaaaaaaaacatggaactagttctgatgtctggactctagtcactgccttgcttcgtagccttgggcaagtcttttgtgagacagggtgatagaatgaaaagtcttgtctttggagtcaggaagacccagatctgaatctagctctgatttgtactagctatgtacccttaggccagttactattctgtgtctcagtttccttatctgcaaaacaggtaaaaacaactttctcagaatatcagagataatgtgtaaagtgtttatctctgtggttggcagtactcaataaaaggtaactaaatcatttatgtcttccttccctagattcttatgtatgttaaattagaatagatataaatgtactaagaaaagttaaaagcggccgggcgtggctgtaatcccagcactctgggaggccaaggcgggggcagatcatttgagg

SEQ ID NO: 9904 - DNA, 52 bp, Homo sapiens
ggcaggctcacccagaacgctctggacaggtcagtgaaaatgggagcttcgc

SEQ ID NO: 9905 - DNA, 486 bp, Homo sapiens
ggcacgaggctcggcctgcaaggctgttgtttcaagaaatgaaaatgaagggcgccctggaataggttcgccgaagagagagcttgcaggcctctgggaagcaagccatcgtgtggcagaggcccaggtggcaaggaaccaagggcggcttctggccaacagccagcgaggacctgagaccgtagcccaacacccctccaggaactgaattttgccagcaaccagtgagtgaccttggaagtggatccttcccccgaaagcccggctttcagacggaggctggtgggacctcaaccccagcttgtatccaggctcttgacaccatctggagaaggaattcaagagtgtgtcagaaaatgatgaaagtacaaagatttattgcaaagcgaaaaatacacactcaagaaaggggagtatgggtggactcaagacagagtccgatgggacttggggtttctaccttttgggtttctttttttttttttt

SEQ ID NO: 9906 - DNA, 411 bp, Homo sapiens
  misc_feature 365: n = A,T,C or G
ggcacgagggcacacgggcgagcgacccttcgtgtgcaactggctcttctgcgggaagagcttcacgcgctcggacgagctgcagcggcacctgcggactcacacgggcgagaagcgctttgcctgtcccgagtgcggcaagcgcttcatgcgcagcgaccacctcgcgaagcacgtcaagactcaccagaataagaagctcaaagtcgctgaggccggagttaagcgggaggacgcgcgggacctgtgagccctcccggaggtggaccccctttccagcacctctgcgagagatccggagacctgtgggcagctggcggaggggagactcagcagacggaccctcgtccgtgcctgccttccanaatggagccaggcttccaactttcgctggcttacgacatagggacg

SEQ ID NO: 9907 - DNA, 229 bp, Homo sapiens
gcacgaacaggggcatcccgcgtccacgccgcggggaggatggtttcaccgtctccagggacttggctcgaggaaattaaactctaatgagtagctcgagaaatgttccgggatggtggatgagcgatcatccttaaaagaaaatgctattctgggagctccaacctgcaattaacctacagaaggaaccttttgagaggctggtgcagcgcttcggggaggcagatta

SEQ ID NO: 9908 - DNA, 597 bp, Homo sapiens
ggcacgaggaggagtcttggagagctctatttcttgcctcgattctatggacatccatgcccttttgaagggaggaggctgggacctgaaactgggcttttgtttccaagactagaccagtccaggacttggctggtgaaagcccaccggacctagaaactcagttcttaccggcttgtggtaaaaaagcaaatgtgttatctttttattttttattttcaggaaagttatactagtattttcttaagtgtggaatcaaatgagcacataagctgtgtccctgtgaaaagaggtttgtagcctttcaggtgcctgctcctattcatttctctgtgaccattgatcactgtcctttgtgcattgtgtgtctaagatgtcttcaggggaaagatgggtaagagacagtgttgctaatgctgttccttctttgtgcctccttccaaaccacagttatttgcccaaactacctctcgtggctggtttttcattggcctggcctctgcttctcaggctaattagtgactcctttctttgagggtcagggttggaggccccttactggtggttttacagggggatcctactttgttacacatg

SEQ ID NO: 9909 - DNA, 411 bp, Homo sapiens
ggcacgaggggcgggacggtacagcacccggaggaaccttgattccctgccccgcaagcccagcaccggttttgccgccttgtctcgaagggtcaaccaggccatctcctgcctcgggacggagagcgccctggaaaaggcggaggggccgaccttagtcacacaagagcgatggcaagattttcacccaagccatctgacttggaacccatggattaaccaactgccactggaggcaaatccagagaccaagggagcagtttatacagaaacagaaaaattagccgggcatggtggtgggcgcctgtagtcccagctactcggaaggctgaggcaggagaatggtgtgaacccaggaggcggaggttgcagtcagccgagatcgcgccactgtactccggcctgggtgac

SEQ ID NO: 9910 - DNA, 596 bp, Homo sapiens
ggcacgagccaggagtcaacccagaacttgccctgaaggacttcgccacacaaccaacctctccaagacaaacggagaggaaaaaggaagctgccgaggaagagcccacagtatgtcctcacttggggaaaaagaaaactatgcatggattggtatatgtaatatacatacatacatacatatatatatatatatatgcattaagtgagtaacaaaaagtctggaaggatacgttcaaactattaactggggttacctgcagggagggtgccaagggaacttttacttttactacatatatttctggcttatttgcatttttcacccaagtatccaagtgttacttgagtagtttaacatgagaggaattattagggttgcaattaacatttgttgcatgaatagatggcaaattcatttcctaggcttgtttttttcaaattctgggtatgacccatcagtggattgcaaaattaatttcgtgggtagcaatcagtaattaaaaaaaaaacaaatacacaagaacaaaaaggattacagaccagcagacacagtaggggagttatttcagtaaacttttgtttcagctatataca

SEQ ID NO: 9911 - DNA, 279 bp, Homo sapiens
ggacatgggaaagcggaaccaccaaaaggagtgatgatcaacgatctcatgataaatctggatgctagttctcatgcctcaggacatcctactgggaacgacacaccagctcctgggatcagactttcatctacttaggacccctctttgcccagactactaaagccagtcttcactagccacgaatggctacccaaaggaaacacttggtgaaagagtttaatccttacattacctgctatatctgtaaagggtatctgatcaagccaacaacagtgg

SEQ ID NO: 9912 - DNA, 516 bp, Homo sapiens
ggcacgagcggaggaggagcccatggacacttcccccagcggcctccacagcaagctggccaacgggctgcctctcgggcgggctgcgggcacagacagcttcaacgggcacccgccccagggctgcgccagcacccctgtggctcgggaactgaaggccttcgtggaggccacctttcagagacagtttgtgctcacgctgagcgaactcaagcgcctcttcaatctgcacttggccagcctgccccccggccacacactcttcagcggcatctcggaccgcatgctacaggacacggtgctggccgccggttgcaagcagatactggtgccttttcccccccagactgctgcttccccggatgagcagaaggtgtttgccctctgggagtctggagacatgagtgatcagcatcgacaggttttgcttgaaattttttccaaaaattaccgggtacgccgaaacatgatccagtctcggttgactcaagagtgtggagaagatctcagtaaaca

SEQ ID NO: 9913 - DNA, 506 bp, Homo sapiens
ggcacgaggaatgtgtcctggcagagctcaagggcgttacatgcgagaacagggaggctgtgctggatgcttttctggatgatggcttccttgtccccacatttgaacagttggcagctttgcagatagaatatgaagaaaacgtggacttgaatgacgtcctggtgccaaagccgttctctcagttctggcagcccctgctcaggggcctgcactcccagaacttcacgcaggccctattggagaggatgctctctgaactgccagccttggggatcagcgggatccggcctacctacatcctcagatggaccgttgaactgatcgtggccaacaccaagactggacggaatgctcgccgattttctgcaggccagtgggaagcaagaaggggctggaggctgttcaactgctccgcctcccttgactggccccggatggttgagtcctgcttgggctcaccttgctgggccagcccccaactccttcggatcatcttcaaagcc

SEQ ID NO: 9914 - DNA, 278 bp, Homo sapiens
ggcacgaggtggcccccttccatgaccaccaaaacggcgtgcacaactacgacctgcacgacaccgtctccttcgtgggctccaacaccttctacctcaacgcggcgcaaacatccggccagtcggcctgcctcggggccctcctcttcctctacacgggagacttcttcctccacattcggttccacgaggacagcaccagcaaggagctgccaccctcttggctgtgcctgcccagtgtgcacgtgagagccctggaggcgcaggcctgagcccgc

SEQ ID NO: 9915 - DNA, 342 bp, Homo sapiens
ggcacgaggttctgagcaactggaggctgctggggctgtggtggcggctggtggtgctgtgtgtgatgcatctgctgcagctgctggggcagagcctgggagggcggaggctgtggctgctgcatcggtggctgctgaattggtggctgggcctgcaaagcctgctgctgctgctgctgctgctgctgctgctgctgttgctgttgttggagctgcagctgtgctattcgctgcagctgctgttgctgctgctgtatctgttgctgattttgatgatgcaatttaattagatgctgctgctgctgctgctgctgctggaactgctgctgctgctgcactact

SEQ ID NO: 9916 - DNA, 210 bp, Homo sapiens
ggcacgagccggcccaggattagcgccctgggagcgcgcgccccgctgcctcgccgccacactttcctgggagcggcggccacggaggcaccatgaagaagtcttactcaggaggcacgcggacctccagtggccggctccggaggcttggtgactccagtggcccagccactgaggcggctcccagctgcgttggcgacatggccgaca

SEQ ID NO: 9917 - DNA, 99 bp, Homo sapiens
ggcacgaggagagagagagagagagagagagagagagagagagagagagagagagagagagagagatctttttttctctctctctctctctctctgtgt

SEQ ID NO: 9918 - DNA, 533 bp, Homo sapiens
ggcacgagcccgcgctcgccgcacgcacgcgcactgcgcccagcatgagggtcgcggctctgatcagtggtgggaaggacagctgctataatatgatgcagtgcattgctgctgggcatcagatcgttgctttagcaaatctaagaccagctgaaaaccaagtggggtctgatgaactggatagctacatgtatcagacagtggggcaccatgccattgacttgtatgcagaagcaatggctcttcccctctatcgccgaaccataagaggaaggagcttggatacaagacaagtgtacaccaaatgtgaaggtgatgaggttgaagatctctatgagcttttgaaacttgttaaggaaaaagaagaagtagaggggatatcagtaggtgctatactttctgactatcagcgtattcgagtggaaaatgtgtgtaaaaggcttaatctccagcctttagcttatctttggcagagaaaccaggaagatttgctcagagagatgatatcatctaacattcaagcaatgatcatc

SEQ ID NO: 9919 - DNA, 373 bp, Homo sapiens
ggcaccagagccaccacacctggctaggtttacatttttagaatatcccttggaaagtggttggagagtagcaaaagtgtgttgtttggtaaaatatctctggaaggaaacttcagacaatagtaacagcagtcttcttggcaggcaacctgggagacagggataaatgggagactccctgtttataacatacccctttgtactttctaagttttatactatgtacatgtattcattgactgaataaatagctttataaagtcgtttttataaaagagaaggttgggaggagctatcaggtagcaactgcagatgtctaaggaagaggtcatggtggtcatttggactgggtgctggtggtggagtcaaagtg

SEQ ID NO: 9920 - DNA, 509 bp, Homo sapiens
ggcacgaggtaaagacaaggctcattaattcagatatttggaattcaaaaatatttaaagttaaccacagcataatgaatcctcaacgtccagagttctacaaaaatccagcaaaacttacttttactcattcatcagttctatgtcactccttagtttccctaaaaaaatatggctttataaaaagtagcttctataattcacaaaatgaagagttttattataatttgagtatcatctctgtatcaccgacagcacagctttagaaaattattgcttttcttattatcttattatttcaggtttcattacacatcgagtacccatgcaggactcactacattgtataataactatgatctatagtgataaaaatatagaagtatctttgattttaatcctaaaagcagggggaaaaagtcaccttatcttaatgttaacaaaatcaagagctacccctaatatatcgatcaaaccacttcttatggctttgcttatagttgctcatg

SEQ ID NO: 9921 - DNA, 608 bp, Homo sapiens
ggcacgagattaagtgttggttcatagagattgccaataatcagaaagaaccttaaatgtgcatttaagacagtgtcccttcccttcttttcaatgaaggtccctgcctatataaatcatctggcacgctggtgggaaatcctttgctcttccaacgtgttattagtgctgggcagagatggggcacactcaggggccaaagaggacaaaaagtccatgcaaaacttgagtcttttaatggcttaagataatcaggagtcagttctgaatcttacaaagtgctctgcttaataagtaccttacttagcagagcactttgcaaacatattacttattagcagagctctttgtagaccttccacatctggctgtcagatcttaaggttgtgaatttaggctccagttatattcactggagagcataatcccacacgggttgtttataaatacagagcctctgattggacggtctcctgccaagaactagtaatacccttgttttaaaatcttcacaaggtaaaacttaaaaagccaaccaaacaaattgctctccattctacttttaattgggccaaacagcatatgctacagtagtaacatgttttttc

SEQ ID NO: 9922 - DNA, 650 bp, Homo sapiens
ggcaccagccggggtcgccgcagcccgggaggagtgtctggtctccggcctgcctgtgctgtccccgcgccctgtccactggactcccgagacccttggaacccaggacaccattggagaaactgggcattttaccaaggatttgactggaatggcatgcttcctttaaagatgaaagttgacttttagagccaattaaagccctttggggaatctggcctcataccttgtccacacagagttcctgtacaaggttcctgacctgtgggaagcggcacagcaccagctaggcagagacgccccaggccatgttagagctttgagtgaggcctggtaacagggaggcgctgtcacctactggccttgccaatccagctccaagatgctgagcctgaagctccccaggctgtttagcatagaccagataccccaggtgttccatgagcaaggcatcctgttcggctaccgccatccacagagttctgccactgcctgcatcctcagccttttccaaatgaccaatgagactctcaacatttggactcacttgctgcccttctggttctttgcatggaggtttgtgactgcactgtatatgacagacatcaagaatgacagctactcctggcccatgcttgtgtacatgtgca

SEQ ID NO: 9923 - DNA, 502 bp, Homo sapiens
ggcacgagggaaaaagctgcctttgtcaaactgtacttagtctctcaaggacgattccccttggtgaacctgaccgatatgctgagcgttgctgtgcagcaccgtgagaaagaggtgttggcctggatgattctgcacagcttataccaggcacggattgtgagccatgccaatacgggcgttttgaagagaatggagtggctcttggaactgatgggttatattagaaatgttgcttaccagtcaacatcctttcacaatacggctcttgacgaggctttggacttcttcttgctgatatttgcaaccgcagtggttgcatgggctgaccacactgcccctctcctcctcggcctcagtgccagttggttgccatggcatcaggagaatggcccggctgggccagtaccaagcttccttggcaggagtccaatgcacagggtcactctgcaggaggttctcactctccttcccaatagcatggctctgctgctgcagaaag

SEQ ID NO: 9924 - DNA, 312 bp, Homo sapiens
ggcacaaggtggaatgggaggaggtcgcgctgtccatgggcgtccttggcctgcgccacccacagatgataaatagccaaagacgtcaatggcacccatggacatagtaagcatagtaggagctgaaaaactagaagcaatgacaatgtcaactattatgagcacaaagaagcagtgtcttcggaacatttgatcgtataaccagaaattaaaggatgagaaaaacatttttctgaagcttatactttcacatttcctagagagcatatttgtgaggatgggggtgggtaaacactcaacaaaggtttcttt

SEQ ID NO: 9925 - DNA, 514 bp, Homo sapiens
caccccgaactgctggccaaaaagcgagggaccaaaggcaagtcggaaacgatcctctccccacccccagagaaaagaggcaggaaggccacgtcaggcaagaagggggggaagaaatccaaggctgccaaaccacggacgtccaaaaagtccaaaccaaaggacagcgataaagaaggaacttcaaattccacctctgaagatgggccaggggatggattcaccattctgtcttctaagagccttgttctgggacagaagctgtccttaacccagagtgacatcagccatattggctccatgagagtggagggcattgtccacccaaccacagccgaaattgacctcaaagaagatataggtaaagccttggaaaaggctgggggaaaagagttcttggaaacggtaaaggagcttcgcaaatcccaaggccctttggaagtcgccgaagccgccgtcagccaatccagtggactcgcagccaaatttgtcatccactgtcacatccctcagt

SEQ ID NO: 9926 - DNA, 595 bp, Homo sapiens
aaaagtgttaccacttcagcatcaggaagtgaaaatcttactcttattcaacaggaagtggatgctttggaagaattaagcaggcagctttttctggaaacagctgatctatatgctaccaaggagagaatagaatactccaaaaccttcaaggggaaatattttaattttcttggttactttttctctatttactgtgtttggaaaattttcatggctaccatcaatattgtttttgatcgagttgggaaaacggatcctgtcacaagaggcattgagatcactgtgaattatctgggaatccaatttgatgtgaagttttggtcccaacacatttccttcattcttgttggaataatcatcgtcacatccatcagaggattgctgatcactcttaccaagttcttttatgccatctctagcagtaagtcctccaatgtcattgtcctgctattagcacagataatgggcatgtactttgtctcctctgtgctgctgatccgaatgagtatgcctttagaataccgcaccataatcactgaagtccttggagaactgcagttcaacttctatcaccgttggtttgatgtgatct

SEQ ID NO: 9927 - DNA, 532 bp, Homo sapiens
tattaacctgttgtcatatttgctacaaacatttccatgatgaattatttgtcttttaatattgttcattgtttggacatgtagaaatgtgttatcttaggagtcaaaatctgtccaacttttgttttgtttttcctattctatacttggaagaacttattctccaagaagtttgataaataagtacattatatttaatgtttttaaaaaatggtttaataaactatttcccctgcaattgctatttagccatcttgtcattatttattaaccaattcttcctttccacagtgatgtagtatcttttcagttatattagttatagagtcagatatagctcttgttcagtgccatactgttttttttattgtagctttataatttagtttagtattctcactaggccagttttttaaagagacggagtctcactctgtcactcaggctagagtacagtggcgtgatcttggctcactggagcctctgacccctgggttcaagtgattctcctgcctcaacctccctagtagct

SEQ ID NO: 9928 - DNA, 543 bp, Homo sapiens
ggaagatggacgcagctactctgacctacgacactctccggtttgctgagtttgaagattttcctgagacctcagagcccgtttggatactgggtagaaaatacagcattttcacagaaaaggacgagatcttgtctgatgtggcatctagactttggtttacatatcttgtaaaaactttccagccattggggggacaggccccacctcggacacaggctggggctgcatgctgcggtgtggacagatgatctttgcccaagccctggtgtgccggcacctaggccgagattggaggtggacacaaaggaagaggcagccagacagctacttcagcgtcctcaacgcattcatcgacaggaaggacagttactactccattcaccagatagcgcaaatgggagttggcgaaggcaagtccataggccagtggtacgggcccaacactgtcgcccaggtcctgaagaagcttgctgtcttcgatacgtggagctccttggcggtccacattgcaatggacaacactgttgtgatggaggaaat

SEQ ID NO: 9929 - DNA, 356 bp, Homo sapiens
aagttttattttaaattaaatatagaaattattggcaacaacactggataggatttaaaacaaaaataaaaattgtttaccaaagtcaaatgatttgaaaacatttttaaaagcttatgtgcctgttaagatgaaggccttgcgctagttgctcatgaatcaatagctaatatgacgtaggagagtaaaaggaggcagatagctaaataagtggtatggtggtgggcgcctgtagtcccagctactcaggaggctaaggcaggagaatggcgtgaacccgggaggcggagcttgcagtgagccgagatcacgtcactgcactccagcctgggccacagtgtgagatctgtctcaaa

SEQ ID NO: 9930 - DNA, 429 bp, Homo sapiens
  misc_feature 327: n = A,T,C or G
ggcacgagctctactcaatagtccccccagctttgtgtgctggtctcggggcttcatggagatgaatgggcggggggagttggtggagtcactcaagagattctgtgcttccacgaggcttccccccactcctctgctgctattccctgaggaagaggccaccaatggccgggaggggctcctgcgcttcagttcctggccattttctatccaagatgtggtacaacctcttaccctgcaagttcagagacccctggtctctgtgacggtgtcagatgcctcctgggtctcagaactgctgtgggcacttttcgtccctttcacggngtaatcaagaaaggtggcttcgtccctgtcatcgcccactaagggaagccaatgaggaggttgcacttcgtgtaccacaacttgtggcccaagaattggccc

SEQ ID NO: 9931 - DNA, 402 bp, Homo sapiens
cgttgctgtcggtgggagagaagtattcacattctcaggctccaggcctgtgcaaccagaggagtggaattgtcattgaagggaggcgggaggaggggtgatggtgttagaagagataatatgcatgtggccacccccacaaacctttaggaatgcagtgcataattaggactaaaggcactgatttggatgtggtgggtgataggtggtctgtgggagtaaatgagatgaatgagacactagaagtaggttggaaatagaatcctggggacaagaatcagtggagaaagaggtgactgtgaaggaatcaggatgcaagaagagtcagtaaagtttagccttcaagaagtcaacagaagggggagaatttgaattctgttttcaacctgttttggttggagg

SEQ ID NO: 9932 - DNA, 540 bp, Homo sapiens
gaaatggtaagagtgattagtgaaatgtaattactgtaattttttccccattcaactttatatatctttaactgatgaccagatcattgttgttctgaaccagtttgtggtcagcaagtgttttgtggggttttgtttgtttgtttttaaagaacagtttgggtcacttgacatggttctccaaagggatgttatgggttgtatttggttctgggtgataaccgacttgttagataatttagataagcaaccgagttgccatgtttgtttgtcgaatctcaagtgtagcttatattttatgttcctagagaggttgtcagggaagatttgaccctttggcaaatctgtttgaatagagatactagccatgctgcccaatagggctttctggccctgaaaaagatacggagtattcttggaaagttgaagggaaaaagaataaactgatccatgtagtagcatgcagattattgaggaattttctaaaggtatctctctcggtgtatttctctacttacctgtaataatgcttttgtctta

SEQ ID NO: 9933 - DNA, 593 bp, Homo sapiens
cggcacgagcaaagagggttttctacatacacagaagcagttcaacttctcaagttaattttgataagcagaatctactactggccagagcgacaggagtggctaggggttgccagccagtccctttctgatgatcaaggccctgcacagcaggatgccacaggatgcccctgccatctagctggaagcatcaaaagtccctctgtatgacccggtgtgggaaagagggttgtcaggatgagaaagtggggctgcagggtgacgataagaccacctaaccaactccccacctccaccaccacaataagaacaaaactgtagggctctaaagagagggggtggtttacaagtttattgagcatttactaggaagtgacatggcgatgacctctgtacatgagttaggttcactttcatgtggcctcccactacagagatgcgtatgcccagaagtcagctctctgaggagacaggctactttggccccagtttgaagcattctgtccaaatgtcctgagctctccagcagtcaagtagtgaatggataccatacttattatggttgatgaaaaaaggcagagcttatcctcaat

SEQ ID NO: 9934 - DNA, 550 bp, Homo sapiens
taaaacaagatctgctgttcatattttttaatttctcaggaagggtacattttgggctttgggtttatactgcgagcctttttttgtttttcttgtatgtatacctaagtagtcatatgttttcacatggtcagagttttgataataatactctacctagcttctgaacagtttaataatagatttaatccgtgagaggaaataccctcgaaagttactatataaataacaccttactatctggtggcatttacttagttcttagaactggctaattagtttatcggttaaagtaatttgctattatattgtaaaatagtacatttgaggctcacttataaaaattggaaaacatcgaaatataagaggtccaagagggtgtttgaaacacattttgctaagttgacaggaaattaatagactttttatgggccattaactaataatacactcaaaaaaaaggtacagttaaataaaggttttaaatagtctataccgtatactaaaactaaattaatatttaggactgaaataacatattgattaagta

SEQ ID NO: 9935 - DNA, 524 bp, Homo sapiens
ggcacgagcccatctcctgttcacacaatggagcaaaaacctctacagtcattgtcttcaaaagtgcagtcattaacaattaaatcaaatagctctggtagtactggtggaggggatatgcagccttcgttacgtggtttacctaatgggcctactcatgcttttagttctccttcagaatctccagattctacagttgaccggcagaagtcatcactgtcaaataattccctgaaaagctcaaaaaattcatctttgagaactacttcatctacagcaacggctcaaacagtgccaattgatagctttcataacttgtcatttacagaacaaattcagcagcattcattgccacgcagtagaagtcgacagtcaattgtttccccatcttccacaacacagtccttaagacagagtcataattcaccaagtagtgaatttgagtggagtcaagtaaagcccagtttgaagtcaactaaagcaagtaaaggggggaaatcagaaaattctgccaagtctggatc

SEQ ID NO: 9936 - DNA, 422 bp, Homo sapiens
ggcacgaggagagagagagagagagagagttagagatagagagagagagagagagagagagagagagagagagagagagagagagagagagagagagagagagagagagagagagagagagagagagagagagagagagagagagagagagtgagagtgtgagagacagagagagattgagagcgccccccccctctttctctcccctctctttgtttttttttttttcccctctctctctctctctctctctctctcttttcttttttctctctcctgaggggtggcccccttctctctcttctctctctctcgcgcgcgcgctcctttttttttgtggctttctttgttgggcccctctctcctctccctctctccctctctcacccctcctcgtgtgtgttcgctccctctctcccccc

SEQ ID NO: 9937 - DNA, 463 bp, Homo sapiens
tgctcgatctgcacgatcccaacgatgcgaaatcggcacgagcagaaacccggttcccagcgtcggcggcccggcttccgctgcccgtgagctaaggacgggccgctccctctagccagctccgaatcctgatccacgcgggggccaggggcccctcgcctcccctctgaggaccgaagatgagcttcctcttcagcagccgctcttctaaaacattcaaaccaaagaagaatatccctgaaggatctcatcagtatgaactcttaaaacatgcagaagcaactctaggaagtgggaatctgagacaagctgttatgttgcctgagggagaggatctcaatgaatggattgctgtgaacactgtggatttctttaaccagatcaacatgttatatggaactattacagaattctgcactgaagcaagctgtccagtcatgtctgcaggtccgagatatgaaac

SEQ ID NO: 9938 - DNA, 562 bp, Homo sapiens
ggcacgaggcaaagggagacgtcatttgctactatgggaaccgaggggagcctgatcctatcgttttgacgccaggcacctacgggctgagcaacgcgctgctggagactccctggaggaagctgtgctttgggaagcagctcttcctggaggctgtggaacggagccaggcgctgcccaaggatgtgctcatcgccagcctcctggatgtgctcaacaatgaagaggcgcagctgccagacccggccatcgaggaccagggtggggagtacgtgcagcccatgctgagcaagtacgcggctgtgtgcgtgcgctgccctggctacggcaccagaaccaacactatcatcctggtagatgcggacggccacgtgaccttcactgagcgtagcatgatggacaaggacctctcccactgggagaccagaacctatgagttcacactgcagagctaaccccacctctgggcctggccagtgggctcctggggggccctgccttgaggggcactgtggacaggaaaccttcctttgccatactgcattgcactgcccgtggcttg

SEQ ID NO: 9939 - DNA, 146 bp, Homo sapiens
gccagggtccagagaggctggtgtctggctccgacgacttcaccttattcctgtggtccccagcagaggacaaaaagcctctcactcggatgacaggacaccaagctctcatcaaccaggtgctcttctctcctgactcccgcatc

SEQ ID NO: 9940 - DNA, 398 bp, Homo sapiens
tttcaaaggatactgtcatgaagcagacacatgctgacacacctgttgatcattgtctatctggcataagaaagtgtagcagcacctttaagcttaaaagtgaagtcaacaagcatgaaacagcccttgaaatgcagaatccaaatttgaacaataaagaatgttgtttcacctttacgttgaatggaaactccagaaaattagaccgtagtgtgtttacagcatatggtaaacccagcgagagtatctactcagccctgagtgctaatgactatttcagtgaaaggataaagaatcagtttaataagaacattattgtttatgaagaaaagacaatagatggacatataaatttaggaatgcctctcaagtgcctgcctagtgattctcattttaaa

SEQ ID NO: 9941 - DNA, 145 bp, Homo sapiens
gaaccatgcttctttctacaagtttaggaaaacatttcacgtgggagtgaacaacagattgtggtgatggttacacaactctgaatataaaacactgaactgttggctcacacctgtgatcccagcactttgggaggcgggtcac

SEQ ID NO: 9942 - DNA, 349 bp, Homo sapiens
cattggctttgcttgaatttttgcttggttggttagtggaattagaatgaataggttttaaggccatttatggtggctcatacctataatcccagcactttgggaggccaaggcgagagaatcagttgaaaccaggagctcaagaccagcctggacaacatagtgagacccccgcctctataatttttttttttttttaaattacccaaggggggtaccacacccctttaatcctacctactcaggaacctgaccaggaggattgtttgaccccaggaggtcaaggatgcagggagctatgattaccccactgctttccaccctgggggacaaaacaaaaccctgtttt

SEQ ID NO: 9943 - DNA, 393 bp, Homo sapiens
tccaggtaacaaccctgcacatatatcccagaatctaaaataaaaatggaaattataaaaaaaaaagaaattaaattgtgaagaaaacaaagtatcaaaagaccttttctgttaaagtctaacaatgttcaaatttagcttcttggaaataacttttaaatagctaaaagcgtcaacagaaaactgtggactacaggaaaagaactgcttcatatttcccgaatcttctcaaacttggtatctgcatatcaatgactttagattttatttttatgttgctgttacttttgctaaggaagtattatggtatacatagatactgtctatgctattttaaaaaatatctaggaaaatacattaagatctgtttattattactattaggggtttctt

SEQ ID NO: 9944 - DNA, 378 bp, Homo sapiens
aagaggtatacccagacctcactccagaagagaccagaagaaacagccttggaggtgatgtcttatttgtggggaaacatcacccactccatgacttcattttagagctgtaccagacaggttccacagagccagtggaggtaccccctgaactatgtcatgggattcaaggaaagttttctttggatgaagaagccattcttccagatcaaatagtatgttctcctgttcctatgttaagggatctgacacagaacactgtagtcagtattaattttaaagacccacagtttgctgaagattacatttttaaagctgtaatgcttccaggagcaagaaagccagcagcagtactgaaacctagtgactgggaaaaat

SEQ ID NO: 9945 - DNA, 441 bp, Homo sapiens
ggaacctgaaatgagaaaagggtagtgaaggaagacttgatgtccttcataactggcctgcatcctgcccagcccctcctttctttccagaagcccaccagtggcccagagtggaagggtgggagtcagaccagtccaaggttgctaattaagactggactgccaggcacggtggctcatgcctgtaatcccagcactttgggaggctgaggcgggcagatcacctgaggtcagaagtttgagaccagcctggccaacatggtgaaaccccgtctttactaaaaataaaaaaattggctgggtgtggtggcacgcacctgtaatgccagctactcaggaggctgaggcaggagaattgcttgaacctgggagacggaggttgcagtgagccgagatttggccactgcactccagcctgggtgacagagtgagactccgtgt

SEQ ID NO: 9946 - DNA, 494 bp, Homo sapiens
aacccagcatttgggcatctagaagccttcccaagggctaaggagacacctgaaaaatgagaaagagttacagagccaggcccttaagttggccctgccaaccactctccaaaacccttagatttttgctgcctttgcccttgacactgtcctttccctggagctgaatgtctgggggtagaggaatgactttaaaagtcgaggatcaggcctggcatggtggctcatgcctgtaatcccagcactttgggaggtcaaggcgggtggatcacctgaggtcaggagttcgagaccaggctgaccaacatggtgagaccccgtctctactgaaaatacaaaaattagctgggcgtggtggaagccacctgtaatccaagctactctggaggctgaggcaggagaatcgcttgaacccgggaagcaggggttgtagtgagccaagatcacgccaccacactccagcctgggtgacagggccagactccgagtgttcc

SEQ ID NO: 9947 - DNA, 656 bp, Homo sapiens
taaatgggatacacgtcttcttaagtaattcaaagtctagtaggggaagcagaaaggtaacaaacaattaagatacaaaagtaaaacaaaagccctctgtagagtgctccaacatcttttattccttatcatctccccaaattccaatttgctgcccctatatgccctttaaaaaaacccaggccgggcacaacggctcacacctgtaatcccagcactttgggaggctgaggcaggaggatcacttgaggccaagagttggagaccagcctggctaacacggtgaaacttcgtctctactaaaaatacaaaaattagctgggcgtggtggtgcgcgcctgtagtcccagctactcaggaggctgaggcaggagaatcgcttgaacccaagaggcagaggttgcagtgagctgagatagcaccactgcactccagcctgggcaacaaagcaagactccatctcaaaaaaaattccggaactaggcgtggtggctcacacctgtaatcccagcactttgggaggccgaggcgggcagatcacctgaggtgtcaagagctcgagaccagtctgggcaacgcggtgaaaccccatctctactaaaaatacaaaaattagctcggcgtggtggcaagcacctataatcccagctaacttg

SEQ ID NO: 9948 - DNA, 554 bp, Homo sapiens
  misc_feature 406: n = A,T,C or G
aaatgatacctttaaaaaagcctcttcctaaagacttcttttaagtaaaatgatgatcactaattactttgttgtgagcacaaataagaattactttcttcaaaaattctaactaaataaattactccagtcaaaaagatgtactcaattaattctttattaagggcgttgtaaaatctaagtgattgttccagagaagttaggcagtgccaggaaaatatttatcacttagcttagtaattatttacttagaaaaagttcaaaaaaggccgggcgcagtggctcacacctgtaatcccagcactttgggagaccaaggtgggcggatcacgaggtcaggagttcgagaccagccaggccgacatggtgaaaccctgcgtctactaaaaatacaaaaatttagcanaaatttagctgggcatggtgggtgcctgtaatcccggctactcaagaggctgaggcaggagaattgcttgaacccaggaggtggaggttgcagtgatcttagatcacgccattgcactccagcccaggtgacagtgggagactctgac

SEQ ID NO: 9949 - DNA, 635 bp, Homo sapiens
gactttcagagacaaacaaaagctgaggaaatttatcaacaccagacatgtcttacaagaaatgataaagggagttctttaatctaaaataaatggacactagatgcaacaagaaaccgtctgaaggtattgaactcccaggtaaaagaaagaaaatagacaaacttaaaatactcctaatactgtaatcgggataagtaaatcatatatcctatgtatgaagactaaaagacaaaaatgttaaaaataactgcaggccaggtgcggtggctcacgcccagtaatcccagcactttgggaggttgaggcgggcagatcacgagatcaagagattgagaccagcctggccaacatggtgaaaccccatctctcctaaaaatacaaaaattagatgggtatggtggctcacgcctgtaatcccagctactcaggaggctgaggcaggagaatcgcttgaacccaggaggtggagtttgtagtcagccgaggtcacaccgctgcactccagcctggcgagagagtaagactcagtctcaaaaaacaacaacaacaacatcaaagactacaacaattagttaagagataggcaatataaaaagatgtcaattggaatatgaaaagtaaaaatctggggg

SEQ ID NO: 9950 - DNA, 86 bp, Homo sapiens
aaaaaaaaaaaaaaaaaaaaaaaaagggggcccttttttccgtaaacccaaacttaaaaaaaaccttggtttttttggaaaaaccc

SEQ ID NO: 9951 - DNA, 615 bp, Homo sapiens
  misc_feature 382: n = A,T,C or G
catttttaattatctcaagtgttgcattctgtagatgaagcttaagagctagatcttatttgaaaaaatctgtcatctaagtccctgtgtcccacatttattcaagtgcataaagtaataaagaagatgctagtttttaacttattgtttgccttttcattttttaatagaaaaccaaggcaaaaaaaagtgtatattatgcacagtgcttggcacaaagtaggatttgagatgtactttgtctcattttatcaaaatatacttatataaaggtgaattaggtagctgcctagatggtgtaattttaagtgcaccaaaagtctctgaatgactgcatcatgggtgaccttaaggaattttttgtttttattggatatctcanactacctaattagttaggcagtaaacgtgtcattggccccagacagctgctattaagctattatcattggcatataggcataaattatatacttgaactgcatggatacagttcattaattgatgttttgagccatgataaatcagagagagagagactaggatagcaggggtaaattctgagttttaaaggaaaaagaagacagtggcaaaccagagaggacaggtctgaat

SEQ ID NO: 9952 - DNA, 71 bp, Homo sapiens
ggctttcgcatcactgatcagaggtcagcattcacctgggtccctttggagtggtgctgacttctctcctc

SEQ ID NO: 9953 - DNA, 353 bp, Homo sapiens
cacaaaaaacaaattgtgaattaaaacaaattatataagtaaatgcatatttagcataagaaaagaaatcccctcaaaataccaaattttatctaatacatactacaatacataaaaataattttttttatttattaacttcatagcatacctttctaataccacattttctttcttttttttttttttttggaaacaaagttttctaaattttttggccaaggctgcaaaacaggggggggatttaagttaattgaaacctttcctttcagggtaaaaggaattttctggcctaagcctccaaaaaagttaaaataaggggggggcacaacattgccgggttatatttgtgt

SEQ ID NO: 9954 - DNA, 82 bp, Homo sapiens
gcaccaccttcaacattggcgatcaactgtcaatatgagacttgaaggcaacaaatatccaaactatatcatttgtaatatt

SEQ ID NO: 9955 - DNA, 432 bp, Homo sapiens
aacacaagagtcaacactctgtaattggaaatattaatctgtgtgaaggaaatagctaaattaatgtcaaacaacaatcccgaagacaaagctgatgccccagactcagtttcagttgggattaaatagatattatttcagtgtttattaaaagatgagacacattaactaggttatcactcgtatttaagtttctttaactatacgggtctaatgtaggtactaaacaaagttaaaaatattttaaaatagctaaaaaataagcaaatttgcatacagaaaataaatttattagacacttttacatttaattactgaccatttgtatatcttctcttgagaaatatattttcagtttttgtccatattatctaaactatctaaagtgagttttaaattaatactcacctggaagtaaaagtaaagtgtgtt

SEQ ID NO: 9956 - DNA, 366 bp, Homo sapiens
gctcccctaacagcctttaagatgtggctacttgtttttcccaccgtttaacaccctccaacttcatttggagcacgggttcctcaagggatcctgagagctgggtgctgggtgctggtttggagaggcaggatgatgcttctcccggctggggagagcagagcaggaaggctggttggcgccatgaggaaagagccacgaggttttagctcccgaaccgactcgtcagtagcccctcctccatgttggttttacatttttccctcctggtctggactactttagcgcaaggagcccagccagacacggcagcaggccgcattgacccgtctccatcggaccccagcccctatctccaagagacag

SEQ ID NO: 9957 - DNA, 562 bp, Homo sapiens
ggcacgaggagaaagtaaagtccctttataatggcatgtgaaccagacaatttagtagccagggttgtaaggcaactcttaactgacaatatagttagtatattctgggccttcatcttcaaaattagtaggtagtatttattgagtgcatatcatgtgccaggcctggtgctgagtgcttacaatgatcattttatatatgggaaaattgaggctcagcagggtcaagtgccttgtaagaggtagcactagtaagtaacagtgctcaaattcaactaggtctttcagctttttatacaatactgcctgttatcagaaagtatagtcttaaaatctgctatcaagcatctatcagaagcctgatgagaaatattcagatgatctaacgcagttcccaaacctgcattgtgggccgttttcattacaattacctaaggtgctttaaaaattttcttgggccctactcgttgtggttcagcagctgtgtaatggagcaaaaaggaatagtcactaaacagcgaaggaaagtggtggaattattgaaagacctagcacttacctg

SEQ ID NO: 9958 - DNA, 515 bp, Homo sapiens
ggcacgaggaaggaagaaaatttgggactttgttttaaaagtggaatactatcttcttaaacaacttgtgtttaaaacaagccccaatccacacttgatcttcttaagctaggaaaagtgagctcacactgagtgctggcaggatgctccatgtgcatcattattttgtttaattctcacaataactctctaaatcccttttgaggataaggagactggggctgggagaagttatttcaaggagtaaataaaaaattcagacccacttgggttttatgccaaaggctctgtttttacaaatacacaatattgttgcccagttgtgatgaaacataatttatgaatttcactgagggaatttcgcaaaaggaaagaatttacttttccctctaaagcagaggcttttcatatgcaactgttaaaagacacacgagcttgtgggtctgatgggtggtctgagctgttgctgttgggagagctgctgggacactagcaggaagacgtagtttgtgctc

SEQ ID NO: 9959 - DNA, 498 bp, Homo sapiens
tggtcagcagtaagatggaagaaagaaagtcaaagctggaagaggccctcaacttggcaacagaattccagaattccctacaagaatttatcaactggctcactctagcagagcagagtttaaacatcgcttctccaccaagcctgattctaaatactgtcctttcccagatagaagagcacaaggtttttgctaatgaagtaaatgctcatcgagaccagatcattgagctggatcaaactgggaatcaattaaagttccttagccaaaagcaggatgttgttctgatcaagaatttgttggtgagcgtgcagtctcgatgggagaaggttgtccagcgatctattgaaagagggcgatcactagatgatgccaggaagcgggcaaaacaattccatgaagcttggaaaaaactgattgactggctagaagatgcagagagtcacctggactcagaactagagatatccaatgacccagacaaaattaaacttcagc

SEQ ID NO: 9960 - DNA, 386 bp, Homo sapiens
ggcaccagtttacattttgtttgaatcaggatccaaataaggtttaaatattgcaatttgattaatacattaagattcttttaatctataagttcctgctccatctgtcattttatttttatcccttgaaatttatttattgaagaaactatatcctttgctttgtaaaattttccacagtgtggctggctttggctgattgctagcgtcatttgctatttatttttgtcctgtatcttggatctggcgccttgatcagatttaagttgatttttggggacgtaattacttcataggtattatgcatttttggatagaggagtaaagtagtgaaagtaatgtttttaggatggtttgtctggcagcagtgtgcaaaatgaattggt

SEQ ID NO: 9961 - DNA, 612 bp, Homo sapiens
cgaattcggcacgaggctacctgggcggcgacgggctggacgtggacgtgcccacgcgtctggagggctggttcttctgcacgcccgcccgcaagctgctctggctggtgctgcagcccttcttctactcactacggccgctctgcgtccaccccaaggccgtgacccgcatggaggtgctcaacacgctggtgcagctggcggccgacctggccatctttgccctttgggggctcaagcccgtggtctacctgctggccagctccttcctgggcctgggcctgcaccccatctcgggccacttcgtggccgagcactacatgttcctcaagggccacgagacctactcctactatgggcctctcaactggatcaccttcaatgtgggctaccacgtggagcaccacgacttccccagcatcccgggctacaacctgccgctggtgcggaagatcgcgcccgagtactacgaccacctgccgcagcaccactcctgggtgaaggtgctctgggattttgtgtttgaggactccctggggccctatgccagggtgaagcgggtgtacaggctggcaaaagatggtctgtgagcccaggctgcctcctggtggt

SEQ ID NO: 9962 - DNA, 643 bp, Homo sapiens
cgcagcggatggccgaaaatctaggcttcgttgggcctttgaaaagccaggctgcagatcaaattacgaagctgtataatctcttcctgaaaattgatgctactcaggtggaagtgaatccctttggtgaaactccagaaggacaagttgtctgttttgatgccaagataaactttgatgacaacgcagaattccgacaaaaagacatatttgctatggacgacaaatcagagaatgagcccattgaaaatgaagctgccaaatatgatctaaaatacataggactagatgggaacattgcctgctttgtgaatggtgctgggctcgccatggctacttgtgatatcattttccttaatggtgggaagccagccaacttcttggatcttggaggtggtgtaaaggaagctcaagtatatcaagcattcaaattgctcacagctgatcctaaggttgaagccatccttgtcaatatatttggtggtatcgtcaactgtgccatcattgccaatgggatcaccaaagcctgccgggagctagaactcaaggtgcccctggtggtccggcttgaaggaaccaacgtccaagaggcccagaagatactcaacaacagcggactccccattacttcagccattgacct

SEQ ID NO: 9963 - DNA, 91 bp, Homo sapiens
gaatgggtgattggagattattagattctaggttaacttctaccactttaccctaatacataaaactttttcctaaataaatgatggaagg

SEQ ID NO: 9964 - DNA, 105 bp, Homo sapiens
gtgcatctcctattcaaggcactggggatgaagcagtgaacaaaatagaaaataaaaatcctggccgggcgcggtggctcacgcctgtaatctcagcactttggg

SEQ ID NO: 9965 - DNA, 532 bp, Homo sapiens
gactagagggttggtgaaaattcagacagaatgtaacttgacaaagagaagacagcaacaactgtaacaattatcttatgaatatttgcgaaactcaaagggatctgattggtgacctctgggctttatcaaattaacatcacaacttctagaagaaagtcaaccttcatcttttacaatagaaatcatatgttttgctaacccattcctatttaggctgaaaacaattaagagttatgggtacttaaaaaaatcattatgtttataaaattagtgatagaaggagcatagtgttctatacagtcacacacatacacttccttatttcttttatttaaactttgagtaacatagcagtctatgtttgggtcagttttcccttttttgtaattacattcagtggtttttgtaacttcattatttattgggaattagtgatttagtcagtgggagttttgtaaaacttaagattttggcttttttccccctcctcctggataaccagttaacccaataatggcttggccgatgg

SEQ ID NO: 9966 - DNA, 86 bp, Homo sapiens
gctgagaatggtgtggaggagaaaaagaaagcctgcaggtcgccaacagcccaatcccctaccccatctgtggaggcggactcccc

SEQ ID NO: 9967 - DNA, 68 bp, Homo sapiens
tgtgtgcgaagaatgggtgtctggaagcattgtgcattgagacgactgcaggtaactgcctggtatgt

SEQ ID NO: 9968 - DNA, 416 bp, Homo sapiens
ggcacgagacacaactttgagacaccccaagtgctttctgcagaggttgtcgttggaaaactgtcaccttacagaagccaattgcaaggaccttgctgctgtgttggttgtcagccgggagctgacacacctgtgcttggccaagaaccccattgggaatacaggggtgaagtttctgtgtgagggcttgaggtaccccgagtgtaaactgcagaccttggtgctttggaactgcgacataactagcgatggctgctgcgatctcacaaagcttctccaagaaaaatcaagcctgttgtgtttggatctggggctgaatcacataggagttaagggaatgaagttcctgtgtgaggctttgaggaaaccactgtgcaacttgagatgtctgtggttgtggggatgttccatccctc

SEQ ID NO: 9969 - DNA, 337 bp, Homo sapiens
ctactccaggaaaaaaacatcctttatgtaatgagcatttattcactgaacacctactgtatgtgctcaattctgcgctggacttgatacacacacatatacacacacacaaatactcacaagtatatgcgtacaagtacacacacaagtacacaaatatgggtacacaaatacacaaatatacacatacaaatgcgcacacacaaatacacgcacgcacaaatatatgcacacataagtacacaaatatacacacataaatatacacatatatgcacatatatgtaaacacatgtgtatataggacatgtgtaatgtcataaaattctcaccgtag

SEQ ID NO: 9970 - DNA, 92 bp, Homo sapiens
tatgtacacaattagctgggattacaggcgctcagctgccatgtccagctaatttttgtatttttagtaaaaacagggtgttggccaggctc

SEQ ID NO: 9971 - DNA, 409 bp, Homo sapiens
ggaggctgcagtgagccaagacggcaccactgcactccagcctggtgagactccatctcaaaaaaacaaaacaaaaacaaaaaaattcctgggttcaagtgatcctcccacttgagcctccagagtagttgagaatacaagcatatgccactgtaccctaatttttttattttttcttagagacagggtctcgctatgttgcccaggctggtgtcgaactcctgggctcaaacaatcctcttgctttggcctcccaaagcactgggattacaggtgtgagccactgcacctggcctacaccaacctacctcctcctcctcctgcctccatcaagatttctccctgctcccaacttttgcccaagctgtagctcctgcccagaatgcctgtgcttatgaactcctacaca

SEQ ID NO: 9972 - DNA, 169 bp, Homo sapiens
tatctacgggatcataagtctaggtgtctataattcagaaaactacctttcattgtgtatttgatgtttttgtatatccagagcgtattaataaattgaattttaaaagtctcttaaattaaaggagctaggttgggcgcagtggctcacccttgcaattctagcactt

SEQ ID NO: 9973 - DNA, 87 bp, Homo sapiens
tacaaactcatgtttatgcaatgagatttattagactgatagttcatatcttagccccttttcatagagaatcattgaaaaaaaact

SEQ ID NO: 9974 - DNA, 221 bp, Homo sapiens
atgttggccaggctgacctcgtgatccacccacctcggcctcccgaattgctgggattacaggtgtgagccaccgcgcccagactaagtcccatctttaggtccgcttggctgttccacggccacctggaggggaggtagggccagcaaggagggaccctagggtctcagggcagaagatctgccggaggagagggagaagagggttctgaggggaggaag

SEQ ID NO: 9975 - DNA, 540 bp, Homo sapiens
atttattatattttaacttgtgaaaggggttaaagtgatattgtcaaatttcatattattccatttttaaattttattaataaactttgatatgacttcacatttttataatacatttaacaaacagggtgaaaaaagagatagtatcttgatagtgctttattatttttctttaatcatatagactatattttcaaactttgtattttaatatttactatttaataaatgctatagttttcaaacatcttcttccattctattttttttaaactaacatttcttatttgcccactttagtagttttcatctagttacgtttactaaaaatacaaacattaataacttgttaggatttgagatgaagcagtataactatgatacaaagagtcaatgtttattttctccctcaaatgtcttcttggcagttgtattctttattaggatatataggatattaagaaacaacttgtggccccgcacagtggctcacacctgtaatcttagcactttgggaggcccaggcaggtggatcatctg

SEQ ID NO: 9976 - DNA, 404 bp, Homo sapiens
tttctagcaatattcgcatgtcatggaggggaagtgactacccccagaaataatacaactgcttacccactccatgaagtgaaagatttgaaagacatttctctgttccaaaggcctgtgggcagaattaaaagtaattgccagaaaagccagtttcaaaacagtctctacacttgcatttattgaatgagcttattggatatcttggttgcaagcaggaagcaacctgctgacctgagctccctgtggccctggtcctctccactctgaaaacatccaggcagatcttacaactcctccagtcacacccagataccaactctaggccagaccaatgcaatctcttgcctgtatttcaacttttgatttctattgtatttatttaatgttccctccttcccccc

SEQ ID NO: 9977 - DNA, 252 bp, Homo sapiens
agtgtagtggcatgacctctgcctcccgggttcaagtgatcctcgtgcctcagccacctgaatagctgggattacaggcgtgtgccagctaatttttgtatttttagtagagacagggttttgccatgattgccaggcttgtcttgaacttctgacctcaagtgatccacctgcctcagcctcctaaagtgcactatttatggtgaggggttggttttgaaaatgtccagtaagtcatgaacagatgctttt

SEQ ID NO: 9978 - DNA, 418 bp, Homo sapiens
atcgtatgaactacaactattaaaatgtgaaatgcatgatgcaaatagtgcacaaaaaaatagagtgaaaatgatgaatacagccataaaagacagccaaactccattttagcaataaagtaaaatataatctgctgtcaggggaaggtaatttgaagtacttgagatgttctttaatttaaaaatccaaaaatatttttagctttagttactataaaacatgtttaagcattttccatttgaaataaaattttaatttcatgctttgtcagtttccctaaataaatagaaaatagtaaaatatcgcatactaaaaaaatcaacttctttggtaataaatcagttcaactgtcagaccaaaacatagttacattttacccaatgtcatgctgaccaatttgatcaaatgccacttcct

SEQ ID NO: 9979 - DNA, 159 bp, Homo sapiens
ctttgtatggtagcttcatgttgaagtggttttttgtttttgtttttgttggtttaatttgtaaaatctggaaagttagcttgttctaataggggctatgctctgcaattcccttttttttttttttttccctccccctaagcaaaacctttaaaaaaa

SEQ ID NO: 9980 - DNA, 294 bp, Homo sapiens
tggagcagaggtggtggatctgctggtggccatgtgtagggcagctttagagtcccctagaaagagcatcatctttgagccttatccctctgtggtggaccccactgatcccaagactctggcctttaaccctaagaagaagaattatgagcggcttcagaaagctctggatagtgtgatgtctattcgggagatgacccagggctcatatttggaaatcaagaaacagatggacaagttggatcccctggcccatcctctcctgcagtggatcatctctagcaacaggtcaca

SEQ ID NO: 9981 - DNA, 392 bp, Homo sapiens
  misc_feature 392: n = A,T,C or G
ggcacgaggcaagctaggggttcggccccctgcctctgggcaggaaaccttctggcgaattccagccaagctgagtcctacccagctccggagggcagcagcttctttgagtcaaccagaggaggaacagaagctgcagccagagctgcagcctaaagtccctggagagcaaggctctgatgaggagcactgtaaagagcaccgagcacaagccctgagggccctcttgctagcccacaagaagaaagcgggcctggcatccccagaggaggaagacgctgttggtaaagagccgctgaaggcagcacccaagaaacgacaattgctggacagcgacgaggaacaggaagaagatgagggcaggaacagagcaccagagttgggagctccan

SEQ ID NO: 9982 - DNA, 174 bp, Homo sapiens
gcccagcagtgcgggaggccaggaaagtaggcttggggaggctggcctctcctccagtttgaagcatggcaggggttccgggggaggctgctggggggcctgcgagcatgtccagagcaggaatgcttggggtggtgtgtgctttgctcgtctgggcttatctggccgtgggga

SEQ ID NO: 9983 - DNA, 289 bp, Homo sapiens
caccatgaatgacgggctggcccaggtggccactaacacggacaccagccgaaatgccggaaatgcggtcctgtttgagacagtactcaccatcatggatatccgctctgcagctggcctacgggttctagctgtcaacattcttggtcgcttcctactcaacagtgacaggaacattaggtatgtagccctgacatcactgcttcgactggtgcagtctgatcacagtgctgtgcagcggcatcggcccactgtggtggaatgtctacgggaaactgatgcctccctc

SEQ ID NO: 9984 - DNA, 399 bp, Homo sapiens
ggcacgagaaatggccttaggccgcgggcagcgagatgttgcgttccggtgtgggtgtgggtgtgcctccgacggcgtctcggtgccagtgtcgaggttctttctgcttagctacccggagccgactacggaggaggacacctgagtttacgtctcttccatctgctgctcgcctcagctgcctgggtccccgacgagagccaggtgacacttaactccgccatctgcgttttgagcactgttctcataatggagtttcctgatttggggaagcattgttcagaaaagacttgcaagcagctagattttcttccagtaaaatgtgatgcatgtaaacaagatttctgtaaagatcattttccatacgctgcacataagtgtccgtttgcattccagaag

SEQ ID NO: 9985 - DNA, 242 bp, Homo sapiens
ttggcaggagccaaagatgttgccaaacatgtagtacacagaacagctcccccagacaggattatctggtcccaaatttcaatagtgccaaggtggagaaaccctggagtagaggatgcctggtatgaggcaatatttgggatagggaagggaagcttgggattttagctacgtagagacacttgaaaattggagggaggaaaggagtgggtggctttggaaatgttctggaatatgtgaat

SEQ ID NO: 9986 - DNA, 466 bp, Homo sapiens
aaggagaaatccggttgttgcaatcttacgtggatgctgatgtatcctttcctgggtttttaatatctttagtcaaaggaatttattttcaataagtgcaccaaaacttttataaattaatcatttccctaaagttattgttctttcttaaccgatttcttcactatcacccaagagaatcctgtatctagttttcctgacccttagaaatccattgtggtatgtgtcaactcagctaggcaaaaagaaaaagcaaagaatccattgtgggatggatgtgctggttaggtgcagatgcctatagagataggagcattagaaatctagtaatagaaaatattagcaaagactgattaaaacctcctttttctttgacgttgcctaaaatatatcatttcattgtagttataatgatgaacttggcttgtgactggtagtcattctaagtatttgatcaacgaagcct

SEQ ID NO: 9987 - DNA, 282 bp, Homo sapiens
agatttttgcttccaggaaattgagaaagatattcataactttgagtttcagtggcaagaagaggaaaggaatggtcacgaagcacccatgacagaaatcaaagagttgactggtagtacagaccgacatgatcaaaggcatgctggaaacaagcctattaaagatcagcttggatccagctttcattcgcatctgcctgaactccacatatttcagcctgaatggaaaattggtaatcaagttgagaagtctatcatcaatgcctccttaattttgacatc

SEQ ID NO: 9988 - DNA, 294 bp, Homo sapiens
aacacccggaagagtgcctggcacatggtaggctctcaataaatgtttactggacaagctaattcatgcaatcaatccttccttcacttgccatgtatttctggagagtctacccagtgtcatgccctgtgccaggtgcctggattccagctgtgatgaaaatgcaggcctggtctaaggatgaaaagtcataattaaagaatagggagagggggacgtgatagtttcagaaacaggatcttactacattttacaaaaacctcaggaggcaggtattgttcttattttacagat

SEQ ID NO: 9989 - DNA, 533 bp, Homo sapiens
taatgcaaaaagccaccttttgatcagaaagcactgggcacggcctttcaagtttttctacacttctttccacattagccaaatgagcccgtgctctaaagatctgtagttaatgccgattctattttccatttttattctatgttttatttgtccatagcatctaggaaaacactcatttttttcccccatagtcctcaatgtcaatcttaatttttctggcttagtccctccaaagaatgaaattgttccttggacaagtaaaagaaaattctagaaaataaaattgtcaaagaagaattataattttctaaaatagaaaaagagaaactacattgtgagctttttttccacagatgttataaattttgttgggaggaaatgcataattattagaatcttaacaaatatcaccctattcgttctgcagcaaagaacagagctccatgggaggaaataatttggattatctacagtaaggttgggagatctaggaagaaggacctaggaagaggccaccactcccagcctct

SEQ ID NO: 9990 - DNA, 534 bp, Homo sapiens
caccaaacaaaaatcctgctaccagagggcttagtgatagtccatgagataagcctcctgagacttccacacccttagcctcacagggttggcccttatatccaaaacaccattataacaaacagcatatgagaaagccactgcacagaagctacctgcaaccaaggaacccatacagagccttgacccactgaaaatgcatagaaattaagccaaaaaaccatacacaacataaaacacatttatacactcaagaaaaaaagaatttttaaaaataatccaaacaatatcaaatttaaaaaaagaagtaacagctctctgagatgaaaaggaatcagcaaaagaacgctggcagtacaaaaaggcagagtgttgtgacaccaccaaaggatcacactagctctgtagcaataacagatcctaacccaattgaaatatctgaagtgatagataaagaattcaaatatgaatggcaaagaaactcaattagatccaagagaaagttggaatctaacacaaagaaagcaggaaaac

SEQ ID NO: 9991 - DNA, 609 bp, Homo sapiens
tctacatatgtatttttaaatgaaaatataaatgtaaattgatacatttgttttatatgactaaaataggacacatttcttagatattattcttactgacatttcaaggcaaaaagtagtttagaatgtcttaaaaaaaagaatgtcttataattaatttggaatataaataagtataaagatttaaactgtaaaagtcccatcaattgaagtcaagtaatgttaccgctataattgggaatacaggcaaaagagaaaagaaagaagaaacgaagggaaagagattaacagagaaaagagggaaagataaatgcagaatgaagacagagaaaggaaaggaggaaggaagggagagaaagaaacaagatcagccgggcacggtggctcacgcctgtaatcctagcactttgggaggccaaggcaggcggatcatgaggtcaggcgttcgagaccagcctggccaacatagtgaaaccccatctctactaaaaatacaaaaaattagcttgggcgtgttggcgggcgcctgtaatcccagccactcaggaggctgaggcaggagaattgcttgaacctgggaggtggaagttgcagtgagccgagatcgag

SEQ ID NO: 9992 - DNA, 400 bp, Homo sapiens
gttgctctatgaaaaacacacattatcatttttcacaacattaggaaccaaacacagtatcataaaaacatagaaaaaaaggaactaattttatcttctactcacagatgatgttcataatcaaaatgacatgtgactaatagtcagatatcaaattactggagctctgctcttaaccacatattactccatatctgtttctttatggcagcaaaagacaagactccagcagtggttcagctgtataatgggaatatgaatattccaaaactttctgtatgccaggtgattgggaacaacagtctcttaatattacctggcttttaaaagtattggcatacatttgaactaaagatttttttaaaaaataaaatctgtccaggtgcagtggctcacgcct

SEQ ID NO: 9993 - DNA, 658 bp, Homo sapiens
attttatatcgtaagtgtgattttaaataattacttcaaatgtctacctacatttacatgtatttatttgtttatttaggtaggggtgtgtgagtagctacagttagcttcaagatttaggaaatatatattttttttatgtgtgatacaaagattttaacagtacaaatggtgtttcccttggaggcatccttggtgatgaatgtgttaatattttcaatatgggttttggctgatgacaattctgtcacatctgaaataatttggattgactacatagcattatctaaatttttgtcatgtaaatatcgacattggcagcataacgtgaaaaatacatggatttctatttatacctctgacattaatcccccaaatgatattttgatgttgattaaaaatttttattcatacattttaaatgcctgatttaaatatcaatttttcaatctatcaaccaacatttctgtaaattatgaatcggatttttacattattattcatgtcatcatggcactgagttataattcatgcaactgatttaaaagtcagtgctttatactttgaatataatgagctataaatattgtagtaggacattttccaaaggcatttaaaaaaatcatgtttataagtttgtagtctgacaccacagagt

SEQ ID NO: 9994 - DNA, 643 bp, Homo sapiens
atgtaagtggaccagtgcagttcaaatccatgttgtgtttgtcagctctgggacagttttacttttgtgtaatgacagttcaatgggttggcaaagttatcttttaccaatctaaaatttcatcaaaattatatcttctttaaaaaataaaaatactgtctgggcatggtggctcatgcctgtaatcccagcactttgggaggctgaggtgggtggatcacctgaggtcaggagtttgagaccagcctgggcaacatggtgaaaccccatctctactaaaaatacaaaaattagccaggcatggcagtgggcacctgtaatcccagctacttgggaggctgaggcaggagaagtgcttgaacctgggagacggaggttgcagtgagccaagatcgcacaactgcagtccggcctgggtgacaagagcgagatgccatctcaaaaaataaataaataaataaataaataaataaatacatacatacataaaatacttgtgtaatttgaaaaaaaggattgcagggtcttcaaaatagctttttcattatattatatttaccagtaacttcagaaatatttatatgtttagtgctttttaacctccaacgccttttttgataaacttcctacttcaatttcatag

SEQ ID NO: 9995 - DNA, 592 bp, Homo sapiens
ttaacatgctactctgatattttcatttagggtcctagtttaatatatgaaaacataaacagtaaattagcagtctaggtttctgccattttttgttggaaacctattagcaacctttatctaaaaatgggaggagagctttcacaaaatagctgaatttcaccaatccctaaatcagaggaatttacagcatctcttggatgtttcttctggattgtcacagactcatatacacacacacaaagctgcttcattcattcaacatacttgtgttaattgatcttggggagacaatattgaataagacaaagtcactaccttctttgcttaaggacattgccaagtaagcagataattaccatacagtaggacaatattacaattagggcataaatggagagcttaggtcagattgttaatgaaagctttattttagaatgaaatcaaacatcagtccaaatatcctaaatgagttaatattgaaagacaaaaatttgttacttttagaagcaacaaattcctacagaagagcaaacctaatactaagccatctgttatttgcaatacacttaataaagtcaacagacggatg

SEQ ID NO: 9996 - DNA, 513 bp, Homo sapiens
aggaggtttgtgtaattatgattactgaaggaagaagacaattatgtcagagtatagaagtatataaaatagctaccaggaagttattttagagaaatttttcttaaaagactgtaatcagaaacaaagacaattaatgcagggacattccatgaacttattcacaaaagctggtaacaggacttaataatctttgaaagctgcatttccaaacattgacctaaccattaggaccaagatggacctaatattctaattaccaagaagagagtggtgatgaattaagtggggagagaaactgagtgtaaactggaagattttaatgttttatttaacttaactaattctggtagaattttttactttgaaactctattttatggtaatttaacaataaggattctaaatggtggctcagcattcagggctgagaaagacactgaagggtaatgccacaaggagaggctggataaagctctaataaaattatttcttttatgctacttactagca

SEQ ID NO: 9997 - DNA, 388 bp, Homo sapiens
ctaagctccaatgtgatgatatttggagatgggatctttgggaattaattaaggttagatgaggtcatgaggatgaggcccttatgatgggattagtgcccttataagaaaacacaccaaagtgcctgcttgctctctctctgccatgtgaagacacagtatgaaggcagcttattgcaagcctaagagagaacccttgccagaattggacttccggtctccagaaccatgaaaacataaacttctgttgtttaagccacccagtctacggaattttgttctagaagcccaagctgactaatatggttggagtccagtgctttgcgtgaagaaggtacatctctaaaactaaacattttgctcattgaagcttgatctgaaataatta

SEQ ID NO: 9998 - DNA, 368 bp, Homo sapiens
gccatctcaaaaaatataaataaataaaaataaaaataaaaataaaataaactgcttcaaaagaagctgagcatagtggtggacacctgtaatcccaggctgaggtgggtggattgcttgagctcaggagttcaaaaccagcctgggcaacatggcaaaaccctgtctctattaaaaaataaataataaagtgctgaaagaaaacaaaatattatcaacaaagaattctatatccagcaaaactgcccttcaaaaatggagtaataaaacattcccaggcgaacaaaagttaggggagctcgttacctgtagacctgccctgtgagaaatgctaaagggcagccttcaagttgaaacaaaatgacact

SEQ ID NO: 9999 - DNA, 572 bp, Homo sapiens
agagttgggaggaggaagtggccatgctgcaggtgccctaacagatccagggaagcatggagagcacagccactagcctgcctcgggctgcagggggcggggagcacatgcggcgtgcagacctttccttaggtttgtgctgggtgctctgctctcaggcccacagaattctgcactgtgagcagcgcaggtcggaagaggcatttggaaatgacacgctctgtccaggaactgcagtaaacgttctagcttgtaataatctttccttctggcagatggtgggttcacactgagttaagtagcttcacgactgctagtggctggaagcttccagattagtagtttaagccagaaaacaatgttgatacgtcttgagatgtgtataaatcatttgatttggctgggcagggtggctcacacctgtaatcccagcattttgggaggctgaggtgggcagattatttgaagtcatagttcgagaccagcctggccaacatggtgaaaccccatctctactaaaaatagaaaaattagccgggcatgatggcgcacgcctgtaattccggctactc

SEQ ID NO: 10000 - DNA, 302 bp, Homo sapiens
ttgcatcatagttggaggtcttaaatttaagtctttaatccattttgatttggcttttgtgtatagtgatagatagaggtctagtgtcattcttctgcatttagttatttagttttccaagcaccatttatggaagaaactgtcctttccccagtgtatattcttggaacctttgtcaaagatgagttggctgtgattgtgtggatttatatctgggttcacagacaacaagatctgttttttgttttgttttttttgtttgtttgttttatgagacagggtcttgctctgtcacccaggct

SEQ ID NO: 10001 - DNA, 500 bp, Homo sapiens
  misc_feature 281, 290: n = A,T,C or G
gaatgtgaggcttggtcccttgatcttgataaaaagttatagcagcagataccaaatggcggggtcctgacatgtcatgtaatttccttatcagcctgcttgtcgttctgtccaggtatgtccgtctgtccatctatttttgcaagtcggtcctctggtcatccatctctgttccttcatggttgttctttatccctgggtctcagagaccatcctgcttccatccttagtccttcatatccctaaaaatctatctgaaaagcctgtagtggaacacattntcaaagaanaatattttatttttgcatctcttaaatattttctaggccgggtgcagtagctcacgcctgtaatcccggcgctttgggaggccaaggcaggaggatcacctgaggtcaggagttcaagaccaaccatggccaacatggtgaaatcccgtctctactaaaaatacaaaattagccaggcatggtggtgcacgcctattgtcccagctactc

SEQ ID NO: 10002 - DNA, 490 bp, Homo sapiens
ctcttcaaccattcgtgctgagccctgataatgacaagtgggcactcccttgctctaaggtcaccaaagaccccagaggtggctaaagcttgacctaaggagggaggaaaagcttggacacatggaacatttcatagagaaggggaagtcaatgtgaagttgcaggtgggagtgcccatttgcagatcctacacatcgtatttcacaggtgcatactggggaaatctactacgtatttctacacttggtcaggtttggtttatgctaatattgaaaaatgtggccaggcatcatggctcacgcctgtatcgggagattgagaccatcctggctaacatggtgaaaccccgtctctactaaaaatacaaaataaataaataaataaaaacttagccgggcatggtggcacatgcctgtagtcccagctacttgggaagctgaggcgggagaatcgcttgagcccgggaggcggaagttgcagtgagccgag

SEQ ID NO: 10003 - DNA, 353 bp, Homo sapiens
ccgggtacaagctattctcctgtctcagcctcctgagtagctgggattacaggtgcccaccaccatgcctggctcatttttgtgtttttagtaagggcagggtttcaccatgttggccaggctgctctcgaactccagacctcaggtggatgcacccgcctcggcctcccaaagtgctgggactacaggcgtgtgccaccgcgcccagcgaattcttcattttataatctgtctcttccactgtgagggttgaaaggaacactgaatataacaggtgagttaattaaggggttaatgccaggaagagtcacgaaagttcaaagattctttaaaaaaacttgtctttttagggc

SEQ ID NO: 10004 - DNA, 518 bp, Homo sapiens
gagcagagtcatcctaagtgaacacatggaaggccctgaaaaattaaacttgggcacaaagttctctgcacattctcactggagaggcaggaacatttagccaaagtcaaagaccagggcaggggtaagaggaggcacccatcctagcctcaaatctctgccctgctactcaccagacacatgatcttagacatagaaatattgacaaattagctaactgtgccctggttttcccatctgcaaaatgggtataatcatattacttacctcaaagtgttcttggaaagatttcatgataatagcactcactatgtgcattagttgagcacttattaggtgccaggtggtattttaagtattttttaaaaatatatcaattcatttcatacatgaaaatcattttatgcagggtatataacaagtgcttggtagatgttagttatcttcaagatacctgtcattattagtgaaaagaaaaggtaggccgggcgcagtggctcatgcctgtaaccccaaca

SEQ ID NO: 10005 - DNA, 615 bp, Homo sapiens
attttcccaattatataactataaaacaattctggaacttgataaatgggagtggcctctcaatggccacttatagacttgttaagtatcacatatacaaccaaaagaatatcaagaggcacaaggcctctttatgttagccccaaaatgataaattcatcctaacgtgggtaaggaagaagcttcacttaaccatatgaacagagaaaaagcaatcaaaagaaacagaatgggccaggcgcggtggctcacgcatgtaatcccagcactttgggaggccgaggcgggtggatcacgaggtcaggagattgagaccatcctggctaacacagtgaaaccccgtctctactaaaaatacaaaaaattagcccaggcatagtggtgggcacctgtagtcccagctacccgggaggctgaggcaggagaatggcgtgaacccgggaggcggagcttgcagtgacgcgagatcgtgccactgcactccagcctgggcgacagagtgaagactcagtctccaaaacaaaacaaaaaaagcctaaaactttccattctctttgcagtgaccctaacactccttaagcttctttctgatagtcagccccaacttgggctact

SEQ ID NO: 10006 - DNA, 569 bp, Homo sapiens
agggtctttccagtggccccagtggtcttcgttcctggctgatcctacaagccaatatcccccaccaatgtatccctcccagccttctcctcaccccacgggagggaagaagcatggccccctctgagaagctgatgcaagttatgagcaatttctgcaggaaaatacaacgtcagaaagttcacagaccccctggaggccattcccggcctccctggggtccaagggaaaaggaggactgatccagacagagggagcctaaatcacccagatctggatccctagctgggccctgaaccagagcgggagaggctacaaagaatgtcaaggagaaacgcaggcaacagtgtagcatcaaggttggtgcagtgggtgagagtgtagcatcaaggttggtgcggtgggtgagagtgtagcatcaaggttggtgcggtgggtgagagtgtagcatcaaggttggtgcggtgggtgagagtgtagcatcaaggttggtgcggtgggtgagagtgtagcatcaaggttggtgcggtgggtgagagtgtagcatcaaggtcaacacagggggtagc

SEQ ID NO: 10007 - DNA, 644 bp, Homo sapiens
gcactaagacattcatgagggatctgctttcatgatccaagcacctcccacaggccccacctccaacactgggaatcaaacttcaacatgagatttggaggggacaaacacccaagctatatcaaccagatacaagaaattttgcctgtggtttccctttgtagcaatgtattctttctaccctctcagtcagctattgtatcattcagaatatccctagttaataagaacttaaatttaccatttataatagaaagtgtaaaagaggaatgttttataatatttattatatttttcaatcttcattgtagtcgttaaaatacaaaagacgtttcggccaggcacagtggctcactcctgtaaccccagcattttggtaggccaaggcaggcggatcatgaggtcaggagatcaagaccatcctggctaacacggtgaaaccccgtctctactaaaaatataaaaaaaattagccgggcgtggtggcgggtgcctgtagtcccagctactcaggaggctgaggcaggagaatggcgtgaacccaggaggcagagcttgcagtgagctgagatcgcgccactggactccagccagggtgacagagcgagactctgtcccaaaaaaaaaaaaaaaaaaaaaaaaaa

SEQ ID NO: 10008 - DNA, 523 bp, Homo sapiens
agcaaaggcgatcttaggctgcagcaagaggagtgaatcttgcactgctcaggccaactgtatctggagctctgccttcagttctgggaaacatttgaggaggaacatggagaaactggaacacatttggagcatttcaaccaggagggtgaagagattaaaaagtattcaaatgaaggacagctaaagatgccaagtctccttcccttggagaagggaagcctcagagatacataaatgctgggtttcaacattttggagaattgtcttatggatgaggacccaagtgccaaggcagaaatggtacagagaaccagggctcagttcagtgttcccatacccttcaaacatgtgtctggttaggggaagggctgccccggatgaagttagctccctaaccccacccctaaagttagaaatgtgaaagcagtcgatgggtaacctttggccagggatagggtggagggaatgggtggccatcacagcaatgatggacacacctgagatggaatgcagaaagagt

SEQ ID NO: 10009 - DNA, 75 bp, Homo sapiens
aaataaaaataaaaataaaaactgaaaagagacatcagcagctgcatactgtagagacttcacagatttagtcca

SEQ ID NO: 10010 - DNA, 516 bp, Homo sapiens
ctggccttgagctcctaggctcaagcgatcttcccaccttggcctcccaaagtgctgaatttacaggtgtgagccacagtgcccagcccattgttttctaatatgattttatccacttaattatatgtgtgaacttctttccctcctgttacatgatagctacttcatcatcgcatgtggttgcctggttttgttggttccactgtgtgtgggcaaataccatatcatgcagggcctccttgtagataactgtagattattttcttgggttctttattagaaatagaatggctgggccaggggcgatggctcacgcctgtaatcccagccctttgggaggccgaggcgggaagatcacgaggtcaggagatcgagaccatccgggctaacatggtgaaaccccgtctctactaaaaatacaaaaaattagccaggcgtggtggcgggcgcctgtagtcccagctactcggaaggctgaggcaggagaatggcgtgaaccagggaggcggagcttgc

SEQ ID NO: 10011 - DNA, 573 bp, Homo sapiens
aagctggatcaaggtgctccagaggagagttgaaagggtgatagaaatacatatgcacgcacacaccacacacactcacacactaacatgtgaagtcaacagacaaaagtaatctggtctagacaaacatacttgacgaaatgaaaaaatggtagaaacagtggactaatttggggtacaagaaagcatccagaaagcagttagtggatttttgcctctgaaaagtatttaatccctaaatgccctttatattttgtagcagcccacacataatttaatgtcatgtttatttatgtaaaatcctctgcatggcactgaaattgagtgaaacagccactgcataccccttgaggaaattaaaaggcaagccaaccaacagtgtcgcagacagagctagggacatacagataaccgaatcaacattagacacagcaaattgtagcacatggagagccctcgtgaagagcaaaaaactttttgtaaatttgctataccctcctgactctgtttctccacagagccagaggtcatttgtagctaagacataaaatctgcacctgagttgcaggactc

SEQ ID NO: 10012 - DNA, 333 bp, Homo sapiens
tgaagaattaacatttaaaaatcaagcagaggccaggcacagtggtgcacgcctgtaatcccatcactttgggaggctaaggtgggcggattacttgaggtcaggagttccacaccagcctggccaacatggggtttagtagaaaccctatctctactaaaaatacaaaaaattagctgggtgtggtggtgcatgcctgtagtcccagctactcagaatgctgagacaggagaattgcttgaacctgggaggcagaggttgaagtgagctgagattgcaccattgcacgccagcctgggcaacagagtgagaatctagcagaaattctggggc

SEQ ID NO: 10013 - DNA, 558 bp, Homo sapiens
gttctggtacaaggtatttccccaaggtcttacagaaatgtaaagggttgatactattctgagtgcatataaaacttttaaaactgaagaacattgtttagcactatacaaactatagcaataatttaagatctgccatagtggccttcttctgtgcctcagagaacttggaaatcatcagtagcttatgctaacataaaaatacattaaccatgagttacacattctcatatatatgttttcaaataccagcaatcatttcattaaaaataaaacaagcacttccacttatcttaaagactacttctcggctgggcgcggtggctcacgcctgtaatcccagcactttgggaggccgaggcgggcggatcacgaggtcaggaaatcgagaccatcctggctaacatggtgaaaccctgtctctactaaaaatacaaaaaattagctgggcgtggtagcaggcgcctgtagtcccagctactcgggaggctgaggcaggagaatggcgtgaacctgggaggcggagcttgcagtgagctgagatgtgccactgcactc

SEQ ID NO: 10014 - DNA, 374 bp, Homo sapiens
gtgactattgaaatgagatgataacttcccagaaactgcgtagaaataatcatcactttattaccctttgaaaagaagattgatagaaaagtcattcgaaagatggttcattaccatgccctagtacgatttctttactcacatctctctaaagcatgagaaagggaggattattctctaaggtcggaatttgaaggctgtttgcctctttgaagtctcggtatttaattttctgtagtcatttcttgggcaattttctaagaaactagttgaagctaatttatcataagttaaagtcaaatgacagaaaagatttttcccccttaacagcattttattccacagaggttagcttctgaaggaaaatgagactt

SEQ ID NO: 10015 - DNA, 446 bp, Homo sapiens
agtgatctgcccacctcggcctcccaaagtgctgggatgacaggtgtgagccactgcgcctcgtctaatttttaatatttttagtggagacagggtttcaccatgttggccaggctggtcttgaattcctgacctcaagtgatctgcccacctcggcctcccaaagtgctgggatgacaggcgtgagccattggtcccggtctctttactttcttaatgttctttgatgcacggcagtttttaattttggtggagtcaaaatttgtttgtttgttttttcctgttgctcatgctttgggtgtcatatccattggcaaatccaaggttcatggaaatgtacccctatgtcttcttctaagatctgtacagatttagctcattgttcgattttgagtcaatttttgtagatggtttaacatgggagtttgtggatgtctgtctgtctc

SEQ ID NO: 10016 - DNA, 642 bp, Homo sapiens
  misc_feature 420, 444: n = A,T,C or G
gtgagctaccatgcctggctggaaagaggtttaatgggctcacagttccacatggctggggaggcctcacaatcatggtgaaaggcaaaggaggagaaaagtcacatcttacatggcagcaggcaagagagtttgtgtaagggaactcccctttataaaatcatcagatctcatgagacttactcactatcatgagaacaacatgggaaagacccacccccatgattcaattacctcccaccggtccctcccataacacgtgggaattttgggagctacaattcaagatgagaattaggtagggacacaaccaaaccatatcagcagtcttttgtgatagtttttgttttcatgaatacaagtgtgagacctctcttcatggccttcctcagctctatttgtcagatttttctttcattntttttgaacttagtgacctcattntgattctgacaactttcttacttatcaacaccacaaattattgtattatccatatcatacccgtctccccgacttgaatgtaagctccttaaggacagggactttgttctgtccattgctgcaaccaacacctatattactttctggccacttacagcatatgctcagcatatattaacaacgtgaatggacttgatg

SEQ ID NO: 10017 - DNA, 561 bp, Homo sapiens
atcagccccagggcgctgtgccagaaaaaggactgcacagcaatgacagctcattcttctaccacggtctagcatgcgtgctgtgtgtgtggtgggtgttatttaggggaggaggaggtaacagtgagacacgtgttttgtgtgttaaggggacagagacactaagcttgacccactatgatgtctgagtcagtctggtgaaccaatcatgaaatgctcaaaagagagttgcacagttacaaagcctttgccattgaatggtggagactgtggcatcagtcccccaccctatcttctgtagaaaacagaatgagagtgcagttgcacagaggtggctccactgtagctcctcatgttatgcatggcagacattgctaatattcattccagttcccggtcaggcatggtggctcacacctgtattcccagcactttggggggccgaggcatgtggatcacctgaggtcaggagttcgagaccagcctggccaacatgatgaaacctcgtctatactaaaaacacaaaaaattagtcaggcgtggtggcagaagcctgtaatc

SEQ ID NO: 10018 - DNA, 455 bp, Homo sapiens
  misc_feature 361: n = A,T,C or G
cagtgttccttcctttagggtatgacacaggacatctttggaaatgaaggtcttatgacccaagatcagaaaggcaggagaagattagagtgctgccctgggcaggtgagaggagggcggaagaaggtcagagagagagagagagagagactctgttttctgaggcctacttctgaggcctaatgtgccccaacgttaaaagatagtgacaagggctatgggagttatgagccaggaactgtggacaaaatctagtatgtgttaactagttgtcttgtttaaacctaagaatatactaatataaaggataaaaaagaaatttaagtttggcagcataatgtaatttcagggcatatgattntatcacttactatctgtgtaacatttggcaaggaacctaacattacaaaactacagttcacttctattaaagtgggtataatcatgcttacctc

SEQ ID NO: 10019 - DNA, 515 bp, Homo sapiens
aggcgggagtttgcctagaccacactgtgagtttgctgtatatatccacgccttacacagtgaatgagaagatactcagggccgggcacagtggctcagacctgtaatcccagcactttgggaggctgaggcgggtggatcacctgagtccaggaattcgagaccagcctgaccaacatggtgaaactccgtctctactaaaaatacaaaaattagccaggcatggtggcatgcgcctgtaatcccagctacttaggaggcttgaggcaggagaatcgcttgaacctgggaggtggaagttgcagttagccgaaattggccccattgcactccagcccgggtgacagagactccgtctcaaacaaaaaaaaagatacttgccccagcgtggtggctcacgcctgtaatcctaacgctttggaaagctgaggcaggcagatcacctgagatcaggagtttgagaccaccctggacaacatggtgaaaccccgtctctactaaaaatacaaaaatta

SEQ ID NO: 10020 - DNA, 618 bp, Homo sapiens
ggaagccgtctgatgacaggatgagcctaaggtggggaggggaggatgcggtgagccacaggttctcaatgttcagagagccagtgtccttaaatagcgaggtgaagagctcaattaggaaccaaagccaaaaatgagctgaggcaagatggtagaacccaggcctggatctgagcagttgtcaaaagtctggttacaacatttgagagtgtggtgttcagctacctttttggattcagttgtagttttttatttgcatattctttttctttttgataaagctctatgaggactatgttttcaactccctagatgcatatagtcctgtactcagatataatgtatctaatctcttcccagatttataattgcaaaccataagccactttgagttgtgttccagcacctgccgaaggagacgactaaatgatatgaaccccattttcctcctaagagggcattcaaattctcttcctcttggattttatgaaatcagatttcagttggaagattctgtcacttggcctcttattgtcaaacacaggtaccttttaacgcagacttctactgagaaataattagagacagggtctcatggtcaggcgcggtggctcatgc

SEQ ID NO: 10021 - DNA, 534 bp, Homo sapiens
tacacatttctgaattatttgaattttttaacaggagcatatatgattcatattaccagaaatagcaaacatcaagctgaactgcagctaaggagtgtctgtgataaagagaaaactgtttgattattaaacaaaagacaattgaagcctcagttcttttaatttgccttgttcaattagttacttaactttatgaactcaagtcatacactgagaccctaaagttgtttttgttttgaattaatgccatatagctgaaagtgacaaacactttactcatggcagtatacagaaaattttcagggaagattaaaaggcatgaaaacagcaggttgtggtggctcatgcctgtaatcccagcactttgggaggccaatgtgggcggatcacttgaggtcaagagttcgagaccagcctggccaacatagagaaaccccgtctctactaaaagtacaaaaataagccggctgtggtggcgggtgcctgtaatcccagctactcgggaggctaagacaggagaatcacttgaaccct

SEQ ID NO: 10022 - DNA, 476 bp, Homo sapiens
actaggcttactgtaagagctccaaaaatattttctgacatatgttctacttatatgtcattatgtaaaaataaaacaaaattatactcatgcatttttaatattagcatttttttgactctattgataacatctgtattttccaactgcgaagtttgtgtaagtgatctcttgtaagatggaggtctgaaacataaacagtttatcacttgttgctggagtaacaattggcagagattgccctaaactctaatgacattttactctccccaaatcagatcgataggtttttgaagtgcactcatgttgaattagaacaataataaacagtttttaaagaaatgcatgaaaaatacaaagaaataacaaaaaataccttttaaaatacacatcttttcacctttttgaagcatttttacaaagttaaggggtgtgtgtctgtgtgtgtgtgtgtgtgtgtgtgtgtgtgtgtgggt

SEQ ID NO: 10023 - DNA, 447 bp, Homo sapiens
  misc_feature 342: n = A,T,C or G
gtagtggcatgatctcagctgactgcaacatctgcctgccggtatcaagcgattctcctgcttcagtctcccaagtagctaagattacaggcgcctgccaaccacacccagctaatttttatatttttagtagagactgggttttgccattttggctgggctagtcttgaactcccgacctcaagtgatccacctgcctcagcctcccaaagtgctggaattacaggcatgagctaccacgcccagccccagacttcaattctcttccttcagccttcacccactatgggctcatccaatcttagaacttagacctagaagttcacctggatcttatcttanactctaatctgttctgctcggcagggccaggtaaatactattaagggtaagcactcagcccaccacacacacctgcacaaaacaggagactgggccgggcgcggt

SEQ ID NO: 10024 - DNA, 540 bp, Homo sapiens
cctgtctctatgacattctgcttccaccaggaagccttctctgatagactcaactctgtgcttttccaaggccctattctcctttttaaaacgtacttctaaggatgcctagtctttttattcatacactatcttcataactccatgtaatggtcctattatttttatacagaataaaacagagacactaaaatgttaataatagaattcagtaactttttttaagaaacctattagaaatttaaaaatgtgggcaacttcgccaggtgcggtggctcatgcctgtaatcccagcactttgagaggcagaggggggtggatcacaaggtcaggaattcaagaccagcctggccaagatcgtgaaaccccgtctctactaaaaatacaaaaattagccgggcgtggtggtggactcctgtaatcccagctacttggggaggctgaggcagagaattgcttgaaccctggaggcagaggttgcagtgagccgagattgcgccactgcactccagcctggctgacagagcgagactccgtctc

SEQ ID NO: 10025 - DNA, 515 bp, Homo sapiens
atcagatgatttccttgaaagttatttttttaattttggggaactagtttccctggacctgcccgatatggttgctaaaagagctggcttgatcttgcaatgttgcaaaggtctagtaaaaagaccatacccttgtgcaaaagaaaataagccactttttcttcaaagtttcaaggtcgaaggagtcccagtgcttcaacatatactccatgggagtgcacattgaagacgatctgttacccatctagaaaaagaagtgagaataaaagcgtccttttagtctccttcctttcagtatgtgatccagggtggagatgaaaacaatagagggcatccccccaactattttctctctgttgctccaggattcccggcacctgcttaaatgtgccacccatgactgcaggcgtgaccctccaagctgtggctccagaggaactgagttccttggtcacgctgtccccaagcaatcagtactctgccttttatttccctttgaccttctagacttgcgt

SEQ ID NO: 10026 - DNA, 390 bp, Homo sapiens
ctggtgtgctgtatgtactccggaaggtcaagaaatacatacgggctacaaggaaaaatatatgaaatataaagtatgtttccgtctaaggtttcttggaaactctagttgaggcttttacaaatgtgctttttagcatcattcttccaaaagtaccttttaaaatgattctcaaggcttcacaatatatatatttttacaaatacttatttcccaacatctgtaaaagtgtaaatcttagagtattttatgctgaacttacaaatttggtactgaagacaagtatttcttgcagtctgccaaatttctgccacactggaaaatacacagatgattgtttaacattctgtgccatcagacaggaattatatttcacatcttttttttttt

SEQ ID NO: 10027 - DNA, 456 bp, Homo sapiens
gcactcacttcagactgggtgacagagcaagactgtctctcaaaaaaaaaaataaataaaaataaaataaaaatggctaatttttgtatttttagtaaagacgtgttggtcaggctggtcttgaactcctgacctcatgatctacccgccttggcctcccaaagtgctgggattacaggtgtgagccactgtgcccggccctatagattatcttatatttggtccttttcaggtttgaggatgcaaaaaatacatgtatacatgtaaatggttaaaaaaacattttgtttctttttctattagcactttttaagagcactggaaaactatgaaaagcttctgtaatgtagtaataaccgtatgtggagcatctgttttttatttgggttttcttgtggtggcatttttccttgaacacttatactgttcttctaccatttttttcctaccccagta

SEQ ID NO: 10028 - DNA, 356 bp, Homo sapiens
ggcacgaggcttcctccacctccagggttcaagcgattctcctgcctcagcctcccgagtagctggcattacaggcacctgccaccacacccggctaaattttgtatttttagtaaagaaggggtttcaccatgttggtgaggcttgtctcaaactgacttcaagtgatccacttgcttcggcctcccaaagtgctgggattacaggcgtgagccatcacgcccagccgagggtatcttttataccaacaaattatatgactgaggtgtaatggacaaatcctatgcacaaagtgagggtatctgaatatgtgggccggagccaaaaatttttagctacttttacacttaagtcag

SEQ ID NO: 10029 - DNA, 552 bp, Homo sapiens
ggcacgagaggcattaaacttgtacactgagttactaaacaacagactccatggtgagtttgagaactcccctctgtccctttctccatttccttcttttaattgtctgtgtgaaggctttggatcgtgcctcagtcattggcctacactttaccttttcctgaggcgtagatgattgaagcaagagtagagatccagaaaggagagtagttttccagttttgtggacatgtgattagttaagggacacataggaatgactgctttgccttaaactcagccatttagggattaatcttcaaccccaaattttatcattttattattttacagctgatgtatacacatttaatgcattgattgaagcaacagtatgtgcgataaatgagaaatttgaggaaaaatggagtaaaatactggtaaggaggaatcctcagtttattttttaatagggcttaaatactctttaccagaaatacatgggctggccaggtgtggtggctcaaacctgtaataccagcactttgggaggccgaggcgggcagatcacctg

SEQ ID NO: 10030 - DNA, 635 bp, Homo sapiens
ccatctctactaaaaatacaaaaattagttgggcgtgatggcgcatgcctgtaatcccagctacttgggaggctgaggcaggagaattgcttgaacctgagaggcagagattgcagtgagccaagatcgagccactgcactccagcctgggtgacagagcaagactccatctcaaaaaaaaagaaagaaagaaagaaagagtttttctggctaggtgtggtggcttatgcctgtagtctcagctacttgggaggctgaggtgggaggattgcttgagctgggggagtttgaggctgcagtgagctatcacaccactgcactccagcatgggtgacagagcaagaccctgtctcgggggagaaaaaaaaatgcaaatgctttcctgacagaactaagagagtttggaactagggttctataaagtcagccctggtgtgggacttctgttattacagagagtacagaaagtgtcctaaaaggacagctgggtggctgggcatggtggctcacatctgtaatcccagcacttcgggagcagaggtaggcggatcacctgaggtcaggagttcgagaccagactggccaacatggtgaaaccctatctctactaaaaatacaaaaattagctgggcata

SEQ ID NO: 10031 - DNA, 698 bp, Homo sapiens
gtgttttaactgctttttgtacttaatatcttaaacatgcttggaattgattggacagaataaaaccaagataaatatacaaaattaaatgattcagggataatgtgggttatgccttgcgtgcctgtctgaggagtttggacttgattctctagaccaaggattggcacactgtaacttgtgggccaaatccagccttctgcctgtttttataaataaagttttattggaacacagccacatcaatttgtttgcatattgcgtgtgactgttttggtgctataatagcagagtaggggataggcttgcagggcttaaaaaatctgagcttttacacaaaaagtttgccaaccctgatataagtagtgggaagccatgaaagggttttgatcagggaggtggtatcttcagatttgtgtgtcagaaagcttactccagcagctgtgtggaggatggatcggagaatacaatgaacagggggatggcagagggaatgggagggaagggaacagcagaaagacattttggacatagaatctactataagcctgggtatggggtatgggagggagaggagccaaagacagttttgtaaaaaaactattaaacccatataacctcccccaaaattcagaataataacacacccgaccacaccgctaacaatcaatactaaacccccataaataggagaaggc

SEQ ID NO: 10032 - DNA, 349 bp, Homo sapiens
ggcacgaggacactagagcccctggtctgagagggagaagcctggatgtaggaaaacccgtttccaccccaggccctactccctagccttttccaagtgggacatggaagaggcagcctgctgcctggatgctggtctccccagcatcactgttcccatggagctcaggtcaggctctgtattcagaccgagggtttgtgtgaggctcatagcaaatgaacaagtgccattcaagggttagaaactgctcagccacagggtcccagtgtctgagtctggaagagtctttacagatttgttcactctctgagggatcctcctggctctggttacatactttcagggacgg

SEQ ID NO: 10033 - DNA, 350 bp, Homo sapiens
ggcacgaggcggctgcttcctccggggtcgtatctccgcccggcatggggctgctggacctttgcgaggaagtgttcggcaccgccgacctttaccgggtgctgggcgtgcgacgcgaggcctccgacggcgaggtccgacgaggctaccacaaggtgtccctgcaggtacacccggaccgggtgggtgagggcgacaaggaggacgccacccgccgcttccagatcctgggaaaagtctattccgttctcagtgacagagaacagagagcagtgtacgatgagcagggaacagtggacgaggactctcctgtgctcacccaagaccgagactgggaaggcgaattgcgg

SEQ ID NO: 10034 - DNA, 585 bp, Homo sapiens
ggcacgaggagtgaccctgggttttgtgtttttactctgtggatgttgtggtcacgctggatcatgttgtgtggaggcttgggagcatgtgttggaggaacagttgagattttaattttatttttggtggcttttttggtacatccaaccctttcaggttaattaaatgccaggtagagctagcccacaagtggattttgttttgaaaatgtgcctgttttccaggagccctttgtggcagcctggtctggttgcccagatatcattttggcttcttggtgccttagtgcctgggatgaattggcctgcctgctgcagtctcttctcctcagccctgatatccgccaactgggtggctttgatgcctctgctgagggctctggtttcctgccagtctgggaggcgtgggatctcatgcgtgggaaaggtaatcaagcaataaaactaagcctgggcgtgagaggtggattaaagtgggcaaggaagaagcaggggagagggagggagccagctgtccagagtggccggaagaggcagaatgtgggctccatcctggctgggacctgtcagcccttgtgagaactt

SEQ ID NO: 10035 - DNA, 531 bp, Homo sapiens
ggcacgaggccatttccagtgtcccaactactgtcatcgtgaggttttcatcggctgtgccatttcccaacgtcttttgggatttacatctgtctgtgttaaaataatcaaacgaaaaatcagtcctgtgttgtcagcatgattcatgtatttatatagatttgattattttaattttcctgtctcttttttttgtaaattttatgtacagatttgatttttcatagttttaactagatttccaagatattttgtgcatttgtttcaactgaattttggtggtggtagtgccattatctagcaccctgattttttttttttactataaccagggtttcattctttttccactgaagggtgacattttgttagtacatttcagggtagccattcatttctagctgtccataggatgaaggagagatcagatccttgaacatgtcttacatgggttgctgtatttagaattataaacatttttcattattggaaagtgtaacggggaccttctgcatacctgtttaaaaccaa

SEQ ID NO: 10036 - DNA, 476 bp, Homo sapiens
ggcacgagagagaactagtctaagacatagaggggatagggacactgtaatcaggtcacctgtgaaagaaactggcattaaaaaggtaagaatttttagacatgcaggcatgagtcagccatcagtgattaatgactatgactgtaggctccattctttgtgtttcttctgtgtattagtttttcccatgaaatatttaatgcagggtgtttttttttttccacaaagctattttacattatttgaaaatacagcccgagcgtgggggctcacccctgtaatcccaacactttgggaggccgagggggatggatcacctgaggccaggaattcaaaaccagcctggccaacatggcaaaaccgtgtctttactaaaaatacaaaaattacccaggcttggggacgggcacctgtaatccaagctactcaggaggctgaggcaggaaaatcacttgaacccgggaggcggaggctgc

SEQ ID NO: 10037 - DNA, 553 bp, Homo sapiens
tataaaattctagcccagaagttctcatctggggtagattttggccttcagaagaccaatttggtgatgtctggagacatgttgggttgtcaaaactggggtggggaaaaggttgctactgtgcaatgcatacctcctcaacacccccccacactcagtaaagaattttccaacccaaaatatcattagtcctgaggttgagaaaccctgtcctagcctaactgtgtacctctatagctatgttttatagttttagaatattaaaacctcagatatttatgtgggtaggtacttaaatggccaaaaactttaactatgaaatgttactgtgtagtatattgaatataggaagtgatgaagattataggtattttattcccatgtttccatctataaatagccttctcagattcagaaaacaatacagagaacatcagaaattttctaaaatgggtcactttgaaaagaattctttttctcactattaatgctttagaagcaagacgcaattttaaagctttagttccttttctttcagtcattgtcttagttt

SEQ ID NO: 10038 - DNA, 495 bp, Homo sapiens
ggcacgagcagtggccgaaaagtgaggacaatccgcaaataccggagccggcccctttgcctggacatggaggcatcccccaatcacctgcagaccaaggcctatgtgcgccagtttcaggtcatcgacaaccagaacctcctcttcgagctctcctacaagctggaggcaaacagtcagtgagagtggaggctccagtcagacccgccagatccttgggcacctggcactcaagcactttgcacgatgtctcaaccaacatctgacatctttcccgtggagcaacttcctgctccacgggaaagaggtcgatggatttacccctggacccataagtctgttcatcctgctgaagtcccctccccattgctccttcaagccaaaactacactttgctggttcctgtcccctctgagaaaggggatagaaagctccttcctctatgtcctcccatcgagatctgttctggggatggagcttccaacttcctcttgc

SEQ ID NO: 10039 - DNA, 528 bp, Homo sapiens
ggcacgagcttcccccattgatgttttaatcttgacaacggatggatgttatgctatggttggccaggttcatggcggcttgatgggaattattcagagagctatggtcaaggcttgtcctcatgtctggtttgaacgctcagaaatgaaggatcgacacctggttactaagagactaaaagaacatattgctgataagaagaaactacccatactaatttttcctgaaggaacttgcatcaacaatacttcagtcatgatgtttaaaaaggggagctttgaaattggaggaaccatacatccagttgcaattaagtataaccctcagttcggtgatgcattttggaacagtagtaaatacaacatggtgagctacctgcttcgaatgatgaccagctgggccatcgtctgtgacgtgtggtacatgccccccatgaccagagaggaaggagaagatgcagtccagtttgctaacagggttaagtctgctattgctatacaaggaggcctgactgaacttccctggga

SEQ ID NO: 10040 - DNA, 539 bp, Homo sapiens
ggcacgaggtcaaaacagcctcactccctgaatgcaggctcagggccatcagccaggctgacactccaggaggcacagtgggtgtttctggtccacgcccagcgtggaaatcatagtggtgcacatgtactctgcgtgggcattgcggcagcatccgtgcttggacctcaccgcctttggggcccacgtgggattcctgccacatcgtcctcttgccctgcaaagtcggtgcagcccctcattgttgacaaagaaaccaagaccctgaaggttcagaactgcccatgatggtggcaccggggcttgaaccccggctgtggtggtgaccggcgactggctctgtgtgaggttcctgtggccgccacgacaaaggaccgcaagcggggtggcctgatgtagcagaaccagattcgcttgcaggtgggggcagggcgggctccttccgccgctctggctctctgcagctgcatgtggcctttccctctgtccctgcctcaagtcttcctctcctttctctcatgaggacaccagtcattgga

SEQ ID NO: 10041 - DNA, 515 bp, Homo sapiens
ggcacgaggccagcatggcaaaaccccatctctactaaaatacaaaaattagctgggcatgatggtgcacagttgtaattccagctactcaggaggctgaggcatgagaatcgcttgaacctgggaggcagagattgcagtgagcccagttcgtgtcacttcactccagcctgggcaacagagtgagaacatgtctcaaaaaaaaaaataaaaacagtgaatgggtgtaggtgtgatggaattcactttacttactaaatggtttcgggaggttgtttctccaggtaaaattgtcgcctttctggtcccattcccaccttcaaacattatatgcaaacagttttaaaaaatcttacagttctaaaaggcttgtgacaaaaaaagaggcagtccctctttcacattgacagaaaaaacttcctctttcaattctagtagttgaaaaatttatatttccaaattgtatgattataccgctactttttgatacatcaattatttattgacttcctact

SEQ ID NO: 10042 - DNA, 65 bp, Homo sapiens
gctgcgagaacacgacagaagggcgctgtggctcatgcctgtaatcccagcactttgggaggctg

SEQ ID NO: 10043 - DNA, 388 bp, Homo sapiens
ggcacgaggtgaagacaagaaaggggcactattttaacacaaccttttcccgtgatcaccaccgaaaattactgacgagtcaatcacctcagatctctcaagcagtccagcctacgcaacagtactccacctctgcgcctgtgcggggagggtaaggcggggccagcaacttcctcagctggagggagagcgcacggtggagccgccagttgagaaggactctgatccggctcagctttccaatcagctgcggaaggagccacgctttcgggggttgcaagatggcggccaccagtggaactgatgagccggtttccggggagttggtgtctgtggcacatgcgctttctctcccagcagagtcgtatggcaacgatcctgacattga

SEQ ID NO: 10044 - DNA, 547 bp, Homo sapiens
acagaagggagccacactgcctagagagtaagcagagagagaattgtcattaacccaaagaccatcttcgaaaacagactggctgcggctgagtgcggtggcacacgcctgtcaccccagccctctggaaggccgaggcaggaggaccacttgagcccaggagttcgagaccagcctgggcaacatggcaagaccctgtctctatctttctaagtaaaacaaaataaaaagctcagaccggcagcacatggttctttccagctgttcccatgaacaggcttcaggacaagcccaggcaaaggcagggagaaatggggtggggacccccaggctcacccccttgtctgctgcgtaggtggagttggtcacaaaggtcacaggctgggaggggtccaaggctttggtgtgagcaatcaccatcctgtccacaaaagagagaagacacaggttccgtcagtccgggaaaggctcagacaccctcccatcctctctgtcccatcttcccctgccagaacacaactgggggccaggcatgatggctcacatc

SEQ ID NO: 10045 - DNA, 547 bp, Homo sapiens
ggcacgaggtggcgcgtgcctgtagtctcagcctcccaaagtgccgccgggattacaggcgtgagccaccatgcctggccttcattatctcttttttaaaaatgaaaaagtttataatttacattcagtaaaatcaccctttttagtgtctagtctgtgaattttgacaaatgcatggttttgtaaccaatcgataggacagttctgccacccaggacattcccctctgttcctctgttcctctcttctcctgccccctagcaaccactggtgttttctgtccctcttgttcattgacatttattttaaaataaaatattttaaaatctactttttggtgtacagttctgagttttggcaaatgcagtcaagtcactaccaccaccacaattaacagctatatcaccctccagtaaattccctgtggtcagctccttccccaccttttaccgtggcaaccgtcaagctattctctgtccctataccaggtgtcatcaaatttttttctggaaaggcccatgcagtaaatagttcaagctttgtgggc

SEQ ID NO: 10046 - DNA, 459 bp, Homo sapiens
aattattaagatttattggttggcatcatgtcattcccagctataactcttaattttcctaaaatgctttctgtaaatgagtgctgtatttatatctttcatgtgctttaagaatctctctcatttgattgggacacctacaaaatagcaatagtagtagtcttttataatactctagaattcttttttttcaagatggagtcttgctctgtcacccaggctggagtgcagtggtgcgatcccggctcactgcaagctccacctcccgggttcacaccattctcctgcctcagcctcccaagtagctgggactacaggcgcttgccaccacgccaggctttttgtatttttaatagagacgaggtttcaccatgttagccaggatggtctccatctcctgacctcgtgatccgccaaccttggcctcccaaagtgctgggactacaggcgtgagccact

SEQ ID NO: 10047 - DNA, 645 bp, Homo sapiens
ggcacgagggtggtttgtgcagtgacatttggcagtgttttctcggcaagcgagtctttgaggctgccctcatgctgctcagtgggcacaccaagaacaagagctggccagggatgacggacgcatctaggccttctcggcctaagggttacattaattatacactctggaggtgacttgacctgtcattgtgaacaattattgctcttggacgacccaggacataggccagccagtacttaccccagtgtgttggagaatcgcgctcggcttcttcctctgtgctgagtcatgaaagttgccggagcaggtgcagttacacaacctccaggtatgatcctgtttaaggactggatttaggataactacttagaggttaaaagtcacaagggtgtatggatgaggctggagtgatctgggaccaaagacatctaggcttgctgtcaaggcttctgatcaacatgagatgaccgccgtgtggtaaactgatgaaccccgacgctgatcaacatgagatgaccgccgtgtggtaaactgatgaaccctgaccctgatcaacatgagatgaccgccgtgtggtaaactgatgaaccccgaccctgatgaacgtgagatgaccgccgtgtggtaaactgatgaaccccg

SEQ ID NO: 10048 - DNA, 556 bp, Homo sapiens
  misc_feature 101, 107, 556: n = A,T,C or G
gcagtccttccacttcagcctcccgagtagctgggattacaggtgcacaccaccatgcccagctagtttttgtagagatggggttttgccatgttgcccangctggnctccaactcctgagctcaatctatccgtcctcctcagcctgccgaagtactgggattacaggcgtgggccaccactcccggcttccaaggcaggcatttaaatgttataaatagggagataagcaagaaccctgttggacctggtagaagcaaacatttattagtactattacgttgtttaacatatttgccgccctctatattcatgtcctcccaaaattattaaacaacctactcttatagttatttggcttatttctcacgaggaatataaattagtaaatattattgggccgggcgcggtggctcatgcctgtggggccagcacttttggccgaccagcggaggaagaccaccaagccaggactttgagaccggcttggccccacggggaagacccggtggtactaataatacacaaaaatgattggcattgtggcggcggcccn

SEQ ID NO: 10049 - DNA, 571 bp, Homo sapiens
cagtggctgttcatgggcacgtttatcacatatggccccagttcctattgcctgggctggttcaactcctgggctctagctatcctcctgcctagacctcaaggtattgggattataggcataagccaccacaccctgccagatttgtgcattttaattttggcagattcttccaaacactcccaagtgttagaccactttatttgttctggaaatgtacagagtacccatcttcttataggtaggttatcaaacttggatttttgccaatggaaaatgaaaaatgggctgtgtgtgctggcttccacctgtaacccccacattttgggaggtggggccaggaggctcacttgagcctaggaggtccaggctgtggtgacctgtgatttcaccactgcacaccatcctggatgacagaccctgtgtccaaaaaaggtgaaaaaaggctgggtgtcatggctcaacctgtaatcccagccctttgggaggccgaagtgggctgatcagctgaggtcaggattttgaaaccagcctggcgaacatggtgaaaccccatctccactaaaaatac

SEQ ID NO: 10050 - DNA, 274 bp, Homo sapiens
tggagtgcagtgatgtgatcttggctcactgcaatctctgcctcctgggttcaaatgattctcccacctcagcctcctgagtcgctgggattacatgcatgcaccaccacgcctggctaattttgtatttttagtagagatagggtttctccatgttggtcaggctggtctcgaactcaggtgatctgcccatctcggcctcccagtcgctgcgcctggccttgatttactttcttttttttttttttaaaaagggattccccttttttccccg

SEQ ID NO: 10051 - DNA, 478 bp, Homo sapiens
agacgacagaagggtacggctgcgataagactacagaagggtacggctgcgagaagacgacagaagggtacggctgcgagaagacgacagaagggtacggctgcgagaagacgacagaagggtactgctgcgagaagacgacagatgggtacggctgcgagaagacgacagaagggtacggctgcgagaagacgacagaagggtacggctgcgagaagactacagaagggtacggctgcgagaagacgacagaagggtacggctgcgagagacgacagaagggtcggctgcgagaagactacagaagggtacggctgcgagaagataccgaagggtacggctgcgagaagactacaaaagggtacggctgcgagaagacgacagaggcggcttaagtgttcttatgtttcatctccaggggctgggatacagaacccgcacacttcagttttttttgtttttttagaacgtgtttgcg

SEQ ID NO: 10052 - DNA, 556 bp, Homo sapiens
gtttctataaactttaattacctctgatgaggagtgtatcccctcatcacattcaccccaaaggtacagaggagttcatttttaaaaatgtgttagagcaataaaaggccattagagggagggaggatggggtgtggaagagacgagagagcgagcgagagatagagaaaacacactagctctccctgctggaataataggcttgaaatatgaggaagttgatcaactgccgctgccttccaaaaacagattaatccaccttggtagctttcctttcagagcaagcttttggctctgtcgactttctctatcagcctgaactcaaaaggacacaggccacatgccatctgagcttaagagttattttgtgtgttgatctgagaacttcacattttaaaacaatgaattcatgtttctactgtttgttgctgtctgtggatttgctgatataaagaggagagtcctagcctggtcatttaatgaataattctaaggaacctgaacttctccagggtgcccttctacatctgcagtggtggttctcagctggggtgac

SEQ ID NO: 10053 - DNA, 620 bp, Homo sapiens
tccgttgctgtcgggattgtattcgggctggccagcatggacgagctctcatggaagcatgcaatgaattctacaccaggattccgcatgactttggactccgtactcctccactaatccggacacagaaggaactggtcagaaaaaatacaattactagaggctttgggagacattgaaattgctattaagctggtgaaaacagagctacaaagcccagaacacccattggaccaacactatagaaacctacattgtgccttgcgcccccttgaccatgaaagttatgagttcaaagtgatttcccagtacctacaatctacccatgctcccacacacagcgactataccatgaccttgctggatttgtttgaagtggagaaggatggtgagaaagaagccttcagagaggaccttcataacaggatgcttctatggcatggttccaggatgagtaactgggtgggaatcttgagccatgggcttcgaattgccccacctgaagctcccatcacaggttacatgtttgggaaaggaatctactttgctgacatgtcttccaagagtgccaattactgctttgcctctcgcctaaagaatacaggactgctgctcttatc

SEQ ID NO: 10054 - DNA, 373 bp, Homo sapiens
cgaatccgtgctgcgaacccatagaaaatgatcctgaggcaccgaggatggttataggacgtggtctgctgctgcatgttgcattactgtatgctgggtttttggtactctttctcaaggctctgttattagttggtaggctccagtaatgaatatagaggactgacagagtgggattaacttatttgcaattgtttcctactgaaatcaaatgcacggttttcccaatttaagacttggtcccttgtaccttgatttgattcagaaagccatctgtgatgtttttgtttcctggcgcctgcaggaaaactcatttgtcatgagttacaattaccttgcagtcattgctatgtggttgtagcacactcattgc

SEQ ID NO: 10055 - DNA, 623 bp, Homo sapiens
acctgcttctgggtcggggtttcgtacgtagcagagcagctccctcgctgcgatctattgaaagtcagccctcgacacaagggtttggacacttttaagaaacaaagatagttttctgaacattctgtgtcctgcctgtctcctgttgattcgcagatgtaatatcgagtattcatcaactggtctcaatttcctgaacacattcactgtatccctcattgtaaccgttatccccctgcttcaaaatgtgccagttccacttggtaataacgttgggaaaatgcaggtttatgaatgatgtggacttttagaggatcaaatcaataaattggattttttattttttgagggcagctgccctcactgttttaaataaagaatcttacataagaatgttgacaacattcacagtaagccattggcagaaaattgatctgcatgtcctagaccaatgattacaaggtgtctgtggtttagggggcccagcccatcattccttttccccttggcactcatgagagagatgccaagttcagtgtggatttttcttggtgctctatggagaaatggagtctgtgtgcttactgaagagtcccaaaaaccagagaccattttcatttact

SEQ ID NO: 10056 - DNA, 573 bp, Homo sapiens
caacttctctcaccgccatggagttcgacctgggagcagccctggagcccacctcccagaagcccggtgtgggggcgggccacgggggagatcccaagctcagtccccacaaagttcagggccggtcggaggcaggggcaggtccgggtccaaaggtaagtcgcctcatcaccggctgcggagaggcgggaaggctggggttgcccctgaccccagggtcctgccttaggcctccaacttcagggggctgggtaaggggcgccgcctcactgccacacctccatccagcaaggacaccacagctcttccgactccagcagcagctccagcgattcggacacggatgtgaaggtaaggggctctcgccagcgtccccaagcacgtgccctgcaccccagagaggcgtccccgcactggggctggcggggagggtgcggggagtggtccccctgtctcgcttccagcccagaaccatctcttctctcccatccctgccctcggccccacagtcccacgctgctggctccaagcagcacgagagcatcccgggcaaggccaagaagcccaaagtga

SEQ ID NO: 10057 - DNA, 149 bp, Homo sapiens
gtgggaggggcaggtgggaggtggggcagtcagaaggaacatgtaaagactcaaaagtgtgtaatgtttcatggaagccatcaacaaagcggatgactttctttatttttttgagacagagtcaaactctgttgctcaggctggagtgc

SEQ ID NO: 10058 - DNA, 355 bp, Homo sapiens
gcatggtcatttgtttgggaggtaatgataggagcagaaatgaaaaatctttgagaagattgtgaaattggaaagtgtggagttctagaacagaataaattctagagttagaggaggtgctttttcatgaatgggtgtaccgtgtgttgagagagtggagtgagaaatgtacttctttgatctgtttcacatagaagcatgtatcatatagaaattcagtggtggccgggtacggcggctcacgcctgtaatcccagcactttgggaggccgaggtgggtggaacacttgaggtcaggagctcaagaccagcctggccaacatggtgaaacccctcctctactaaaaaattaact

SEQ ID NO: 10059 - DNA, 348 bp, Homo sapiens
ctagactctatgattgacagggtgaccagctgtcccagtttgccctggggcacaggattattcgtgctgaaaatgagaaagtcctgggcaacctgggatgaattggccaccttcactattgatccaacttcccaaatgctttgtctacattgctggtatctggctcggaggaagccctgtgggaaaggctgtgagtgtgttgccccaggttccacaggacacttagagtttgggggacacctgccgtcaacgcactgcaacaatctttagggatgttaattgttcctcaggaggcatacgtaggaatcacatccaccttaaacatgcccacttatggcatttgggctc

SEQ ID NO: 10060 - DNA, 408 bp, Homo sapiens
cgttgctgtcgcgtcaatgccgagttgcgcagtatgtgggcgacctgacttcttttgagcagttggcactacccgccttgaggaatgccaactgcaataatgccccagggctaaaagcgggcgtgatcgatgaaactgagaacatggacctcttctctcaccttttcattcaagctggacgtcagacgctgtctaccccagggactataatccttggcacaatcccagttcctaaaggaaagccactggctcttgtagaagaaatcataaacagaaaggatgtgaaggtggttaatgtcaccaaggaaaacagaaaccaccttctgccacatatcgtgacgtgcgtgcacagcaccatgaagtgaatacacgtgcattcctgccttccgtgaaggagagcccagttcc

SEQ ID NO: 10061 - DNA, 598 bp, Homo sapiens
atgctaactgagttaattagatgagattctgtagagaaaatggacactataagaaataatagtgtccagaactgagttataatgacctctaatatttaatgataaatgaaagaagaggaactgatgactgaatctgagaagaaaccaataaacttgtaataacagaagaacaaacccaggtggtgctaaagaaatcacagttcatcaaaaaggagggacaagtggacttgccttgttaaagatggactgccttaccaaatatgacaaatattaaaatatgtttagatttcaatgatgaccaaatatgtaaataagacactggaatttattcgtcaaattcctgataatattaaatgttacatgagcaattggatgttaaagcacaacttttcggctgggtgcggtggctcacgcctgtaatcccagcactctgggaggccgaggtgggcggatcacaaggtcaggagatggagaccattctggctaatacagtgaaaccccgtctctactaaaaatacaaaaaattagccgggcgtggtggtgggcacctgtagtcccagctacttaggaggctgaggcaggagaatagtatgaaccc

SEQ ID NO: 10062 - DNA, 563 bp, Homo sapiens
caaatacctggagtacactgcctcactatccttagtcatgctagctttctcttccctgcagtatagatctgccaattcaaatctgtatggcaccagggctggcaaacgcagaatgattcaattagtaatatggtattgttaaattattataaagcgggccaggcacggtggctcacgcctataatcccagcactttgggaggccgaggcaggcggatcacttaaggtcaggagttcgagaccaacctggccaacagggcgaaacctcatctcttctaaaaatacaaaaagtagccaggcgtgctggcggatgcctgtaatcctagctactcaggagggtgagacagaaggatcgcttgaacctgggagacggaggtggcagtgagccaagatcataccactgcactccagcctggggaacagagcaagactctgtctcaaaaaaaaataaaattataaagtgaatgaatgactatgggatgcaatgaccgactttacggtgaatagaaaattcaaaacggctctgaaatcaactccaaagaatgttgagatcagtgctgaaat

SEQ ID NO: 10063 - DNA, 521 bp, Homo sapiens
ttgctttcaatgatcctgatttcctctctccaccgcagtatcttgattgcagtaaagcacatttcctcatcattctttccacacacattactcattcccatttctatccttttgcccagacattttctagaatttactcttacacattctctagcccagatcattagctgtaacaaatgagggttgcctcaatcatatcttttgtctcctaattgaaattctatcttgtattatttgttgcttcatatcagtgaagttgtgtccccaggtatataattagaacatttatagtaagcatcatatcttaatttctttaggaagtgtctaccatgtaaccacagatgaaaaataaactcttgctgattaataatgaatgtgattggcccggtgcagtagctcatgcttgtaattcctgaactttgggaagctgagatgggcagatcacttgaggtcaggagttggagaccagcctggccaacatgatgaaatctgtctctactaaaaatacaaaaattatctgg

SEQ ID NO: 10064 - DNA, 593 bp, Homo sapiens
aacattcttttatgtgctctaaaggcaaggtttctatgcagttacctttgtaaatagaataagtttctatagaatcagtcttaacttttatgagtcagggattcagaaacttgtggggtggcctgtgataatttttcctccttcaatgatatctcgagtttgagaactctcgatgcaggattatcatgttggaaagctggctgtgatctccaggtcagtgaactgcagttctggcctccataggagaggtgtggcaggtggtggtctatctctacttcacagatggtgaaagagggccagacaggggagaggaccttgcttgggatcatggtggtaagctaggggccagttagcagaaggatgaggccttgatttctcactctgactggtgagctctgttgtgggttgagtcgtggcctcatcaaaaaggtatgttcttggccgggtgcggtggctcacacctgtaatcccagcactttgggaggctgaggcaggtggatcacttgaggtcaggagttagagaccagcctggccaacatggtgaaaccccatctctactaaaaatacaaaaattagccgggcatagtggcaca

SEQ ID NO: 10065 - DNA, 89 bp, Homo sapiens
gtcctaaagtaaaaactgtctccccaaaaaaggaaaattgcaaatactacattgattttagaaaggttaactcccatcttggtcacatc

SEQ ID NO: 10066 - DNA, 595 bp, Homo sapiens
ggcaggcggatcacctgaggtcaggagttctagaacagcgtgccaacatggtgaaaccccgtctctactaaaaatacaaaaattagccagacgtggtggcgcatgtctgtagttccacttaggaggctgaggcaggagaatcgcttgaacctgggaggtgggaggttgcagtgagctgagatcccaccactgcactccagcctgggcgacagagcaggactccgtctcaaaaaaaagcaaaacaaaaaacaaaaccaaaacaaaagaggtgcaggccagaattgtccccgtggacatagttggtcaattagattgcatactttaatccagcctcagttggtgtgtctgggttttctggctaggaagaatgctgctgtggaatgtgctggaacagatccttacgtgcgctgtgttggagtctttccaggtcaggggttctcaaacggatttcaggaccctttacatcatccagaatgatccaatagccccaggagcctgtgtctgtgtggattatgtctgccggctgttagtgtgttagaagttgaggccaggcatggtagctcacacctgtaatcccagcactttgggaggctga

SEQ ID NO: 10067 - DNA, 128 bp, Homo sapiens
ctctaggagcttccaggtcacttctaactgcctgcagctctcccttctcggaaccctgctgcattcagagtggagccgtgctatttagctcttttttcttgtctttttttttttttttaaaacggggt

SEQ ID NO: 10068 - DNA, 376 bp, Homo sapiens
gaggcaagctgcaagaaggccatggggacaatgtgcagagcaatgaagcctcctgcccatagtgactgtacccgcgacctggtggtgaccaggcaggcatttgcacctgctgggctccagagctccccttctttcttcactcggtgacagcaaaccaagacttgggtcacatcatttctgggtaagtatgcagagatgctgaaagaacagtgggagcaaaaagaacaatattcttgaacgtcttctgttttctctatgacccttagaaacccaaagaaaatttcacagtaggaaaataatccattgcacaaactgtatttttaaaggtgagagctggccgggcgcggtggctcatgcctgtaatcctaccactttg

SEQ ID NO: 10069 - DNA, 54 bp, Homo sapiens
gtggatgtttaccgtgtgttatataacttcctggctccttcactgaacatgcct

SEQ ID NO: 10070 - DNA, 157 bp, Homo sapiens
gcgatgtctaaaaccaaatagggaaaatataaaaccaggctgggcaaggtggctcatgcctgtagaatgcttggcacaatgcctggcacatggaggccaaggtgggaggctcacttgagaccatcctggacaacgaagtgagaccctgtgtcaaaag

SEQ ID NO: 10071 - DNA, 416 bp, Homo sapiens
aaagccggctatgggaagccatgtcatacttggctaccttcctatgttccttctcacagcaaaactcttggactgatcatttgaagtcacccctctgtgtcttcttgtgaaatggcttgggcgtctctgggctctgacttgctcatctgggaagagatggggtagagggagttggattataaatcatgcttcactcagtcaacagaatgctactcaggcactaaaaatgatggcgtagccctacgtattctgacatgggaagatggccacaatatcttattatgtggaaaaaactagttgcataggatttatggtttgattacattttagtaaaataaattcatttatggtggtatatgcaaagaaaaaataatgccgggcgcagtggctcacgcctgtaatcccagcactttggg

SEQ ID NO: 10072 - DNA, 515 bp, Homo sapiens
atgcaaactgcagtagagatgtaaaacagatgctcttgaagcttgtagaactccggtcaagtaactggggcagagtccatgcaacttcaacatatagagaagcaacaccagaaaatgatcctaactactttatgaatgaaccaacattttatacatctgatggtgttcctttcactgcagctgatccagattaccaagagaaataccaagaattacttgaaagagaggacttttttccagattatgaagaaaatggaacagatttatccggggctggtgatccatacttggatgatattgatgatgagatggacccagagatagaagaagcttatgaaaagttttgtttggaatcagagcgtaagcgaaaacagtaaagttaaatttcagcatatcagttttataaagcagtttaggtatggtgatttagcagaacacaagagagcaagaaaatgtgtcacatctataccaaattgaggatgttgagttatgttactaatgtatgcaactttaat

SEQ ID NO: 10073 - DNA, 309 bp, Homo sapiens
gatcaagcagattccacgaatcctcggcccaggtttaaataaggcaggaaagttcgcggtccctgctcacacacaacgaaaacatggtggccaaagtggatgaggtgaagtccacaatcaagttccaaatgaagaaggtgagtgggtctggcgggttgctatgggtgaaggtgttggcagggtctaaatcttatccaagtctctaaatatgccagtaagagcacccaccaggattgaaacttttggagtaaccctggtcttggcccgggtccaagtacctgctcaccaggccactgggggaggaaggac

SEQ ID NO: 10074 - DNA, 599 bp, Homo sapiens
caataaggaacaggatcaacggccactccacccagtggcaaatccacatgcagaaatctccaccaaggttccagcctccaaagtgaaagacgccgtggaacagcaaggggaggtgaagaagaataaaagagaaagaaaggaagaacggcagaagaaaaggaaaagagaaaagaaagaactaaagttagaaaaccaccaggaaaactcaaggaatcagaagcctaagaaccgcaaaaagggacaggaggctgaccttgaggctggtggggaggaagtccctgaggccaatggctctgcagggaagaggagcaagaagaagaagcagcgcaaggacagcgccagtgaggaagaagcacgcgtgggcgcagggaagaggaagcggaggcactcggaagttgaaacagattctaagaagaaaaagatgaagctcccagagcatcctgagggcggagaaccagaagacgatgaggctcctgcaaaaggtaaattcaactggaagggaactattaaagcaattctgaaacaggccccagacaatgaaataaccatcaaaaagctaaggaaaaaggttttagctcagtactacacagtgacagatg

SEQ ID NO: 10075 - DNA, 643 bp, Homo sapiens
ccttgaatatgaagatgctagaaagagctctgcatttaagcagagccttgtgcaattcccggaccaaatgctgaaactgcaagagtgccctttaaaagaccttcttaggcatgtgacttgttctctaccagaacctttgggcaacatgaaggaagtcaaaggcatttactggcttgctgttgctgcctgcacagcacctgaccctcaaccagcgtgtttgctcctgcttcagtcaactttatatgctttggtcctgtcagataatctcggctcaatgagcatttttcatgctctacctctctctggtctacaggagattcagattggctttggtggacagagtgttcgattcctgagctctgcagagggtcttctgctcactgtattcagttacaacaaatacctctctcaacagctgtgtcgtgacctcctgtgtgtcctgatgccagagcctgatgccgctgcctgcgctaatcatcccttgctccagcaagatctggttcagctttctcttgattggaaaacagaaatccctgatttagttttgccaaatggagttcaggtgtcatccaaattccagactaccttggttgacatgatttactttcttcatggaaatatggaagtcaatgtcccttccctg

SEQ ID NO: 10076 - DNA, 376 bp, Homo sapiens
ccaagccttctcgcggggagggaatttcttctttctgccgcctgttacatccctgtgtgagaaggtctgtgagctgagcccacatcactcgttctgctgcccacgtgtgcttccatcttcactgtggaaaagtcattttgaactccccggcgactgcaaattaagttatcaaggacagatgggactgggttgaccattccaaggagtacagttacttgaagaatctggaagcaataccgagcacatttgttggcattaattcattggagcaataatgctgtacgtagaaagtatgttgcttttttaaaaaaacatcatcagttctgagcatttgtagcaagtgaactctaacttggaacggatgataaattcttct

SEQ ID NO: 10077 - DNA, 300 bp, Homo sapiens
ggccttccagatcgtgctgtcccacctacctgcaccgccgaggccttccagatcgtgctgtcccacctacctgcacatctgccacagctggccctgggcccaccccacgaagggcctgggcctaaccccttggcctggcccagcttccagagggaccctgggccgtgtgccagctcccagacactacctgggtagctcaggggaggaggtgggggtccaggagggggatccctctcccttggggctgcccctgtggagggggatcccgcctctagaactatagtgagtcgtattacgtag

SEQ ID NO: 10078 - DNA, 626 bp, Homo sapiens
ggcacgaggtgaaagcccaagtttagatgtgcattaagtattaaatagcacagtatcttcttcatggagccttttttcctcccccatcccctgcagctgcctttttttgggggcagggtgggggttgatgttgaactttaagagtttaaaagtttagcttattgagtagttgtcatttaaaatataattgcgaatatcagaaaactcatactggaaaactaaattttttttttctcttgagacggagtctcgctctgttgcccaggctggagtgcagtggcgcgatctcggctcactgcaagctccacctcccgggttcacgccatcctcctgcctcagcctcctgagtagctgggactacaggtgcctgccaccacacccagctaattttttttgtgtttttagtaaagacggggtttcaccgtgttagccaggatggtcttgatctcctgacctcgtgatccacccgcctcagcctcccaaagtgctgggattgcaggcatgagccactgcacccaacccctggaaaactaaatttttaagtgcttatttttatagaagtttgaaaatttaatgcaggcaggtgtgtaataaattatttttgaattgaacattaaaattctgct

SEQ ID NO: 10079 - DNA, 400 bp, Homo sapiens
cgttgctgtcgattttaacaagctctttgctagagagactgcagtgacagatggttgggagtttgcccctaaagctgtgacaccaatcttctaatgagcatatttgttctgggtcgccctgccagattctttctctatttcagaaagggacaacagaataagtgacttcaaaagaagaccatgaggaagagatggatgaagatatataagacttagatcactatgagatgaaagaagagcctattattgagaacaagttggaggatgaaggaactgaataagaaaattgggcaatattatagaaaattaggaagactgaaaggttgaccctgatagtcctttgcacagtgatctttatatcttaacaagaagcgataggagacattcttgttatctttca

SEQ ID NO: 10080 - DNA, 381 bp, Homo sapiens; identical to SEQ ID NO: 222
  misc_feature 381: n = A,T,C or G

SEQ ID NO: 10081 - DNA, 557 bp, Homo sapiens
tgctctcaaactcctggcctctagcaattcacctgcctcgttcacggacttttctgatcttgcttgtctctgtttagggtttctggagtcagaactgctgtcaggatgagtgggaagggcatcccctcacctgtctgtgcctcagattcctcatcttcaaaatggagggaataaaactacttaccttgaagggctggtgaaaggttaaaatgagatgtaattagtttagacattacattcatacataattagtttagaatagaaactggcatgtgttaagtgttaaaataaatattggcagcttttgttgctttatctctatgaatcctttgcagaagttagagatcacggattatctagaggtaggccatggtggagaattgagaatgagatgtggagtggtgattggatgaggaagtcatataagctgcaggaagggcgagtgactgaggaagcttttgtggagtcctaattagagaaacagagttaggctggcaggaccaagggaaagcaaagagagaaagcagataaacggccgggtgtggtggctcacgcct

SEQ ID NO: 10082 - DNA, 500 bp, Homo sapiens
  misc_feature 355: n = A,T,C or G
cactgcaacctccgcctcccaggttcatgccattctcctgcctcagcctcccgagcagctgggattcccggcacccaccaccatgcccagcgacttttttgtatttttagtagagacagggtttcactgtgttagccaggatgttcttgatctcctgacctcgtgatccacccgcctcagcctcccaaagtgttgggattacaggcgtgagccaccgcgcccggccgagcagataggttatcaaagagctgagcaaagattgtagcagtctcacagtactagggagataaaggtaggaattcaggactttccagggtgcacaggctttggtaaatgcctcacattatcagctganaacctagaaggtctactccttagaaggtctataacctagcagtaagacctacatccttggagtaaggaccacttccaaaagtctctaccacaggtacgagaactatatctttggattaagagaaaactggagaaataccagctta

SEQ ID NO: 10083 - DNA, 596 bp, Homo sapiens
ggtttgaaacctacaggaaaatattggagtaaaaaaaatatagaaaatcaaacatcaaaggaaatgctggaagtgtgggaattgataaaaggagcacaggaaaagtgtgcagagcgttgttacccaaagtgctgtgggaattttatacacatatgaatacagctcacaaaacacacaaatatttttgcttccctggatcatttactggagtcttttacatacacattctgaagtataaggtatgcagaattttctaagcgtatcatagaattccattccaagaatacatttcaggaaaactattgtcaatcagggaaacattggtgcagaatagtaagaaaagaaatacccattaagactagtagttacacagtggacatgaaaatactaggcagcaaggagttattaaaaagaaagcatgggctgggcattgtggctcatgcctataatcccagcactttgggaggccgaggcgggcggatcacctgaggttgggagtttgagaccagcctgaccaacatgaagaaaccccatctctactaaaaatacaaaattagctgggcatggtggcacttgcttgtaatcgcagctactcg

SEQ ID NO: 10084 - DNA, 550 bp, Homo sapiens
tagtcccagttactcaggaggctgaagcacaagaatcgcttgaacccgggaggtggaggtggcagttagccgagatcacaccactgcactctagcctgagtgacagagcaagactctgtctaaaaaataaaaaaagaaagctgctttctgaagacagaggagcttccacaactgtctttttccagcatttaaaaatcttccactaaaccatctggtctctcttagcccacaccttctccagaccgaagcaaaactgttagcactttttataagaactatcaagcataagaggttatttaccttgaagggataatcatcaggatatagtcagtgatcgtttattcacatatcaaactaaattcaacagatagctatgaaatataggctgggcacggtgactcaggcctgtaaacccagcactttgggaggccgaggtgggcagatcacctgaggtcaagagttcaagaccagcctggacaacatggcaaaaccccatctctactaaaaaatacaaaaattagccaggcatgatggcattcatctgtaatcc

SEQ ID NO: 10085 - DNA, 280 bp, Homo sapiens
acaagggaactgggcaatgccttggtgaaattcaaacactagaattgatccctgaagagacagaaaccctaagcacaccatgaaaccaccggagaaagggaaaacgggttgagagatctactattttgaaaagtcaggcctggcgcggtggctcacgcctgtaatcccagcactttgggaggcgaagggagaatggcgtgaacccaggaggtggagcttacagtgagccgagatcaccccactgcactccagcctgggcagcagagtgagactccatctc

SEQ ID NO: 10086 - DNA, 514 bp, Homo sapiens
agagacagggtttcaccatgttggccaggatggtctcaatctcttgaccttgtgatccaccctcctcagcctcccaaagtgctgggattacaggcatgagtcaccatgcctggcccacagtgaccctttaaaggaaaatgggagggacctacctcggaggttgtgcagaaaatgttggcttccccagcactaggtttggttccctcctaggtcctcccacagctgtgctttgacacatagcagtctctattaaagtgcctctttaatttgtctgtcattgccaccagaccacaagatactttggggcagggctgtatttcattcatccaggtatccctagcacctgcagctactctgtaaacagaagaaagaacagtaggctgggcacagtagctcatgcctgcaatcctagcactatggggaggccaaggcaggtggattgcctgaactcaggagtttgataccaccctgggcagcatggcgaaaaccctgtctctactaaacataaaaaact

SEQ ID NO: 10087 - DNA, 411 bp, Homo sapiens
actagttctctctccagaaaactacaactccaggagaaacaaaacttctggcctctgaaatctatgacattcttcagtcctccaatatggcagatggtgatagttttaatgagatgaattcacgtcgaaggaaagctcaattttttctgggaactacattcaaacgtgccaaaacagtggttttgcatatagatggccttgatgatacggctttggcatcagcaatagcatcaaccaaggttatgaaagctcagcaagttgtgaaaagtgaaagtggagaacatatgttggtcccattccaagatactcctgtggaagttgaacagaacacagagctacctgactacctgcctgaggatgagagtcccacaaaggaacaggacaaagcggtgtcccgggtcggctcacacc

SEQ ID NO: 10088 - DNA, 285 bp, Homo sapiens
tcactcctgcccctctcctccaggcaatcaaactttggtttctgtcactatagattcgtctgcattttggggatatgtagatatattctgaaatactgtatattctgaaaatacactatatgattctgaagtcatacagtatattctttttttggtctggcatcttttactcagcataattattttagattcatccagggtgtaccttattgatagttcattcattttattgctgagtagtagtccattgtacagatacactacaatctgttcatccattcatct

SEQ ID NO: 10089 - DNA, 619 bp, Homo sapiens
atttacaataagtttacaatttacaataaagctttaaaagaacaacaaaaaattaaatatacctctattgcttgtacgtttttctacttttgatagaaacatggacatattaaatatttcacttttaactctagtataagaaagtcaataatgcaagagtgatgataaagagcaactctcacttggcatcatgatcagggagcaatagggagtgggtgactgcggtgacctaaagcatacaagccttgtctaaagtgaacagctgctctcagccctagctcataagtgccacagagtctacaggcctagacctgctgatccccagcatttgcaagagactcttggtaaccaggattttaaagtaacatttcctggttaagggtagcggccgggcgtggtggctcacacctataatctcagcactttgggaggccgaagtgggcagataacttgaggtcaagagtttgagatcagcctggccaacatggtgaaaccctgtctctactaaaaatacaaaaattagccaggcattggtggtgcacacctgtattcccagctgcttgggaggctgacgcatgagaatcgcttgagccctggaggtggaggttgtggtgagccg

SEQ ID NO: 10090 - DNA, 591 bp, Homo sapiens
ttatatatgaaggatttcaaagagatgtcaattttggaaaatgcttctggccatcccaaatgcttggcttatatctactgttttttaacttgttttttttcctcattcattccaactcttattactaaaatactacatcaaaagaaattaagggaatctacaaatatatttgaataagtgattttgccatgtatactgaccagagtcacacttgctcttgctccaaaaacaaatcattgcactgcctgagaggaaaatggattgatggccaagaaagtctgattgttacttctctatacctcatgatttcctttctttttactgcagttctgaaatttggatggccaggtcattcagccctgatcagtcccagagcaaaacttacagtccctaagctcacaagaatgtaatgtgtatcaaaaggtaaatatagacctatgaaatgagatgattgctacagatgctgctaatattaatttcggccattctgtgcatttttttttctgtaaagaagtctattttggggccaggcgtggtggctcacccctgtaatcccagcagtttggcaggccgaggctggcagattacttg

SEQ ID NO: 10091 - DNA, 340 bp, Homo sapiens
gtagaagctatatgttgttattgtattgctatttatctacttaaataactcttactgtagtatgtattgctcaaggacagagattgtgttgctcatctttgtgttatcccacttagcatagtttctaagcaaatagtatagttctttcatatatgcttatcaagtaaatgaatttgactctacctcctaatgaactattcagaaattcatgtttacgattttagcaatgagaacaccaagacttagcaatagagtatcaaagataatacaactagggagtagatctaaaataagaaatctggtgtgttggctgggcatggtggctcacgcctgtaatccc

SEQ ID NO: 10092 - DNA, 433 bp, Homo sapiens
gacagaagggggaaatttgattattgataaatcatttgatattagtgagaaattgttaattaagagtgataatgacattatggttatgtaagaaagtgtccatattttagagatgctaatagaaggatgaagaaataaaatgatgtgacttttgtgtttgcttaagttactttggtaaagaaagaaataataaaaaaactaaatgaagcatatttgttgaagatcatttgaccatatacacaagagtttatttctgggctctattttattccattggtctatttgtctgttttcatgccagcactacactgttttgattactatggctttgtaatatgttttgaaatcaggaagtgtgagtcatttaactttgttctttcttttcaaaattgttttggctattaaagatcttttaatattccatatgaatttt

SEQ ID NO: 10093 - DNA, 572 bp, Homo sapiens
atccctggcagtcaagagactcttgagaaaaagcatctaagcaagtccttgaatgatgtggcatttcaataaaagagatggagaggaggcatttgagataggaggactagtaggagatggagaaacttggagcatattcagggaaaagcatcaagtccaactgagttagaactggtctatatacaggcatcaaaactggagaacattcagtgccaaatgatacagtcttgaatgccaactaggaattgtgaatgcattaaccaataggtgtcattaaaggtacttgaacaggggagtgttgtggctgtgcttcaggaccaggctcttgtgagtagcttggggggagatcgggaggagaggcagggcagaaactagaggccagaaagccagttaagctactacaacccaccaaggaaaaagaggggcagaaaaggcctgaaatggatgataacaatgaaatgggaaaggaatagatgcaaagggaagaactgacagaatctgatgtctcagtgaaggaacagctaaagctgacactgcgatttccagagcagtggtacccatggaggaaactc

SEQ ID NO: 10094 - DNA, 407 bp, Homo sapiens
gccaagtaggcaaccctgaaggagacttgggaggtggaagtgggcagtgaaaagcttcgagacgacattagctcttgtaagcacagtagcagaggtgacatttcaatttttagtcctgagcacctgtggcaggaggcagtagctgtggagttcccctaggagaatcccacgttctggctgaacatttctccagaatggctgcatcattcctgataaagtagaatgcaaacttacttccatgctcccccagaaattctgtaattgccagataccctgaaatcaatcttgttctgttcaaactactgtttaggatggattccattgtttgcaactcatagactaacctcatagggtttgggggaagattaggcatattagaatatgaatatatgtaacttgcatatact

SEQ ID NO: 10095 - DNA, 368 bp, Homo sapiens
agcagtatcatgcataaggccttcttggaacttcacaaagctattatattaatgtctttgaaaagttcttcaagaaagaaatatgtttaactttatttatcatcatttcccacacttgtttaaaccaccaaattcttctttcaaggagtagctatcaagttggttatgaaaatctgcttaaagttcaattaacagtattgttcagctgagcgcagtggctcacacctgtaatcccagcactttgggaggccaaagtgggtggatcacgaagtcaggagttcaagaccagcctggccaagatggtgaaaccctgtttctactaaaaataaaacaattagccgggcgtggtgtcgggcacctgtaatccc

SEQ ID NO: 10096 - DNA, 604 bp, Homo sapiens
tggcacgtgcctgtagtcccagctactcgggcggctgacacaggagaatcgcttgaacctgggaggcggaggtgcagtgagccaagattgcgccactgcattcaagcctaggtgacagagtgagactccgtctcaaaaaaaacaaaaacaaaaacctgatatagagccttatggtcatgatctattatatcctgtgtattgcacatgaaggaaaatattgtctttaataatattactgctggtttttaaaaaatcattaagtttcagaaagcttgctttctttacctcttactttctagctaagtagataattaatgtggttttatatttacctttaaaattctgtagttgtagagtcttctgccttgtgtttatacagagtttataaaaatttacagtgggccgggcgcggtgacttacgcctgtaatcccagcactttgggaggccgaggtgggtggatcacgaggtcaggagatcgagaccatcctggctaacatggtgaaaccctgtttctactaaaaatacaaaaataaattagccaggcgtggtggcaggtgcctgtagtcccagctacttgggaggctgaggcaggagaatggcgtg

SEQ ID NO: 10097 - DNA, 430 bp, Homo sapiens
gtgttcggacatcactgggcgttacctggagaggttacatggttagagcaggagtcagccaactatggctggtggccagccaaatttagcccactacctgtttttttatggcctgcaagctaagaatggttttcatgtttttaaatggttggggaaaaaaaatcaaaagaataacacttcgtgacacttacaaattatatgaaattcaaacttcagtatccataaatataaaattttattggaacacagtcacattcattcttttatgtatggctgtttttcctctacaattgcagagttgagtggttgtgacagaaactctacggccctgtgctatagtttgaatctcatgttgaaatctgattcccagcgttttcggtggggcctaatgggaggtatttggatcatgaatagactgatgccctccctg

SEQ ID NO: 10098 - DNA, 585 bp, Homo sapiens
tttgttgctgacacatgactaagtggtctaattttgaatgtagtttagaattcttgtatcttaaacatattattctatagccacaagtatttttgttttgcctactcaaatatgtacagatttgtaccaaacaatctcttcacacagatgagaaacaggtgaacattggaaaggtttcaaaatgttactggcaacttcaatttaatattaaagtgcagttcggctcagtggcttacgcctgtaatcccagcactttgggaggccaaggcaggcagatcacctgaggtaaggagttcaagaccagcctggccaacatggtgaaatcctgtctctactaaaaatacaaaaattagcctggtgtggtggcaggcacctgtaatcccagctagttgggaggctgaggtagaataattgcttgaacccgggaggcagaggttgtagtgagctgagagtgtgccactgcactccaccctaggtgacaaagtaagactgtgtatcaaataataataataataataatattaaaggtgtggtataaatttctagtctggccaggcgcagtggctcacacctgtaatcctagca

SEQ ID NO: 10099 - DNA, 613 bp, Homo sapiens
atgtgttgcctgcattatgccactttcactcataaactcagtatggtgctagctgatctacagagagaggaaggaatatacatatctctgctaagggaggagctcatacaccctacaatctaaattgattaagagcctggtaatttatatattgcaacattgaaaaagtcagttgcttctgcctccaaccaaagcagtagagaaatagctacaaagcatcaaccttgacatcaaagaagactaacacacttgctgtgggaagtctgtgaaatttgagggcacagacaagactaagggtattgcccttccaaccaaccacagcagttcagatttcctcaatgtagctgctgtttggttgagagaaaacaaagaggatagtaagtgaggcattggagctatcagcattcaaagccttttctacttaaaaatctttcccagttgggcacggtggctcatgcctgtaatcccagtactttgggaggccgaggtgggtggatcacgaggtcaggagattgagaccaccctggctaacatggtgaaaccccgtctctactaaaaatacaaaaaattagctgggcatggtggcgggtgcctgtagtctcagctactcggg

SEQ ID NO: 10100 - DNA, 400 bp, Homo sapiens
tttgcttcttggtctcatttcttatttttggtgctcatatttattttcctggagttcaacaactctaagtatcttcttcaaaaagggttccagagcagcaacattttaagatgttgtctttctgaaaagaacttcattttgccctcacaatcaatttaaaaattggccaggtttagaattttaggttctaaattatttttacctccaaaatttgaggcatagaatcactttttagtgtatactgattctgattttaaaaaaaatctgatggcaatctgatttacatttctggagatcccattcttgaagaattcctttgctttcatatctgctgacttctttattctggctcctttcactcttagggttgctactatgagtttagggggaaaaaggagac

SEQ ID NO: 10101 - DNA, 552 bp, Homo sapiens
ggaggatgcgtaagagaaatgggagggtgtgaagatgaagtaagattgatcacgagtaggccgagtgtgatggctcatgcctataatcccagaactttgggaggctgaggtgggaggataactcgaggtcaggagtttgagaccagcttggccaacattgtgaaaccctgtctctactaaaaatacaaaaattaaaaattagccaggattggtggtacgtgcctgtagccccagctacttgggaggctgagtcaggagaatcacttgaacccgggaggtggaggttgccgtaagccgacatcataccactacactccagccttggcaacagagtcagcctccatctcaaaaaaaaagaagtgtcagagctgggacccaaacctgggtctcattctggagtctatttggttctgcctttcacataaggtgggtgggcttgtcagatgcccataaaggaatcaatcctgtaaggcacctggcacagtacctgacacattacaaacacccaaaataggactcgaatcaggtgaagtaaactacagctccacacca

SEQ ID NO: 10102 - DNA, 614 bp, Homo sapiens
  misc_feature 473: n = A,T,C or G
atcccagaacttaaaaaaagaaaacaaagaaaccctaatatagggctagtgagacggctgtgtgagcgtgagctggtgaggaagggcttggggccactgtgccagtgctgacggaatcctcgatagtattttgtcaagtcgaaggacagtaataatgataaatgtagcaatggttttctagacacgaggaaatggccttggtctttgggtggctactttgtttgtttgtttgagatgaagtctcgctctgtcacccaggctggagtgcagtgacatgatctcggctcactgcaacttctgcctcccaggttcaagcaattcttctgcctcagcctcccaagtagctggaactacaggtgtgcgccaccacgcctggctaatttttgtgtttttagtagagatgggttttcaccatattggccaggctggtcttgaactcctgacctcgtgatccatccgccttggcctcccanagtgctgggattacaggcgtgggccaccgcacccggcccttgggtggctactttcatagaaaggcagctatgctatattgatatggaacagaggcttatttattaaataaattcactttagcaataataaactcattacat

SEQ ID NO: 10103 - DNA, 246 bp, Homo sapiens
cctgcgagattattatctttagggtgagcacaccaaaaagatggccattgtccatgagctggaaagagagccctcaccagaacccagccatcctgcaccctgatcatggacttctagcctcgagaattgtgagaaaataaatctctgttatttgactacctgtgctatggcattttgttattgcagccccagcagactaagacacctagtgtccatggaccacacacacacacacacacacacaca

SEQ ID NO: 10104 - DNA, 625 bp, Homo sapiens
taattctttgttcttccccaaggaagggtgaggcaaaaactgacgctatttctactatcccaggaaaagagatggccaacctgccttttaggaaagaattaattgacatgcttatcctaagtcagttctatctccatctccttgctaaagacagctggtacaactggtagttaaggcagaggccatgagtgtttgcgaagggctgttgtgatttcttttgggcgggaatgcctccttaatgtggtaggaaagaatgacaaatgagccagctttggggtacatttagaattgctggcatcttgcttttgtaaatgtcaaattgaaacacatcaaaaatttcatatcaactctgttgatcaaattcttcctaaagctgggtgcagtggctcacgcctgtaatcccagcactttgagaggccaaggcgggtgaattgattgagtccaggagttcgaggccagcctgggcaacatgaagagagcctgtctctacaaaaaatacaaaaattagcttgggcacggtggcacgaacctatagtcccagctacttgggaggctgaggtgggagaattccttgagcccgggaggtcaaggctgcagtgaaccacgatcacaccactgtactcca

SEQ ID NO: 10105 - DNA, 441 bp, Homo sapiens
tcctcctttccatcgacatctgcaagcctggtcctgtctgtccccatcggggtctgcgaagcagattccctgacacggggcctcattccttctgcacccattgagcttgtgtgctgcctttgcacccggcctctccgtgagactggagctctgctaggacaggctgtgtcttaggcaaattggaacccaagctccattcccaccatatggctggcactaaagaaatcattcatgggccgggtgcagtggctcatgcctgtaatcccaacactttgggaggctgagacaggtggatcacttgagctcgggagttcgagaccatcctggtcaacatggcaaaaccttgtctctactaaaaatacaaaaattagccgggcatgatggcatgcacctgtagtcacagctactcgggaggctgaggcaggagaatcgtttgaaccc

SEQ ID NO: 10106 - DNA, 124 bp, Homo sapiens
ggtgttctagtaagtaatgaagaaacaaagaaattcctttgatcagggctatataaatttcctaaggctggtgtaacaaagtaccacaaacagactgacctacacaaaaggaacttatcatctc

SEQ ID NO: 10107 - DNA, 440 bp, Homo sapiens
gtatttccaaaagtaaaagaacagaataagaaaatggagccaataggccaggcacagtggctcacacctgtaatcccaggactttgggaggccaaggtgggcggatcacgaggtcaggatattgataccatcctggttaacacggtgaaaccccgtctctactaaaaatacaaaaaattacccaggcgtggtggcaggagcctgtagtcccagctactctggaggctgaggtaggaaaatggtgtgaaactgggaggtagagcttgcagtgagccgaggagccgagatggcgccactgcactccagcatgggcgacagcgtgagactccctctcaaaaaataaaaataaaaataaaaaaaagaaagaaaatggagccaatataaaagatatgtttcaagtaaacatccctgatataacatttgaagagttcaccatgtgc

SEQ ID NO: 10108 - DNA, 160 bp, Homo sapiens
gtttgaggctcaaagctcagggaagaccatcactagctcccagttcaccactaggctcagagaatgaggtacttgttatacctggccaggttaattgctccagaaactgctctgttacaaatgcttacaatatcttactgaagttcaaaagggaggtgga

SEQ ID NO: 10109 - DNA, 311 bp, Homo sapiens
aagggactctggtccaagtctcaaacacatccataaccctgggtttgctggctggggtttcatggcactgcctggcctctcccttccagtctggcttccctttttctgcggcccaccactcttcctgcatctgtcacactcgtctccatacacccctgctgagaccccttctctcctggcccaccagtcagaatggaagttctactggcctccaacttttgaattccaacctggcctttactcaagcccacgccggggagcttttcctgactaagaactccttgagcctaaccttataccgagaattccct

SEQ ID NO: 10110 - DNA, 461 bp, Homo sapiens
atgcaccaaacatgaagactcagtctgcttggtggaacccaactagccccaaagacccggtgcttgcctaacgtctggcaaagttacagctgagactgggaactcgaatttcattaatgttttctattaaaagcaccatttcccattagtatttggagggtaattgatctctagaagtgcatctcagggcagggctgaaggtgttaccacaaagggggaatgacttcataagtctcccactgagctgccacaaagccaaatgaaaatatctccagttccctggggaccagtaaggctattagattagagctcaggtgaagactatttgatgagtcagtcttcagaggaaaagccacggttgtaatagcattggcttgccaaagataaaacagcatttaaaaaccaggtaattttaaaagccccaaatcaaaggttgagatactttataaactttgaacagt

SEQ ID NO: 10111 - DNA, 508 bp, Homo sapiens
ttttattaatggtcatctttaaaatgtcaattaatgccaaagctctgcactgtgataatgcaaatctataaagaaactagcttgacactttatagtaagtagggcaaaaggaagaagcttttatgtttttattatacataactgaatatgacagaaggaaagaagaaggttggaaaccctaatgttttgagctgtgattgcaaacccaatttaaaaattaaaaataaataaataaaattctgaatttaaaccaacaggcttttctcttaggcctctacatttccacaatataatactggctaccatgggatgataaacaatttaaattactatggattgaatgctactgcaaatatgagtctttgtactacaaaaccaatattacctattttaataccactggtgaaagagaaatgccattgcatgaatgtctgctgcgcattatggagaaggctttagatcattaaattttcatccaccatcctttaaacttttttaaatgtttttc

SEQ ID NO: 10112 - DNA, 335 bp, Homo sapiens
cctgcctgactgatctgagggttaggaatgcttacaacaaagaagaaaccagaaatcaggaaaatgggaattgaaagccaatgttcacctccttacacagctcttaaggttggccctgccatcctaagctcaaggatctctacaggaagaatgagatatcatatgaaatgcacttcagaaattctattgagaagtattataattaaggagagttctctgagaggtagcatctttgaataggctcaaaacaggaaaataaactatttaatgcaagaattaagataacatagtggccaggcacggtggctcacacctgtaatcccagcactttggga

SEQ ID NO: 10113 - DNA, 601 bp, Homo sapiens
tgcaccaaacccttctggaggcggcgggctcctgggtagcaggggcctggggacaggaagacgccctctccagggtcacagcccaggtggatggggcctggcatgtggggcctaactctgccccctccccatggctcagccaccctcctggctgctccctgctgcccctgcctgtgaccccattgtgatgcccctcaactgtcctcacccagctggcggtgagccttgctcacttcctccctcacatccgtgatgcccaggcagtgcctgggacagagaaaagcctcaggacgtgctaactacacagagtctgtgtattaatatgaccataagccgggcgcggtggctcacacctgtaatcccagcactttgggaggccgaggcaggcggatcacgaggtcaggagattgagaccatcctggctaacgtgggtgaaaccccgtctctactaaaaatataaaaaattagccgggcgtggtggcaggtgcctgtagtcccagctacttgggaggctgaggcaggagaatggcgtgaacccggggaggcagagcttgcagcgagctgagatcgcgccactgcagtccggcctgggcgaaagatg

SEQ ID NO: 10114 - DNA, 68 bp, Homo sapiens
ctaactttcattttgccagggagtctgggggaaatacaattttcaatcttccaacacgtgtgatactg

SEQ ID NO: 10115 - DNA, 470 bp, Homo sapiens
tattgaattatagaaagcaaaagttacatttcttcagcactagtgtgactgggtagacaaagagtcatactatcaaaatatctaaaaaaagttttagggtaaaataaccaaaaaaatctttcaaaaccttttattcaatatttgcatttaaatttatgaatcactaagcttaacattttgtgttaatgaagttcgttgcaggcagtcagcacttattccacatgtgctgtggcctccacacaccctgcatttcatcagcttgtgcctagggatatttcctcttcaccttaacaaatactcatctaccataggccaggcattatataaaagtgaactgttaattacaaggaggggctgggcgtggtggctcatgcctgtaatcccagcactttaggaggacaaggtgggcagatcacgaggtcaggagatcaagaccatcctggctaatgtggtgaaaccctgtctctact

SEQ ID NO: 10116 - DNA, 431 bp, Homo sapiens
ggtagataaagtaaacacatagatttgtacatccatagggagaatgataaggaaatccgcctctcgataatcaaggtgatagaggagctagaaagaaatttaggcagatagagagggtaaaaggagtcctcagcaaggcttccttttaacaaaaagcagaaaccatttcttttctaacaaagagcagcctgtaaaattgagctgcaaacatagataagcaagctggaagctcgccctggtaaatgctggcagctgtgccaatagaacagggctacctggaagccaggtatgttcaacatggaggctcccttttgtcaccacgtatatagtgaagaaccaggcaacatgatgccagccaggtagggaacccatctgcataataaaagactagggtgggccgggtgcggtggctcacgcctgtaatcccagca

SEQ ID NO: 10117 - DNA, 454 bp, Homo sapiens
ttctcagtgttctttcctaccaccctccattcagatcaaatgcaaaagcagaaggaacagccatgttaacccttcatttcttctaagatccaaatgagggcttcatatgatcactgtctttagatacgctgggattcatacgtccatcacccaaaggacaagtctaactcagtgttctattccttttttggttcttttctttgcaagggaagtgaaaagtaggcaaatgttagtgagtgtcctgtagaaataactcaactgagatttaaccccattgcgcactccaaaatggctaaggtgcttaaaaatggctttcagcgtgaaaattctattcctgcatccttgttttcaccattaaagacaaaacactgctggccaggcgcggtggctcacgcctgtaatcccagcactttgggaggccgaggcgggtggatcacaaggtcaagagatcgag

SEQ ID NO: 10118 - DNA, 469 bp, Homo sapiens
tcactacgttgcccagtctgttcttgggcccgggagctggaggctgccgtgagccgagatcgccccatgccagtatgggcgacaaagcgagaccctgtctcaaacaaaactcacaaaatcaggggacaaggaaacaaaacaaggcttgatagtcaggcctagctgtggggacaaatgccataggtctgtggtttgcagcttcttggggtcctgagagaacaggcccctcccccttttcacgacagtgtgtgcatatgcacactcacttctgtatccagtttcagaggttctcagatctgaggtcccctatggactcctccgctacccccggttgcaaggtccctaagccattgaagaatctgacagaggcacaagtccaccctgacctttggcaggactgttctgctgccagagggattaccgagaaaggaaatcttgtcctggactcttcaagtggggtgagtgagct

SEQ ID NO: 10119 - DNA, 83 bp, Homo sapiens
gcagaggaacaggaagaagtgagcgtttgaggatggaatagtaagggcaggggcgacaggacctgctgatagattggagttga

SEQ ID NO: 10120 - DNA, 320 bp, Homo sapiens
agctggcctgggagatcacatggccagagactggcagggctggagggaaggggcaggcagggcgcctggtaaattacgccagcaggatcaagagttttccgggaatcaaagaatgtggaactcagtgagcttttccctggatttaatgggattctcagaatctgaaacctgcactttggacatgacgacttttatgctgtttgtagtttctataattatttcctttttgtttttccccaaattctttttgaaatggtcagcctaactcagctggaccttaaggacaaggaaaggaactggttcattcttaggcgaagatg

SEQ ID NO: 10121 - DNA, 575 bp, Homo sapiens
gtgtgcacctgtaatcccagctacttgggaggctgaggcagagaattgcttgaacccgggaggcggaggttgcagtgagtcaagatcacgccactgccctccagtctgggcaaaagagcgagactccatctcaaaaaagaaaagaaaatgggaatgcattcaggtgagtaaagtatttaatatgtttgtgttattatctgaaaactgcctgtggtgcctaggtccagggccaacaactcatgaatggatttgacagataaaatgttcagaatgtgataatacctaattaggaaagaaaatactagagctatgataattataatgtaacatcatgtctctctccaccccatctccaatggaaaaatgctgtcgttgacttaaatttccctgaagtgattttaaataacccagtgaaatttgagagagggaaatttgtttaaaatatgataaacaagatgaaagattttttttatcctaaaggttaaagtatcccctgaggtaaatcatctttgggaatagatgtttatattggttcctatgtctcccaaagacctccatgtcaaaccagcaatttt

SEQ ID NO: 10122 - DNA, 378 bp, Homo sapiens
cacacaataaaagcagggactgcaaccctaaaaaaaatagctgggagcaaatgggttatactattgaccaaaatcctggaaaaaggaatcaacacggggaagcatgaagcaggaatcagctcaaagaggcctggctcccaggagtggatgacggggtagccagtggcatggtctccagccagccccttcacctggggccagcttcctcatagcctgagatcttccaaagatcccagactatagttcaagaccagcctggccaacactgtgaaaccctgtctctactaaaaatacaaaaatttgctgcacatggtggtgcatgcctgtgatcccagctacttggggaggctgaggcaggagaatcacttgaacctggga

SEQ ID NO: 10123 - DNA, 635 bp, Homo sapiens
atgcatatttattaaaagtctctgaactccaaacctcttgccaatgtttcttaagcctgatgattcctactattgctccacaacgtgtatatgggagttcccatgtaggaagaaaaatagcatccttgtataactaattaagaaagattaaaggaaagcaaagaatttaactatctttacacagaaaaggtggccggtgttttagtgagtattttctcaaaatctatacccatgcctggcacatattaagcactaaataaatctgttagataaatgttcaaataattagcctaagcttatagacaagagtctaaaacattgatggcaaaattcccaaaatgcaaaataactcaagcaataggcattcaaaagtattgatttatattacagagtcaaaacaaggtggagagtatggattctagactccaggcttggattttggctctacttctttgacatcttgttataaccccctgagccaaagtcttctcacccgtacattaagaaaaataatattggccaggtgcagtggctcacgcctgcaatcccagcactttgagaggccgaggtgtgcggatcacgaggtcaggagatcgagaccatcctggctaacacagcgaaaccccatctctacg

SEQ ID NO: 10124 - DNA, 531 bp, Homo sapiens
tgggtggaaaacaggttaaacctgggagaaagagtcctcttttagggataaaaattgggattgttcagctggtgtggtgtgtttgcatggggtagcacaaagcccccgtgaacatgacttttaccactaactatctgtgtgaatttggcaagcgtctcgaacatcctggggctgtttactcatctgcaaaatggacacaaaaacacctgctctgcgatcttcacgggtggtggtcagagtcatgtgaaaagatgcaggcagtagagcgctgtgaaactctaaagtgctcagcaaatgtaaggtaggctgggtgccctggttcacacctttaatcccagcactttgggaagccgaggcgggcgaatcacttgaggtcaggagttccagatcagccaggccaacatggtaaaacccaatttccactaaaaatacaaaaattagccgggcgtgggggtgcgtgcctgtaatccctactcgggaggctgagtcaggagaattgcttgaacccgggaggcggaggttgcagtgagc

SEQ ID NO: 10125 - DNA, 351 bp, Homo sapiens
tagttaaaatggtaatgggaagaccatataaacaacagaaaattaaaagttcttaaacacatgaaaaggtgctgaacttcacaataagataaaaatgtacaaatatgagataatcatttttaactattcaattgacaaagattcaaaggtttgataaattattggctattttgcaggaaacaaactctccatgttggtataaatatagattaatataacctctactgaaaacaatttagcaaacttttgtttaaaatttaaatgtaggtcgggcacggtggctcatgcctgtaatcccagcactttgggaggccaaggcgagcagatcacaaggtcaggagttcaagatca

SEQ ID NO: 10126 - DNA, 649 bp, Homo sapiens
ttccctcgcttcattacactctcccttcccttataagcaccagtccaaaggctagaccactgaaaattctgtagctcccctgggtctggccacccctgtgcaactgtggcaatccgtgtgggcccgggggaatgtctgtggaagagggtggttcctgtaatgtggacagacagaggctgaggttccctgggcagaaaatgctcccctgaggcctgctcctgtagtatggcacccgcagccacagttctggtcctggggagggagagcaatggggagtgagttggtagtgtggtataaagacctcaaaaaatccccaaatcaccaacaacattagtgtttgggtccatgtgggcagagaaactctcttacagtttggataccagtggtctgccacagagccaagaggactcagatcattccaacctgccactttgatgaaatgtcaagtcgcggccgggcgcggtggctcacgcctgtaattccagcactttgggaggccgaggcgggcggatcacgaggtcaggagatcgagaccatcctggctaacacggtgaaaccccgtctctactaaaaatacaaacaattagccgggcgaggtggcgggcgcctgtagtcccagctactcgggaggctgagtcaggagaatggc

SEQ ID NO: 10127 - DNA, 509 bp, Homo sapiens
gtaattgaaacatacggtacctattaggacctatctgcacatatgtaactgctcatttcatctgtacaaatgactgcttacttaagcaaatggcaggtctgagtgctcatgttgggaaattttgctaggaagtcatttccttaggaaaggctatattcacatcctcaaagtgctgaaaagtctaggaaacacgatgccatggatgcataaaaagagggctggccaggatcggtagctcacacctgtaatcctagcactttgggaggccaaggcaggtggataacttgaggccaggagttcgagactagcctggccaacatggtgaaaccctatctctactaaaaatacaaaaattagctgggcatggtggtgcccacctataatcccagctacttgggaagttgaggcacgagaattgtttgaacctgggaggcgggaggcagaggttgcagtgagctgagattgcaccactgcactccagcctgggtgatagaggaagactctgtccc

SEQ ID NO: 10128 - DNA, 107 bp, Homo sapiens
aaccatatggaaggatgcttaatctcactagcaaagaaataaattccagttaaaaataagagatgtggctgggcatggtggctcatgcctgtgatcctggcactttg

SEQ ID NO: 10129 - DNA, 393 bp, Homo sapiens
ttctccatgttggtcaggttggtctcgaactcccgacctcaggtgatccatctgcctcagcctcccaaagtgctgggattacaggtgtgagccaccgcgcctggcctgattcttttgcttttcatgatatatcctgtgtaccttgagttttttaccaatgaacatgtattatttgcagagtaattttctaagccatatgaaaatgcatacagaaaaaaaattacactgccagattaatagtaggcctcaaaactatagaaataatttaaggagaaggagtaagaaatgtcatctgagattgtctttcaagataaaagacaaacataacagataaaaaataaatatatgtgtgtgcacgtaactattaaaacattataacaccccgggctcagt

SEQ ID NO: 10130 - DNA, 458 bp, Homo sapiens
atcaggagggctttgagcaggtgagagacgtgatctgactcaggtgttcacaggacccctctggttacatgtgagggacagactgcagggtgtgaggagggggacaggatgggagtgggaagaccagggagggacctgctgagacagcccaggaaggagaggatgggtaggggctgcagaatcgggcaggttctggatagattggaaggtggagctgacagcatttcacactggataatattctaagcagggaagagtcactcctaaacgtattcacacacctgtaatcccagcagtttgggaggccgaggcgggtggatcacctgagatcaggagttcgagaccagcctggccaacatgccgaaaccccatctgtactaaaaatacaaaaaattgaccagccatggtggtgcgcacctgtaatcccagctactccataggctgaggcaggagaatcg

SEQ ID NO: 10131 - DNA, 447 bp, Homo sapiens
tacaaaaaaaaaggaaatggaaatattaaaaaccaaaccaagacttcaatgtgaagtcttcagttactcaccaattgctaatgcaattgtgtctagttttgagattagggatcagactgtgcctgtgtccatcctacagaaaaatcatctatttttttccacactgaaatttaagagaacttactgaagttaacatattccattctgggaagtgaattataatgtgtaattattacaattaccacaactggaatgtaacagggttatttttcagagaacagaatttgtcagaaggagaaggaagaaaaagagattatgaatgattaaataaatttctattggatatacaaaaagtcaaaacttttcaatacatacagcttagcttctagaataactatttactgttgagactctctttccaaagttatttgtgctactccttcttct

SEQ ID NO: 10132 - DNA, 564 bp, Homo sapiens
ttgtgatccgcctgcctcagcctctcaaagtgcttgtgaactaccgcgcccggcccctaattactgcttttgaatgttaactttaagtgaaaaatcttttagcaatgttttgttatgtaaggatattttcatattcagtgactatgtcatcgaaacacatgaattacttataggggtaccagcagttgctgaatattaaatgtaggttacttgttctttcagcttctacattcagagttccttaatttgtcgtcaatgaaccacctgaataaaaaaacgtaaatatgtgacaatgaaggtccacgaaagctaggtgcaagattacatgatccgattcttcacaacacacagctaaatgaaaatacagctactctatgaacctcaaagatctttgatgacactgcaaatgacacaaaagcaacctaagctgtatgcttttttagcatctactatttaggagggccaccttataaaatagatttgaatctcaataaaagtctactgtatccgcaggaaaatcctaataccattcactcacacaaataatttaactatccatttcga

SEQ ID NO: 10133 - DNA, 82 bp, Homo sapiens
aagtgaagagaactatttcaagtaagcgtatggaactgaaatattttaatcataacaaataagctttaattggctttccctg

SEQ ID NO: 10134 - DNA, 461 bp, Homo sapiens
  misc_feature 310: n = A,T,C or G
tcttaaaacacattcctacataaaaaaacgaattccttctgtaaaacgacctcagtcgaaagcataataattggtataaattcttactcttttaaaataaagattaaattccagctaaaaattctccagatatggcagtatattgctctttgaattgaattgaggaagggcgagggtgagagacataaaagactaaaacagcaaaaggaagaaaaaaagggaaggaaaaaggtaaaaagaaaaagaggaatataggtcggacacagtggctcacacctgtaatcccagaactttgggaggccgaggcggngggatcacttgaggtcaagagttcgagaccagcctggccaacatggtgaaaccctgtctccactaaacatacaaaaattagccaggcatggtggcaggcacctgtattcccagctacttggaagactgagacagaagaatcactcaaaccc

SEQ ID NO: 10135 - DNA, 372 bp, Homo sapiens
ggcacgaggaacagtctaaggtttgtaggacttgcgttccacctaccaaagctaatcgagttagaaggctccaaactgaggtgtcatttctcattacggtggtgagaggacgggaccacacactgtgaagtcttcgttcccacatcccacacttcattcttgccgcctaagttgtcgccgtgggactattgaaagggtatcagcgatattcatctttcctataaatgggatctgctttctacagtttcctgccagatgtgtaaagattgcaagaattgaaggtatttcttcaactgaagacctttacagatactcagatgactgaaatcctcttatcactggctggacatggtggctcacgcctgtaatccc

SEQ ID NO: 10136 - DNA, 577 bp, Homo sapiens
ggcacgaggggaagtgccaggaagaggagggtggccatgcctggccatttcctgatacctgtgctagtgacggccgcggtgtgtccactggaaagaaacactggcgtgcacggctgtgactgtggtttcagcagttctgagacaagagccttccaagtcgggggctggggagcagagtgcgggagctcctgagtcctgggggcctccgcgcctcacagcatgggcacatgtgggacagaaggcctaatggggtgcctgagggtggcctggttgctgtccccccagggtgggaccatgagcgagtaggggtggcacacgggctcagctctctgtggccggggtggctcctcttgcgggactcaacgtcagccccaaggcgatgttcagggggtccctcagccttttgaggtggtgccgtttagggccgccatgcctgtctatccaggggacggactccgcctgctgttcccgcgctgagctacaggactcccgagtgtgagccgcggttcctctgttgcagcgcagccgtgtgtgctgtggagccgaggccgtcctgcaggaagccgcgtgactcccg

SEQ ID NO: 10137 - DNA, 291 bp, Homo sapiens
ggcacgaggggaggtcctccatgcgcagtcatgagtcgcttcaagtttatcgatattggtatcaacttgactgaccctatgttcagaggaatttataggggggttcaaaagcatcaagtttatgattacaggtggaaatctacaagacagtaaagatgcactgcatttggcacaaacaaatggtatcctcatatttcttttaccaaaaaaaaaatgaattaagtaattttgaaaaagtctttctgaaaactgcttcaggtatgtttttcagtacagttggatgtcatccta

SEQ ID NO: 10138 - DNA, 62 bp, Homo sapiens
gtctcgaaaaaaaaaacaccaggctggcttacaaaggatggtgtttttttactgtcgtttcc

SEQ ID NO: 10139 - DNA, 651 bp, Homo sapiens
gaacacacgcacgcacacatgcagatatgctgcctgggcacacacttccggacacacatgcacacacaggtgcagatatgctgcctggacacacgcagactgacgtgcttttgggagggtgtgccgtgaagcctgcagtacgtgtgccgtgaggctcatagttgatgagggactttccctgctccaccgtcactcccccaactctgcccgcctctgtccccgcctcagtccccgcctccatccccgcctctgtcccctggccttggcggctatttttgccacctgccttgggtgcccaggagtcccctactgctgtgggctggggttgggggcacagcagccccaagcctgagaggctggagcccatggctagtggctcatccccactgcattctccccctgacacagagaaggggccttggtatttatatttaagaaatgaagataatattaataatgatggaaggaagactgggttgcagggactgtggtctctcctggggcccgggacccgcctggtctttcagccatgctgatgaccacaccccgtccaggccagacaccaccccccaccccactgtcgtggtggccccagatctctgtaattttatgtagagtttgagctgaagccccgtatatttaatttatttt

SEQ ID NO: 10140 - DNA, 625 bp, Homo sapiens
ggcacgagccacggtgagcaggctagaaactcacgacaccaggtagctctgcaggtgctgggagggcaactcagcccagaggaagagcaggctggggagccctcaccgcccaatggggactgacccctggcccctgcccctctccaccccactgccctgaagccagatttcctgctcagcatggacaggacagcaagaggctaaccctctgcccaggtggaagctgaccccaagccacccttcacctggacaggatgagagtgtcaggtgtgcttcgcctcctggccctcatctttgccatagtcacgacatggatgtttattcgaagctacatgagcttcagcatgaaaaccatccgtctgccacgctggctggcagcctcgcccaccaaggagatccaggttaaaaagtacaagtgtggcctcatcaagccctgcccagccaactactttgcgtttaaaatctgcagtggggccgccaacgtcgtgggccctactatgtgctttgaagaccgcatgatcatgagtcctgtgaaaaacaatgtgggcagaggcctaaacatcgccctggtgaatggaaccacgggagctgtgctgggacagaaggcatttgacatgtactctgg

SEQ ID NO: 10141 - DNA, 606 bp, Homo sapiens
ggcacgagggcaggagcaggacaggacggccggacgcggccatggccgagctcccggggccctttctctgcggggccctgctaggcttcctgtgcctgagtgggctggccgtggaggtgaaggtacccacagagccgctgagcacgcccctggggaagacagccgagctgacctgcacctacagcacgtcggtgggagacagcttcgccctggagtggagctttgtgcagcctgggaaacccatctctgagtcccatccaatcctgtacttcaccaatggccatctgtatccaactggttctaagtcaaagcgggtcagcctgcttcagaacccccccacagtgggggtggccacactgaaactgactgacgtccacccctcagatactggaacctacctctgccaagtcaacaacccaccagatttctacaccaatgggttggggctaatcaaccttactgtgctggttccccccagtaatcccttatgcagtcagagtggacaaacctctgtgggaggctctactgcactgagatgcagctcttccgagggggctcctaagccagtgtacaactggggtgcgtcttggaacttttcctacacct

SEQ ID NO: 10142 - DNA, 585 bp, Homo sapiens
ggcacgaggccgcggcttatggtgcagacatggccaagtccaagaaccacaccacacacaaccagtcccgaaatggcacagaaatggtatcaagaaaccccgatcacaaagatacgaatctcttaagggggtggaccccaagttcctgaggaacatgcgctttgccaagaagcacaacaaaaagggcctaaagaagatgcaggccaacaatgccaaggccatgagtgcacgtgccgaggctatcaaggccctcgtaaagcccaaggaggttaagcccaagatcccaaagggtgtcagccgcaagctcgatcgacttgcctacattgcccaccccaagcttgggaagcgtgctcgtgcccgtattgccaaggggctcaggctgtgccggccaaaggccaaggccaaggccaaggccaaggccaaggatcaaaccaaggcccaggctgcagccccagcttcagttccagctcaggctcccaaacgtacccaggcccctacaaaggcttcagagtagatatctctgccaacatgaggacagaaggactggtgcgaccccccacccccgcccctgggctaccatctgca

SEQ ID NO: 10143 - DNA, 593 bp, Homo sapiens
atgcagtctttatcataactgcttaactgccattatagtgagaaagcagccacagacaatatgtaaatgaaaaagtgtgtctctgttccaataaaactttattttcaaaaaccagctggcttgtcacatctggcctatgggccatagtttgcccatccctaatgtaaagaaaggactttagcccaaagccacaacttgcatagtaatgcctcaaaaaatgttaacatctttactgttattattattactactgcatctattacagtagcaattgagtaatgaatacatgaatgttataatgttaaattactaaccttttaaaaatattaagcattgcaatatattaatactttaaatcttttaggaagataagttaccctgcagaataatgaagtttcacaacctcagcactgttggtgtttggggctggtaattgtttgttgtgggagactgtcctgtgcattgtaagatgtttagtagcatccctggcctctacccctacatgcaagtagtaccgcaccaccaaaaccacaatcccacaaccaaaaatgtctgcagacattgtcaagtgtctcctggttagggaaaaggag

SEQ ID NO: 10144 - DNA, 603 bp, Homo sapiens
attttcagctgttacagttttacagtttttagaggtaggtaagttggcttctgccagtcattcctgtacctaagtacatctacagactgtatggtaacagtgtatcatttggggaagaacattcttttctcctcccccaccccacaaaagaaaaacaacagcacatttattttctacttcaaattagcagttgctactgccctgggaggcttccctaagagttgttgctgaagattcaattaaaaacacacctgctttcgactgttgtctgctaaatgggaggagagaagtccgtatctcttctatggcttgctctgataggcctcatagccctccctttttcttgtctcctgaccagggcttataaggagttggcttagaaagacagcagagtctgtaatctcagcagtttgagaggccgaagtgggcggatcatgaggtcaggagatcgagaccatcctggctaacatggtgaaaccctgtttctactaaaaatccaaaaaattagctgggcgtggtggcacacgcctgtaatcccagctactcgggaggctgaggcaggagaatcacttgaacccgggaggcggaggttgcgttgagctg

SEQ ID NO: 10145 - DNA, 585 bp, Homo sapiens
aactatgaaagtgatgacgactcttatgaagtgttggatttaactgagtatgcaagaagacaccagtggtggaatcgagtgtttggccacagttcgggacctatggtagaaaaatactcagtagctacccagattgtaatgggtggcgttactggctggtgtgcaggatttctgttccagaaagttggaaaacttgcagcaactgcagtaggtggtggctttcttcttcttcagattgctagtcatagtggctatgtgcagattgactggaagagagttgaaaaagatgtaaataaagcaaaaagacagattaagaaacgagcgaacaaagcagcacctgaaatcaacaatttaattgaagaagcaacagaatttatcaagcagaacattgtgatatccagtggatttgtgggaggctttttgctcggacttgcatcttaaggacatgaatattctcccataacggattcaactatgagaagagaagtggcagcaataaggcagtctctcaaaagtcatactgccagagtctctagggcaaggagaaacaactagctggacaatactcaattcacaacttagcat

SEQ ID NO: 10146 - DNA, 589 bp, Homo sapiens
ggggaaggagggacgtcccaaggaagggtctttgagaaaggggtaggggacgacatcaggagaaggctcccaggaactgtctcaggggagcgaaggttttgaggggacagctggggtctccagtagatagaccacggtgcaggctgagggatgtacttcttggcacaaggcctcggaaagttcaggagccctggaaaggagaaggaataagacggcaggaggaagagagagagagggtagaatggaagaatctcacttcaattctaacccgtacttctggccttctatccccacagtctcaggtcagatcgagaacacaatgttcatcaacaagatgaaggatcagctgttgccagagaagggctgtggtctggccccacctcactaccccaccttgctgacagtgcctgcctcagtgtccctgccctcaggcatcagtatggacacagagtccaagtcagaccagctgaccccacacagccaagcgtccgttacccagaatatcacggtggtccctgtgccgtctacaggactgatgactgctggagtctcctgttctcagaggtggagaagagaagggagtcaatca

SEQ ID NO: 10147 - DNA, 582 bp, Homo sapiens
ggcacgagggtgcccctgctggccaccatgctcttcatcatgggctacgccgtgggctggggtcccatcacctggctgctcatgtctgaggtcctgcccctgcgtgcccgtggcgtggcctcagggctctgcgtgctggccagctggctcaccgccttcgtcctcaccaagtccttcctgccagtggtgagcaccttcggcctccaggtgcctttcttcttcttcgcggccatctgcttggtgagcctggtgttcacaggctgctgtgtgcccgagaccaagggacggtccctggagcagatcgagtccttcttccgcacggggagaaggtccttcttgcgctaggtcaaggtccccgcctggagggggccaaacccccagtggctgggcctctgtgttggctacaaacctgcaccctgggaccaagaggcagcagtcatccctgccaccagccagagcacaggaagagcagtgtgatggggcctcagcagcgggtgcccctggctcgggacaggtagcactgctgtccagccacagccccagcccaggcagcccacagtgctgcacgtagccatgggccgc

SEQ ID NO: 10148 - DNA, 206 bp, Homo sapiens
acgacagaagggtacggctgcgagaagacgacagaagggtacggctgcgagaagacgacagaagggtacggctgcgagaagacgacagaagtgtacggctgcgagaagacgacagatgggtacggctgcgagaagacgacagatggtgcaacatgctgaaccccggctctactgttaagatacaaaatgagctggtgtgttgcact

SEQ ID NO: 10149 - DNA, 518 bp, Homo sapiens
gacagaaggggggacaccttctcacaggactggagagagaatgcggggcagctgggcagggctcacttccagccgcctgtcacagtactgggagtaagaggtgacctatttatttttagaagggggcagtgataataacccagctcctagcttcattcaagggaggcaggcgctttggaagtttgtaaacaccgactttctgagtaagggaggagcactttttttccaaaaaggaaagaacgtctctactgggttttttcctcctgatattcagcattagagtagaaaagaaactattgtttggccacattagccgtggttagcaggtgctgcagcctttgccactgttattatttttaaagggcagaaatgcctgaaggtgaagactttggaccaggcaaaagtactgtgtgcatttttgtgtccattgtttaaatgtaatgatattggacaaaaaatttacagcaaaattaagtcagttctgctgaaactggattttggaattggagaatatatta

SEQ ID NO: 10150 - DNA, 338 bp, Homo sapiens
  misc_feature 130, 187, 237, 258, 300: n = A,T,C or G
caggcacctgctaccatgcccagctaatttttgtatttttagtagagacatggtttcaccatgttgcccaggctggtctccaactcctgacctcaagtgagccacccccctcggcctcccaaagtgctgngattacaggtgtgagccaccacacccagccaaaaatcaccttttttacaaggatcanaacagtcattatgctggagatgacagacctcactgtcaccatgctctttntgatgtctactaagcacggtngctggtccacactcacagaaaccttagaactcgcacccaggngctcggctgtagcagaatcccaagaataaaacctgtgc

SEQ ID NO: 10151 - DNA, 103 bp, Homo sapiens
ataaaaccctcattcacacgagaaaacaccctcatgttcatacacctatcccccattctcctcctatccctcaaccccgacatcattaccgggttttcctctt

SEQ ID NO: 10152 - DNA, 582 bp, Homo sapiens
taggtctaagaacaggtcaatggtggtttaacccagtggtggttgggttaaaggagtggggcaggtaaggaggttgtggacaaaatgaggaacttgaaagtttaaaatcctgaaactaatcaattttgttggccatctcatagggagccaaaagtcacaaaatcaggtatgtgtggtggtgcatgcctgtaatcccggctacttgggaggctgaggcaggaggatcgcttgagcccaggagtttgaggctgcagtgagctatgaccactgtgaatagctactgcactccagcctgggcaacacagtgagaccccatttcgaaaacaaacaacaacaacaaatcatgagaccagagttaagaaacaatgagaccaggctgggtgtggtggctcatgcctgtaatcccagcactttgggaggccaagatgggctgatcacttgaggtcaggagtttaagaccagcttggccaacatgacgaaaccctgtctctactaaacatacaaaaattaggtgggcatggtggcacgtgccttgtatcccagctacttgggaggctgaggcatgagaatcacttgaatccg

SEQ ID NO: 10153 - DNA, 591 bp, Homo sapiens
ggcacgagcccaaagtcaaacaaactgacaaacagaagctggcacagagggaggaagccctccaaaaaatacggcagaagaatacaatgagacgagaagtaacggtggagctaagtagccaaggattctggaaaactggcatccgttctgatgtctgtcagcatgcaatgatgtttcctgttctgacccatcatatccgctaccaccaatgcctaatgcatttggacaagttgataggatatactttccaagatcgttgtctgttgcagctggccatgactcatccaagtcatcatttaaattttggaatgaatcctgatcatgccaggaattcattatctaactgtggaattcggcagcccaaatacggagacagaaaagttcatcacatgcacatgcggaagaaagggattaacaccttgataaatatcatgtcacgccttggccaagatgacccaactccctcgaggattaaccacaatgaacggttggaattcctgggtgatgctgttgttgaatttctgaccagcgtccatttgtactatttgtttcctagtctggaagaaggaggattagcaacctatcggactg

SEQ ID NO: 10154 - DNA, 552 bp, Homo sapiens
ggcacgagattttggagacgacatggtgagaggctagctctagggatggtttagaaaataaagtcacctggggactggtccacccccttccggtccccttgcctgttggggtcagggctgccctgggaagggcagcgacgctgggttggtaggagcatagactgcagggcatctgcctgagtgtagagtccctgggcctctaattctgtaaaatcgcggtaatagcatccgcttctctgagctgttagaggtgtaacaggtaaacccatgtaaggtgcttaggacagggctggtgctggctaagtgccgttaatatcgtcagcatcattacctgcgttattgtagcactgatcgccatgtcagctgccttcagggtctggcaggtaaagtagaggggccaggtagagatcctgctgacctggcaagcacatgttccctccagtcggggcgttgaccgctcagcagcaggtctagtgtcacccagtctttctagttctcaggagaagttgagggtctggatttttagaggatagctcttgtttcctttacttt

SEQ ID NO: 10155 - DNA, 572 bp, Homo sapiens
ttatacaagtggcaagaagaggacagtggaccagctcctgggaccttccaaaacattggctttgacatctgccaagatgatgattccatccacctggagtccatctatagtaatttccagccctccttgagacacatagaccctgaaacaaagatccgaattcagaggcctcaggtaatgacgacatcattttaaggcatggagctgagaagtctgggagtgaggagatcccagtccggctaaacttggtggagcattttcccattgagagccttccatgggaactcaatgttcccattgtaagtacaggaaacaagccctgtacttaccaaggagaaagaggagagacagcagtgctgggagattctcaaatagaaacccgtggacgctccaatgggcttgtcatgatatcaggctaggctttcctgctcatttttcaaagacgctccagatttgagggtactctgactgcaacatctttcaccccattgatcgccaggattgatttggttgatctggctgagcaggcgggtgtccccgtcctccctcactgccccatatgtgtccctcct

SEQ ID NO: 10156 - DNA, 588 bp, Homo sapiens
ggcacgagcaaagatttattcaattaaacttgaaatgcatctggattcttaaaggttcagtagtgatcactgggacagggcgatcataaaactgaatgggctgtcggaaggtgtcgaggcagcagcaagggtgacattgccactgacgggggcttccgaactggggacgtttgtcattgggatgtgttacaagttcgggctgtggaaattactcgatgaaaaacgcacattaacgatagccatgaaatattagttaagggaaactaggttgagaaatgagacagcaggatctatcagagcctggcattgttcgccacagcccaggtagtgattaaaacgactgtcaagcggcagtgggtgggagctgaggagcacggggctgtgagtgacgaggccgcgtccggggctcacatcttggcactgactccccaggacaacttggttccccacccaatgcctccttccagggctgctatggggttcaaatgagataatgtctgtggaacacttggctcagggcactgcacatagcaagcccttccacagtgcgggctggtgtcactgtgactgtgggcttctctctgacac

SEQ ID NO: 10157 - DNA, 404 bp, Homo sapiens
ggcacgaggatgaccccaacgatccatactaggagcatggattgatactgccaaatggaaacattaactggaactgcccatgccttgggggaatggccagcggtccctgtggagaacagtttaagtcagccttttcctgcttccactatagcacggaggagatcaaggggtcagactgtgtagaccagttccgggccatgcaggaatgcatgcagaaatacccagacctctatccccaagaggatgaggatgaggaagaggaaagagagaagaagccagcaaaacaagcagaagaaacagctcccattgaggccactgcaaccaaagaagaggagggatcaagttaatgaaggccacaaggcactgggcaccagtccttttggagtggaccttttgcaaaaggg

SEQ ID NO: 10158 - DNA, 449 bp, Homo sapiens
ggcacgaggagctttgtcaaaatacctggcctctagttctgagattttattattgttcattagaccagtgctagggcatgaatgttttgtgtttatcttttttttttttaaactttaattttaggtttagggatacccataaaggtttgttccttaggtaaacatgtgtcacagggatttgtggaacatattatttcatcacccaggggggaaccccagacctcaatagttattttttctgctccttttccttttcccaccctcccctttaaaataaactccaaggtctatggttcccttttttgggtccataagttcttatcattacctcccacttataagtgaaaacatgcggaagtggattttctgtttctgcattagttggctaaggataagggcctccacctccaatgttttgtttttaaaaccctccaagtgactcctggttt

SEQ ID NO: 10159 - DNA, 111 bp, Homo sapiens
gctcctggtggataaaacagggaagaacatcatctgggttctttgcgcagtagcagccactcttgtgtcccacatgatgctggcctttacgatgtggaacccttggattgc

SEQ ID NO: 10160 - DNA, 391 bp, Homo sapiens
ctgattctattggaaaagatcatgaaaggagtagaagtaaagagaagtctaaacagttagaatcaaagagtaatgagcatgatcacagtaaaagtaaggaaaaggatagacgcgcacaatccaggagtagagaatgtgatataactaaaggtaaacacagttataatagcagaacaagagaacgaagcagaagtagggacagaagcagaagagtgcgatcaagaacccatgacagagatcgcagcagaagcaaggagtaccatagatacagagaacaggaatacaggagaagaggacggtcacgaagccgagagagaagaacaccaccaggaagatcaagaagtaaagataggaggagaaggaggagagactcacggagctcagagagaga

SEQ ID NO: 10161 - DNA, 581 bp, Homo sapiens
cattttggtttacacagtctgaccactagcacaatgcctggcacatagtttacaaatcatttaaggcaagcttaccatcttaagacaatttaatacatagaagtgtccctcctaaaaatctgagtttgatttagaaatccagttatacctgcaggtactgatgactaattccttctttgaagacaaaataagcagctgtgtagcttcagtggctctcaaatggataatagattcagtgtatactcgctttgaactttcctgttttttgatcagctagataaatgactttagtgggtaaatgtctgcctccaaaaccaaattctgaccctgatctaagtattctactgcaccgctgtcactggaatatcaaagttggccttcagactggtgcctggttccttggattggcttgagtattgaggtctgtctcatcttactagggaactaaaatgatgttgattgttttgtagagaattgtaattagagatctgtaggttcttaattcttttggaattccattctgaaaattttcaaccttatggtgttggtggagtgctcatgtgaagagtgaaactgactta

SEQ ID NO: 10162 - DNA, 94 bp, Homo sapiens
acaggacagcaagactcgcagactggacatccgggcaccactgcaccctgagaaggtgtgcaacaccatctagcagccacctgcctgctcctat

SEQ ID NO: 10163 - DNA, 594 bp, Homo sapiens
ccaaggactaggagtgtgagaaaaattgatcctcaggaggaagactgcaatgcatttagcaggaaagagtaatgtttcttaagaaaaaaatgaaacaatgaaaatccactaaaatctgtctcaaggataatattccatgactctacagggcttaatgcgtgtgacatatatagacttctgataagcagtttgaattatatgggtcagagaaatttccaggtcataggacttctctttaaagtaaaataaataggccaggcacggtggcttattcccgtaatctcagcactttgggaggccaaggcaggtggatcacttgaggtcaggagtttgagaccagcatggccaacatggtgaaaccccgtctctacaaaaatactaaaataaggccaagaagggtggctcatgcccataatcccagcattttgggaggccaaggcgggcagatcacttgaagtcaggagtttcagaccagcatggccaacatgatgaaaccccgtctctactaaaaatataaaaattagctgggcatggtggtgggcacctgtaatcccaactactctggaggctgaggcaggagaatcacttgaacct

SEQ ID NO: 10164 - DNA, 490 bp, Homo sapiens
atcaactttcttagttcaggccacctgcaacctccttctagtagcaatcacacccccagcagcctggaactagagtattctgccaaagcagaaaccctgtcactctactcacctatataatgattttctgtgaacttaggtatgaagttgaaaatcctcaacttgtcatacaaggctctttatgttgctcctgctttagtggccaccaatctaccaccccattcactctcccactcccaaccctacacatgcacaccctcttcacattcaatttcttctcctttctccctctccgctcagcaatactacattactttcaactttgcagaagtttcatgttgctgtgtctgcaaatcttctgtacatacatgctttttatatatcctggaatcctctccccctaattcccacctgctgcatctctacctgctaagtccttcttatcttttaggtgtcagtgtagtctttactttttgggtctcttgtatgc

SEQ ID NO: 10165 - DNA, 401 bp, Homo sapiens
attgaataataaaaatttaacccattgttgtgaaggagcctcagaatattttgatgttaacaaaagagttctgtatttacaaagttggagaaacactcatcaagagttaggagtaaggcccagtgtggggttccctctggtaataccagcattttgggaggctgaggtgggcgaatcacttgaggtcaggagtttgagaccagcctggccaacatagcgaagccccatctctactaaaaatacaaaaattagccagctgttgtggtacgcacctgtaatcccagctacttgggaggctaagggaggagaagtgcttggacctgggaggtgaaggttgcagtgagctgagaacacgccactgtaccccagcctgggtgactgagtgacactctgtctcaatt

SEQ ID NO: 10166 - DNA, 511 bp, Homo sapiens
cttaactgtatgaccttggacatgtcactagacttgctttagtgtctccatctgtaaaatggggataaagatggactcttctctcccaaatgcccagcatgatgtgcagggcctgtccccccaggagaacctgtctcaccatccttccccacttcctcccacccccaggtgtgccagaaatcaggcgagatctccctgctgaagcagcagctgaaagagtctcaggcagagctggtgcagaagggcagcgagctggtggctctgcgggtggcgctgcgggaggcccgtgctacgctgcgggtcagtgagggccgtgcgcggggtctacaggaggccgcccgagctcgggagctggagctggaagcctgttcccaggagctgcagcgacaccgccaggaagctgagcagctgcgggagaaagctgggcagttggatgctgaggcggccggactccgggagccccctgtgccacctgccaccgctgacccattcctcctggcggagagtgatg

SEQ ID NO: 10167 - DNA, 505 bp, Homo sapiens
cgctgtagtgtttaattgttaaagccatatgtgtttcaagggaaattgaatccatatgtttctgattcatttgcactgagctcatcaaattgttgttttataagagccgtttgctgtccaggaagaattccccagtgcccctccccacaccgttctatgctgtctaatatctttaaaacaggactctgttctctgcccagcaaaaccctctatcactaccgtactactgcaatcaccttctccactgtaacgttttacatgataaaagttagcctcttttcatggagtaagacaagacggtatcttacagaaaagccgcctaagtgtctcccatgaaaactgcagagtgaagattgagttaaacaaagttaagcaagtctcttcgttgatatctcaagactttacatttcaaaaaagtgaaggagccagacatagtggctcacgcctgtaatcccagcactttgggaggccgaggcgggtggatcacttgaggtcaggagttcta

SEQ ID NO: 10168 - DNA, 442 bp, Homo sapiens
atttgatccctactgactgccctgtgccaggcactgtggtaggccgcgggaatacagcagacaaaaacccctgccatgccaaagagggagccagaaaaacccacagtgagtaagtgaatcgatacgtaacacgttccatgcaaaatacactaggagaaaagtagagcagggaggggatgtctttggggggtgcagtttttaacagacgaggtgacactgaaaaaggcctaaaggtcccggcgcagtggctcacgcttgtaatcccagcactttgggaggccgaggtgggcggatcacctgaggtcaggagttcgagactaacctggccaacatggtgaaaccttgtctctactaaaaatacaaaaaattagccgcgcatgtggtggcgggcgcctgtaatcccagctactcgggaggctgaggcaggagaatcgcttgaacc

SEQ ID NO: 10169 - DNA, 296 bp, Homo sapiens
tataacaggaactcaaagacaatgcacagggctataatctaagaacagatgtattaacagccttactcactgtaaggctgggaacccttgaagccaggcattatatgcacattctcaaatatgatgctctagttaaagccttggtaatatatataaccaatgtttccaactgcatcctgttataaagagagagcaaattttattaaacttatgtaaataattcttgccataaaaaataagaatactcatggatagtttctgaattttagaggaatcaaatagggacaaaaaaaaat

SEQ ID NO: 10170 - DNA, 259 bp, Homo sapiens
gaagctcttgttaaaacaggtgcgcctgaggaactgcgtttatgcgtgaagaacactctccatttgcccctgacgtctgcctcactcttcccagattgaacctttattatcccatgctgggctgggacctcattatggaaggcctcgaaagccagcctgcggaggttgaacaagggagtaggatgatgagagttctgctgtaagagattaacccagcatcagtgtaagagacttgagagggaggaatgggtagagaaag

SEQ ID NO: 10171 - DNA, 506 bp, Homo sapiens
catgtgctgccacaggaagtgcaaactagaatgaagtctccgaagagaagtttgtcagttcatttccagagccttgaagacattcatattttctgacttaacaactccatttgtaaaaatttctcatgagaacacatcagataggcactcgagattattcactgctgtgctatttaaaaaagaattttaaaactgtcatgcaaataaatgcccaatgatagggggatgactaaataaaattaagaatatgcataaaagacaaattgttgactgggtgcggtggctcacgcctgtaatcccagcacttcgggaggccgaggcgggcggatcacaaggtcaggagatcgagaccatcctggctaacacagtgaaaccccgtctctactaaaaatacaaaaaattagccgggcgaggtggctggagcctgtagtcccagctactcgggaggctgaggcaggagaatggcatgaacccgggaggcggagcttgcagtgagccgagatagt

SEQ ID NO: 10172 - DNA, 513 bp, Homo sapiens
tgcggctgcgatcatgccacggcactctagcctgcatgatagagcgagatcctgtttatgaagaaaaagagactgggcacggtggctcacgcctgtaatcccagcactctgggaggccgaggtgggcggatcacgaggtcaagagatcgagaccatcctggccaacgtggtgaaaccctgtctctactgaaaatagaaaaattagctgggtatggtcgcgcacacctgtagtcccagctacttgggaggctgaggcaggagaatcacttgaacccaggagacggaggttgcagtgagctgagatggtgccactgcactccatccagcctggtgacagagcgaggctccctctaaaagaaaaacaaaaaaagaaaaggaaatgaaggaaatgaaggctgggcatggtagctcatgcctgtaatcccagcactttgggaggccgaggccagtggatcacttgaggccaggaatttgagaccagcctagccaacatggtgaaaccccgtctctact

SEQ ID NO: 10173 - DNA, 468 bp, Homo sapiens
cttcttcttttgacctgtcacatgatcagggtggaggaagaattaactgacctgacctaggaggattttctattcatttaaattcatagagttcgtgtcctttgccaaacaaatgtgcataacaagtaaagtatagaatgggtcagagaagccatctggtctcaccttctaaatttaccaatgagaaaattgaggcccacagagattgaaatcctctcctgagtaaaatagtcagaatcaaaaatgaaatctaatgattcccagatggttgtttcttccactataacatcatattattctcctgcattatcatttaactttctgtttacctgtctcatcttgccaactagattgtctttagtttcattccaaaactatctaaacggcatcctccatttccaggtggcagtaaaagattaaaaagtacctcctggccaggcacagtggctcacgcctgtaatcccaaca

SEQ ID NO: 10174 - DNA, 554 bp, Homo sapiens
cgatttggatgtgtgactatgtgatgtaaaatttctcctacatttatattagtaagtcattgttatttgtaagcatgacaataatcactttattaaatatatagtattattaagcaggattctgcctgtattttatgtaaaatacgaataagttttgaaagacaactatgaaaacatatttatactaatttatgtactgatgtgtatttggtcctttcgtttataaaaaattaaacaatctttaaactgtggacttttcatttggttctggtttgagtttgtgtcctgtcacatagatggtaggttaagtacatggtagaaaagttcatttttagaaatctgaaaatcaggccaggcacagtagcttatgcctgcaatcccagcactttgggaggttgagtagggcagatcacgaggtcaggagatcgagaccagccatgaccaaaatggcacaaccccgtgtctattaaaaatacaaaaattagctgggcgtggtggcacacacctgtaatcccagctactcgggaggctgagacaggagaatcgcttgaacc

SEQ ID NO: 10175 - DNA, 531 bp, Homo sapiens
tggggattgggttaacgtatataaaatattagatggtggtaagaagtgctaataagtgtttgttaaatatataagcccagggtcagcctggcttcctcctcatcctcctcctgctcacctggcctggaccccaacctctcccctagcactgagctcactgcccaggtcccacagcagcactccaggcctggactatttctacagccatctctctgcacctgtctttgtccgttgctgcagctacaacaaaatatcataaattgggtgctctggccaggcgcggtggctcacgcctgtaatcccagcactttgggaggctgaggggggcagatcatgaggtcaggagattgagaccatcctggctaacactgtgaaaccccgtctctactgaaaacacaaaaacaaaattagccgggcgtggtggtgggcgcctgtagtcccagctactggggaggctgaggcaggggaatagcatgaacccgggaggtggagcttgcagtgagccgagatcgtgctgctgcactccaccct

SEQ ID NO: 10176 - DNA, 599 bp, Homo sapiens
caattatagcaagtagactttttgtgtgtttcagaaaaaggcacataatttaatgaatggtagatattattatgtgattagatctttttttctttaagaaaagctcattaaatacaaagctgcttagttatatcaacattgacacataaaatttttatcacttacataacactagaatataatgaaccagtgaaatttgttcgttctgtactttcttattaattgtttcctgattagttactttatggttgaggaaaaaaaggaaaattcttgcactgacatatgtaacttgtttaaaaggtgaaagttacttgaattttaaattaattgtagtaactcatatgaactctaaattctttataggaatccaatttgtgaagacagaaattattagaaaagtaatttttttaagaaaagtattgtttaggtccgggcacggtggctcatgcctgtaatcccagcactttgggaggccaaggcgggcggatcatgaggtcaggagatcgagaccatcctggctaacacggtgaaacccggtctctactaaaaatacaaaaaattagccgggtgtggtggtgggcgcctgtagtcccaggtac

SEQ ID NO: 10177 - DNA, 528 bp, Homo sapiens
cttatcaacttagtcaatggcaataatcataaagtaaacattaaggaaaatattttaattacaatactaccaatattatatacaccaaatttccttagcaacagtggttacagaagtaaacaatcacgagcaaaagcaaaatttacggctattgaaatcattaacaagggccgagcacggtagctcatgcctgtaatcccagcactttgggaggctgaggcaggcagatcacgaggtcaagagatcaagaccatcctggccaacatggtgaaacccggtctctactaaaaatacaaaaaaattggctgggcatggtggcgtgcgtctgtagtcccagctactcgggaggctgaggcaggagaactgcttgaacccgggaggcggaggttgcagtgagccgagatcatgccattgcactccagcctgggcaacaacagcaaaactccatcttgaaaaataaataaaataaaataaaaataaaaataaaaataaaaatggagatggctggacgcagtggctcacacctgt

SEQ ID NO: 10178 - DNA, 175 bp, Homo sapiens
gtaatgttttcttaagcatgacacctaatacacacacacgcgaaaacaaaacaaaacaaaacaaaaaacaaaaaaacaaacaggggaaaagtaggtaaattggacttcctcaaaattttaaaatgtgcttcaaagggcactatcaatacacaaagaactattgcataaaactgaa

SEQ ID NO: 10179 - DNA, 573 bp, Homo sapiens
tggagaacccttgggggttacatttcaatatggggcaattattggtggctacaagtaggttcgtgcaattattggtggtaggatttgagctggcctgaaccacaatattcagacactaccccttctgtctgcccctctcactatcccaagggagaagggattccaaaatctcaacacttcactttcctgtattaagctgtgaatgcaaacaattgttctagtcattcaatgtcttctgaggaaaaacaattcagtgcagaatctaacatacaccatgtctatcatgtaaaatttatgccacagaaaattagtatgtgctgagaataaaaaacctaacttttattatttctcttttttcctttatgacctgggcaatataatttgatgaatcaaaatttggccaggcacagtggcttatgcctgtaatcccagcactttgggaggccaagtgctgacagatcacttgaggtcaggagttcaagaccagcctggccaacatggtgaaaccctttctctgctaaaaatacaaaaattaaccaggcgtggtggtaggtgcctgtaatcccagctact

SEQ ID NO: 10180 - DNA, 516 bp, Homo sapiens
gatacctgatggatccagacacattcactttcaactttaataatgaccctttggtccttcgacggcgccagacctacttgtgctatgaggtggagcgcctggacaatggcacctgggtcctgatggaccagcacatgggctttctatgcaacgaggctaagaatcttctctgtggcttttacggccgccatgcggagctgcgcttcttggacctggttccttctttgcagttggacccggcccagatctacagggtcacttggttcatctcctggagcccctgcttctcctggggctgtgccggggaagtgcgtgcgttccttcaggagaacacacacgtgagactgcgcatcttcgctgcccgcatctatgattatgaccccctatataaggaggcgctgcaaatgctgcgggatgctggggcccaagtctccatcatgacctacgatgagtttgagtactgctgggacacctttgtgtaccgccagggatgtcccttccagccctgggatggac

SEQ ID NO: 10181 - DNA, 653 bp, Homo sapiens
tggctgagtggaggcgcccagacctgggcaggcagcaggctcaggcccacaccttgtgatttttgaaaccaaagcccagaagatgatgtttacttctctctccctggctctgcccttcttactgcaaaccatgctgtgccttagggcccttctcatagctgttcctcatggccatgactggaacagggatgcaacctctttctacacaagcacagttagttgggtgaagtctttcttttgtttgttttagacggagtttcactcttgttgcccaggctggagtgaagtggcgtgaccttggctcactgcaacctccaggccagcctcagcctccctagtagctgggactacaggcacccactaccacgcctggctaattctttgtatttttagtagagatggggtttgaccgtgttagccaggatggtctcgatctcctgacctcgtgatccacccacctcggcctcccaaagtgctgggattataggtgtgagccaccgcgccgggccggttgctggcatcttaatgttctgtaggtggaatatttccaataaacacaaggtgccgtaattgaaaaaaaacaaaaaaaaacttcgagcctctagaactatagtgagtcgtattacgtagatccagacatgataagatacatt

SEQ ID NO: 10182 - DNA, 162 bp, Homo sapiens
ggcacgagccccggtcgtgtagcggtggtatactacggtcaatgctctgaaatctgtggagcaaaccacagtttcatgcccatcgtcctagaattaattcccctaaaaatctttgaaatagggcccgtatttaccctatagcaccccctctagagccaatac

SEQ ID NO: 10183 - DNA, 638 bp, Homo sapiens
ggcacgagagttttcctgtgattagtgtttttggtgttgttttattttttttcttacaggaactcttgcaagaagaaaggactatgagttcaactttagagggagccatggggactaaacaaaattctgaggccccctcaaccatctaaatggacttccttctgggccaggacactcgaaaattaaacctgaaagactggttcaggccatgatgggaagtgggagtcgaacatgcctcatcataccctccagcattaacatcaacacagaccttaaggctgataagaagcatttacaatctattctctctgaagtcttctacctggaggcttcatctgcatgataaaactttggtctccacaacctcttacaacccaggcattcctttctatcgataattactctttcaaccaattgccaatcagaaaattgttatatctacctataatctagaagcccccacatcaagttgttttgcctttctggacaggaccaatgtatatcttaaatgtatttgattgatctctcatgtctccctaaaatgtataaaaccacgctgttccccgaccacctggagcacatgttctcagggtctcctgagggctgtgtcacaggccatgttcacttacatttggctc

SEQ ID NO: 10184 - DNA, 539 bp, Homo sapiens
ggcacgagaccaaagctgctggagcctgaggcagagaaccagaggccggaggcagactgcctctttacagccaggaatctcagaggatttgaaaaaggtgaaggacaggatgggcattgacagtagtgataaagtggacttcttcatcctcctggacaacgtggctgccgagcaggcacacaacctcccaagctgccccatgctgaagagatttgcacggatgatcgaacagagagctgtggacacatccttgtacatactgcccaaggaagacagggaaagtcttcagatggcaataggcccattcctccacatcctacagagcaacctgctgaaagccatggactctgccactgcccccgacaagatcagaaagctgtatctctatgcagctcatgatgtgaccttcataccgctcttaatgaccctggggatttttgaccacaaatggccaccgtttgctgttgacctgaccatggaactttaccagcacctggaatctaaggagtggtttgtgcaactctattaccacgggaagg

SEQ ID NO: 10185 - DNA, 597 bp, Homo sapiens
acagagtctcagtgtgttgcccaggctggtctccaactcctggcttcaggtgatcctcttgtctcagcctcccaaagtattgagattacagatgtgagccactgcgcctggcctatagcagttatttataaccttgtattatatatgtaaaaatatttgttcctactttgtcattgagtcattaattcattcttgagacagggtctcgctttgtcacacaggctggagtgcagtggcaataacagctcactgcagcctcggcctcccaggctcaagcgatcctcctgcctcatcccctccccaaaccccagtagctgggaccacaaatcatgctactttgtcctttatcttttaactctgcttatgatattttttggccatacaaagttgtttaatttttaccttatcatttatccatcttttatgttatagttcaggttttgttatgcatagaaaaccctttcaaattcagtgattagtggccgggcacagtggctcacgcctgtaatcccagcactttgggaggccgaggcgggcaaatcacgaggtcaggagtttgagaccagcctggccaacatagtgaaaccctgtctctac

SEQ ID NO: 10186 - DNA, 586 bp, Homo sapiens
tacaggaagtgcctgtgccttgtgggaaaggaactgaccctcgggtcctggaggacaggaaatagaatggctgagtgggcctgggaatattatatgatggaaaggcaggaggtcatagctagtggcaagagacagatgctgtctcattgtatatgggaggaattaaactgccataggagtgaataataggactgataagtaacatttattgaatacttactataagttagacactcttctaatatatttacatgtattagctccattaatccttataataactccatatggttattataaggaaactgaggcacaaatagattaagcacatctaggaaacaactgagccaggatatgaagtcaggtcctctgactccagagtatacatcactctggagccaaagtaggctcctagcctctatgctggcagacctgaaactccagtgtgcgttagaatcacaggagggctgatgaaagcactgttgctgttccaaacctcctagtttctgactcagtaggtctgtgtggggcctgaggatttgtgtacttaagagttcccagataaggctgggtgcggtggatcgcg

SEQ ID NO: 10187 - DNA, 439 bp, Homo sapiens
atctcgaggtcaggagatcgagaccatcctggctaacacagtgaaaccccgtctgtactaaaaatacaataaattagccaggcacggtggctcacgcctgtaatcccagcactttgggaggccaaggtgggcggatcccttgaggtcaggagtttgagaccagcctggccatcatgatgaatcccctgtctcgataaaaatacaaaagttagccagacgtggtgatgggcacctgtaatcacagctacttgggaggctgagacaggagaatcacttgaacccaggaggtagaggttccagtgagctgagattgtgccactgcactccagcctgggcgacagagtgagactctgtcttaaaaacaaataaacaaacaccttcaaaaaccataccttattttatcctttatcctgtgcatccttgggttctcaaactcctg

SEQ ID NO: 10188 - DNA, 515 bp, Homo sapiens
taacacagcaaataattccctttggcccttgctctttattgccttccaaatatggaacaaaatgcttaccattttcttcctcactgtctagtcaaacttactcatcactcctcctaatcttatctcattcagccattctaattacccttctgtgaattcctcctggctgtctacatgtaccaagacttccgagcagagtctcatcagagaagtagggtatctaagacatactttatagaggctacaatttgaataacaggaacaaagaagaaataactcctttgtccaccttcaaaacttttgatacactgcaagagcctgtaatttgtaaaccatttaatctcacaggggggacctaggattctcagagtccgctccatcagggcaactatttacagcagactttcctcagatatacttgttcactttgtgctactccctttgatgtaggtataattaagctgattgcagccccagttggccactatgttcaaagaaaaaacccagtagcaatt

SEQ ID NO: 10189 - DNA, 347 bp, Homo sapiens
ggattccttaaaccttgagccttggaggttgaggctgaagtgagccaagatcacaccactgcattccatcctatgtgacagagtgagacactgtctccaaaaataaaataaagatttaatcaaaataaaatatggtacataaaaatcaaggaagaccatgtggccatataaaaacacaaagccaggcactgtggctcatgcctataatcccaacactttgggaagctgacgcagatggattacttgagatcaggagttcaagaccagcctggccaatatactaaaaccccgtgtctactaaaaatacaaaaaatcagctgggcgtcgtggcaagtatctgtaatccc

SEQ ID NO: 10190 - DNA, 211 bp, Homo sapiens
cccaaagtgctgggattacaggtgtgagccaccgcgcccagcctctgaattacttttctgcttactcaaagattagcctgtattgcggtgctcacttaaatccagttgcaacattacaaaccagccttatatatttggacatgtttactgtttaatgtaccgtaaaaataggaaatttgggttgggtgcagtggctcacgcctgtaacccc

SEQ ID NO: 10191 - DNA, 393 bp, Homo sapiens
ttagatgtcttattattaaagttacctattattgttggaaataaactaatttgtatgggtttagatggtaacatggcattttgaatattggcttcctttcttgcaggcttgatttgcttggtgaccgaattactagtgactagtttactaactaggtcattcaaggaagtcaagttaacttaaacatgtcacctaaatgcacttgatggtgttgaaatgtccaccttcttaaatttttaagatgaacttagttctaaagaagataacaggccaatcctgaaggtactccctgtttgctgcagaatgtcagatattttggatgttgcataagagtcctatttgccccagttaattcaacttttgtctgcctgttttgtggactggctggctctg

SEQ ID NO: 10192 - DNA, 433 bp, Homo sapiens
caaaaataaaataaaataaattagctgggcgtggtgacgcacacctgtagtcccagctactccagaggccgatgtgggaggatcacttgatcctgggaggtggaggttgcagtgaactgatatggcaccactgcactccagcctgggtgacataatgagacacccagaaagaaaagtaataatatatgccttatagaggagatattgcttagtatgtatacatttattttatttagatatattacgcttaaagaaactttttccgccccacagacagagtcttgctctgtcacccaggccagagtgcaatggcgcgatctcggctcactgtaacctctgcctcccaggttcaagcaattatcctgcctcatcctcccgagtagctgggattacaggtgcccatcactgcacctggctaatttttctactttta

SEQ ID NO: 10193 - DNA, 465 bp, Homo sapiens
ggcacgaggagcatatgaaaccaaaatttatggaacattttctgtgtgtacatgtacatgcatttttctagggagagagtccgtaggtttatcagaatatcaaggaaaactgtgacccaaagaagtttaagaatcacatacagtgctgctggctttttgtgcttggcaaatgagtgacaatagaagaaataatttttcttacacattttaaaacgttttctcttccttgtgattgaagatgaaaggagtaagaaattaaggcatttgtttaatttatactggtaacttatttaggggggaggggacatgaaggtaggtaaataggtaggcctctaattgaaccacctctctaagttatgtacgtatatataagctgaaattgtgtttgacattctgagggttttctttttctttttcctttttttttttttggggggggggtggggggaaaaatttttttttttt

SEQ ID NO: 10194 - DNA, 350 bp, Homo sapiens
ggcacgagggggaaaagagaacaagattactatcactaatgacaagggccgtttgagcaaggaagacattgaacgtatggtccaggaagctgagaagtacaaagctgaagatgagaagcagagggacaaggtgtcatccaagaattcacttgagtcctatgccttcaacatgaaagcaactgttgaagatgagaaacttcaaggcaagattaacgatgaggacaaacagaagattctggacaagtgtaatgaaattatcaactggcttgataagaatcagactgctgagaaggaagaatttgaacatcaacagaaagagctggagaaagtttgcaaccccatcatcacca

SEQ ID NO: 10195 - DNA, 411 bp, Homo sapiens
ccccctcaagcaatacatcaattcccttcacaataaacgtgggggctacatgactatctgtgttgaatgcggtctgaaatgatcctatggattttcccggctggttgccactactgtacaacattcagtgcccacatccatctgtgccattaagcttttttgagacatgatagatgcctcttccctgctgtatgacatgcatttgggaagttggaaagaaatgacaaaatcacggagaaaacatccaagcttcttacctgtagatagaatcagccctcacttggtgcttattaccagttattcaagatcactaacaacaacaaaattagtagacatccaagaagcacatattaggaccaaagatagcatcaactgtatttgaaggaactgtagtttgcgcattttatgaca

SEQ ID NO: 10196 - DNA, 427 bp, Homo sapiens
  misc_feature 25, 26, 27, 28: n = A,T,C or G
acacagctcttgtctttttgcggannnnttgttctaattcggcacgagcccacctttgccaaggtccagcggggcgtccaggacatgatgcgtaggcgttttgaggagcgcaatgttggccagatcaaaaccgtgtacccggcctcctaccgcttccgccaggagcgcagtgtccccaccttcaaggatggcgccaggaggtcagattaccagctcaccatcgagccactgctggagcaggaggctgacggagcagccccccagctcacgggctcgcgcctcctgcagcgacggcagatcttcagccagaagctggtggagcacgtcaaggagcaccacaaggccttcctggcctccctgagccccgccatggtggggccggaggaccagctgacccgctggcacccgcgcttcaacgtggatgaag

SEQ ID NO: 10197 - DNA, 414 bp, Homo sapiens
ggcaccagaagaactcttgctcacatcagctaagagattgcacctgctgacctagagattccggcctgtgctcctgtgctgctgagcagggcaaccagtagcaccatgtctgtgactggcgggaagatggcaccgtccctcacccaggagatcctcagccacctgggcctggccagcaagactgcagcgtgggggaccctgggcaccctcaggaccttcttgaacttcagcgtggacaaggatgcgcagaggctactgagggccattactggccaaggcgtggaccgcagtgccattgtggacgtgctgaccaaccggagcagatagcaaaggcagctcatctcacgaaacttccaggagcgcacccaacaggacctgatgaagtctctacaggcagcactttccggcaacctg

SEQ ID NO: 10198 - DNA, 398 bp, Homo sapiens
ggcacgagcctttccaagttctcactgctggaaagagctagaagcacagttcaaagttctggcttctggactctgcagtccaggtctcccttctcccacttgcctaccctcaatgccacactgtttttgaagtggcccataacttgaaggaaaagtttaaagacagttcaatttaatcatcagaatgcattcttttttttttcggaaacggagtttcactcttactgcccaggctggagtgcaatggtgcaatgatctcggctcactgcaacctctgcctcctgggttcaagtgattctccagcctcagcctcccgagtagctgggattatgggcgcccaccaccatgcccagctaatttttgtattttttttttaaaaaaaaatggggtttccccag

SEQ ID NO: 10199 - DNA, 468 bp, Homo sapiens
aaccttgtggtcatcaataagccctacggtctccctgtgcatggtggccctggggtccagctctgcatcactgatgtactacctatcctggcaaagatgcttcatggccacaaggcagagcccttgcatctgtgccaccggctggacaaggaaaccacaggtgtaatggtgttggcttgggacaaggacatggcacatcaagtccaagagttgtttaaaacccgtcaggtggtgaagaagtactggtatgaggcctgctgatggcagtagaggtggtataagtggaggcatttctttcacctatttattcattaaaaacagaaactcccattaatagaaggcactgcactatgacctgcgagattgtaaaaaatatgtgaaacagctttggtgcttaaaatattaagtctgatagaacagtggttcttaattctggtatacatcaaaattatcaaaaattaattatac

SEQ ID NO: 10200 - DNA, 313 bp, Homo sapiens
cagtaattcgccaaaatgacgaacacaaagggaaagaggagaggcacccgatatatgttctctacgccttttagaaaacatggagttgttcctttggccacatatatgcgaatctataagaaaggtgatattgtagacatcaagggaatgggtactgttcaaaaaggaatgccccacaagtgttaccatggcaaaactggaagagtctacaatgttacccagcatgctgttggcattgtcgtaaacaaacaagttaagggcaagattcttgccaagagaattaatgtgcgtattgagcacattaagcactcta

SEQ ID NO: 10201 - DNA, 485 bp, Homo sapiens
gtgaagggacaagcaggtttatgtgtttaaacagaaagaagggaaaaggtactatgtgatatggtactgaaattttgatcccaatagaattcatttctcttacgttgaatccccaatcataattaagccgtatacacagattaaattaacagaagcatttcacataaatgttggtttcagtcatcaactacccatgaattcctgcccaaggatacttaatcaggattaaattttctatgaataattgaaaaacaaaacactcactggatttgttataatccgtgttggcactggattctaagtagttgccatcttgaatcctttgtaataaagccatacttttgtgtgtgtgtgtgatgccccagtattgagtatgctagctaaaaaatatcaagtgcctgattaaagaattgctaaatggttgtcaatactcgctgtataaaatgagtattcccattaatagtcactgattggaaattattctg

SEQ ID NO: 10202 - DNA, 235 bp, Homo sapiens
gaggcagaggttgcagtgaactgagattgtgccactgcactccagcctgggtgacggagcgatactccatctcagaaaaaaaagacttaataacgatattgaaattagactaataaccttacaatgggaattttgcaatgaataaaaaagaggaagaaaatagttataattagattgttttctgaagtgacattaaatggccttcaaggctcaccaaaatgtttcctgaattcta

SEQ ID NO: 10203 - DNA, 477 bp, Homo sapiens
  misc_feature 419: n = A,T,C or G
gaattaaaaataaattagcataaaaagacagatatagtgacttatcaaaccttatgtttagttttgtgtggacagggtgaacacatccaagtacaagacacagctacacatggttagatgaaagcataatattgttcttgttgtgttcaaaagttaactgcagctataaggaccactatagattattatgggaggagataactctgctcttttgttctccataaaccctggttccttttctgcactcataagaatcacagttgctggaaacatagaaattacatttcttaaactcttctgtcagcagtagattcaagtttaggttacagtaaaaagaggtactcccagaatgaaagaaaagtagaagaaagataaaaatgattattgcacaggtgcatgcatgtcatgggatgacttanaattacattttaatagagactttgtcttgctgtttcttataggtaccccatgtgctca

SEQ ID NO: 10204 - DNA, 336 bp, Homo sapiens
agcagggctttggcttcaaatcttacatctgccacttgctaactgtataagttaattacttaaccttttcttttcttttctcaactgtaaagtgaggattatactttataaggtcttttttaataagagttaaatgaattagtatatatgaaaatgcagtcatgctctgtataatgttttggtcagtgatggactgcatatgtggtggtggtctcataacttttttttttttgaaaccaaattttgcttttggtgccccagctggaaggccagggggggaatttaatttaatggaaccctccccctctgggtttaaacaatttttttgggttaacc

SEQ ID NO: 10205 - DNA, 226 bp, Homo sapiens
gctggagaatcgtttgaacccaggaggcgaagtttgcactgagccaaagccatgccactgcacttcagcctgggcgacagagtgagacactgtctcaaaaacaaaaaacaaacaaacaaaagaaatggttaagaattcaggctctgaagtcagaagcctaaattaacagccacgttctgtcactttccactatgtctcctctctaccatcttactgatgaaaatct

SEQ ID NO: 10206 - DNA, 523 bp, Homo sapiens
agcctctgacaaacccaagcccaatatgtctttcctctgcagaaagcccatcaatggcttcctgtacattgagaagaatactacattctttatcataacctacaaggccccttcataggcaggttctgtccacatttctgcatttgcctcatttactttctccttcatttgctctggcttttttacggttttttgaaaattcccatttcttttgctgcaaaggaagcttcttcagggaagagactgtgactgtcttcttcattgctgaagcatcactgtctatcccagttccttgagcacaataagtattctatgcgtgttttttaacaagtagatgaatttatgacctagtgaggatgatcaaaataagtgcataatctttaaaaatgcaaagtcaaatgtggtaagtttcttaagagagacttgatttaagtagtctgggaatttatggaggggtgctgtggtttgaattttatgtctcttcaaaattcacgttgaaaccaaatccccaatttggtgacat

SEQ ID NO: 10207 - DNA, 82 bp, Homo sapiens
ggtcggccctccatcactccccgccaccccggagaccccaacccagtacatcctgggagccctccggcctgagtcatgggcc

SEQ ID NO: 10208 - DNA, 534 bp, Homo sapiens
tgaaaatgtttgtaataaaatattttaaaaatgagtcagtgtaattttccacaggcggggcacagaggctcacatctgtaaatcccccagtactctgggaagccaaggtgagcggatcacttgaggtcaggagtttgagaccagcctgaccaacgtgaaaccccttctctactaaaaatataaaaattagccaggtgtggtggtgggcgcctataatcccagctactcaggaggctgaggcaggagaatcacttgaacttgagaggcagagggtgcagtgagccaagatcatgccattgcactccagcctgggtaacagagcaagactatgtctcaaaaaataacgtaaaataaaataaaaatgtccacattaacaaaggagaaaaaattaaatatcaataaatgcataaaaattaatatatgtcaaaatctattatctaaaaaaaactgatagcaaactaagaaaatgaacttccttaacttactaatggaaatctaaaaataatgtaaaacacaaaaaacaccaaaagcttt

SEQ ID NO: 10209 - DNA, 372 bp, Homo sapiens
gccgggcgcggtggcgcgtgcctgtagtcccacctcaacctcccaagtagctgggactacaggtgcacgctaccactcctgactaatttatttttaatttcttatagaggcagcatctcactgtgttgcctaattaactggtctcaaacttctgggctcaagcagtcctcccaccttagcctcccaaagtgttgggattacaggcatgagccactgtgcctgggcaagtttatcttacttggagttttttgagtgtgtagattcatgccctctgtttccttttctttctcacctccttctgggactccaattgataatatgtctcttggtttatttgacagtgtcccacaagttccttgggctctgttcctt

SEQ ID NO: 10210 - DNA, 580 bp, Homo sapiens
gttgctctatgaaaaacacacattagcatttttcagaacattaggaaccaaacacagtatcataaaaacatagaaaaaaaggaactaattttatcttctagtcacagatgatgttcagaatcaaaatgacatgtgactaatagtcagatatcaaattagtggagctctgctcttaaccacatattactccatatctgtttctttatggcagcaaaagacaagactccagcagtggttcagctgtataatgggaatatgaatattccagaactttctgtatgccaggtgattgggaacaacagtctcttaatattacctggcttttaaaagtattggcatacatttgaactaaagatttttttaaaaaataaaatctgtccaggtgcagtggctcacgcctgtaatcccagcactttgggaggccgaggtgggaggatcacgaggtcaggagattgagaccatcctagctaacatggtgaaaccccgtctctactaaaaatacaaaaaattagccaggcgtggtggcacgtgcctgtagtcccagctacttgggaggctgaggcaggagaatggcatgaac

SEQ ID NO: 10211 - DNA, 417 bp, Homo sapiens
accctgtattcttcagcctgactcatcacttcccttttgttcgtttctagtcttcctctccagcctctccatctgtcgttctctaacttcttcctttatttttccttttctcggtttcattgtgattgttttaaaaaccacgtctatggcaaatatacccacaggtactttttagagggcttaatgacagtgtttatcagcagactctagaaatgtgttcatgacagatcaatgcttatttttgtggttcaaaagaaagttgtaaaaatttttagaaattattagtattttcttgcgggaatagtgaaagttagttgtgtgtgatcattttttaagcatcaaagattggaaagtctgaaattgtgtttcaggtgtgttccaacctactgactttgaattcatcacttattgttactg

SEQ ID NO: 10212 - DNA, 546 bp, Homo sapiens
ccaccaataatttaaaaaaaagtcaattaaatatgcgtagcttacttaaccttttgtccagtgatcaaataacttagttctgactgttgaaattgactggacaaaagttaagccagtgaagaaattttgtgatatcatggggtctgtatttccaaaaaattaaattttttatgtctaaaagcttatgcaaatatgtattatttgtgttggattaactaataaattatttgctttagtatatgccgctttaagaacactgaaaagtcagtgtccaaataactatattctaaacgttaggggaaccaaagtatccatctctaaatgattattactaaaaataattgaagaaatttgtttagtaaatttataaaatggtaaatctgacttagttgtcaaaattagctttttccatttaattttgacctatagattttttaaaaagtggaacggttcagaattttcctattaaaacttttatttgccagcctgggcaacatgacaaaaccctgactttactaaaatgcaaaaaaattagccaggcatgct

SEQ ID NO: 10213 - DNA, 102 bp, Homo sapiens
gaggtggagattgcagtgtgccaagttcgcgccactgcactccagcctgggcaacaagagcaaaactccatctaaaaaaaaaaaaagggccgggcccagggg

SEQ ID NO: 10214 - DNA, 502 bp, Homo sapiens
acacatgtacacacacatatatgtatacgtacacatgtacacgtgtacacatacatatgtatatatgtacacgtgtacacgtgtacacatacatatgtatatgtacacatgtacacatacatatgtatatatgtacacatgtacacatacatatgtatatatgtacatatatacacatacatatgaatatatgcatatatttgtttaaagtgaaaaaatatatattgctggccaggcacagtggcttatgcctgtaatcccagcactttggaaggccgagacaggtagatcacttgtgggcaggagttcaagacatgcctgggtaacatggtgaaaccccgtctctactaaagatacaaaaattagctgggcatagtggggggcacactgtaatccaacctactggggaggctgaggcaggagaattgcttgaatatgggaggcggaggttgcagtgagttgacatggcatcactgcactccagcctgggaaacagagtaag

SEQ ID NO: 10215 - DNA, 541 bp, Homo sapiens
tggaggttgcagtgagctgagatcatgccactgcactccaacctgggtgacagagcaagactctatctcaaaaaataataataataccagacaagaaagtagattctatcaaagaaatagtaaaagtagttatatttatatctatacttgctacgactacctaacgaactctttgacagcagagactacaaaaaaactttatatgttgttcctagcagagtttgccccataataggatttaagaaaccttagtagtgaaggcggcaggtaagcaggcaaacaaatgtgccactggaatttactcagaagatatctgagataaaactcactgttacaggggagaataccagattaaactgccagatttcgaatatatttactgaatatcttaatgtgataaaagtgtactgggaagatctagtacaggacaagtgatcgattagaacaaaaaggtttggtagaatacacagtaaaatgaaatcagcttgagggccgggtgcagtggctcatgcctgtaatccctgcacttcgggaggctgag

SEQ ID NO: 10216 - DNA, 544 bp, Homo sapiens
attcttagtaaacatttaggagcaaatgtaacaggagtataatttaccttgaccaagtataattactcttaacccaagagtactgctcctgctttttacgcaaagacaatctcacataggtcgataaggggacaatttgaggctagttattgtgaagttatctgggggcagcctgggtggcctgtcactgggaaagcaggcaggtgagcgggggcggtgaggcactggaggacgtgcagtaggtagtaatgacagtaacagcgtggggtgagaaggaaaccagaatgaggaggggcagctcatttgaataaagtcaatacctgctattaaaataatcattttggccgggtgaggtggctcatgcctgtaatcccagcactttgggaggccgaggcggacggatcacgaggtcaagagatctagaccatcctggctaacatggtgaaaccccgtctctactaagaatgcaattagccgggcgtggtggcaagtgcttgtagtctcagctactcgggaggctaaggcaggagaattgcttgaaccc

SEQ ID NO: 10217 - DNA, 575 bp, Homo sapiens
ggttaacttccgtgattaaagaattaaagaattaaaagatttcccaaagaatggatacgaagcaggctaatgcacattaatccttggcaattcaagactctgaaattttattgtcaagcttacatataaattccaaatattggaaacaaggaagtgtaaaaagaaaaatcacatattaacagtgtggtgtagagattatattctctttttgcaatctcttttttttttgagacagagttttgctcttgttgcccaggctggagcgcagttgcgcaatctcagctcactgcaacctcggcctctggggttcaagcgattcttctgcctcagcctcctgagtagctgggattacaggcatgtgccaccatgcctggctaattttgtatttttagtaaagacagcattttgccatactggccaggctggtctcgaactcttgacctcaggtgatcacctgcctcggcctcccaaagtgctgggattacaggcgtaagccactgtgcccagcctctttcattaatgttttatacttttcagcatacagatcttgcacatactttgttagatttatacct

SEQ ID NO: 10218 - DNA, 371 bp, Homo sapiens
actcacgatggatatgcttttagagaaacactgtgacaaagaccctttgctccagaggaaggacctgcagtggccccaggctgtggctccagcatcacttaagacagtgtgaacatttggacacaattaaaaacaggacacttaatcaaagagcacacttacaaagtaaaggggcaggaaagctgggaggcaggaggtgcaggaccccacgtgggacaggcagctgtgtgttgttggtaccgccttcctgccatggctttcctacaccagcagagagaaagcccatttctgctctctgctgcaagactctctggatggaaggtccagttccacaggaaggaaatcctggtagctgaggcgtggctgtgcac

SEQ ID NO: 10219 - DNA, 654 bp, Homo sapiens
  misc_feature 535: n = A,T,C or G
gacatcgagtacctggtgttagtggctttcataatgtaacaggtgtttagagacaccatgaagggatagctcaatgtttttaataaattttttaagttaacttgaatcaattttgtcagagccattctagccttctgagccataaacaggagttctgcattagaaacttgaaggccactacctgttctgttgaagctgatattagaacaagtggtctttattccaacacctgttcgtctctcaattctaagagccatgcacctgctaggtaagtgcttctgggaagagtgtgaatggtgggagaagactgaaaaatggttctgggctagaggacagtggcgatttttacctgaactagctgagaaaaccgatggtaagtttcagatgggtaagttccacagatttggggcaactgaaccaaggttggagaaagtgttgggaactgataatgaactttactagaaaaaaaaaagctttcctcagatagtacaagaaaaattagaccaaaatgaaaattgaaaatgagaggatattntataatttggtttgaatgtgatgacataactgatagtcttaaagaaagctgcatatgaaatgaaacagaactttcaattgaacagacaatttttagtaaattatttccataaatttcta

SEQ ID NO: 10220 - DNA, 606 bp, Homo sapiens
actggaagggcttggggaattcctaaaaactccatttacagtgtaggagatccccttctgttactcaaagttcccttcttacagagtattctgagacatttgtgattagtatccccttgagctttgtttctaatttccaccttctttcagggctcagaggaagaaaactgaatacatatacatacacactcacacacacacacacacacacacacacacatatatataatgataaatatataaatacacaagcatgcatactcaatcacacacaaacacacacacatcaccctgatactgttagttcagtggtcctagaatttaagtcatttatttgtaccacttgactctagtgtcattcattcctaattagtccatgtttaaacataacttcagatagaagacaatgaggattttataaaacataaggtaagatatatgtctgagaaaaaggcaggtctgacacaattatggatttaaacgtttttggttgattctggcactattagcaaaaataatacataaatttatatagtgcctactatgtagtaggatacgagataagaagtagcaaagatttgaatttaacagtttttgaatgaaaac

SEQ ID NO: 10221 - DNA, 59 bp, Homo sapiens
aatattcttctgcttctacccactttggcatgaaattggataagccctaaaacttaccc

SEQ ID NO: 10222 - DNA, 496 bp, Homo sapiens
  misc_feature 53: n = A,T,C or G
acaggtgcctgccaccacccccagctaatttttgtatttttaatagagacggngtttcaccttgttggtcaggctggtctcaaactcctgacctcgtgatccgcccccctcggcctcccaaagtgctgggattacaggcgtgagccacagcgcctggcctgtaccatgcattttctttgcgttctgctattccaaaagaaatattaaatattggcattttaaaacataaaataattagaattgaaattttaaaaactcttgtttaatctgtagcatcaacttaaatgaaccatcagtggtgtgcatcatcctttgatatgactgagtctgctttttgtatccagatatcaattatttatttgtttttgcttctacctaacttcttccttctctaacaattcaagactcacaattttctaggattcaaagaacattgttttttgagtgctttagaatcatttactcattcattctttcacttactaaaaaacattta

SEQ ID NO: 10223 - DNA, 121 bp, Homo sapiens
cgtttctccagtcactaatggagtcagcattaatctttcttgatggtcattttgtcattcctaaaatacattttaaaaaccacaattggggctgggtgcagtggctcacgcctataatccc

SEQ ID NO: 10224 - DNA, 220 bp, Homo sapiens
aattttatttttggtttacagaatcagtactctttcaactttaaaataataattacttactgagataataagtcagaactttaaaaattaatttgttcaacatttgtttattaagtgtctgatgtgttagggactgtttttggtgctggggacacagaattgaacagtatctgatgccatccttgcattcctataacttacctggcaggggggtggggga

SEQ ID NO: 10225 - DNA, 421 bp, Homo sapiens
gacggggtttcaccattttggccaggctggtctcgaactcctgacctcaagtgatccacctgcctcagcctcccaaagtgttgggattacgggcacgagccactgcacccgacttcccttggcttttaattacagcactaaccactcttaggtctaatgatcaccttaaaatagtggccaaatattggccttgggagaacatccccgaggagggaatgttcccttccccagccacttcccctgccccggtccctgtccctgctgcagctactgggactgagtcccaccacgtggttcatggaggctgacccagggaaggacctgcccagcccccatgcagggcattcttgcattatctgggaaattcttctggcttctccgtacctgttgagactgcagaatgggtgacatttgctgagct

SEQ ID NO: 10226 - DNA, 669 bp, Homo sapiens
ttggcccggcctgtggtgggcactcactaagtgtctctggtaccggggccagtgatgggcactcagttagcgtctctggcctgagtgttgcttggctgctttcctggtttgacactgcactttagactattgcagctaaaattaacacacatcatctgttgatgtgatgcttgcctccttttaagcttttctcaagctttcaaaatttcttcctgaagtttttccttcacagatgaaattgctcctgaattagaggtgatttactccaggcttccttgtgcttaaatgtggcaactttcaaggctgccttcatttttgcctcagagtttataaagcagcttagtgtgaatagatgctgtagggccgggcacagtggcccatgcctgtaatcccagcactttgggaggctgaggcaggttgatcacctgaggtcaggaggtcaagaccagcctggccaacatggtgaaaccctgtctctattaaaaatacaaaaattacccaggcatggtggcaggtgcctataatcccagatacatgggaggctgaggcaggagaatggcttgaacccaggaggtggaggttgcagttagccgagatcgcgccactgtactccagcctgggtgacaaagtgagactctgtcccaaaaaaaaaaaaaaaaaaaaaaaaaa

SEQ ID NO: 10227 - DNA, 464 bp, Homo sapiens
  misc_feature 403: n = A,T,C or G
tgccactctacctactcataggaacttctaataaactcatctgtataagaggaaacatccttggcatgtcatgggtctttgcagagattaatgtagtaaataagttacatcgaacagttcctaactctgctctagtgacaacagcagcagctggcccccttgtcctcatgcccactccctatacaagagtggattctgtgcccttacttaagcatcattgtctccttgtgcagtgttcaccaggacccgcagcggggtgagtttactaagatggtgttgagtcctggttcccaaggacaggcctcacagcctgtgtcagaaaacagcacaggggaggtgtaggtccgagaggtgggttgtccattgcagtccacctatcaccttctccagacaacgcagcggngctgctctgtgctaggagtattattgctttctgaaattgtgcagggatctatgcactgctc

SEQ ID NO: 10228 - DNA, 512 bp, Homo sapiens
gtttgaatattcagtgcactgactcttacattcagagaaatcttatctgtagtaagcagacctaggatgcagcttgtttgcctttcactctgtagcttcagcaacagcaaacatcattttgccaattttgttcctttcttttgactgcaatcatcttctttctttgtcctagaccattagttttgcggtactcatgagcctctctcaactcccttgagagtgtcatggcatcctctaaaggtaacttgtgggacatgcaaatctctctgccttgacatctttcactcctacaggtagggtttgatgctttacctttccactatcttgtggcgtatctctttcctcaacaccaccaccccccaacccccgcaccccactactggcttcaactccaaaacttagagcatggttgggtgtccatcaccttctctttttgcaggaactatcaaatacatagataagtgtataatgtgtacaactaatgcccacatttcatcactaacataaaaatg

SEQ ID NO: 10229 - DNA, 549 bp, Homo sapiens
atatgttcttaatacaggctgtaatatataaattggaaacaggaggaaaatagagtcaatctaataaaggaaatttttttaaatgaatgcaaatgtacagaaaaaaggcattaaacaactaggtgaaagataaggaagacagataaaggtgatcctatgattgggtccctgaaataaggaacatttccatgaaggaagaattggatcgtctaatcaaaagggcacaccatatattaaggaacactcacacaatgcaaacatcaccaaaacatattctggttattaaaactggagtatgaataacaattatttaagtagtcaggcagaaaaagcaagttatgtgcaatgggggaaattctccctagcctcagactcttctgtagaagctttccatgctagaagatagagccaaagtcataagggaaagtaaatgtgactccaaaatactttaccccagacaagttgttcaagtgtaaaagcaacaggtagatattctcagatatgaataaattaaaatttcaggaaatatagccctaatgagctcctctt

SEQ ID NO: 10230 - DNA, 477 bp, Homo sapiens
gctagagaaaagaggatgttagtaagtttatcataaagaagacaatacaaatttactgttcattaagtggaaatggatcataaaggtttcattctcaagttcatgtcgaataggaggaggagaagaactgcttgatcttgctatctcagggatagcagaggcagaagaacatctgcaaataagtagaccaaacatttcaaatctgtgttgttcaaggatccactgtacagtaatgctaagaaaggcagtggacataatttttaaaaagaactcagatccttaatttatccccaaattcaataatataacaatttttaaaatagaatttgtatgtttgattgtcagagatagatgaaataaaacaaaccattagaaataaaaaattgtttaaaaaatgcatcagtatttagatttgaaaaaatcataattaaaatattttcatcactgaatttaaaaaaatctataaatggatctaac

SEQ ID NO: 10231 - DNA, 613 bp, Homo sapiens
ttatgtgtttcaactttatgcctgacttataataatagttacaaatactacattgctagtaacaccaatatctaataccatttcctctttcctaatttcttgcagttgaagaaatggagatgagtatgtctatatgcttcactctttcctcagcaagatttatttagcatatgttttgttccaggcaccggctaagtgctaggggtacaaaagttgttttgtctcccttccttccagatgtgtccatgtgtccaggctaacagagtgagtagtcacacaggcaaatcattctcctacagttgtcaggctgaaggctgacttggtgtcataaataaaaaggcagaagatatttgtattcattgtcttggatgatattttcaacttgagtaggcagattgaaaagaaaaatgcggccgggtgcagtggctcacacctgtaatcccagcactttgggaggccgaggcggtggatctcctgaggtcaagagtttgagaccagcctggccaacatgatgaaactccgtctctactaaaaatacaaaaaattagctgggtgtggtggcaggtgcctgtaatcccagctacttgggaggctgaggcagaagaatcacttg

SEQ ID NO: 10232 - DNA, 500 bp, Homo sapiens
  misc_feature 355: n = A,T,C or G
gtactgagaaaacaacccatctaaagcaaatggctcttcccctcatttcttttaatccctcaacaggtcatgttctagagctgggctggtgagtaatgaaagtaacaagccaaatgaaaatagccaaaaccacggctaattcatcctagttaaaaatgtacacacgtgaatacacacacctcccaccacaaacaccacactgtctgcttcaattctcatctcacaaaagttttgcttatctgttttaactaatgtgtctttccccatcagtcgaacagtatttcccaagacacaacgatgtgtgaaacaggaactgttatgcatacaactttctcagtctaaaatcatggtgganaagcgtacaaaactcctttgtttttagctggtgaggaaattcttctctgagccctcagaaatttcatcattaaattgtgttactgctgaaatacaatgctcataaagtcatataatctccaagctggacagtctgagtgtgaaca

SEQ ID NO: 10233 - DNA, 175 bp, Homo sapiens
gaggttaagagatttcacctatgggaaccaggatagaaagtggttcaagccgggcgcagtggctcacacctgtaatcccagcactttgggaggccaaagtgggcagatcacttgaggtcaggagtttgaaaccagcctggccaacatggtgaaaccctgtctctactagaaatac

SEQ ID NO: 10234 - DNA, 546 bp, Homo sapiens
ggaagctagagaactaggaccggaagaagaactgagtgttcggagatggagaaatctctcatcatccttgcagaagacaaatttgatatcctctgtccttgtatgctgttttcttaccatagtctgctgaaaggtcaagcagaaggaggaatgaaaagaggacattggatttagtgtattaaataattcaggcaacactagcaggagcaatttcagtggagtggtggatgtgaaagagccaaagttggactgggttaaaaagagtttagggaggctgggcacggtggctcacgcctgtaatcccagcactttgggaggccaaggtgggcagatcacgaggtcaggagttagagagcagcctggccaatatggtgaaaccctatctctactgaaaacacaaaaaattagctgggtgtggtggcacatgcctgtagtcacaactactcgggaggctgaggtaggagaattgcttgaacccagaaggcagagattgcagtgagccaaaactgtgtcactgtacttcagcctggtgacagagcaagactc

SEQ ID NO: 10235 - DNA, 494 bp, Homo sapiens
tcacaggggaatgttgggtgttattttatttcaggattctgatacctactctaccacttgctggctatgccatcttcacctacttgcacctgttttctcttctgtggataggtgatcatacatcccagtttgcctgggaacacctagacctaatcaaccgcaggagccacttgcactctcaaaggtggcctggtttgtattaaaaacactggggggcctggcgcagtggctcacgcctgttatcccggcactttgggaggttgaggcgggtggatcatgaggtcaggagttcgagaccagcctggccaacatagtgaaaccccgtctctactaaaaatacaaaaattagccgggcatggtggcaggcacctgtagtcccagctactcgggaggctgaggcaggagaattgcttgaaaccggaaggcagaggttgcagtgagctgagatcgcgccactgcactccagcctgggcgaaagagcgaaactccatctt

SEQ ID NO: 10236 - DNA, 125 bp, Homo sapiens
gtaaactgaaattaaaataccaaactaaactacagcacctattatacactcacatccttatctcatttgaacctcacaacaaccctgtgaggtagtctgggtcattggccctaatggatagatca

SEQ ID NO: 10237 - DNA, 440 bp, Homo sapiens
gatcggtcaccaagggtcatgtctgcacttcaccacgtgccaaaacaacactagatcccgcccactcagcccctagcacgggaattggactgagattcctccaaccccaacagcagcgcccagtggggtcaccaaacaagactccaactgaccaagggcagcaggctggggacactcacacactctgggggagtcctctgaggctggtgtggaggaggctccaggggagaagccagcaggaacgtgggagggagagggtggtgccaagaggagtgggaggagccctgggaggggagaggaggacaggggaggaccgactagacagggtgcaaggcaatgacgcaggcctggccacgccagctttctcgctgggtggctgggtggagggagggaagtgctctaagccaggcagccatggaggtgggagggatggggatgga

SEQ ID NO: 10238 - DNA, 560 bp, Homo sapiens
tatcagtcattacccttgctcaagcccagactgggtcatctggccacagcaggagatgcagcgggcaacagcagcaggagatgcagcggggaacagcagcaggcatggagctgagacaagatttcactgtgaagacagtttccggggagaggctgggtccgaagctgcatctccatgtcccaggagtacctttcaaagcttcccctgtcctggcctcaagctctaggagctttgaaaaaaatgcttgcattttgggccgggcctggtggctcatgcctgtaatccctgcactttgggaggctgaggcggacagatcgcttgaggtcaggagtttgagaccagcctagccaatatggcgaaaccctatctctgctaaaaatacaaaaattagctgggtggtggtgggtcagcacctgtaatcccagctacttgggaggctgaggcaggagaatcacttgagcctgggaggcagaggttgcagtgagctgagatcacgccactggactccagcgtgggtgacagagtgatacgctgtctcaaaaaaaaaaaaaaaaaaaaaa

SEQ ID NO: 10239 - DNA, 650 bp, Homo sapiens
tctcaaccccgaggtgcctgaccagttctaccgcctgtggctatccctcttcctgcacgccgggatcttgcactgcctggtgtccatctgcttccagatgactgtcctgcgggacctggagaagctggcaggctggcaccgcatagccatcatctacctgctgagtggtgtcaccggcaacctggccagtgccatcttcctgccataccgagcagaggtgggtcctgctggctcccagttcggcatcctggcctgcctcttcgtggagctcttccagagctggcagatcctggcgcggccctggcgtgccttcttcaagctgctggctgtggtgctcttcctcttcacctttgggctgctgccgtggattgacaactttgcccacatctcggggttcatcagtggcctcttcctctccttcgccttcttgccctacatcagctttggcaagttcgacctgtaccggaaacgctgccagatcatcatctttcaggtggtcttcctgggcctcctggctggcctggtggtcctcttctacgtctatcctgtccgctgtgagtggtgtgagttcctcacctgcatccccttcactggacagttctgtgagaagtacgaactggacgctcagctccactgagctggctgcgggc

SEQ ID NO: 10240 - DNA, 614 bp, Homo sapiens
ggcacgaggagagagagagagagagagaagagagaggagcaagcaagggaaatgccagatagctataaaactatgagatcccatgagaactcactcagtatgatgaaaacagcatggggaaactgcccccgtgatccaatcacctcccaccaggtcctttcctcaacatatggggattaagaggattgcaattcaggatgagatttgggtggggacacagccaaaccgtatcagcatacctaggttactagctcatatctggagccagcaatggggtttgtcccaccagaatcactcaagcgtagagtgatatggttccccaaaggaaaactaaggtgttatttctagacaaaaaggattcaatgctgggaaggcaaaagcagtctatctattccacagtaggatgtgagtcatcagtacacaggagatagtaagaaggctaggagtagtggttgacacctgtaatcccagcattttgggaggccaaggcaggtggattgcttgagtccaggagttcaaggccagcctgggcaatatggcaaggccttgtctctacaaaaacaatacacaaatcagctgggtatggtggcatacacctgtagttccagctactc

SEQ ID NO: 10241 - DNA, 664 bp, Homo sapiens
ggcacgagccaggaggaccctcgcttcctctccgccatgcttgccacctcttgcttctgagagtccatctcagttcgcagttctgtgacttgcattgacctggctccaatcaagctacaactcaagcagtcacggggagaaggattgtagatgggccagtgactcacagggtcaggcactcgggggagcctgagtcaggaggtcagtgggccctggaagggagggggcaagcctgggtgggtaaggttctgggccccaggcaagaaggcagagtttctccgcaggggtgtgtgcaagagctagctgcgcagaaggtctccgctggctctccaagccgggcttgtgaaataggaacgccaacatcctcctccacaggcagtggcaggcacctcctcctcaggtgccccccaagccctatctgatgggcaaaggtgaacgcagggcggtgggcttttcctgtgcagagggagactgattcaaagggtcatttatgacctttcacaagtcccacatcctgcccaatggccaggtcttgggatgctgttgcaagatggttctgtgactccatgtgactgtctgatgattgccccagctggggaaaaggctcccatgtctctttctcataaaaccagtgggcaaggccgggcgcagtggctcacgtctg

SEQ ID NO: 10242 - DNA, 648 bp, Homo sapiens
ggcacgaggagacactccctgtggtctgttctaaaaatagcagtgggaacagagctgaggggaagaggagggggctccttcgggagctgggtggggaggcctcacccccttcctcttcctgccaggcccgatgtgaggaagtcccatggagtcacataattccatctgggagagtcctggagccatcagccctcacaccccctcctcatacaggcgaggaggccctggaggcccggagagcagaaagcactggctggtgtcaagcaagcccagagagaagggcccagttggcaggctgtttttccctggctgtttcagcacagtggctgcaggccttgtgctgaggtttgctgtcactgcctttgggcgcacagagactgggaactcctgggaccggatgtggtcaggcttcctgagagtcgcctggcaggcgaggagtccccagctggcccaccctgagccctgacctcagccagccggctgtccagtgccacacctcctcttgctggtgtcccctcccttgctgacttgtcctcctttctttggactgtctgcagggagggaggacaagggccagcctagatctggcctgcaggacagaggcctcagtggctcaggacctttccctgcccctccccaggaacaagc

SEQ ID NO: 10243 - DNA, 640 bp, Homo sapiens
ggcacgaggtgaggagtagttgctggccagcctggatgacgacctctgacccatgtcgccactggagctggtggcagtggggctggggaggaaggaacgccaagggccacagagagaacccaggctccatctgggccgagacatcctggcctctgagtttgacaggggagcccactgcccggccaaacaggagctggggctgggagctcagactcagtccagcccaggtgggagtcctggggaaggagatagcccacgagcctcaccagccctgggtgacagccagatggtgtccgaagccccaggcctggggcaggcagggggtgtctgggccagggatgaacggaggccaaactgggtaacaagcagagtcgggtgtgcagtgtctcataggcaacgtgaggagtgtttgagcaggagccggggcaggaggttgtggaaggccctggaaggtgccgaccagccaggccctctgatttggccggtgggggccatcggtgacgtgggaacgatggtttcagggaagcagtggctcagagctccgtgacgttttttggaacgggaggtgcgagatgcagacatttaacacatccggggctgtagccaggcagaggagcgtcagaccccccaccctgtttgg

SEQ ID NO: 10244 - DNA, 105 bp, Homo sapiens
tgtcctcgctgggtgggccaaggtctgggacctgtcttggactgtgggagactcaccctcaccttgccaggcctctcccctgcaggactggcattgcactagtct

SEQ ID NO: 10245 - DNA, 605 bp, Homo sapiens
ggcacgagatcaaggaccatgattttattccttcaaatagtatattatcaaatgccttgtcatggggagtaaaaattcttcatattgatgacattagatactacattgaacaaaagaaaaaagagttgtatttactcaagaaatcaagtacttcagtaagagatgggggcaaaagagttggtagtggtgcacaaaaaacaagaagaagactcaaaaagccttttgtaaaggtggaagatatgagccaactttataggccattttatcttcagctgaccaatatgccttttataaattattctattcagaagccctgcagtccatttgatgtagacaagccatctagtatgcaaaagcaaactcaggttaaactaagaatccaaacagatggcgataagtatggtggaacctcaattcaactccagttgaaagagaagaagaaaaaaggatattgtgaatgttgcttgcagaaatatgaagatctagaaactcaccttctaagtgagcaacacagaaactttgcacagagtaaccagtatcaagttgttgatgatattgtatctaagttagtttttgactttgtggaatatgaaaaggacacacct

SEQ ID NO: 10246 - DNA, 53 bp, Homo sapiens
gaagcattttgctcattgtcctacccaagtattaatagcataatagttgatgc

SEQ ID NO: 10247 - DNA, 555 bp, Homo sapiens
ggcacgaggctaactctgtcctgaagagtgggacaaatgcagccgggcggcagatctagcgggagctcaaagggatgtgggcgaaatcttgagtcttctgagaaaactgtacaagacactacgggaacagtttgcctccctcccagcctcaaccacaattctcacacagctctaggggcctgctcctctaactcacagtgggttttgtgaggctctgtggcccagagcagacctgcatatctgagcaaaaatagcaaaagcctctctcagcccactggcctgaatctacactggaagccaacttgctggcacccccgctccccaacccttcttgcctgggtaggagaggctaaagatcaccctaaatttactcatctctctagtgctgcctcacattgggcctcagcagctccccagcaccaattcacaggtcacccctctcttcttgcactgtccccaaacttgctgtcaattccgagatctaatctccccctacgctctgccaggaattctttcagacctcactagcacaagcccggttgctccttgtcagga

SEQ ID NO: 10248 - DNA, 408 bp, Homo sapiens
ggcacgagatcacgtgcctgctgagccactacaagctgtctgcacggtccttcatcagccggcacagccaggggcggaggagagaagatgccctgtcctcagaaggatgcctgtggccctcggagagcacagtgtcaggcaacggaatcccagagccgcaggtctacgccccgcctcggcccaccgaccgcctggccgtgccgcccttcgcccagcgggagcgcttccaccgcttccagcccacctatccgtacctgcagcacgagatcgacctgccacccaccatctcgctgtcagacggggaggagcccccaccctaccagggcccctgcaccctccagcttcgggaccccgagcagcagctggaactgaaccgggagtcggtgcgcgcacccccaaacagaacca

SEQ ID NO: 10249 - DNA, 676 bp, Homo sapiens
ggcacgaggaaggatgtgattgagctgacagacgacagctttgataagaatgttctggacagtgaagatgtttggatggttgagttctatgctccttggtgtggacactgcaaaaacctagagccagagtgggctgccgcagcttcagaagtaaaagagcagacgaaaggaaaagtgaaactggcagctgtggatgctacagtcaatcaggttctggcctcccgatacgggattagaggatttcctacaatcaagatatttcagaaaggcgagtctcctgtggattatgacggtgggcggacaagatccgacatcgtgtcccgggcccttgatttgttttctgataacgccccacctcctgagctgcttgagattatcaacgaggacattgccaagaggacgtgtgaggagcaccagctctgtgttgtggctgtgctgccccatatccttgatactggagctgcaggcagaaattcttatctggaagttcttctgaagttggcagacaaatacaaaaagaaaatgtgggggtggctgtggacagaagctggagcccagtctgaacttgagaccgcgttggggattggagggtttgggtaccccgccatggccgccatcaatgcacgcaagatgaaatttgctctgctaaaaggctccttcagtgagcaaggcatca

SEQ ID NO: 10250 - DNA, 96 bp, Homo sapiens
aaaacaaaaccaaaccaaaccttaatgacttaggaaggtggctttagtggccgcatgaagcacaccctgattgccgaggaaacagagtgcaaagct

SEQ ID NO: 10251 - DNA, 361 bp, Homo sapiens
gctcggctcactgcaacctccgcctcccgggttcaagtgattctcctgcctcagcctcctgagtagctgggattacaggcattcaccaccacgcccggctaattttgtctttttagtagagatggggtttcaccatgttggccagcctggtcttgaagtcgtgacctcaagtgatccacctgccttggcctggaagcacgtacattattgcgaagttttgacaaagtctcaaaagtcttttttattttgtttttgagatggagtttcgctcttgccacccaggcaggagtgcaatggcgtgatcttggctcactgcaacctctgcctcctaggttcaagcaattctcctgcctcagcctcc

SEQ ID NO: 10252 - DNA, 485 bp, Homo sapiens
  misc_feature 260, 272, 387, 402: n = A,T,C or G
acgacagaagggtacggctgcgagaagacgacagaagggtacggctgcgagaagacgacagaagggaatagagttgttaactctcatctggggagagccctgagatctacagtaaagctcttggccagaatatcagaggtctttaaaggaggtggaatttctcctattatagaaatcatcggccaggcgcggtggctcacgcttgtaatcccagcactttgggaggccgtggcaggtggatcacgaggtcaggagttcangaccagcgcggncaacatagtgaaaccccgtctctactaaaaatacaaaaattgggccgggtgtggtggcacacgcctgtagtcccagctactcgggaggctgatgtgggagaaactgctgacccangaagcacaagttgantgagctgagacatgcattgactctagcctggggacagagtgaactctgtcgcaaaaaaaaaaaaaaataaaaaaaaggggcgg

SEQ ID NO: 10253 - DNA, 602 bp, Homo sapiens
  misc_feature 563, 578, 584: n = A,T,C or G
ttgagagacctggtcttactggatgaggctttggaaaccaacgtgaggcaggcgctagcacatcctgagaggggtgtgacctggcacacaggcccagcctgggcttcatgtctcagctggcaagactgcctgctcattgccattccaggccgggcagggccaaggggcttcagggacccatgccctcatggggctcattgagctcgtctcccagcagccaaggccctggcatctccaaatgaagccagctgtgggggaaggtccttctcatgagccagtctgtcctggctgggggtggcatcccagagccccatctaggatgcccagggatgtataggtctgttgtgaggataagccagcactgagccctcaccctggactgggagggcagtgggcctgctctgagccctcaccctggactgggagggcagcggctctgctctgaaccctcaccctgggactcggggcagcccgcctgctctgagccctcacccttgacttgtctcctctgttcacgtcatgccgtggaggaagtggtgaaagaggtggtgggacatgccaangagactggagagaangacagnccgctgaggtcggcaggg

SEQ ID NO: 10254 - DNA, 572 bp, Homo sapiens
ggcaccaggggggttgtggccgggctggactgcccctggacactgctgagacactggacatggcctcgcacacatggctggcactggcacccctgcccactgcccgggctggtgcagctgcggtagttctgggcaagcaggtgctagtggtgggtggtgtggatgaggtccagagcccggtagctgctgtagaggccttcctgatggatgagggccgctgggagcgtcgggccaccctccctcaagcagccatgggggttgcaactgtggagagagatggtatggtgtatgctctggggggaatgggccctgacacggccccccaggcccaggtacgtgtgtatgagccccgtcgggactgctggctttcgctaccctccatgcccacaccctgctatggggcctccaccttcctgcacgggaacaagatctatgtcctggggggccgccagggcaagctcccggtgactgcttttgaagcctttgatctggaggcccgtacatggacccggcatccaagcctacccagccgtcgggcctttgctggctgcgccatggctgaaggcagcgtc

SEQ ID NO: 10255 - DNA, 585 bp, Homo sapiens
ggcacgagcccagtgcgactcccaatacagcggggagttccagcacgaggtctactgaggacctgccaggctcgcaggccaccctgagccagtggtccacacctgggtctaccccgagccggtggccgtcaccctcacccacagccatgccatctcctgaggatctgcggctggtgctgatgccctggggcccgtggcactgccactgcaagtcgggcaccatgagccggagccggtctgggaagctgcacggcctttccgggcgccttcgagttggggcgctgagccagctccgcacggagcacaagccttgcacctatcaacaatgtccctgcaaccgacttcgggaagagtgccccctggacacaagtctctgtactgacaccaactgtgcctctcagagcaccaccagtaccaggaccaccactacccccttccccaccatccacctcagaagcagtcccagcctgccacccgccagcccctgcccagccctggctttttggaaacgggtcaggattggcctggaggatatttggaatagcctctcttcagtgttcacagagatgcaaccaatagacagaa

SEQ ID NO: 10256 - DNA, 492 bp, Homo sapiens
gtcctgaacctaagccgagacactagtccatcatctccagcaatgaatgtcatccccccagacttcagcatcctgagttaattaaaaggtgcagatgaagttaatcaagtttggaactctaattttgtgcagtgttttgatacgatttgatgagtcatcttttggtagagcacctctctatccctgacagtgtttgatcttaacggaacagttttataatgtgtaaactggtgggaggtgctcttcagaaatgcagtcaacagtggtatgtgtgcgtgtttggctcttggggcggggcggaaagcagaacaaaggagaatttaataagcgagaacttgtcaggggctagggtcagttctgaggctgctgcctgtcaagaacatggctttcttcctgcccccctccactgctgctaactggagtctgaccttcgagaaagagtgaaaaaagacagcttctgtttgttttgctgcaagtaagtggctggactga

SEQ ID NO: 10257 - DNA, 587 bp, Homo sapiens
ctacaagtctcacttatccgtgacatcagacgaagagggaaaaataaagttgctgcgcagaactgtcgtaaacgcaaattggacataattttgaatttagaagatgatgtatgtaacttgcaagcaaagaaggaaactcttaagagagagcaagcacaatgtaacaaagctattaacataatgaaacagaaactgcatgacctttatcatgatatttttagtagattaagagatgaccaaggtaggccagtcaatcccaaccactatgctctccagtgtacccatgatggaagtatcttgatagtacccaaagaactggtggcctcaggccacaaaaaggaaacccaaaagggaaagagaaagtgagaagaaactgaagatggactctattatgtgaagtagtaatgttcagaaactgattatttggatcagaaaccattgaaactgcttcaagaattgtatctttaagtactgctacttgaataactcagttaacgctgttttgaagcttacatggacaaatgtttaggacttcaagatcacacttgtgggcaatctgggggagccacaacttttcatgaagtgca

SEQ ID NO: 10258 - DNA, 54 bp, Homo sapiens
tctagtgcagaagccaaatttgtgaagcagctagaccaatgtgaaatgattctt

SEQ ID NO: 10259 - DNA, 559 bp, Homo sapiens
gaagggtttagacaagatcatctctaaaaacctcatggttggctgagcacagtggctcatcaaccctgagccaactttgggaggccaaggcaggaggattgcttgagcccaggagtttgaggctacagtgagccgtgatcacgccactgcactccatctcttggtgtaaaaataaataaaaataaaaggctcatggtaattttaaaaggctatttttctatgacacttgattgccattgcaggggaggggacaggaatgcttggtgtcatggtacaatttgatgtaagtgacttagttttggataaagtggggtttctaaatctcagtgtggaggctttatctattttgtttgtcattggtaagattgccaactcacttcttggcaagagggatgggaaagagagggaaaggcagagagagtgggagcatggatagacatgtgtttcctgaccatgccttgctacatttctcgtttcttccaggagcctgactgctactccctgtcagttcctgaggcatctatacctttcgcctttctgtttcccgtttttccccttt

SEQ ID NO: 10260 - DNA, 417 bp, Homo sapiens
ctatacttcccaaatgaatttaagatgacttaaaataaaatttcttaacagaataaatggtttttatatgtgggaggcgagtgcctccctccttagaggctttctgcaaatcatttgtctttaccttggctctctgaccttgatgaagtactgatgaactgagagtgtttttgtcttttctctgattaccaaacaacaatcatttattaagcattcattaggaaaaagacactgcgctaaatatagagatacaaagatataaaactcaaattttctacctgtaagaagctcataaactaggcacggtggctcacgcctgtagtcccagcactttgggaggctgaggcgagaggatcacttgagcccaggagtttgagaacagcctgagcaatatgtgagaccccatctctttaagta

SEQ ID NO: 10261 - DNA, 542 bp, Homo sapiens
ggcaccagctctgattccttcaacgaggacatcgctgcctttgccaagcaggttcgctctgagaggcccctcttctcctccaacccagaactggacaatctgatgatccaggccatccaggtgctgcggttccacctgctggagctggagaaggtccacgacctgtgcgacaacttctgtcaccgctacatcacctgcctcaagggaaagatgcccatcgacctggtcatcgaggatcgggacggcggctgcagggaggacttcgaggactacccagcctcctgccccagcctcccagaccagaataatatgtggattcgagaccatgaggatagtgggtctgtacatttggggaccccaggtccatccagtgggggcctggcctcccagagtggggacaactccagtgaccaaggagacgggctggacaccagcgtggcctctcccagttctggtggagaagatgaggacttggaccaggagcgacggcgaaacaagaagagggggatcttgcccaagtggccaccaacatcatgcgagcc

SEQ ID NO: 10262 - DNA, 77 bp, Homo sapiens
gagagcatccggacagacgtttcgccaagatgggtggaatggccagttaaccactgggagagcatccggacagacgt

SEQ ID NO: 10263 - DNA, 429 bp, Homo sapiens
atgttgaaatgtcacattagtagtaaagtggggtttatttatatagtggttaagaaatgtcagtttacactgctgtatacttcttcttctgtgtccctaaggcctggtacagtgccaagcacatacttggtatccaataaatatttgttggatgaatgtatgcatatgtattcagtatattttaaatgaataatcacagaagtaagtttaatatttgtcctatttttctctgtcacttcctttttctctaaggcaggaaaggaaagacattaaaccattaattaagtcaatcctcttggagactcaaaagactatgaagtgatcactctatataaaatataaatacagtgtgggttcaaatggccattttttgtgtgtccctctctctcatcttatgcttcccttcctttttttatttgtattttttgg

SEQ ID NO: 10264 - DNA, 192 bp, Homo sapiens
ccgccgggccgggaggcaggaggcggggtgtccgggcctggccctgcctttttttccatgtggttctctaaacctcttgttcgtaaaaagacaaaaaaacaaaacaacaaaaaagcgaaattggaacaagtaaaagtcaaatcgattcagcaaatatttacggtacagcgcagttgcaggagcccctccgtc

SEQ ID NO: 10265 - DNA, 409 bp, Homo sapiens
atcacattcctgaatgttgaaattatatggcttgaaatgatcaacatctcctttgcttctgtctctgagcagtcctaaatcccgttaattcctgcttagaattcctcagatcaccctctcctttccgtctcctctgccaaccctcaatcacgcttattacctctcgctggcatgtctgaaccctcctggctttccctcttctaaacaagtcagccacatttaactttctgatacaatattttaagaacatcatgttttaaatatattcaactataatttgtcaatttctaattttaaaaataaaaattgaaagagcatcatttttttcctcagaaaccttcaacagctcaccactatctatgtaaatatgtgtttgtcttccgtagtctcaggtacaaacgttgcatca

SEQ ID NO: 10266 - DNA, 242 bp, Homo sapiens
tattttgagttgaaacgttgatgggagatgcttataagctgacgaattttttttgtaatgactgttatttatgtaaaaatttaaaagcctcatttaaaaatgaccttccattaatttgttcctcgatagcaataatctttgcaatagtttgaaccagtgtcattttacaggttagaacccggcatgcaaatttaaagtcttgtttacatccttgtaaggagttggatacaaagctgactaaa

SEQ ID NO: 10267 - DNA, 339 bp, Homo sapiens
gcatagaagctaagaaatagtaaaacttatgtaatcacattatgcttgggaaactgttttcttgcaaacaaaggtatttgtctcttatttattgtgttgatcatgaaaatagtatctctaccctgaggtgttacaaaaaattaatcaagtcagcatgtatactgcatatgtgtcttctggaatatttaccatttaatcaagaacctaaaaaatatataacctagctcccaaaaagtaacatcagtggttaattgtcaggttaaagaaaagtaaaataaggctgggcatggtggctcacgcctgtaatcccagcactttgggaggtcgaggtgggtggat

SEQ ID NO: 10268 - DNA, 89 bp, Homo sapiens
ctgataagggccttcaaggcgcccgacaacttgtttacgggccttgttttcagagattctccatttgatgtatcccggtcttgcagccc

SEQ ID NO: 10269 - DNA, 576 bp, Homo sapiens
attgtttttcttccagtttttctttttccaaaaaagggattcaagctggcctgcaaactcaaatggcttgtacatagttgagattaaggcaaatacacaagattgtatcctgtttttttcagctacattatacacaagtatcttcccttgtgataatgtagtttttataaatataagtttttaataactaatatttcattatgtgatacatcatgatttattattttaaaccatttctgtattgtcttgttttcaacttgggagtgttctacaaaattctttaacaagatctgtatgcggcagactcagtggctcacgcctgtaatcccagcactttgggaggctgaggcaggcggatcacctgaggtcgggagcttgagactagcctggccaacatagtgaaaccccgtctctactaaaaatacaaaaattagccgggcatggtggcacgtgcctgtagtcccagctacttgggaggctgaggcaggagagtcgcttgaacccaggaggtggaggttgcagtgagccaagatcgtgccactgcactccagcctgggtggcagagcgagactccgt

SEQ ID NO: 10270 - DNA, 397 bp, Homo sapiens
tttccctgctcacatgttacctttgacacactctggatctgaggaagtccctaattatctcttgcttttgcagactgcttacttgctgtgtggctctaagcaagttacttagcctttctggttttttttttcctcgtttatgaaatgaagatgatatgagcacctaattcatagggctactgccacgatatttaagttatttaacaatgactggcccatggtacttattccaggaaacaaatgagtataattataagtattttcaggacaattctctgtgatgtaatcactcctattttacagagaaggaaacatatttggaggttaaatagttgcccaaggccacacagctattaatagtggcaaggccgggcacaatggctcacacctgtaatcc

SEQ ID NO: 10271 - DNA, 317 bp, Homo sapiens
tggcccatcttttaccacaaggcacctcccgagtagctggggttacaggcgtctgccaccacgcccagctaattttttgtatttttagtagagacaaggtttcaccagattggtcaggctggtctcaaactcctcgcctcaggttatccacctgcctcagcctcccaaagtgctgggattataggcgtcaaagtgacttttaataataaattttaaaatcaacaataacagcgctaatgaaatgcttcctctgtgccaggctctgtgccaagccctctatgtgtattgtcttattccatcctcataaccactctatg

SEQ ID NO: 10272 - DNA, 360 bp, Homo sapiens
gaattgtttaaaaccagagatgtgcctccactttaatcctgcagagaactccctgattgctttgtcttctgaattggtgtttattttcccaaaccctagccagccttttgtaatttgatcatcagggagaattctatttattgcaatatttggaaatatacttgtggatagcctcacattaggatgcagcaaccagcatgagggtccttttttcctcttcatttgcccagccaatatacttttgcttttggttagcaaaagtccttgtagaaattgtaaattacagaaagaaaacaaaatttgcccctaagcacagcacctagtaatagttattgttttttcttttttttttttgaaaag

SEQ ID NO: 10273 - DNA, 621 bp, Homo sapiens
tatacttttctagtatatactttttctgtctcatacgattttttgtattattttccagttatctagatacataaatataaaatatttatgtttgctattttaattaatagaatttggcatattatagtagtagatggttaattaagtttgctgaattcaattttgaatggatcttacatctatttcactgtactgaatagttgaaagaaaatagccataaaatagatattggtgcagccgaagtgaaaaacaacatctaagtctccatctttcctgtgattttctgtcctctttctagcctctccctgcctacctttccgtgtgaacaagtgcacacctatcttgtttgaggcagataatttattatcataggcaagggatattagagtgataagaaatgatgtcacccttgggccgggtgcagtggctcatgcctgtaatcccagaactttgggaggccaaagtgggtggatcacctgaggtcaagggttcaagaccagcctggccaacatggtgaaatcccgtctgtactaaaaatacaaaaattagcttgggtgtggtggcaggcaactgaaatcccagtgactcgggaggctgaagcaggagaatcacttgaacccg

SEQ ID NO: 10274 - DNA, 543 bp, Homo sapiens
gtgtttgggcaagcaatacagaaataaacaaaagtgcaaaattatagtaactgttaaaatttgatggctttatctataactctactttcttatgataatagaaagtgaggaaaagctagtcaggtagactctgcagttagccagagttcaaaatctagctgtctcttacaatctctgtcaccctgaacaagtttttaaagctctctatgtctcaattccttaaatataaaaagtaagaataataatagtgctttgagcagtacctcagtaaatgctagccattattattgctttatccttataatggccatctacttcaagtactgggtctaggccgggtgcagtggctcatgcctgtaatcccagcactttgggaggccgagacaggcagattgcctgagctcaggagtttgagagcagactgtgcaacatggcaaaaccctgtctctacaaaaaatacaaaagttagccaggtgtgtttgcttgcacctgtagtcccagctacttggggaggctgaggtgggaggattgcttgagcccggg

SEQ ID NO: 10275 - DNA, 630 bp, Homo sapiens
atctaggtacttttataaaatcagattttaaaaagtggacatagtacatccagtctagtagatcataccatctactgtcatgtaatatggcaaactgtatcattgtcacttcagtagctctgtcaaaagtgctggactggaaggcaagagatccatgttcttaacctgagtctgttactaattacacacatgaccccaggcaagtcacttaaccttttatggtgtcagtttcctcatctgttaaatgaagggattagactagattatttccaggactccttccgaaaaagtacaggagagagttgtataactgaaaggcagaaagtggaataattgaggcttggaattcagggtgacttaaaaattactttaggctggacatggtggctcacacctgtaatcccagcactttgggaggctgaggtgggaggaccacttgagcccaggagtttgagacagcctaggaaacacggcaagaccttgtctctacaaaaaataattaaaaaaaaaattagcctggcatagtggcacatgcctgcagtcccagcttctcaggaggctgaggtgggaagatcacttgagcccaggattacaagactgaagttagctatgttcacaccactgcagtcc

SEQ ID NO: 10276 - DNA, 557 bp, Homo sapiens
gcctcctgagtagctgggactacaggcatgtgccaccatgcccaactaatttattttattttgtagagatagggtctcactatgttgcccaggctggtctcaaacccctggactcaagcaatcctcctgccttggcctccctaaatgctaggattataggcgtgagctatcatacccagcctgtgttgttttttaacaatatataataaaagccaacatttattcagcactgaagtattttatacacattagctcacttaatttttacaacaaacctgtgtgggaagtactgttataattaatcgtcattttcagataagaaaatagcagctgaaaaagtaaaaataatttcctcaaagacagccagggcttaaatcaggcctttctgatgtagaccatgctcttcactaccacagagttccatgctactttctctccctctccctcctctcctgtccctgctacacacacacacacacacacacacacacacatgcacactcactcacacacacgctatctacgtagatccagacatgataagatacattgatgag

SEQ ID NO: 10277 - DNA, 274 bp, Homo sapiens
ggagaccaaataaacactgtcaaatgcaacagacaagaggaaaaattgaactaggataaaaagtcaaaatttcaagtgaagctaacacctacatagcagttgtgtgccaggtacagttcgaagtgccatatatatatgttaataactcaccacagatctataagtggatactattattacacctgtgttacaaatgatgaaataagaagccgggcttggtggctcacacctgtaatcccagcactttgggaggacaaggcgggtggatcacctg

SEQ ID NO: 10278 - DNA, 479 bp, Homo sapiens
ggcacgaggtcatgatcaactcagtataggttttcttaaaaaattttttcttaaaatgttttttgaacttcaaataagtttggttggtgctacagatttaaatcgacttgtttgtgaggataatagaattctttttgctatgaacttatcagtcagcccagcgtctgtgagacggtgcctgcttgcatggtgcagtccagagtgtattttgcaaacgtctagcactgcctttatgtaggacgcgtgcttcgttttattggtctaaaatttcccatgtcataacactttgatcatgccttagagaagtcttacagcttattcagagcactttggagacattaacacccagcgtgcaaatgcgtcttcttgcttaggcgtcttgtgccttgtgttcagcatcagtctctaggcccgcttggtgtggttctggaccagagaaagtgctggtgagaagatattcctcagcagtgttgggagag

SEQ ID NO: 10279 - DNA, 134 bp, Homo sapiens
cgccgggctgcccagcctggctctgtctacactggccgagtctctgggtctgtctacactggccgagtctccgactgtctgtgctttcacttacactcctcttgccaccctccatccctgcttacttagacctc

SEQ ID NO: 10280 - DNA, 594 bp, Homo sapiens
ggcacgaggtggctggcaccccaccctgtcttctctgatctggtgctggcgtagggccgtgggggtaagtcacgtctccccgtgggctcagggaggcctctgcacttagggtctgaccagcctccccactaggaacagggtgggaaagtctgctcctgagccaggagtcaggctgggagtagcaatgctgggatgggaggtgtgtggccctcatgggcctcctctgggaagcccccagcacagatgtgggcccactcagaggctgcctcctggacctccccttctgctggaccccggcgtatgcctcagctaagcccgtatttcattctgctcagatgctcagaactctagacatttgcctccgcaattatatcccattctcctggaggaccaggaccatgtcatattcattgctgaacactgcacagtgcttggtgtggggctggtgcctgtgagagtctgcacaatgtgtgaggcccgctggggcccacgaagggtgcaccaggttcccagcctcgctccatctcagaggtgtcctgctgtgtacggcggtggcccacggatgccgagagagcctgagcacgtgtcacacct

SEQ ID NO: 10281 - DNA, 148 bp, Homo sapiens
tcggcacgaggagagagagagagagagagagagagagagagagagagagagagagagagagagagagagagagctgaagcagcgcgctcgctctctctctctctctctctctctctctctctctctctctctctctctctctctctct

SEQ ID NO: 10282 - DNA, 216 bp, Homo sapiens
atgaagggagctcaggagagccgtcttcagctgggctggggttggggctgctgtgaggaaaacctgccattgtggccctggagagtcaccagcagctcttgggaaggacttgctgggaggctgagagaggctttgggcacagcctgctgtcttttccatttcctaaagttacttcattgtcttgaggcttccaggttttgtttttgtttttgccaa

SEQ ID NO: 10283 - DNA, 634 bp, Homo sapiens
ggcacgagcgcgggagttccgcaggtttcccgtgttcgcagcggagccggaggccagactgaacccggctcgtggagagtcccgagataggtaggagcgaggggtacccataggtacgcagttaacatggcacctggtaaaacaaagtgaataagatgggcttaagtcacgagcaaggatttggagccccttgtttaaaatgcaaagaaaaatgtgaaggattcgaactgcacttctggagaaaaatatgtcgtaactgcaagtgtggccaagaagagcatgatgtcctcttgagcaatgaagaggatcgaaaagtgggaaaactttttgaagacaccaagtataccactctgattgcaaaactaaagtcagatggaattcccatgtataaacgcaatgttatgatattgacgaatccagttgctgccaagaagaatgtctccatcaatacagttacctatgagtgggctcctcctgtccagaatcaaacattggccacgcagtacatgcagatgctacccaaggaaaagcagccagtatcaggctcacagggggcacagtaccggaagaagcagctggcaaagcagctccctgcacatgaccaggacccttcaaagtgccatgagttgtctcc

SEQ ID NO: 10284 - DNA, 572 bp, Homo sapiens
attcatggttcaaaatagaaatcgtaatgaaaattataaaaatcttttaaaagaaaacccaacattaaaacctgcatggtgcagctaaaggtgtgtgtggagggaaactgaccttaaatgcaaatattagcctggaaatcagactaagaaatgagcaacagcaaattaaaccaagacataacggaaggcaggagacagcaaagggcggcagtgaacgcgcaagcacgcggacacgtggcagggaggactaagacgccgaaagttctttgaaacacaaataaaatcaataaagtctcagataactaacacgggaggaaaaaggtgttatcactataggttccatcacattagatcataagagaacaatttaatgctaataatcttgaaagtgcagatgaaatggacacattctcagaaaaacacaaattaaagcatcatactctgggctgggcacagtggcttccacctgtaatcccagcaccttgggagcccgagacgggtggatcacctgaggtcaggagtttgagaccagcctggccaacatggtgaaactgtcgtctctactaaaaata

SEQ ID NO: 10285 - DNA, 192 bp, Homo sapiens
gcatggaggagagcctggcagaaatgagtattatgactactgagcttcagagtctttgttccctgctacaagagtctaaagaagaagccatcaggactctgcagcgaaaaatttgtgagctgcaagctaggctgcaggcccaggaagaacagcatcaggaagtccagaaggcaaaagaagcagacatagaga

SEQ ID NO: 10286 - DNA, 568 bp, Homo sapiens
gtcgtacggtttatacttcaccgtacgactcctctcccccactcctttgtgagtctggtctcttgccagtttcttaccctgagtggtgctaagcagataactcgtggttattccaagatagcatctgagtggagccacttcaggactagagggatgtgtcctggatctttggtctgtctcatgccttgcaccaagcttgtgggtgacgtatcatgaccttgttggagtgattgaacttgatctattgagacgcaatccaggatccctagaaacaagcacggtagactgttactgtgtggcaggtgtttcagtgacctcccgtcatcaagaggtgtgtgtgacttgacaataaaaaaataagtgtcctaaaagaatttactggctgggtgcggtggctcacactggtaatcccaacgctttgggaggccgaggtgggtggatcatttaaggtcaggagtttgggaccagcctggccaacatggtgaaaccccatctctactaaaaatacagaaattagccgggcatggtggccatgcctgtaatcccagctactcgggaggctgaagca

SEQ ID NO: 10287 - DNA, 572 bp, Homo sapiens
actggactgtgaatgtcaccgagcttttctcagattttcttctctacccttaggtaggaaaggatggcgagagtaggctgggattgggtactatccttctcccacatggttggctagggtgagctttagttgagtatttctcttctcccacgtggaaagttagagctgactagaattaggttttacccttctcctagttcagttaggctctgataaaaccccagaatgttaggctctggttaactagcttctcctgagggcagagtttgtcaagaggagcacagtgctctgaagctttcagaatgattcctatttccgtctccctgctggaagctcaaggggattcttcttgagaaggtaaaattcacaaaagtatggggtcctcatatgagggagtccccctgaagtttttaactctcagacttgttctcacctagcctctaacaatttgttgattacagttcaggtttcctaactctggcaccggttcctataaagacttctgtacattgttctcaatgtttgcatttctgtctctgattatgggagcagtggtttgccctgtgacctca

SEQ ID NO: 10288 - DNA, 578 bp, Homo sapiens
gtttgccttctctccaggctggcccacttcatttggggtttcccatgccccctgcttcacatcctttgactctggcttttgttccctccctcccagaatagctctcagttcatgaagcacaccaaacgccggaagctgacggttgaggacttcaacagggccctcagatggagcagcgtggaggtgagtggggtgcaggctacagagggctcaggtggcatgaggccacttccatgtccagttcagggctggcgatgtggtgagacattaagaccaaacgctgccgggcatggtggctcatgcctgtaatcccagcactttgggaggccgaggtgggcggatcacttgaggccaggacttcaagaccagcctggccaacatggcgaaaccccttctttactaaaaatacagaaattagctgggcctggtggtacatgtctgtaatcccatctagtcaggaaactgaggcatgagaatcgcttgaacctagcaggcagaggttgtggtgagctgagattgcactccagcctgggcaacagagcaagaccctgtcccaaaaaaaaaaaaaaaaaaaaaaa

SEQ ID NO: 10289 - DNA, 386 bp, Homo sapiens
cgttgctgtcgggtcttgactgtagcccagctcaggctggaactgctccctgtccccaagccagcctccctgtctctcttcaaagagtgtgagtccctttaggtcctggtgtgtggggacacacctccttcctcctctggcccggaggcttcggagcaggagagcctggagaagtgggggcactgtcggggctcctcggtacacagaccacgggacagatgcgtggcctggccctggcatccatgggcaaaggagagactgagacacaccgatgtgtcaccatggcccggtgcccagccttgccccagccccagctgggggcagcacggagtcctcgcacggggaagtcagtgtggggcgtatgaggaccaacagctgggtcctgg

SEQ ID NO: 10290 - DNA, 360 bp, Homo sapiens
  misc_feature 360: n = A,T,C or G
tctcctttagctgctacagactccctgctctcttccctttccagcaaacactgtctgcttcctcttgtcccaccagctcttgaactcactcctttcaggctccatccccaccaccccactgcatccactaatgccaaggccacctccatgtggccacatccaatgaccatctctctgccctcaggtccctggttgaacatgtcagcagcatttgagtagctgacctcctttgctttcaagaaacttttcctgctcttggatctcttcctgtctccctagccagattttcctacttctcccttactgattcctcctaatttcctccatcatgaagcactggagtgtcccagggttcagtcn

SEQ ID NO: 10291 - DNA, 300 bp, Homo sapiens
gatgaccttgaaattaaatgggtcatgtgaagctaaagattatagaaccccttgattcctttataaacagtatttctaagataagatcaacactaatctttcaaattagttgactgtgtatagaacaacttgtttatttaaagtcatctagtctaatgcaatcaaggagtaaattataaataaccagttagcataaatggaaagaaaatagttccttttctttgaattcatttcatgtttaatttttcttgcgcacatatagaaatgaatagaaatattcccatttcaatatgcaaattc

SEQ ID NO: 10292 - DNA, 499 bp, Homo sapiens
accaagtaggactctatgtgttatgttatgaagaaagatgttttgctaacgagatccacacatatctttgatgttcaaagtgggaatatagtgtagcaagaagaaaattgttgaaaatatttccaattgtatatgttatgcatatcatctaaacataaacatgatgcattgaaaaaaatactgttggcaaagcaatttagaaattccagaaaataagccaggcatggtagtgtgtgcctgtaatcccagcactttgggaggctgaggcaggcggatcccttgaagtcaggagttccagactagcctggccaacatggtgaaaccctgtctctactgaaaatataaaaattagccaggcgtggtggcatgcacctgtagtcccagctactcaggctgaggcaggagaattgcttgaatctgggaggtggaggttgcagtgagctgagatcgcaccactccactccagcctgggcggcagagtaagtgagactccatctac

SEQ ID NO: 10293 - DNA, 105 bp, Homo sapiens
gggttcacagctgcagtgagctgcggtcatgccactgcactccagcctgggtgacagagtaagaccctgtctcacagaaataagtctaacttgaattgaaatgct

SEQ ID NO: 10294 - DNA, 482 bp, Homo sapiens
atttgtaactcacagggcagaataacagctctagagctcaatttatctggaggagattcagcacacctgcttctctttttccactggcatggctcttggtgcaaatttgtatttatgtaatagttagaaattaaacatcagcaccaacggaaaaatattcaacgccctttattaaacatcaaacaactttgtcaatgggaaaagctgccccaactgttttagatcttacctctcaacattgttgtcaaagtacctttccactctctggtagtgtctttgagagggtttgtctattggacttaaaactacatacacaaaggtaagataaaggttatttacacagccaatcttaaaagtagaatatcagcactctttaatcttcccatttttttgtagagacacgatctatgttgcccatgctgtctcaaactcctgacctcaagcaatcctcctgcctcggactcccaaagtgctgggattac

SEQ ID NO: 10295 - DNA, 539 bp, Homo sapiens
ggcacgaggcaacccacccccgtgtccccaatgcctcactcctggcttctagtgcagccctttgtagactcacctcgcaagaaggaagatctgcctggagacctgatcccagtccagctttttgaccataggtcatctttgtccccttgctcctttgcatcatgtcataaaatttgaggatatcagctgattattttttcttccaagaatgaaaatcaagcagaattgattcctacacgaaaaaaaagcacacgaatgccaaacctttcctttggtggactggacactaaccagatgagagtaaatttcttatccgtggacgtatgtaagctactgctgctgtgtgctctccacagccatatttattgtattaaacaatcagcactaaaccttcaaaaattgcccagtgttcctagttaaatgttcagaggggagaaatagatatattttaaataatgttttgctaatgaaaagagtaaatatttttgtttaaatcagcaaaaactttccattattttatatttccgtctactatacct

SEQ ID NO: 10296 - DNA, 352 bp, Homo sapiens
tatctttattaacaattgacttgaatttaaaaaaaattttagtatttttatttttaattttaatgaaggaaaaagtaaacatgtaaatgcttgctttatttttcaattttataaaagcagttaattacagagaagtgctgacatttctacttttcataggaaacttggagagaagtcaaaggtgtaaaaaggacaaattttagaaaatgagattcatgaggaaagactgattaagttcactttagttaatgaaatgtggaattatgaaaaattaaatattaaggagaaccctaatgaaattataagaatagaaaataatttactcttggcctggcacagtggctcacaccta

SEQ ID NO: 10297 - DNA, 406 bp, Homo sapiens
tcatctttgtaatatctacatgcccagtacctaatatatatttattcaatgtgatatttcttatcaattcatacctgagaattcacttaactttgccatcacatgagttctagcaagcaggaatatacagtgattatgcctagaattttaaacatcagatctgacctaagaaataacaatcccaactgtaagaaagaagtggtttggggaagtcaaacactaaagaaatactttcaaaccagtctaaaactaactaaatggttaatcttatattaacaaaaacatgcaacctagattaacaaaagcatacaaatctcaatttcattatgtgcattcattcagtttctggtcttaaaagcttgaggctaaaatcaaagaaaattataatctaaaacaaagtttaatt

SEQ ID NO: 10298 - DNA, 355 bp, Homo sapiens
taggtagacgtagtgttgtggatctacaaatttcctttacaatgtaaaattgtgtgctttcatttttgagatatctaaaatatgattgtaaggattgtctggatcgtctacatgaccagcttctaaccaaatattaccaaccaatgttggtgtccctatgtgctgttgtgtttattattgcaactgtcccaagtcaaagggtaacaaacaaagagtagcggcaaacctaataagtttgccaaaatttcacaccagatgacatcatgtgcaccatggaatgaagatttttaagtagataaaagtggtagcaaaactggaccagcacagtagcaaaaaagccaaataaaaagactcc

SEQ ID NO: 10299 - DNA, 80 bp, Homo sapiens
cttggctgttactgcaaagaaaagccctctcactaagccctgtgagtttgcatgcatgcctgtgtgcttctgtgagtgct

SEQ ID NO: 10300 - DNA, 438 bp, Homo sapiens
caccccttctttcaaactgcttttgaaaaacccctaacctatgagctttggacaagatgattggagtatgaactctgtctcccctgtgacatggttgggctcgtgtctattaaactctttctctactgtgatgctgtagtccttcatgcagcagacaggaagaaccccttggacagttataaagatattaaatgaaaaaaagttcccttatcatccccgataccacacctgactgacatagtaataacagtattgacagtagtgttagatagataataagtgtttatactaatcctcacaacaactctcctgatacatggatattattgacactttatagatgaaaatgaaaattcagaaaggttaagtgtattacaaaaatttaaatggctgacaagttacaaaaaagggtgaaattcaaatgtatttactccaaat

SEQ ID NO: 10301 - DNA, 331 bp, Homo sapiens
catgtttttaaatggttggggaaaaaaaatcaaaagaataacacttcgtgacacttacaaattatatgaaattcaaacttcagtatccataaatataaaattttattggaacacagtcacattcattcttttatgtatggctgtttttcctctacaattgcagagttgagtggttgtgacagagactctacggccctgtgctatagtttgaatctcatgttgaaatctgattcccagcgttttcggtggggcctaatgggaggtatttggatcatgaatagactgatgccctccctgcgagctgggggaagctgtgagttttcactgtatt

SEQ ID NO: 10302 - DNA, 600 bp, Homo sapiens
ctagtagctgggagtacaggtgcctgccaacacgcccagctaattttttgtacttttagtaaagacgaggtttcaccgtgttaaccaggatggtctcgatctcctgatctcgtgatccgcccgcctcggcctcccaaagtgccgggattacaggcgtgagctactgtgcccggccacttcgtggatttttaacaagagaaaaatttcaagatattgtaaatttaaaacaaaattttatgtgtaataccattgaaatgtctttaaccagtatcaatcacgtgatatgaaaaatattaaatatatatttattgaataaatgaatgaaaatcataattaccttgatcactatatttaaaatttaaatgaagcaggaaagtaaatcttcctaattatcatatacttaactgtttaaaatcactctaatgacaagtaatacgctttcaatcttgcattataattttaaaattcctgtattgtttcattcactcatccttccattaattcagtgaacaaacattgattccttacccactaggtgctaggtattatgatagattcagggagtacaaaaatgattaaatgaggggatcagctggagtg

SEQ ID NO: 10303 - DNA, 420 bp, Homo sapiens
ggagttgaaatgaaaatgctaagggaaagaagccagacacgaaaaattgcctattgtaggattccatttctatacgatttcttaagaaggcaaaattgtagagacaaaaagcacatcagtgttttttcaaggtttggggttgaatgggaattaacagcaaatgagcaaaaggaaactttttggattgataaaagtattctaaaactagattgtggtgatgactgcacaattttataagtttactaaaattcattaactgtataattaaaatggatgacatttaaggtgtgtaaaattctacctaaataaagatgtttaaaaaaaataccctgatctatgaacaaagccacaaaagaaatgtcaactaattctaaaatgagatatcatacaggtgacagtcactgttcatcatgcaatcaa

SEQ ID NO: 10304 - DNA, 591 bp, Homo sapiens
ctgaacgtacatatgaaaaacaattagaaaagaaatggaatgcttcatgaatttgcatgtcatccttgtgcaggggccatgctcattttctctgtattgttccaagtttatcatatatgttgctgaagcaagcatgccagttatctattggtaaaaagttttggaataagttttctagtaatggcagtggtctaacctatgattaatttatttttgcgatgaatagtttgtatttgtgaaagtagtaattatattggtcttaaatactaagacccattgcgccccatttagtgataagaaacatgacggtatctcctcagatactttgtttttaaagagcaggctaaagagattattgtattctgttttttctgtaaattgcgacatggtgcattcaaattagaactggaggcaggtatggttactcacacctgtcatccctgcactttggaaggccaaggtgggaggatcccttgagcctaggggttcgagaccagccaggacagtgtaacaagatcccatctacaggcgggacacggtagctcacgcctgtaatcccagcacttttggaggctgaagcaggcagatcac

SEQ ID NO: 10305 - DNA, 552 bp, Homo sapiens
gtgatttagtagacttcagtttctataacttaatcaagatagcaagtcaactgatactttcattaggatttaattttgagaggtattcccatcattatactactcttctgctggagtgacactaatcagtcatagcgttggaatcctgtttcttcctggcagagtttaggttttaaaatgataaacccctacattttatgaccctcaattcccatggtggcagcaaaaccatggaagtcctggttaagagagattaatggacttcctaaatgtctgcatctggttttccagaatgacttttttctctagatcaattttaaggtcacagcatgaaaatcacacatgtatacatgtaatccatgaaccaagaaaacaagggacaagagagaagatatgggtcatcccaaatcaactgtattagttaggaatcttcattgcaagtgacagaaactcaactccaaacagcttaagttagagtttattgacttatacagctgaaaaagaatggatgaacaagcatgtctgcacccagggacccaaatgatagtacca

SEQ ID NO: 10306 - DNA, 578 bp, Homo sapiens
gattacaggcgtgagccaccgcgccaggccaaaaatggtgacttgtatctcctttccttctggttcttttctggttctgccacttaaccctgagggaccgtgagcacgttacttagcctctctgcgccttggtttcctcccttaggaaacggggataatggtacctgtcttgtaggctgttgtgaaagttaaaagaggcctaaaggcaaatgctccattactgctaccaccaccgtcatctctcatgtctagtgactgcgcgtccgagtgcagcaacgggattcccttgcgccctccaggggcagctctccagaattgcaggctgccaagcacaactcaggcgtccctgaaggctgaaagtgaccaccgccctgccctgaaataaaaaaaattaatccagctggtttaagtcagaaaagaattgcttgaccacagcagccacatgctgtgctctcccctgggggcttctcaagtggacggctccttcggaagccttcaaactgccatggcactgccacctcctgagacccctggctacttatttattcaatactgaacacccgttctatgccagactc

SEQ ID NO: 10307 - DNA, 573 bp, Homo sapiens
gtgtgcctgtttgggtctcagagaggttagtgctgagttgaggagtagggacagaccttagataaaatccttcactagtagcttggctgcaggagtgtggtgtatgggagctatgccctagagggctccctgaattcctttgtctatagggtggtgccacatggtgtttacaaaacatggattctgggatcagagtgcctgggttgaaatcctcactctgcttttagctttggcaggtcacttgaacctctctgtgtctttagatgtttcttcatctgtaagatggggacaatgactgtacctatcaacttagaacggtatctggcaaattgtacatgctatataggaattagccattatcactactactcctatgaaggaagccccttcctaaggtgaaatgtggcctggttggcagaggagctgtggttggttctctttggggagatctcctaaggtcaggctagccagagggagaaagaattgtgcttccttgttgagactagtctttaaaaggaagctgggcagtaagtgattggtgccaaatgtcaaagaaactatttctcatctcag

SEQ ID NO: 10308 - DNA, 574 bp, Homo sapiens
tagtaaactacgttcatataggcatatatgggctaatatgctgtaggtgcctatgtgatttagaagtcttaatgttatatatcatggccattgaataggctaatgtgtttgaaaatcagaattatgtcatgcaaacaaatgcaatgaaactgcattttcattaaattcaatttttgccccaaagaatgttggaagagtgtatcagaaattactctaatgtatataaagctctatgcatgaaatctcctttgatctttgctacatttttagttaacagaattgttaacctttgtaggcattgactacctattttattcatcactttttagctgaaaggttaagaaagcttttgtgggatcatgtattatgcagtagagagtattctaatgaaggctacgtaaatattgattagaatcaaaaatcaaaacttccttgaattggccgggcacagtggctcacacctgtaatcctagcactttgggaggccaaggcgggtggattgcctgggttcaggagttcgaggccagcctgggcaacacagtgaaaccccgtctctattaaaatacaaaaaatt

SEQ ID NO: 10309 - DNA, 482 bp, Homo sapiens
  misc_feature 340: n = A,T,C or G
caatgaattaaaaggataaaaataatatatgttctctgatcacaatagaataaaattagacatcaataacaggaaaaatgtggaaaaatcataaataggtagaaattaacctactcctatgtaaccaatgggtcaaagaagaaatcaaaaggggaatcagaagaaaaacaattacagaacattgtggtaaatgcaagaatgggagctagcaaggagctaaatgtgcatatagagttgacactaattctacctaggaaaatgcaagaaagaagaaaactacagaacagaggaagtaacatttaggcaggtcttgaaagatgaatatgaatttatgtggcanagacagggagaaagaaaatgaaaaacatggaagcagcttcccaaagcagggaggtgttgaagtgaatgataaaatctgaaatgatgagcagttaggagtggctagcatgtagggtatgtggtaggagaatggcagtcgagga

SEQ ID NO: 10310 - DNA, 561 bp, Homo sapiens
tggactctacgcatatcatcccatttaatcctcacaatagcactgtgaggaaggtactgttattctctctgatttacatacaaacgaggaagtagattttgaggtaaggaaaagagccaggctcaaactggccagcccgctgcagagtctgggtcagagccactgggctgacatgtgccccatccactaggcttaaaggatactttgttgcttcctaaccaagacaggctacgtcaaaggtcagtaagaccttggccacttaaggataaaactggatgactaaggccgggcacggtggctcacacctgtaatcctagcactttgggaggccaaggcgggcagatcacgaggtcaggagatggagaccatcctggctaacacggtgaaatcccgtctctactaaaaatacaaaaaattagccgggcttggtggtgggcgcctgtagtcccagctactcaggaggctgaggcaggagaatggcttgaacctgggaggcagagcttgcagtgagccaagatcaggccactgcactccagcctgggcgacagagctagactccgt

SEQ ID NO: 10311 - DNA, 569 bp, Homo sapiens
ctcagcctcctttgcagctatctgttgcaaagcgaacaagtgggagtggtgctggtggctttgcagttagcctaggattgagcaattgctgcaattgttgctctctgcatcttcggtgttacttcttactggttgtgacagtggtttcctccctggatgagttctacagcatggtttggggtacatttcctggctgcctagctttgatctggctctctagccttctcaacagttctacaagttccccactatttctgtgataaacctatttattgttaatgtcagccataattggcttctgtggtttatattttttaaaattccaagatataccaacgtaacagatagctcaacaaacatatgtctttttaaattaagatatattctgtgtcacatgaagtacaatggacaaaatgcaacaaattgaattgagctaaagaccaaatatatattaagcctggctggtcttaaaaatgtaactggatacagccaggcatggtggctcacgcctataatcccagcactttgggatcctgaggtgggcagatcacctgaagtcaggagtttga

SEQ ID NO: 10312 - DNA, 426 bp, Homo sapiens
gtgacagagcaagactacatctcaaaacaaaacaaacaaaacaaaacaaaacaaaacaaaaaatctagtctacctcttcccttagaaactttgcatcatttaacaacttgtgttagagagaattttctcccaaaaatgcctatgacttagtcaccagaatctattcatctgttaccttacatggaaagcaggactttgtgggttctattaaattcttgagatggaacaattattctggattatctagatagatacaacctaatgatataatctctttagagcaggaaatctttcctagctgggccagagagcaagatgagacaggaaaaagaaaagagtttcaaagagtgagagggacaagctttgatgttgctagctttgcagatggaagaatagggtgaaaggtgaggaatataggtggttcca

SEQ ID NO: 10313 - DNA, 121 bp, Homo sapiens
acatgcatgaatctcaaaaatgtcacagtaagtgacaaaaggtcacaaaagaatatattcagtatgacttatatgtgagttaaaaacaggcagaattaaaaatatatgtttggtaaaactg

SEQ ID NO: 10314 - DNA, 207 bp, Homo sapiens
ggatatgggtctgtagtttatgttattgtttttgcttttgttattttgtatatgtgtatccttttctggctttgtcagtgtaatgctggcctcatagaatgagtttggaagaattccctttaattcagttttttaaaaaatattttgacatgaattggtattaattcttctttatacagtaaagcaacatgctaagatggttatttt

SEQ ID NO: 10315 - DNA, 574 bp, Homo sapiens
tcctgcttcaagatatggaatcaactctcctccaaataatcctggttccttttaatggagaatgctattaaagatcacaatctgagtgctggctgcatgtgagcgtggagcagggaaggtggggaaacggggtaagcgtgctgctttggtggcaacagagacagaaacatatttacttgtaaggttgtgttcatactactctttccaacttaacacagcgtgcctggtgggttccacccacatttctcacagtatgagccttcagaggccactaagaccttctccatgcagacctaaataagaagccataaattcagcctttaccttttctccccatcccttcctgtcaggggaaggaagctggacagagattattttctgactagcagaaacagtgccaccactttactcttgtaagaaggctgccctacaaggatttggttttcaactgctttctccagcatatattctatgggaatgggggtgggtgcatgatcaactttgtattttgcacggacgcccctgtagctgggtcaaggctggatgacaggacagaggtcaggacagagaagca

SEQ ID NO: 10316 - DNA, 574 bp, Homo sapiens
ttatcagaaaacccaagagtaaagttaggcttgtgagtaatgctagtctacctaaagctgtctcaaaaatcctattatctacctgccttggaccacttgtcagtaggcaataaagaattcaacctggtatatcccggatatactgcaaccaagattatcatgggacaatttctctgccacaatatatacagatgcttctctggttcattaattttacactgcctttcatacatatttgctcaatgtcacaatataattataggttgtgatattttataatctgtataggttgaattaagtcttcaaaaaagtcttaatccccacaccttatttagaaataaagtttttgcagttataattagttatgatgagtttcatactagagtaggatgggctcttaatactataagactagtttccttataagaagatgatgtaaagacatgagggaagaatgccaaatgaagacagagggagagattggatttaagctgccaccagccaaagaacgcctggagctatcagaaagagacaaaggaggatcttccctagaggcttctgagaaagtatggac

SEQ ID NO: 10317 - DNA, 369 bp, Homo sapiens
atggcgtgatctcggctcaccgcaacctctgcctccctggttcaagcgattctcttgtctcagcctcctgagtagctgggattacaggtgcccaccaccatgtccagctaattttgtattttttttttagacaggttttctccacgttggtcaggctggtctcgaactcccgacctcaggtgatctgcccacctcagccttccagagtgctggattataggcatgagtcaccgtgtctggccgattagcactgtttccattatcattctgctttaagtgccttaaaatatatagttatttctttgacttatgaattactcagaagaaagctttaaagttttcaaatgtatgcgaattttaaatttatct

SEQ ID NO: 10318 - DNA, 435 bp, Homo sapiens
atcgcctggggttaggagttcaagaccagcctggccaacatggtgaaaccctgtctctactaaaaatacaaaaattagctgagcgtggtgggcacctgtaatcccagctacttgggaggctgaggcaggagaatcgcttgaacacgggaggcagaggctgcagggagccgagacagcaccactgcactccagcctgggcaacagagcaagactccatctccaaaaaaaataaacaaataaacaaaatgccaagagtatgctgatgtaaaggtttaagtagaaactctggttgttttactcatgtgtgtaaaccaagcccccaagatgtgccaccaaaatacagagtttgtgggtggatcagcctgtacctgagccccctctgccacactgacatgatcctcattaaagaaagaaaagagggggcaggtggatcac

SEQ ID NO: 10319 - DNA, 566 bp, Homo sapiens
  misc_feature 436: n = A,T,C or G
aacctccgcctcccgggttcaagcaattctcctgcctcagcctcccgagtagctgggattacaggcgcacaccaccacactgggctaatttttgtatatttagtagagacagggttttaccacttttggccaggctagtcttgaactcctgacttcagatgatccacccaccttggcttcccaaagtgttgggattacaaacgtaagccacggcacccagcctcaggtatgtctttatagcagtgtgagaatggactaatacagctgggtatcctcttgccaagaacggaaggattttggtaggcagttagtacattctactacagttccttaaactgactcgaaaagagcttggaatgtattataattctataatgattgaggaaattaagttagtgaattagtataaaatatctttatattaaaagaaactaanaagtcaaaacaatgaaaggtctataaacattgaaatggataaataaattatagtagattcataccatgaaatatggacagcaatttatcccacaactagagatacatgctaacaaacatgtatgcattta

SEQ ID NO: 10320 - DNA, 625 bp, Homo sapiens
agtgtgaccaaaggaaatctgaaataccatagttgatctcaaagtcttgaaagctggccatccacacaggaggcagatcatggccatagagtgaccttcctccaaagatcaggaacaaaacagggatgtccactctcacacttcatttaacattctggaggctctacacagtgcaatcaggtaagaaaaaaataatcatccagattggaaaagaagtaaaactgtctctatttgcaaatgacattattatctatatagaaaactcagtatgtctaaaagaagccactataactagtaagagattttagcaagatttcaggatacaaaattaatattcaaagataaatcgtaggccaggcgtggtggctcatacctgtaatcccagcactttgggaggccaaggcaggtggattacctgaggtcaagagttcgagaccagcctggccaacatggtgaaaccccatctctactaaaaatacaaaaattagcctggtgtggtggtacatgcctgtggtcccagctactcgtgaggctgaggcaggagaatcacctgaactcaggagatggaggtgcagtgagccaaggtcataccactgcactctagcctgggcgacagagcaagact

SEQ ID NO: 10321 - DNA, 83 bp, Homo sapiens
ctttcttataacttatatcccatgagtttaaaacctttattataaatatagttattttacaaggacaagctggacagcttata

SEQ ID NO: 10322 - DNA, 57 bp, Homo sapiens
gtcatttttccttgtttctgacttttccctttaaagatccatttaacagttacatat

SEQ ID NO: 10323 - DNA, 409 bp, Homo sapiens
gagtttgaggctgcagtgagctatgtttgcaccactgcactccagcctgggcaacagagaaagaccctgcctcaaacaaacaaacaacaaaaacaaaacaaaacaaaaaaactatctcatgggaggttctggtgagacgagtaagatcatggtggaaaatgccttcggcccactcaggaaatattcttcggcctactgaggtgcagagactcaaagagagagccctgtatggagatactcaggcctgtggcaagctgagacctggagctgtccctcactaaactggagaaacggctgcttcccagtgcccagcagtaattcagccaaaagactttcagatgtacaaatttttacacttctaaaaaattaattttctcccaatattttatgttaactttctttttttttt

SEQ ID NO: 10324 - DNA, 384 bp, Homo sapiens
cctgtgcctggctcagtttcttatttataagatatccaacagttcttaaccattaattagactttaaagattattaatttcaagtgcacattaatgtgttttttaaaagaacaagaaataattaaaagaaacatttcatttttacttagcattcaaattgcacttaatctctttcactcatagagtggatttttattaacatttacagcatcaggcagacacatttagccatgatcctgaaatcgtgaagtactatacaaagaaataaagctatttattatagtaatatccactcattttctgatgccctgaacccaaaagtgaaaatatgtgcctttagaccctcacttcaaatctaactggatgtaatatcacaaataattc

SEQ ID NO: 10325 - DNA, 398 bp, Homo sapiens
aaatgataatttatcattcctgcccaatcacacatacatacatttatgtatgcaagcaccaacatgtacacacacgagagagatatatcatcatgcaagtggaaaattatcctagaagatgtaagcacaatcattcaagaagttaaaagcactacaaacactttgggaggccaaggcgggtggatcacgaggtcaggagatcaataccatcctggccaacagggtgaaaccccgtctctactaaaatacaaaaaaattagccaggcatgttggcgggcgcctgtagtcccagctaccaggtaggctgaggcaggagaacggcgtgaaaccggggggcggagcttgcagtgagctgagatcgcgccactgcactccagcctgggagacagagtgagact

SEQ ID NO: 10326 - DNA, 376 bp, Homo sapiens
tagaagagtattctcaagtgatcccattttggaatacatttttgtttatttcgaagcggcctacggctgcgagaagacgacagaagggtacggctgcgagaagacgacagaagggtagaagagtattctcaagtgatcccattttggaatacatttttgattattgctgtgtgtattatatatgtgcacatgtacaaatgcatagaaaatattgtggagggatacacattcaacagtgattgcatctaaagaatacagctgggcgcggtggctcacgcctgtaatcccagcactttgggaggctgaggcggttggaatccttgaggccaggagttcaagaacagcctgaccaatatggtgaacccccacctctact

SEQ ID NO: 10327 - DNA, 471 bp, Homo sapiens
aagacgacagaagggtacggctgcgagaagacgacagaagggtttgtgcacaaaaggcatactgtttaaacaaactggtatctacctatcttagaaatttttattattaacagatttaaagccaaatataacaatatacgcaaaagtaggagaatgggtttctaaatttttggaaaacaataataggagttcttaagatgcatgaaaggcaactgaatttcatgacagaaatagtaagaaagaaggaataagaaaatgtttcttggccgggcgcagtggatcatgcctgtaatcccagctctttgggattacaaggcaggtgggtcacctgtcagaagttcaagaccagcctagccaatatgatgaaacctcgtctctactaaaaatacaaaaattagctgggcatgatggccagtgcctgtaatcccagctacttgggaggttgaggcaggagaatcgcttgaacctgag

SEQ ID NO: 10328 - DNA, 208 bp, Homo sapiens
gggaagccctggtgccagctgactggccaaggatctcattacctttataaacacattgattgattgattgagacagaatcttgctctgtcgcccaggctggagagcagtggtgcgatctcagctcactgcaagctctgcctcctgggttcacgccattctcctgcctcagcctcccaagtaactgggactacaggtgcccaccatgcc

SEQ ID NO: 10329 - DNA, 307 bp, Homo sapiens
agagtgaggaggaaccaggtgagaacgaggccggagacagaggaggcagggggtgagaggaggccagagacagcggccctgtaaagaaaacattcaggctgttggccgggcgcggtggctcacgcctgtaatcccagcacttggggaggccaagcgggtggatcacaaggtcaggagttcgagactagcctggccaatatggtgaaaccctgtctctactaaaaatacaaaaaattagccgggcctggtggcgggcgcctgtagtcccagctactccagaggctgaggcaggagaatggcgtgaacc

SEQ ID NO: 10330 - DNA, 401 bp, Homo sapiens
gttaagtcctattctccccactacttatccttgttgggaaacactgttgtacacagttagtaaactgatatgcagtagtagtaataaacatagtaataatactgctcataaaatttgatcttacttataataatgtcttttatttatagatttgtcaaaagacctttgcttatatcatctcactgaaaaatcacaaaagcttcaatgaccagccaggtgcagtggctcacgtctgtaatcccagcactttgggaggccaaggtgggcagatctctgaggttgagagttcgagaccagcctggccaacacagtgaaatcctatctctactaaaaataggaaaaaaattagctgggcatggtggctaatgcctgtaaccccagctactcaggaggctgagata

SEQ ID NO: 10331 - DNA, 568 bp, Homo sapiens
gagtgatcctcttgccttggcttcccaaagttttgggattacagtcatgagccaccatgcccagcctaatttattattgaagaaaaaatttaaaataaattttgtgtagcctaaatgtacagtgtttataaagtcaacagtagtgcagtaaagtcctaggccttcaggttcactcaccactcactcactgattgacccagagcaacttccaggcctgtaagctccattcttggagcttatacactttatacagggtaccattttaaatcgtttataccagatttttactttaccttttctatgtttagacatgttagatatgtttagctatgcaaatacttattgtgtcacagttgcttacagtattcagtacagtcacatgttgtacaggtttgtagcctaggagcaataggctataccttatagcctacatgtgtggtaggctataccatctaggtttgtgtaagtacacttcacataatgattaaattgccaaagttatgcatggctataattaattattttatttcctcatttagtggtcattcagtacttaagtataagtact

SEQ ID NO: 10332 - DNA, 531 bp, Homo sapiens
tcagagcctcgtggaagagaccgcattaggtactccaaactattgactcttcaaagctgagctgacatggttttggtaactttcagactgtaccggtaaactaagtcaggattcccataactctatagctgaaaagcggtttcacacaactgctaacccaagatccaatagaatgagaattaattacacaagactgaaaaaaaattgatgagagaaatttttttcgggttatttgaaatgcagttgttttaaggttctgttcccagatcgtaagaagccttttctttctcttcttgtgctatctgtaattcacaataagcttttaaattctgcttttataaaccagaatgaagtattcttaaattatatatgattctcactaacacgattcttcttatttgaattcagaaactcttacccagtctctctacatttcttggcaatatagttgtttgcataggtttagtaagaatctgtcctcccttttgccaaaatacaactgggagcatcaattatgcaatgaaagccttg

SEQ ID NO: 10333 - DNA, 555 bp, Homo sapiens
gaccatgagttcaagtccagcctgggcatcatattgatgtctcttctaaaagcactactaatgcaataaaatgtattctcattgaaaattacatctgcagacaataaaacaggaaaaaactgctgtcttttcacactcaattgtttatcttctgatctgattcatcttgccattgtgtgttgcataaaagttgtaataaactaaaatttaacatattgtggtacaaacacaccgtggaatagtggaatactatgcaaccataaaaaagaatgagatcatgtccttctcaagaacatgatgaagctgaggccattatccttagcaaactaacacaggaactgaaaacaaaataccgcatcttctcacctacaagtgggagttaaacgatgagaacgcatggatacatagagggcaacgacacacactggggcctacctgagagtggagggtgggaggagggaaaggggtacaaaaaataactattggttactaggcttaatacctgagagatgacataatctgtacaacaaacccctatgacacgcgtttacctat

SEQ ID NO: 10334 - DNA, 637 bp, Homo sapiens
ctagagtgttacgatttcatgggcaaaatacaaagttgaagtgtccctgataacacatagcaagcagcacatttcccaggaaaggccagcactgcttattctcacagaagtcacccctgcaagggttctttagatcagtggttctcaaattgagcattcaagagcatcccatggaaggcttattaaaatgcaggttgctggcctcagagctcagattcagtagaagtcagttagagtctgggaatctgcatttctatgcatccttgctctctctccctcccttcctgctgctactgctggttcagggaccacactttgagaatcactgctttggatattagaatgatgattctctcaagtcttgaaaaaaaattgcgaagttccctctaatttagcagagttaagacaaatgtttcatttaatttgcatctatacatagctctgatggactaatcctttataattcaaagggaagaatttaaaaatcataatgatgaggctgggcacagtggctcacgcctgtcatcccagcactttgggaggctgaggcgggaggatcacctgaggtcaggagtttgacaccagcctggccaacatggtgaaactccatctctactgaaagaaaatacaaaaatta

SEQ ID NO: 10335 - DNA, 593 bp, Homo sapiens
ggtgcatgttgggggttggatgacacaaatactgagatgaaatgtaaagttaactgttgttaacgcattttatgcagctaggagggcaatggaagaggaaaaaagcaggaagaacggataatgtcagtacaagtgtgacttgtgtgaggataagaagtactcacttctacggtcaccaggtcgtggctggtacagtctttatggccacgctctcccgtcactcctgcgtggtccctttgccctctgcaagcacctctgctggtcgtggttcactgtctggtggggtgacccaaacgttccttcccaaaaggcctatgctgttagcagttttgccttatggggtggttctggttttccagtggtgttttctgcaaggcttagaggagctacgtgatattacagacgatctcctgcctcccaaatttctcccccttagccccattctgtgatcaggttccaagttccccttgttgggctcagtcagccggaccagcacagggaccctcttctttgtcgaccccctggtgtgaggaaccggcgtccaggtgggcagtctcagcttcctgcgtaacgtgtcccctggtggaaacact

SEQ ID NO: 10336 - DNA, 332 bp, Homo sapiens
gtagcagatatgattccgtgtggcatcctaagctagagcataaaggacattttggcttccattctcttggatcacttggtccaggggaatccggcagctgtcaggaacagccctatgatgggcccatatggagaggaactggggtctcccacaaatagccagcacaacttgacagtcatatgagttagccatcttgaaaatggatctgattccagccccagtcaaaccttcatatgtgtgcattctcagctgacatctgactaaatctcatgagaaacttcaagatagtaaaaacccattaaggctgggcacagtggctcacgtctgtaatc

SEQ ID NO: 10337 - DNA, 341 bp, Homo sapiens
catccggtattttcacccaaagtctggcagaaattaagtgcaaagattaaaactacattcctttcaaatccaagttcaagagtggcttagacagacaacgtcaagagcagcagtgggcagaatggaggcttctggagcaggcatgtagacacccctaaatgcttaggatgagtaaaccagaactccttactgaccagactgtgtagctccagccttttaccattcccaagatgaggacggtccaggacagctttacagagataacaaagaagtaggattggcaacccaacaagtcaaagtagccgtaaccgtagccactcccatgaccaagcagaagcagc

SEQ ID NO: 10338 - DNA, 622 bp, Homo sapiens
gtgacccacttaagattccaaccatctctattttactccaaatcctaaattcttagccattatgcatcactgccttgacagctgttttgtacctgcttccttctccctgcagagtgcctgctgcactgtaggtatttaatatatgtgcttagaacgtgaactaagctgaaaagcacaccaaccaacaagtttttttgatgtcattctttctatttaaaaactgttgtgactaatgagctattttaggtctggattactgtggctgaagtaacagatatgtgatcaggtcctcctcatccccatgacacatagagtgtatgcttcccaatactgagagtcaccatttccttcctgtatattcctggtctttaatataacctcaaaccaaattccattatattgtgtacttgatgctaccattactcagcatgttaaacgaatgccataggccaggtgtggtggctagcacctgtaatcccagcactttgggaggccaaggtgggcagatcacttgaggtcgggagttcgtgaccagcctggccaacatggtgaaacccatctctactaaaaatacaaaaattagccaggcatggtggcgcactcctgtaatcccaggaactcg

SEQ ID NO: 10339 - DNA, 196 bp, Homo sapiens
aacagatgaagatgtatctcctttaaaaacaaacaaacaaaaaaagacagtttccctctgtcacccaagctggagtgcaatggtacaatcttggctcactgcaacctccacctcccaagttcaagcgattctcctgcctcaacctcctgaatagctaggattacaggcgtgcccagctaatttttctatttttagt

SEQ ID NO: 10340 - DNA, 479 bp, Homo sapiens
attctttatgtttccagcttatctatttcccagagaccaggtcatatctgattaccttacagtctatgaatatatttttgtgtgtgggaagagtgggtctacagtatgaataaagtttgcctatagtcattttctatgttgctctaaaattattctaaactcctctaataaaaacttacaaagaaaccagacaaatgtgcatatggatatgactatgaactaggaaacatccagatgccttggaaaaccctaagagaagaaggaataactcacgatatgtggaaatgcaagtgagataggtgagctggagaatatatcatcagtataagccttagatttattttgcataattgaataaaattctttacaaataaaaaggtgagtgttttaattaaacttgacaagtgacaattaagttaaacataatcttttgtttacaatcactttgattggagacagaaggaaattagaaattaaag

SEQ ID NO: 10341 - DNA, 634 bp, Homo sapiens
agccaaaatctatatggtttcttatgatttttttccctaatggattttgaatccctggaggtcaggggttcatactctccacagcaactggagagctaggacttagataaagtagacattctaacaatgtttgttaaatgcaacttttaaaatgctttaagtagaagcccttacaagtaatatctggaatctttttaagtttgaaaatctaatggctatttgtatcagatttatatgtcctggctcttaataacctcctagcctacctgataaacctgtgaaattgcactttcttccagtagataactatgctgttctcaggtgaaatacttcgcttatcccttgccagtccagcctggggaaggcagctggacctgagctgggaattttatttgagggagtggaaataggaggggttggccaaggctgagttagaggggacagctctttagtggcctgagctggctctttggtgcagccgaagattgttagaattttagaggtggagagactttagagatacatcccagtcctctattttacagatgaatgaaagtgagtctcaatgatgttaagtgactttttaaaggctacagaaggctgggtgtggtggctcacgcctgtaatcccagca

SEQ ID NO: 10342 - DNA, 652 bp, Homo sapiens
ccttgattttgatcaaataaattacaggcaccagctggccaagagttttaatcaggctttgagatagtgggtcattacatggcaagagcgcccaggacaagagacacgggtgccctgcagtgtgggaacatcatccagggcagggaatatcatccagagagaatgattttgtcttgaattttgcaaatgttgaacagatataaaaataacttcataaatgattaggagaattttttccatctttaatttcataagaaaattattgaataataattgcttaataataattgcttaaagcaagaaatagggagaagcttaaaatgcttatttaaaataaggtggcaaaataaattttaaatgcttataaatttatacatgtacatatgttgttcacagaattaagtgtataagacagtgataggccgggcgaagtggctcacgcctataatcctggcactttgggaggccgaggtgggtggataacttgagatcatgagttcaagaccagagtggccaacatggtgaaaccccgtctctactaaaaatacaaaaattagccaggcatgatggtgggcacctgtaatcccagctactccggaggctgaagcaggagaattgcttgaacctgggaagtggaggttgcagtgagctg

SEQ ID NO: 10343 - DNA, 432 bp, Homo sapiens
tacggctgcgagaagacgacagaagggtacggctccgagcagacgacagaagggttttcactatgttggccaggctgatcttgaactcctgaccttgtgatccgcccgcctcggcctctcaaagtgctgggattacaggcatgagccactgcacccagccggacttatgttttttactgatcagaccagacagtgctcagagtaaagacaccaggaatctcttggtgtcatctgcagaggcagaactggggtgcagcgttttaggctcgctgagactcccaggggccttctttcttcacaccattctaaatgccagatataggcacatggaagtcactatggaaaggaagacaaataaaacaaagtagtctatgactttcattatttggttgtgaaaaataacaataatagattttattttatcttgaagga

SEQ ID NO: 10344 - DNA, 407 bp, Homo sapiens
ttttgtatttttagtagagacagagtttctaccttgttagccaggatggtctctatctcctgacctcgtgatctgcccacctcggcctcccaaagtgctgggattataggtgtgagccaccgcccctggccaagaacattattcttaagggaggagacctggatttcagtaccagttgtattttctgattaaaaggaaaaatagcttgcctggtcttagattctcctacaaaactaagtgggttggtctggatgatcattacattcccttatcaccttagcatttcttcacaatcctttactgtgctggttattactgaagagtatttagtagtactgtagctctgtaagattaatgtcaatgagaggctggtattgaagtaatttctgagacctttaaaaattatc

SEQ ID NO: 10345 - DNA, 249 bp, Homo sapiens
tacggctgcgagaagacgacagaagggtacggctgcgagaagacgacagaagggaaaggcttaaatgcaagacctgaaactataaaactactagaaaaagcatagggaaaatgcttcaggacattggtctaggcaaagattttatgcctaagacttcaaaagcacaggcaacaaaaacaaaaacagacaaaagaggctatattaaactaagaagaaaaggaaacaatcaacagagtaaagagacaacct

SEQ ID NO: 10346 - DNA, 293 bp, Homo sapiens
agtattcttttatgtatcagtgtgaggtggacataggccgtgtgcatcccagcactttgagaggctgaggcgggcagatcatgaggtcagaagttcgagaccagcctggccaatatggtgaaaccccgtctgtactaaacatacaaaaattagccaggtgtggtggcccgcacctgtagtcccaactattcgggaggcagaggaggaagaatcgcttgaacccgggaggccgaggttgcagtgagctgagatcacgccattgcactccagcctgggcaatagagtgagactcc

SEQ ID NO: 10347 - DNA, 125 bp, Homo sapiens
gtgatcacagctgcacccaggctggagtgcggaagtgtgatcactgcaaccttgaattcctgggctcaagcgatcctccaccttcacctcccaagtaactgaaactacaggtgcatgccaccatg

SEQ ID NO: 10348 - DNA, 614 bp, Homo sapiens
gtaagaacaggtaggatgattccactttgaggaaaggtactttgttactaacgttggtaagacagcttctgctataaatgctcttcacaatccacatgtagagaattctggacaacagtatcagtccagatgccagaaaatgcacagtgagcatgacatgctcatcggctgaggtattctgacttcagctaaggacgcaatgatattttacttgagattcaggaatgcagaggatagattctgtgggagaaagaaaagctttgtttaagtaactgatctaaagacattacaatgttagctgctttcactccttcaaatcccaaatattgcctaatatttgatttgctttgcattgagaatttggaagtaaataagatatagtctctggcatccagagggtcacagtcaaataggaaaggtatggatggatattacccaaaaatatgagagattctttaagtttggaaaacttaaaggaaaaggcagattgattctctagtgctggctgcaatgggcgattcctcagagaaggcaggagaatgattgtcacctgagctaatccttgaacacatagaaattctctggacaagatgcaaaagtattagaaacagaga

SEQ ID NO: 10349 - DNA, 408 bp, Homo sapiens
tttcctggaaaatataaggtcattagaaaaatttaattccatttaatttcctccaaactttcatgttgattgttaagtattttaactctatataatttttaatcatcataagatttcattatcatggccaggcacagttgcacacatcctataatcccagcactttgggaggccgaggtgggtggatcacctgaggtcaggagtttgagaccagcctggccaacatggtgaaactccatctctacaaaaaatacaaaaattagccaggcatggtggcacttgcctgtaatcccagctacttgggaggctgaggcaggacaatcacttgaactcaggaggcagaggttgcagtgagccgagatcatgccaccacactccagcctgggagacagagtgagacttagtctc

SEQ ID NO: 10350 - DNA, 263 bp, Homo sapiens
ccatgtttcgcccaggtttgtctcgaactcctgagctcaagtgatctgcccaccttggcctcccaaagtgctaggattacaggcatgagccaccgcgcccaaccaagagcagagtttagatgtggtacccatggagacgcagactaacaataggtgagtggatacagttgtgactcagtatataaaatcttttctttggaaggctattgatgacacctcagatgccatgctgagagcatggcaaaacaatgaatgtggccggg

SEQ ID NO: 10351 - DNA, 655 bp, Homo sapiens
attcggcacgaggcttagggaacaggagtgaacagacttcagccccacctggcaggggctggctcccgaggttgggcccagtccctgagggtctgctctgctacgggtctgcccttgagtggccttccgtggagggtgtgtgaccaggtggatggtgcagggcctctggagccctctcctcaggagcagacctcaacctttttctgtaaaagactttactttggtgttctaggtggacaacaggttccaggctggtgtttacaatctcggaggaagtgcaatggttactgttcttttgacagtacagactgatttcaagacagacaaaagcgaaccaaaagcaccggacacaacaactcctctggctgtgtaaacagacctgacaatgtggccgtgcagcccaaacgatcaaagagaagccaggcgttgaccaagccccaaggtgcctgaggccatggtgcaactctgctggtgactggggcaccttggagcagagcttcacccggatgggaaatcctcactcctgagtggcactccctcctgaacaggcccagtggcagagtgtccgtgctgctgggtgctgtccccagccctcctggtccatcttcttaagatgcgtccactgctttatatttaaaattctctttttcacagg

SEQ ID NO: 10352 - DNA, 481 bp, Homo sapiens
ggcaccaggattgaatcctggaacctcaccatcttccctattacgtatacttctctattatgtatacatcaccatcttccctattatgtatacatcaccatcttccctattatgtatacttctgttatgtatacttcaccaccttccctattatgtatacttccctattatgtatacttcaccatcttccctattatgtatacttccctattatgtatacttcaccatcttccctattatgtatacttctctattatgtatacttctctattatgtatacttcaccatcttccctattatgtatacatcagttttcaaatattaaacccaccttacatttctaggataaaccctacattattattattattattattttcccaatatggagtcttgctctgtcacccagagctggagtgcaataatgtgatcttggctcattgcaacctctgcctcctgggttcaagcaattttcctgcct

SEQ ID NO: 10353 - DNA, 57 bp, Homo sapiens
gaatgcctacagttagcagatatggtatcctctgagcgccacaaactgtacctggta

SEQ ID NO: 10354 - DNA, 660 bp, Homo sapiens
ggcacgagggaaagtgtgggaccttttccccgaggctgacaaagtccgcaccatgctggttaggaagatccaggaagagtcactgaggacttctgaagccaagtaccaagagaagcagcggaagcgtgaggctgaggagcggcgccgcttccccctggagcagcgactaaaggagcacatcattggccaggagagcgccatcgccacagtgggtgctgcgatccggaggaaggagaatggctggtacgatgaagaacaccctctggtcttcctcttcttgggatcatctggaataggaaaaacagagctggccaagcagacagccaaatatatgcacaaagatgctaaaaagggcttcatcaggctggacatgtccgagttccaggagcgacacgaggtggccaagtttattgggtctccaccaggctacgttggccatgaggagggtggccagctgaccaagaagttgaagcagtgccccaatgctgtggtgctctttgatgaagtagacaaggcccatccagatgtgctcaccatcatgctgcagctgtttgatgagggccggctgacagatggaaaagggaagaccattgattgcaaggacgccatcttcatcatgacctccaatgtggccagcgacgagatcgcacagcacgcgct

SEQ ID NO: 10355 - DNA, 624 bp, Homo sapiens
ggcacgaggagggacgggtcccgcggcgagcgagctcctgagcataagctgtggccatgactactgaagtaggctctgtgtctgaagtgaagaaggtaaaagaaacacaggaagacaaattagaaggaggagcagcaaaaagggagaccaaggaagtgcagaccaatgagctgaaagcagagaaggaaacatcggagagcaggggtatttctcggttcataccgccatggcttaagaagcaaaagtcatataccttagtagtggccaaagatggaggagataaaaaagagcctacccaagctgttgttgaagaacaggtcttagataaagaggaaccccttccagaagaacagagacaggctaagggtgatgctgaagaaatggctcagaagaaacaagagattaaagttgaagtcaaggaagaaaaaccctcagtgagcaaggaagaaaaaccctcagtgagcaaagtggagatgcagcctactgaattagtaagtaaggagagagaagagaaggtaaaagaaacacaggcaccaggctcatcccagtgcctggctggcccctgcagactcaggctcaaggcctaccccagtgccaggtcagctctagtggacccaggcttca

SEQ ID NO: 10356 - DNA, 670 bp, Homo sapiens
ggcacgagagattctcctgctcagcctcccagtagctgggattacaggcatgcgccaccatgcttggctaattttgcatttttagtagacacgggatttcaccatgttggtcaggctggtctcgaactcccgacctcaggggatctgcctgcctaggcctcctgaagtgctgggattacaagtgtgaaccaccgtgcccagctggttttctgtttcatacatcagagtcaacttgtgaatacatttaaagattatttcattttgatatcacgaagaaaaacaggctttatatctcagactttaactaaatccagttagacctcaatttttcactgtcagattaaatccccatacctgaaaataagtttaacatttttttttgcaaatgatctattgaatcagatttaaaatgaagcatgcattgagtgtgccaaggaactaagtggtccatagcagcagtaatgttcatagggtgcgagatgcctgctatgaaacagcaactctcaaacatttttatctcaagaccatttgtttatgtgagctatatatattattatattaaatattaaatttttaaaatatttatttatgggccaggcacggtggcttacgcctgtagtcccagcactttgggaggctgaggcaggcggatcacaaggtcaagtgattg

SEQ ID NO: 10357 - DNA, 623 bp, Homo sapiens
ggcacgagggaaagcagagcgcggcggctggaagctgctaagtcagagccgcgatgttccggattgagggcctcgcgccgaagctggacccggaggagatgaaacggaagatgcgcgaggatgtgatctcctccatacggaactttctcatctacgtggccctcctgcgagtcactccatttatcttaaagaaattggacagcatatgaagacaggacatcacatatgaatgcacgatatgaagagcctggttacagtttcgactcctctctgcaagtgaataggcccagaaaggtgtaagagactctttgaatggacataaaattctgcttgttaagaacaagtttggctctggtaactgaccttcaaagctaaaatataaaactatttgggaagtatgaaacgatgtctcgtgatctggtgtacccttatccctgtgacgtttggcctctgcaatactggtataattgtaaataatgtcaaactccgttttctagcaagtattaagggagctgtgtctgaaatggcactgtcttgtcagtcatttctgtttacctttttcttctgcccagagtgtatttgtgaagagtctcttatattatgttttgtggaaatcagcacac

SEQ ID NO: 10358 - DNA, 572 bp, Homo sapiens
ggcacgaggtggcattagggagggattgtgagaaatgacttgtaaatataccttgggaaggtaaaacaaagatgatttattgatgggaaggatggaattgatagaatgtgagggaaagggagaactcaaggggaatactctgattttttagcctgtcattggttggatggtgaagcaggcaacaaaaatgggggggcctgggcaaagattaggggggggggagccaagagtttcatttggagctcatcagtttgaaatctcagtgagacttccaaattgaataggcagttggatgcaaagatgtggagcttgggcctggagatgcacattgtttggagatataaatggtgtttatagacctatggttttataatacatcccttggagagatagagagaaaccagagccaaagaccgaacccagggtcactccaccacttggaggctgggccagtggctggaatgcacagcagcacggggcctggtgtatagtaggtgttcaacaaatctttgttgctgaggaaatcagcaccagcagtagtgactgcttatgcagtttctggagcagcttgc

SEQ ID NO: 10359 - DNA, 57 bp, Homo sapiens
gtgacaaagcagcaagacgcagtctcaaaacaaaacaacaacaacaacaaaaaaacg

SEQ ID NO: 10360 - DNA, 120 bp, Homo sapiens
ggcacgaggagagagagagagagagagagagagagagagagagagagagagagagagagcgcgcgcgcgcgctctctctctctctctctctctctctctctctctctctctctctctctc

SEQ ID NO: 10361 - DNA, 161 bp, Homo sapiens
  misc_feature 12, 161: n = A,T,C or G
gaatgtttccangccacctcggaggagaatcagatcccctcgcacttgcctgcctgcccgtcgctccagcacgtcgccagcctgcggggcagagccatcatcctgctgtacgtgcaggccttccaggagggcatgccaccccctgggtgctgcacgggccn

SEQ ID NO: 10362 - DNA, 639 bp, Homo sapiens
ggcacgaggcaagaacgacatcatcacaatcgtgtctcagaaggacgagcactgctgggtgggggagctcaacggcctgcgaggctggtttccagccaagttcgtggaagtcctggatgagcgcagcaaagagtactccatcgcgggggatgactcggtgacggagggggtcacagacctcgtgcgagggaccctctgcccggcccttaaggccctgttcgaacatggactgaagaagccatccctgcttgggggcgcctgccacccctggctgtttatcgaggaggctgcaggccgggaggtcgagagagactttgcctccgtgtattcccgtctggtgctctgtaagaccttcaggttggatgaagatggcaaagtcctgaccccggaggagctgctctaccgggctgtgcagtctgtgaacgtgacccacgatgcagtgcatgcacaaatggatgtgaagctccgctcactgatctgcgtggggctcaatgagcaggtgctgcacctgtggctggaggtgctctgctccagcctgcccaccgtggagaagtggtaccagccctggtccttcctgcgcagcccgggctgggtccagatcaagtgtgagctccgagtcctctgctgctttgccttcag

SEQ ID NO: 10363 - DNA, 384 bp, Homo sapiens
ggcacgagggcacatgcctgtaatttagtcactccggaggctgaggcaggagaatcgcttgaacccaggaggcggaggttgtggtgagccaagatcctgccattgcactctagcctgggcaacaagggtgaaactctctcaaaaaaaaaaaaggaaaaggaaaaggtcaaaccctgttaaaaaacaaacctctttctttcaattaaaaaaatgggccaaacgggggcccttccaattttttggatccctatataaaagttaattcccataaaaaaattccatttaagctttttaaaaaccttattttattttagagatttttttatttcaatccttataatttaaattaaccatgggcaaaaagttaaaatccatttaaaaatg

SEQ ID NO: 10364 - DNA, 384 bp, Homo sapiens
ggcacgaggtcactctgtcgtgctgtggggatgagtcccagcaccgctgcccagcactggatggcagcaggacagccaggtctagcttaggcttggcctgggacagccatggggtggcatggaaccttgcagctgccctctgccgaggagcaggcctgctcccctggaacccccagatgttggccaaattgctgctttcttctcagtgttggggccttccatgggcccctgtcctttggctctccatttgtccctttgcaagaggaaggatggaagggacaccctccccatttcatgccttgcattttgcccgtcctcctccccacaatgccccagcctgggacctaaggcctctttttcctcccatattcccactccagggcg

SEQ ID NO: 10365 - DNA, 623 bp, Homo sapiens
ggcacgaggcgaggtcagccccaactaccggaaatatatgtcccagatgtgaatcaggctttattgaagaagtgacagatgattccagttttttaggtggtggcggcagtcggatagacaataccacaacaacacattttgcagagctttggggccatttggatcacacgatgttttttcaagattttagaccctttctaagtagcagtccactggaccaagataatagagccaatgaaaggggtcaccagactcacactgacttctggggagcaagacctccacggttgccattgggtcggagatacagatctcgaggaagttctcgtcctgacagatctccagctattgaaggaatactacaacacatctttgcaggattctttgcaaattctgccattcctggatctccacaccctttttcctggagcgggatgctgcactccaaccctggggactatgcctggggtcagacagggcttgatgccattgtaacccagcttttaggacaactggaaaacacaggccctcccccagctgacaaggaaaagatcacatctcttccaacagtgacagtaactcaggaacaagttgatatgggtttagagtgtccagtatgcaaa

SEQ ID NO: 10366 - DNA, 605 bp, Homo sapiens
cggcacgagcggtgacaccccacaaggacacggcctcagcggttccattttcccccgaacattcagccacttccctggagcaatttttcctgccccgctggggaccagcgagtggcctagttgcggctgtggccctggacagcggcgtgaggcccaaacctctaggtagggcccagttggatcctgatttttcattgagccaggcagtctcagcccgagttgaaaggcctccttagccttggaactaacgtctcttcaccctgacttctgggcaaggggagatcccaggaaaaggtttacctgcaggttttccaaggccaaagccccagcaaggaccccctctccaacctttgttatagggctacatggggcctgggctcagcatcctcatttgtggtaaactgaggcccgggacaagcccggcagagcctaaggctgctcggggagtggggccaatcagagatgattggagctgccagaaactctaatcagatgacagagacctcccccggcgggggtactcaggtgctacgaacatggcagctcttgtttccggctgagccatggccagagcagggctcagtctgcccctgaacttgctgaat

SEQ ID NO: 10367 - DNA, 91 bp, Homo sapiens
aaacctaaagacagaaataccattcgaaccagcctggggcacatggtgaaaccccatctctactaaaaatacaaaaaaattagctgggcgt

SEQ ID NO: 10368 - DNA, 403 bp, Homo sapiens
ggcaccagagtcaagattggctgcctcatgttgaggttcagagttacgactcggactggacagaggcgccggcagctgtggtgattggcggggagacctacggcgtgagcctggagtccctgcagctggccgagagcactggtggcaagaggctgctgatccccgttgtgcctggtgtggacagcctcaactcggccatggcggcaagcatcctgcttttcgaagggaaaagacagctgcgggggagggcggaggacttgagcagggacaggagttaccactgaggacgcagaagtgacttctgcttgaggacgtctgcagctcctcctacaccagcacactggtgggaggctggcggagtcagtgactatggcccccacgttcaggaggaaggtgtgatgcc

SEQ ID NO: 10369 - DNA, 404 bp, Homo sapiens
cgttgctgtcggacgggtccaccatgttagccaggctggtctcgaactcctgacctcaggtgatccacgcacctaggcctcccaaaatgttgggattataggtgtgagccaccatgcctggccgggagcagcattcttaaggaattcaagacacaggaagaacacttgcctttagtgggagcaagacaacgcagtgtggcagaagacaaagaatgggggcacaagtgcaaggtgaattggaggtagaatataggacttaactttctgacggcttctgttttctcagtgaagtctgaggcaaggccggtgacttaaacaaagaaggggtagtggataatttcaggaaagatggacacttcaccttgagcaacaggacaaggaactgagtaactgggaaacaaggt

SEQ ID NO: 10370 - DNA, 512 bp, Homo sapiens
ggcacgagagatattttatctcctttatttgggacgcttgtttcttcagctcagtttaactactgctttgacgtggactggctcgtaaaacagtatccaccagagttcaggaagaagccaatcctgcttgtgcatggtgataagcgagaggctaaggctcacctccatgcccaggccaagccttacgagaacatctctctctgccaggaaaatgatgctgctgctctatgaagaaggcctccgggttgtcatacacacctccaacctcatccatgctgactggcaccagaaaactcaaggaatatggttgagccccttatacccacgaattgctgatggaacccacaaatctggagagtcgccaacacattttaaagctgatctcatcagttacttgatggcttataatgccccttctctcaaggagtggatagatgtcattcacaagcacgatctctctgaaacaaatgtttatcttattggttcaaccccaggacgctttcaaggaagtc

SEQ ID NO: 10371 - DNA, 434 bp, Homo sapiens
acaccttcccggccagcggtagcaactgcagaactgcaggagactatctttctagacaaggcagttgaggaggagggagcgcttgagggggactggcctggcgtgcactccgcacctcggggacattattgcgcgtggaacggctgcttttggaagactattgcccagaagaaaagatgtttggttttcacaagccaaagatgtaccgaagtatagagggctgctgtatttgcagagctaagtcctccagttctcgattcactgacagtaaacgctatgaaaaggacttccagagctgttttggattgcatgagactcgttcaggagacatctgcaatgcctgtgtcctgcttgtgaaaagatggaagaagttgccagcaggatcaaaaaaaaactggaatcatgtggtagatgcaagggctggacccagtcta

SEQ ID NO: 10372 - DNA, 290 bp, Homo sapiens
aggaaagcttaatcattggaaatgtagattattcctgctttgtggattatttgcatcagagttttaaattatgggttgatgatttttttttttttggcttttttaaccctccctttttttttttgttttccctaactcggggtgggggaaccctaagggaggcaaccggtttttaatggaagccccctttcccaccaaatttggcccagggggctttttgggtttttccaatttttggggggattggctttttggaagggctttggctacctttggaaccctttcccaaa

SEQ ID NO: 10373 - DNA, 572 bp, Homo sapiens
ggcaccaggtggttaagaatttataccctccaaattatgcgtctggtgccttggttgaaagtattctcacttcatggttgctgtattacaggtacggtattctcaccaaaatcatttctctttgtaattatgatactgattttaatgccgcacatttgcatactatatgcttgttacagtgatccccacagtaactcatgaagcagccactcattgtacaaatgaacgtctccatataatagtttagctattatacagtacatggcagaaacacaattcaaactcaagtttatacgaatactttcaagtctccttacctgagagcagaaagtgacatttaaatttaaaggagttcccagcctttgttttcagtgcagtttgtttcatggtgtaggcagaagtcagggctgtgtgattgtgtggctgggctctctggatttggctctttgggttgcaggagtcatggctcatacgctacatgaggcaccagctcatgtaagcactgtcagttcctatgtgccccacaggaaagcgcccttaaccactgatgagtgttgatgtttttctgcact

SEQ ID NO: 10374 - DNA, 267 bp, Homo sapiens
acaggcgcgagccatcacacccagcttatatttttagaaaggtaataaggtagtaagcagaaaagtgtgaacacgaccacctgattgcttttcctgcttgaaggctgcttacaagtttagcccttggctagtgtctgcatacttacagggtttccaccattaacagaattgggtagagtagctcagtgtgcctcaactgtttgtacaaacaatatggtttatgctgaacaccgctttccctctgggagtctagacttttggtatgtg

SEQ ID NO: 10375 - DNA, 212 bp, Homo sapiens
ggcacgcaggggcatctgtgaaaaagagtccctttcataatatatgcaatatattccagatgttttgagagattacagaagaggaggcctgcttcacttgcagataagtttattataattctccagaaatgtgcaggatgtgcattagcaaattgcactgtacttttcactccagcctgggtgacagagcaagactcccgtctcgggggctt

SEQ ID NO: 10376 - DNA, 461 bp, Homo sapiens
ggagccaccgtgcctggcctacataaaggatttcattgaagatttgcaaatgtctgtgggctgggctgcctcaatttgaatcctgggtccgccgcttccctgctgtgtggccttgtgcaggttacacagtctatctgtgcatcagagtcttctgctgaaaaacggagctgataaaaaaaagagagagagagaaacggagctgatgagaatgactgttgcctcagaaggcttttgtgggaatccgtgggggtaaaaatgtgtaaggtgcaaagtgccttacacagatcccactctgactgtcatctcagatgaggaaacagaagttcagagagatggccaggcatggtggctcatgcctgtaatcccagcactttgggaggccgaggcgggcggatcacgaggtcaggagattgagaccatcctggctaacacggtgaaaccccgtctctactaaaaaatac

SEQ ID NO: 10377 - DNA, 80 bp, Homo sapiens
aaataacttataaaagtgtataaaaattacatgccaggccgggcgcggtggctcacgcctgtaatcccagcactttggga

SEQ ID NO: 10378 - DNA, 412 bp, Homo sapiens
ggcacgaggtcacagacaaaaacttcagctcaaggcattggatgtggttttgtttggacctctaacacgcccacctcataactggatgaaagattttatcctcacagtttctatagtaattggtgttggaggctgctggtttgcttatacgcagaataagacatcaaaagaacatgttgcaaaaatgatgaaagatttagagagcttacaaactgcagagcaaagtctaatggacttacaagagaggcttgaaaaggcacaggaagaaaacagaaatgttgctgtagaaaagcaaaatttagagcgcaaaatgatggatgaaatcaattatgcaaaggaggaggcttgtcggctgagagagctaagggagggagctgaatgtgaattgagtagacgtcagtatgcagaacag

SEQ ID NO: 10379 - DNA, 237 bp, Homo sapiens
acgacagaagggtatcaaaaataccaaaaaaaaaaaaaaaaaaaaaaagggaaagaaaaaaaaatttccccggggggggggggtttcccctttttcccaaatttttcggggggggggggggggaaaaatttttaaccctgggggggggggggtccaggggcctaaaaatttgccctgggttttttgggggggcccaagggggggtttccaaaaaaaaaaaaaaaaaaaaaaaaggga

SEQ ID NO: 10380 - DNA, 482 bp, Homo sapiens
aaatgagatcataaggatgaggccctaattcagtaggactagtggctctgtaagaagagcaagagagacctgagatggtatccactggccctctcaccatgtaaatgccttccacctccatcaaaagggggccctagacctcagacttcccaagacaatgaacccaagacatttcactatgatttgtcaagagcgaagattaaagaaaaaagcaggggccaggcatggtggctcacgcctgtaatctcagcactttgggaagccgaggcaggtggatcacttgaggtcaggagttcaagaccagcctgaccaacatggagaaaccccgtctctactaaaaatacaaaattagccgggcgtagtggcgcatgcctgtaatcccagctactcaggaggctaaggcaggagaatcgcttgaacccgggaggcagaggttgcggtgagctgagatcacaccattgcactccagcctgggcaacaag

SEQ ID NO: 10381 - DNA, 198 bp, Homo sapiens
cagatttttctctaaggagaatatgacatgcttatgcttaccaagatcaagtgcattgaggggcagttttgtttgcctgaataaacgtaaaggacaagtaaacaatttgatgataagctacagtttttcttagaaagtaaatattttatttatgcgctgttagttggcttttgaatcgattatttcatgctttttttt

SEQ ID NO: 10382 - DNA, 601 bp, Homo sapiens
ccgggggctttgataggagttgtccgggaccccagggagatgagggttcagagggtggtgagggcacataggaggggagtggaagcctggctctcaggcctaggcccctatcctgccccagggcaggtccaggccctggaccccgcctagcgtaggctagtgtgtatccctggaaccagaagagagtaggtgggctctggaggcctcaaaggacccccgctagactctgtgatccccacgccccagaacatgcgtgggcgctatgaggcaagccaggacctgctgggcaccctgcggaagcagcttagcgacagcgagagtgagcggcgggccctagaggaacacctgcgtggcgccgtcggtcttgtcccgcaggcactggccaacatggcgaaaccccatctctactaaaaatttaaaaaattgcccaggcacagtggctaacgcctgtaatcccagcactttgggaggccgaggcgtgcagatcacttgaggtcaggaatttgagaccagcctggccaacatggtgaaaccccacttctaaataaaaatgcaaaaattagctgggcgtggtgataggcgcttgtatcccagctactcg

SEQ ID NO: 10383 - DNA, 627 bp, Homo sapiens
ggcacgagacgacttcttgaacagaaaacacaagaaagtcaaaaaaagaagcaacaagatgattctgatgaatatgatgatgacgactctgcagcctcaacttcatttcagccacagcctgttcaacctcagcaaggttatattcctccaatggcacagccaggactgccaccagtaccaggagcaccaggaatgcctccaggcatacctccattaatgccaggtgttcctcctctgatgccaggaatgccaccagttatgccaggcatgccacctggattgcatcatcagagaaaatacacccagtcattttgcggtgaaaacataatgatgccaatgggtggaatgatgccacctggaccaggaataccacctctgatgcctggaatgccaccaggtatgcccccacctgttccacgtcctggaattcctccaatgactcaagcacaggctgtttcagcgccaggtattcttaatagaccacctgcaccaacagcaactgtacctgccccacagcctccagttactaagcctcttttccccagtgctggacaggctcaggcagctgtccaagacctgttggtacagatttcaaacccttaaatagtacccctgcaacaactacag

SEQ ID NO: 10384 - DNA, 367 bp, Homo sapiens
gctcatgaagctgaatgtgggaagttcactttcacccatccaacccagaacatctttttacctgctctgaagatggatccctctggcactgggatgcttccacagatgtacctgaaaagtcgtcactctttcaccaaggtaaaactttttaatgaatactgttatgtgtactttttttttttttttttaaaaaaaagtttcattttttcccccaggctgaaatgcaggggcacaatttcggttaattgaaacctccccctccggggttaaagcaattttggggcctaaccctcccgagtagccgggattactatttttgccccaccggccccggttaatttttttgttttttaaggggaaagggggt

SEQ ID NO: 10385 - DNA, 596 bp, Homo sapiens
attaaacaggagcttttctaatatggctggaaactgttgggggtggattagagatttttaaggatcttatggcaagctttggctggtagagtacaagaatctagtggtgtcttttattggggttttgggggtgctgggaactatgacattacaaagagccactaattgttaactgaaggaaaaaatactggtcaatgaagggaaacttaactataaaatcaacttagtagaaataaaccattaagtggtactaatatgggcaggcacagtggctcacagctgtaattccagcacgttgggaggctgaggcaggtggatctcttaaggcgaggagttcgagaccagtctgggtaacatggtgaagcttcatctctactaaaaatacaaaaattagcagccagggctgggtgcggtggctcatgcctgtaatcccagcactttgggaggccgaggtgggcagatcacctgatgtcaggagttcgagaccaacctggccaacatagcgaaaccccagctctactaaaaacaaaaaacaatacaaaaaattagtcgggcatggtggcgtgtgcctgtagtcccagctactctggatgctg

SEQ ID NO: 10386 - DNA, 172 bp, Homo sapiens
tgtgggggtggagtggccttgcccacgcctctcacctctgccttcatttgtgctgccaccctgcccctccctcgtcctcctctcccgcttcctcctctctgtgtgcctcagtctcctgccggaagaaatgggttgagcccgaaaggaggctgtctgaggaagggagagggag

SEQ ID NO: 10387 - DNA, 345 bp, Homo sapiens
cggaaaaagaagaaggaatctttaccaatggactacaggaagtgaaagcaaaacgtttccctacctgaaagtttccttgtgtgagactggaatatatagttttacctctgtacaccatttttgctctagcctatatggactacctacactcataatgagaataatgatcaaatgaaggagttcggttttgttttgttcttttctttctttttttttttcttgaaacaatctcactccgtcacccaggctggggtgcaggggcataatctttgatcactgcaacctctgcctcccaggttaaagcaattcccctgcctcagcctcctgagtagggggaattacagg

SEQ ID NO: 10388 - DNA, 535 bp, Homo sapiens
tgtgaccttgggcaagtgacttcatttttctaagtctgttttgtcttttatgaaatgaggataataatagcactaacctcatggtcattgggaggattgagataatgctaaaagcatccttagcacagggtctggtaatttaataaaggtttaataaatattaccatatgattcttattactgtgaacagttaagaaatagtaaagtgatacataatgggtgagtacgaggcatgagaacacaggccaacgtgatgaattgccccatgaatagtgctgtgtataaccctctccaggccaggtgtcatgctcccacctgtaatcccagctctttgggaggctgaggcaggaggatcgcttgagtccaagtgtttgagaccagctttaatgaaaccccagtttctacaaaaaatacaaataaaatgaaaagctgggcgtgatgatgcatactgcactccagcctgggcaacagagcaagatcctgtctcagaaaaaacttctccagcagtttggatgaggtgagctcactttgaact

SEQ ID NO: 10389 - DNA, 559 bp, Homo sapiens
ctcatgaggaagaggaggaaaagagcattaccgctgtttgtcacatgaggattcatttgcagatagtatgaaaatggaggcaatttttccagtctcaagaatggtaaaaggcacaggtgggacttgaacccagactcttggcttcaagtccagagttttctcatgcaccagctacccctcaacaggatttgactatcctgcagtaaccctagaggaagtttagtccttgggacgcttggcctgccagtctctgaaaaaaatatgatggggatggtggtggtggtagtgcacgttgggttgaggggacagaggaagaagcaggttgatggctgttgtccatcaggtaacacagtgtttcttttcccattttctctggaatcaagaagcacccagaagactgggctgagcagaagactggagagggtgcaggaaagatggtagcaggagaggagaataaagcaccatccaggagcttagtggagagtgccccttttctctccccaactggatcagattgtgtagacagtgtgggaggtgcagctggtcaatgcttaaccga

SEQ ID NO: 10390 - DNA, 510 bp, Homo sapiens
gtaatcccagcactttgggaggccgaggcgggtggatcacctgagatagggagttcgacaccagcctgaccaacatggagaaatctcgtctctactaaaaatacaaaattagccaggtgtagtggcgcatgcctataatcccagctacttaggaggctgaggcaggagaatcacttgaacctaggaggcagaggttgcagtaagccgagattgtgccattgcactccagcctgggcaacaagagcgaaactccatctcaaaaacaaacaaacaaaaaaattgcaaaatgtagtcaccctgttatgtttcatgactctgaaagtgttatgtgtttttttaacagtaaacagtcacttcaatagtttattatttcttatcattattagtaatatcatatcaatattttaaagctgaagttgtttcttcaacccttaacttataaactaaaacccagagtaccaaagtttgctttgcagcataaaacaaattaggaggttgctctaatttagt

SEQ ID NO: 10391 - DNA, 298 bp, Homo sapiens
aaaataatcatgaaaacgatttgcggaatgagataaaacttcagaaattagatgaccaaattctacaacttctaaatgaaacttctaattcaatagataacgttcttgagaaagaccccagaccaaaaagagacacagatataacttctgaaagtgactatggaaacagaaaagaatgcaatagaaaagttcctcgaagatcaaaaatcccttatgatgccaaaaccattcaaactattaagcaccacaataaaaactacaactcttttgtaagttgtaatcgtaaaatgaaaccacc

SEQ ID NO: 10392 - DNA, 539 bp, Homo sapiens
ccacaaaataaacattaagaacaagtcctcaactggtgaaacccctgagtttcttcaccagaagcaaatgcagagccattttgtaggaactcttccacaatcatgcccagtaaaaatgatcttgcaattttttttttaaaaaagcaaaagaccacacgagagagccattcaccaagagggagtagacacaataaattgagaattagcaccctgaaagggtgacataatataactgtgggtatcattagtgcaaacactattttcagccctttgccttctgggcacctaagattacacctcttggcccacttgagggaggagctaaatgaacaacatgtgtatgacttgtattaaaaagacaggcagcccgggcgcagtggctcacacctgtaatcccagcacttcgggaggcgaggtgggtggatcacctgaggtcaggagttcaagaccagcctgaccaacgtggtaaaaccctgtctctgctaaaaacacaaaattagccaggcgaggtggcacgtgcctgtaatcccagctactca

SEQ ID NO: 10393 - DNA, 565 bp, Homo sapiens
ccatgtaaggacacacaaagaaggcagccacctgcaagccaggaagagagccctcaccagggaccaaaatggccagtgccttgattttggacttcagcctccaggagagtaagaaataaatttctgtttcttaagccacctaatctgtgatattttgttatggccatttgaactgactcagacagccaggatcacttatttagttgttcattaatttattgatccattcaagaaattcaacaactctctattgagtgctttatgtaccaggcactgtttttggaggtcaggatgcatcagtgacagaagacaaaaagattcctacattgtaagcttacctgtagggacagtaaacaatcaacattagaagtaactaaatctgtggtgatgatactatacattttgtgatgtaccttaacagtacataaatgtcttttacacccattattgcatctgacctggcagaccccgggaggtatgaggaaatgaagcccactctccaggtcacatggctggtaccaattatagtagtagctaataagtatttagctgcttattatgtgct

SEQ ID NO: 10394 - DNA, 523 bp, Homo sapiens
gcttcacaaaaatatccaacctactgacaaaagagttgtggagtatttcatgatacaatagtggtcgttgttctgggtctgtgagacctccttgcgtcattttaccttggtcacttcaaatcctataaacaaacatttactgagatctcatgtgcagcgggcacggtgctgggggtttgttctcaaggctaaggaggtggaggagattgggcttccaaggaacaggtgaataaatagattcattgagttgtggtggttctatttcctctttccacccaaaacccatgcgggaaacatatttcctcaaagtctgtggtgtgggttttaagttttttcgtgttcttagatctaaaagaatcaggccgggcacagtggctcatgcctgtaatcctagcactttgggaggctgaggcgggcggatcacgaggtcaggagatagagagtatccttgctaacacggtgaaaccccgtctctactaaaaatacaaaaaacaaaaacaaaaatagcccggcgtggtgatgg

SEQ ID NO: 10395 - DNA, 516 bp, Homo sapiens
  misc_feature 369, 439: n = A,T,C or G
tctgaacagtttaatagtagatttaatccgtgagaggaaataccctcgaaagttactatagaaataacaccttactatctggtggcatttacttagttcttagaactgactaattagtttatcggttaaagtaatttgctattatattgtaaaatagtacatttgaggctcacttataaaaattggaaaacatcgaaatataagaggtccaagagggtgtttgaaacacattttgctaagttgacaggaaattaatagactttttatgggccattaactaataatacacttcaaaaaaaggtacagttaaataaagggtttaaatagtctataccgtatactaaaactaaattaatatttaggactganataacatattgattaagtaccagctatgtacccaaaaaatgctgggcacagaagttagagtaagatgttntacttaaagggcctttgagtgagagttgggcattcattctgaactaaccactaatatcattaagaattagtgctgag

SEQ ID NO: 10396 - DNA, 53 bp, Homo sapiens
ggcaccttaaaagccctacattggccgggcgcagtggctcacgcctgtagtcc

SEQ ID NO: 10397 - DNA, 449 bp, Homo sapiens
  misc_feature 289: n = A,T,C or G
cacatttgtttactctatgaaaactgaaataagaagacagagagtcctcttgctcaacagacctcagctggaaatacgtgtgttggacggctgaaatttttttgcctttctgctcatgtccatgaatgactgcaaaagtaccacaagtactggtttgggaattacaaataaatttcagtaagcagacaaattcacaggtatggaatctgtgaataaggaggatccactgtataaggaaactggggctcagtgaggtgaagtcacacaattagaggcaggcaggaagcanatccatgatgatcaagatccaaaacccagagcacttaactctcattattctgcactcattcactcaggaaatgttcactgacaacttcttatgtgccaagcaccagggccatagatgaatgtaatctggtcccaattcttcctgagaatgaaacagaaag

SEQ ID NO: 10398 - DNA, 439 bp, Homo sapiens
tagcaggaggtagaagaaaaagttattgaagctgaaatagtgatccttagccttagggacagtgtgtgtcagaggttagagcatccagcatggctggtggccagagctttgcatcagtctgagatgtatgtgatgtatctttagctcagggaagagagaggacttgatttttgaggaaggcttgggaaggagggatagaagagctggatagttttgctgctccccagccagaaatttatagtttgatttcattattgccttgaaatattgggatgtcccagaacacacagccattcatatttaaaagtaagcatggcaacctcacgtctgattcggatataaagggctgatttggcttatttatatgatttcaattcacaggcagccataatcaagtgcttactaggcttgtaagagcagccagaggtcagaccattta

SEQ ID NO: 10399 - DNA, 537 bp, Homo sapiens
cttgtgcctgtggtcccagctactcgggaggctgaggagggaggattttttgaggccacaagtttgaagctgcaatgagctataattgcaccactgcactctagcctgagtgacaggatgagaccctttctctcaaataaaggaaaaagaaaaaagtaataataacaaaataaaaagagtaatttaccaattactgagggagtctagaaaggttaagtataccccctctaaattggaaataacagtttaaaaaatattttattggtaaaaaataaaagccactttttatcctgagagagtatgtagaacttgaattttggtttaaagcacttattactaagcttaacgtaaatactttggcaaattgattctaacaaagatatccttctcatgacttaaaagagccactaattttacttttgaaatatgtttaatttttatattaaaagctaggatggctgggcgcagtggctcacgccagtaatcccaacactttgggaggcggaggtgggtgaatcacccgaggtcaggagttcg

SEQ ID NO: 10400 - DNA, 582 bp, Homo sapiens
  misc_feature 473: n = A,T,C or G
tgcaaccctatggaagatgatgtggactgcaaaaactgcattaagcagcagaatttggctcacggatatacaaattaggagccttttctattattcctcataaaacataaggaagaattaaaaggtgcctgagatactgaagtaattgaatggggaattcttaattaatcagctaattatttaaaagatcatttattcatttaagaaattaattgagcacctacattataccatgtgtattttattttattttaaaattctatttatttatttgagacagagtcttgctttgtcgcctaggcttgaatgcagtgccatgatctcagcttactgcaacctcctgagttcaagcaattcccctgcctcagccttctgagttcaagcaattctcctgcctcagcctccggagtagctgggattataggcgcctgccaccaggcctggctaatttttgtatttttagtagaggcggngtttcgccatgtgccaggctggtctggaactcctgacctcaggtgatccgcccgccccggcctcccaaagtgctgcgattacaggcatgagacgcttgcccggctgcat

SEQ ID NO: 10401 - DNA, 645 bp, Homo sapiens
attttgcacatgatcctgggagtaaagagtcacaggtaaacaaggctgcaagaaaagtccaggtggtgttcacacagtagctgcaaacttctcagaacttttcagaaattcatccttgcctgtcattacattttttaatgagccactcagcattccaacgaacaacccaatacatcatttcctctattaattggtgcagttaatttgaaaactgttctcagttctatatttatatgggaaatattaagagtccatctccttgctcctttttcattaattccacacacattcatggagcatcacgctaggaactaaggacatgatgtgacccgaggttggcaggtcctaccctcgggctcgggggcaccaagggctaggtggccatgaaagagcccaggccgggcgcggtggctcacgcctgtaatcccagcactttgggaggctgaggcgggcggatcacgaggtcaggagaccgagaccatcccgggtagcacggtgaaactccgtctctactacaaatacaaaaaactagccgggcgtggtggcggacgcctgtagtcccagctactcgtgaggctgaggcaggagaatggcgtgaacccgggaggcggagactgcagtgagttgagatcgtgccactgcact

SEQ ID NO: 10402 - DNA, 310 bp, Homo sapiens
agaatcgcttgaacctgggaggtggtggaggttgtagtgacccaggatcatgccattgtactccagcctaggtgacaagagcgaggctccatctcaaaaaaaaaaaaaaaaaaaaccaaaccctttggcttttgttggtttttgaaaaaaagtttaattttgtcccccagcctaaagggcagggccgggatgtggcctaattgaaatttgaactccgggcctaaggggatccacccacctaaccctccaaaagggctgggtttatgggcttgacccattgaccccagctggaaacctttaactttttaat

SEQ ID NO: 10403 - DNA, 253 bp, Homo sapiens
gtttgaatgtgagctctgcatttttatctgcattactttttgcaaatggcataacttttctatgtcctagtttcctccactacaaaatggaagtaaaattactttttatctcgaaaagttattacaagaattaaataagttaattattttaaagtacttagaatagtgcctggtacatagtagttgcttagtaaatatgagccataattacttctttcctgtatgtttgaaatagttcatagtaaaatattta

SEQ ID NO: 10404 - DNA, 566 bp, Homo sapiens
ttatgtcacactatatataaactagtaagaataatgactaccatctattgaatcctaaccatgtgtgaagcactgggctagtatattacatggactgtctaatttaattgtctcacaaatgctatgcatgcataggctttatttacatctccatttcatgggagtgaaaagtggtgctcaaaggctaaataacttaacagttggtaagtgttcgaactaactgggatttgaaccaatgtttgtttgtccagtatgccaatcagccaatgctaaatgtttaggtgcagtttgcattataatctttaaccacattggctgattaaataatagttcttttgttattttctataatgaatatcttattgaatcctctaaataaatttcacgtatgtataatacaaaaaatcccaagagatattgaataataaaaatattggccgggcgcggtggctcacgcctgtaatcccagcactttgggaggccgagacaggtggatcacgaggccaggagatagagaccttcctggctaacatggtgaaacctgtctttactaaaaatacaaaata

SEQ ID NO: 10405 - DNA, 507 bp, Homo sapiens
actccatctgctggaaattgtaagatgtctacaatgtgactaccatgcgctgggattataaagagaatcctggtcagagatgctaagaggcacgtggtggcaatagtgaggttcttgttagaagaacctaccagggtggttccctagttcaaagctggtcccctagtcctctcagaaatgcattagcaggctgggcgtggtggctcacatctgtaatgccagcactttgggaggcagaggcaggcagatcacttgaggtcaggagttcgagaccagcctggccaacatggtgaaacccgtttctactaaaaatacaaaaattagccgggtgtggtggcacacacctgtaatcccagctattgaggaggcggatgcagatgaattgcttgaacccaggaggcagaggttgcagtgagtcaagattatgccactgtactccagcctgtgcagtgagtcaagattatgccactgtactccagcctgggcaacagagcgatactccgtctc

SEQ ID NO: 10406 - DNA, 135 bp, Homo sapiens
tgatccgcccgcctcggcctcccaaagtgctgggattacaggcgtgagccaccgcgcccggactgtaccaacttcttaatgcctgaactgcatctctgcttggacttttactgcaaacaaatgtattatgggatg

SEQ ID NO: 10407 - DNA, 152 bp, Homo sapiens
ggcacgaggctggtgttagggttctttgtttttggggtttggcagagatgtgtttaagtgctgtggccagaagcggggggagggggtttggtggaaattttttgttatgatgtctgtgtggaaagcggctgtgcagacattcaattgttatt

SEQ ID NO: 10408 - DNA, 399 bp, Homo sapiens
attcggcacgagaggatgttgctgctgtgggccgcaagggtcttggtagcttcctctagggcaggcttgtgttcctgattggggttgggatgggtgggggcatcccctgtggcctcagcaatccagccctgcgcatatgggtcccattacacagacgtagacattgaggtctagttagaaggacttgccaggagtcctgtaatagagcttggcacttgggtctcttgactctcatggactgggtgtgagggaagtgggctccttttgctccctacctgcagtgcctttgaggggatgagggtcttccatcagagttctgaaaatgacctgcacattttagtgccttagaaatctgctcgttggggccaggtgtggtggctcacgcctgtaatcccagca

SEQ ID NO: 10409 - DNA, 517 bp, Homo sapiens
ggcacgaggagaagtcagcctggcagagagactctgaaatgagggattagaggtgttcaaggagcaagagcttcagcctgaagacaagggagcagtccctgaagacgcttctactgagaggtctgccatggcctctcttggcctccaacttgtgggctacatcctaagccttctggggcttttgggcacactggttgccatgctgctccccagctggaaaacaagttcttatgtcggtgccagcattgtgacagcagttggcttctccaagggcctctggatggaatgtgccacacacagcacaggcatcacccagtgtgacatctatagcacccttctgggcctgcccgctgacatccaggctgcccaggccatgatggtgacatccagtgcaatctcctccctggcctacttctcaagcttccctccaaagaaactgattggccctggaacctccatcccactcttgttatgactccacagtgtccagactaatttgtgcatgaactgaaataaa

SEQ ID NO: 10410 - DNA, 299 bp, Homo sapiens
cgctgggctcaggcaatccacctgccttggcctccaaagtgccgggattgcaggcataagccactgtacccggccccaactaatttttgtattttttgtagagatggggtttcaccatgtcggtcaggcttgtcttgaactcctgagctgaagcaatccacccgccttaccctcccaaaggtgctcagattacaggcttgaggcactgtgcctggccatgggtgccatctatctaaagagtgatgaacttggtgttaaaccagtaatagaaatcaccaagttcctaccatcatgagctc

SEQ ID NO: 10411 - DNA, 521 bp, Homo sapiens
ggcacgaggagacgtcgtctctacaaaaaataaaattagccaggcatgatggcctgtacctgtagtcccagctactcaggaggttgataggggaggatcacctgagcctgcgaggtcgaggttgcagcaagccaagatcatgccactgtacttcagcctgggcgatagagaccctgactcaaaacaaagaagacccagtacaagttcagtgttgagtgctaaagacttaaaagagttataaagctgaacccttaatcttaagaggtttataagtgagaacaagaatctccaaatcctgtactgtttaatatcagcatgagactaaaccactgtcctaagaagacaaccttaatttgaatcaagttattttagagtgatgtgttttctgaagcagctctcagaaggttattgtctggtgttaaaatagtgaaattgagtaataacaaggttaaaatcggtggacattaaatacacacaagacttcaattgctgggtcctccattgattaatgaaaaaatgat

SEQ ID NO: 10412 - DNA, 428 bp, Homo sapiens
gcttatcaaacgagacacagtgatgatgacatttttgaacacagattaattgtgccaccctctcttatttccttcctcattgagcatacaaatgagagaggtacaatttcaggtaactttgcaaaaaggaaagaaatagaatttctgagccgggcgccgtggctcatgcctgtaatcccagcactttgggaggccgaggtgggtggatcacctgagattgggagttcgagaccagcctgaccaacatggagaaaccccatctctactaaaaatacaaaattagccaggcatggttgtgcacgcctgtaatcctagctacttgggaggctgaggcaggagaattgcttgaacctgggaggcggaggttgtggtgagccgagatcgcaccattgcactccagcctgggcaacagagtgaaactctgtctc

SEQ ID NO: 10413 - DNA, 350 bp, Homo sapiens
  misc_feature 303, 309, 338, 340, 346: n = A,T,C or G
ctttgaaacaagcgaattaactatctacgctgcctgcaaggggccacttagggcactgctagcagggcttcaaccaggaagggatcaacccaggaagggatgatcaggagaggcttccctgaggacataatgtgtaagagaggtgagaagtgctcccaagcagacacaacagcagcacagaggtctggaggccacacaaaaagtgatgctcgccctgggctagcctcagcagacctaaggcatctctactccctccagaggagccgcccagattcttgcagtggagaggaggtctttcagccncagcangtctggagggctgataatgaacctgctanangttttnacat

SEQ ID NO: 10414 - DNA, 166 bp, Homo sapiens
  misc_feature 10, 11, 14: n = A,T,C or G
aaaaggtctnnatnaattgcaaagatgtctgacacagtctggcattgctggaggatacaaaccttttaacctggagacttgccggcttatggtttcaatgctggatagagatatgtctggcacaagggtttcaatgaatttaaagaactctgggctgtactgaatg

SEQ ID NO: 10415 - DNA, 85 bp, Homo sapiens
aaaatgtaaggattctggaatacatattccatgggactttccttccctctcctgcttcctcttttcctgctccctaacctttcgc

SEQ ID NO: 10416 - DNA, 367 bp, Homo sapiens
cgaatgccacagacggcgtgcggctagcagcccgcatcgtggacacaccctgcaatgagatgaacaccgacaccttcctcgaggagattaacaaagttggaaaggagctggggatcatcccaaccatcatccgggatgaggaactgaagacgagaggatttggaggaatctatggggttggcaaagccgccctgcatcccccagccctggccgtcctcagccacaccccagatggagccacgcagaccatcgcctgggtgggcaaaggcatcgtctatgacactggaggcctcagcatcaaagggaagactaccatgccggggatgaagcgagactgcgggggtgctgcggccgtcctgggggcctt

SEQ ID NO: 10417 - DNA, 375 bp, Homo sapiens
gcagtaattagtaaatataaaatcctacatcagccaaaaaagtctatgaattctgtgaccagaaatctctatcacagatttattgatgaagaaacgaaggataccaaaggtcgttattttatagtggaagctgacataaaggagttcacaactttgaaagctgacaagaagtttcacgtgttactgaatattttacgacactgccggaggctatcagaggtccgagggggaggacttactcgttatgttataacctgagtcccttgtgaacttttgaacctaccaacagggtatagagtatagaggctatttctataattttcttatatataatttttttaacttttaatcttttttgtttcctttttttttttt

SEQ ID NO: 10418 - DNA, 499 bp, Homo sapiens
ttatgtagcatgattttccttgggatgcaaatcttaaaacagtcctttaatatgaaccaacaatctggagcacaccgaagggcaatctaaattgtggcttgaaggactgcactaaaacccactaaaaagatgcgaaaacctgatgagggcaaaccagttaaacctaacaccctgccttgtctgggctcatcacctctccctatcccagactaactttactgtgaaatcctaccacattccatgtctgaatttttggattcggggtggattttcgttgtccgtggaagaacacatggatctctctggctttctcacccaagttggccacttacgctaatcctggaagtatgatcacttttgaacctgccccttaaccttgacgaggatacaaaagtgaaagcatcatcccccaaaggatcactgcacagtcctactacagtatttttaagtagccctctaaatacttaattttaagcaaaatcccttggccgcactttta

SEQ ID NO: 10419 - DNA, 411 bp, Homo sapiens
  misc_feature 411: n = A,T,C or G
cgttgctgtcggaattgaagcccaggtgggtgtccaatgccagaccatggatcatcagcctgggacaccaaagtgccacactctcagagtgaggatgatcctcaggaagtcagctctaccaccctccacaccaggaagtgcaagcagactcacctcatgattgagcagaataagagaatccttgagaagtcataagtttgcatggatttgcagcacaagttcaaacaactagatggcaccaaatccctcaatttatgaagacatttaacgtggtacccaattggaaacgcctcatggcagaaacaaacataaatcctttctagaaggttgccttgtccaagtgtttcccaaaccagtttttttagggaaaatgcacagcttactataaaaaaattttaacctaaacttggn

SEQ ID NO: 10420 - DNA, 300 bp, Homo sapiens
gcgaattataattttaaagattgtccatagaaggataatcaacagattccactcctttttactctttatgggccatccaccttatgcaattcgggaagtgaacataaacaaattctgcaggattattagtgaatttgcactagagtatcgcacaaccagggaaagggttttgcagcagaaacagaaacgggccaaccacagagagagaaataagaccagagggaagatgatcaccgattctggcaagttctccggcagttctccggcgcccccaagccagccgcagggtctgagctatgc

SEQ ID NO: 10421 - DNA, 397 bp, Homo sapiens
  misc_feature 9, 10, 11, 12, 13, 14, 15, 16, 17, 18, 19, 20, 21, 22, 23,24, 25, 26, 27, 28, 29, 30, 31, 32, 33, 34, 35, 36, 37,38, 39, 40, 41, 42, 43, 44, 45, 46, 47, 48, 49, 50, 51,52, 53, 54, 55, 56, 57, 58, 59, 60, 61, 62, 63, 64, 65,66: n = A,T,C or G
  misc_feature 67, 68, 69, 70, 71, 72, 73, 74, 75, 76, 77, 78, 79, 80, 81,82, 83, 84, 85, 86, 87, 88, 89, 90, 91, 92, 93, 94, 95,96, 97, 98, 99, 100, 101, 102, 103, 104, 105, 106, 107,108, 109, 110, 111, 112, 113, 114, 115, 116, 117, 118, 119: n = A,T,C or G
  misc_feature 120, 121, 122, 123, 252, 253, 254, 255, 256, 257, 258, 259,260, 261, 262, 263, 264, 265, 266, 267, 268: n = A,T,C or G
ggcacgagnnnnnnnnnnnnnnnnnnnnnnnnnnnnnnnnnnnnnnnnnnnnnnnnnnnnnnnnnnnnnnnnnnnnnnnnnnnnnnnnnnnnnnnnnnnnnnnnnnnnnnnnnnnnnnnnnnncacgcacccgcctgtgtgtgtgcgcacacacgctccctctctctatagacagacacacactgcgcgctcgctctctcttttgtgtgcgctctccgtgctccccccctctctctcttttttctctatatnnnnnnnnnnnnnnnnntctgagagctcgcgcgctcagcgttctattcacacgcgcgttttttttatatatatattttgtgcgcgccggggggggcgcacacactctctcttttttgtgggttcgctgtccgcgtccctccttttg

SEQ ID NO: 10422 - DNA, 371 bp, Homo sapiens
ggcacgagatagaatccgaggcattgatatcattaaatggatggagcgctaccttagggataagaccgtgatgataatcgtagcaatcagccccaaatacaaacaggacgtggaaggcgctgagtcgcagctggacgaggatgagcatggcttacatactaagtacattcatcgaatgatgcagattgagttcataaaacaaggaagcatgaatttcagattcatccctgtgctcttcccaaatgctaagaaggagcatgtgcccacctggcttcagaacactcatgtctacagctggcccaagaataaaaaaaacatcctgctgcggctgctgagagaggaagagtatgtggctcctccacgggggcctc

SEQ ID NO: 10423 - DNA, 300 bp, Homo sapiens
aattccgttgctgtcgtaaaacttaaatacattacacgggttgtaaggacaaaggattttaaaatctgagcacttaggtgaagggacaagcaggtttatgtgtttaaacagaaagaagggaaaaggtactatgtgatatggtactgaaattttgatcccaatagaattcatttctcttacgttgaatccccaatcataattaagccgtatacacagattaaattaacagaagcatttcacataaatgttggtttcagtcatcaactacccatgaattcctgcccaaggatacttaatcag

SEQ ID NO: 10424 - DNA, 120 bp, Homo sapiens
ggttttgtcctcccaaaccagagtcatatgctgctagtagaattttttatttgatcctgcgaacttttcttataggaaaaataaggcaaaggatgtgtagtgcaaccatctgataaacta

SEQ ID NO: 10425 - DNA, 420 bp, Homo sapiens
ggagaaaccctcctggcaacagaaaacaaaaataaaaaacattgaacatagaaactacatgaagaagccacaatttgattggattggtttgtagaggaatttatgtccaggacgttgttgataataatagagcaatcccagattgttaatggagtttaataactgtgtgtgtgtagggaacatgggaagagagccttataagtcccagtgcggccatggcataccctaaactgctcccccctagattttactaaactaaagtaatccagccagtcactaaagaaataaacaagcggccgggtacagtggctcactcctgtaatcccagcactttaggaggctgaggcgggcggatcatgaggtcaggagatcgagaccatcctggctaacacggtgaaaccccatctctactaaaaatac

SEQ ID NO: 10426 - DNA, 65 bp, Homo sapiens
attaccaacctaacaccacacctagagaaactagcaaaccaacctccagactagcggaagacaag

SEQ ID NO: 10427 - DNA, 573 bp, Homo sapiens
catgccaccacacctggctcttatttctacttttgaattataagcttgaggacacagccataccttccatttctctgagtcactcttagaattgaacacagtattttatgcacagataaattcaataagcaactgattatttcatataaacatagagtattaaatgtctgaaaagtgttacatgtgtataacaaacatgcttcaaagcttaaatagcaatatgggatctaagagttaagctctcttattacataggtaactgaattctgattttaccagataaaagggtaaagaaaatactggccaggcgcggtggctcacgcctgtaatcccagcactttgtgaggccaaggcagggagatcacgaggtcaggagattgagaccatcctgaccaacactgtgaaaccccgtctctactaaaaatacaaaaattagctcagtgtggtggcacatgcctgtagtcccagctactcaggaggctgaggcaggagaatcgctggaacctgggaggcggaggttgcagtgagccgagattgcgccactgcactccagcctggtgacagagcgagact

SEQ ID NO: 10428 - DNA, 442 bp, Homo sapiens
atatttgtttatacttagcagtcaacaaagtaactcatgggtaaaaattggtttacaaatcttcactttaaaatgaccgtcttatgaattatcattggatttgtaaaagttactgactttaagataagatgataatgctgtgagaatgatggaaaaactatttgtgactcatgttgtattttagcagtttagataaaaataaaataaatcattcttagatgcagtcctcctatacttggaaaagcatatatttgaataagtatataaaactgaaggcttgagtgtttcagttgggtttcccagaaagcaaattctaagctaaaaaataatatataagaagtattctagtcttctttggatcaaaacctgttgtagcaataaaaggaaaaagattggctagagagagaaaatgaacatctgctgaccccactgggagtgctga

SEQ ID NO: 10429 - DNA, 439 bp, Homo sapiens
atactcttttgggggttgtgggagagcacttttagttgaatggtgaagatagaaataattaactttgaagatcttaagcaaattacttaatctctatctcattttactcctttaactacattctggcacatcttttcaacacatatccacacttacccactccaagagaaaatactgagctctgcctggaaaccattctatgcattttggagaccacaacctttattgcagcacaggcactggcagtgaaggaaatgttatgttcctgggatgatcccaggagaaaagtaaaaggtttatggacttcattacagtttccaaatgtttgaatgctttacttttccagagaaactgggcaggcaggaaagagttgcacggactgtgtcttgagtcatgaagctttgccagtgtggaggagtgtaagcctacctcttacctt

SEQ ID NO: 10430 - DNA, 512 bp, Homo sapiens
tatcttctttagaaagtccctcttatgaacaacattcctcttgtggagagtggctgaataaaatcctaaatgtaaagatcccaaactggtaacttttcatctggaagttagcaagaatgccacctcagcagctgtaaggaggaaatacccttacagagatgaggatgcactgcccttgtcatctcagactattagagggctgatgctgaactactggactcatacaatgaggatcaattccttctcctcttgattttccttctagtaagagctacagaatatgccttaatgttcatactcttagaagctacttgtttatttcaaaactccccatattttccacttctagacatggataagaagttttcttgcagttcatgaaatcataaaccatgaccatttagaaatctggctcagttcttttgctttacagataagaaaactggacaggacgtggtggctcaatcctgtaatcccagtacttcgggaagctgaggcaggtgaatcacctg

SEQ ID NO: 10431 - DNA, 516 bp, Homo sapiens
ggcacgagccgccgccgaggattcagcagcctcccccttgagccccctcgcttcccgacgttccgttcccccctgcccgccttctcccgccaccgccgccgccgccttccgcaggccgtttccaccgaggaaaaggaatcgtatcgtatgtccgctatccagaacctccactctttcgacccctttgctgatgcaagtaagggtgatgacctgcttcctgctggcactgaggattatatccatataagaattcaacagagaaacggcaggaagacccttactactgtccaagggatcgctgatgattacgataaaaagaaactagtgaaggcgtttaagaaaaagtttgcctgcaatggtactgtaattgagcatccggaatatggagaagtaattcagctacagggtgaccaacgcaagaacatatgccagttcctcgtagagattggactggctaaggacgatcagctgaaggttcatgggttttaagtgcttgtggctcactgaagcttaagt

SEQ ID NO: 10432 - DNA, 419 bp, Homo sapiens
ggcacgaggacaggccttctgaagcagagggaagcctatcagagtaagctcaggtgggcctggtcagcctcgccgagctctcatttccactctgcccacagccacagagggaatgggttgcctggagaggtagcgagtgctgcatcagtgcaggtattctcgcacagattcgacaactgcgtatcagcctgtaggtgagggaatagttaggcttgatcatccagaaagttccttttgaccctaaaagtctgattcttgtgattctagcctttggcaaaccacagataaccagtctctcctcctatagtatagggttcttattacgattattgaccttgtgatgacaagggtcacaaatccaggaggctgtgaagcccctgaaattattacttttttcttcctttttttttttttttggg

SEQ ID NO: 10433 - DNA, 70 bp, Homo sapiens
gttgagttgctcatggccctttggacctggcaagtgtctgaaccatacctctggttctatcatcatgctc

SEQ ID NO: 10434 - DNA, 470 bp, Homo sapiens
agccctcccgaccaccatagctgagagcccaggacaccatctcacaccacacgctgaatgggggtgggagccagacctggtgatccccaggactatggagcagcagggatgaggtggtggaggggaagaattgaggctgaaataagatgggagtctccttcctcacacaggctcacctctgtggcacacagtccaggagagatggtttcttcactggtctataagaacctctggtcaggccgggcacagtggctcacacatgtaatcctagcactttgggaggccaaggcagggggtatcacctgaggtcaggcgttcgagaccagcctggccaacatggtgaaaccccatctctactacaaatataaaaattagctgggcgtggtggcatgcacctataatcctagctactcagggggctgagatgggagaatcacttgaaccgtggaggtggaggctgcagtgagccg

SEQ ID NO: 10435 - DNA, 578 bp, Homo sapiens
acataattcatcaaaaaataaaaaatattatacttagcacagtatgagccttaatacaataaaaaatcctcctacagacctagtctagttgttgtcaaattttactttaaaattacttcactatggcaatactgtcttctgcaaacacaagctagctttgaatctatgagatacaattatttacatagtcaaaataaaggtgctatcttgttttaattatacatagaaagagctttttaagactcatacaaacttatctaaaagtaatatttgcaaagaaagacctagtgaggaaaaaacaaaaattacttgaagttattcagcaataataaaggaaactcaagaataataaatacatttgttttgagctaaaataaacactgttaaaaaggacgactgtgccagccgggcgcagtggctcatgcctgtaatcccagcactttgggaggccgaggtgggtggatcatgaggtcaggagttcaagaccagcccgaccaacatggtgaaacctcgtctctattgaaaatacaaaaattagccaggcattggtggtgagtgcctgttatcccagctactca

SEQ ID NO: 10436 - DNA, 331 bp, Homo sapiens
ttgtagaccacagctagacaagtgggtgctacaatcactgtgtcaagtatagaaaggacagctgagatcacatcgaggattccagaaagaattggcacaggatcatttgggacgcatctctcccttgcccctgttcctggctttccttacagctctcgacttcctcaaaggagtcatcaattcggagtttggcttccattcctattgaggaagctggaaagcgtttcaaaaatgctcctctgatgtgcctgtggttaagacctctgagctctgcttaaaactttttgaagctgggcgcggtggctcacgcgtgtaatcccagccctttggg

SEQ ID NO: 10437 - DNA, 464 bp, Homo sapiens
ttgggagcaacccctggaagatagaaaaggcaagaaaactgattaatcctgagagcctccagatggaatgctgctgtgctaacaccttgattttagcccactgaaactgattttagacttgtctactctagaactggaagagaataaatttgtgttgctctaagtcactaaatttgtggtaattcgttacaacagcagtaggaaacaaactcaggaaccaacatgagcatgaagcatatgtggcctgctgtgctgtaatgaagatttttgtctctgacccaagactcttgtgtcttctggcagcatccatgagactatggcaagctgatttgcagaaggggcaaaatcttggaccattcacagttcttaacatttagttcataaaaatgatgatatagtcatgggtatttgtctgacgtttaagtatctttcaatcttctgatcaataaatctacttctaaata

SEQ ID NO: 10438 - DNA, 460 bp, Homo sapiens
ttgatacatttgaccctgggccttctgttaaccagtgctccctatatctacagcaatttatttgtctttaattcatacaggcaatattcttagcattgttttgtggtttaaagttagtctttaacacttttcaaatagcactcagaagagtagctttctacaagagagctcatggcctgtctgacttcctaaatataataactcatagatactagagttaatgcctatttgattttttactctattcttttacactatgtgtgtgaattagcttttgttgttggtggtggtggtggttgcttctttttttaacactcaaaaataatagtttttggttaaaattttaatttcaacgttttggggacagttgggaaaatctgatataataatcttacttccatggtgttatcattaggatcaaaagaaattataggctgggcgtggtggctcatgcctgtaa

SEQ ID NO: 10439 - DNA, 532 bp, Homo sapiens
tacggctccgagaagaccacagaagggccgggtcccagagggctgaaattgaggcatctaccaggttgcgttcctttctgccggttctggggaagaattggcttccaagctccacttgttggcagaattccgatccttgcggctgtgggactgaggtccccatgtcctcgctggctggctgtaagccaggtcctctcacggctcctagaggccgtccaccttccttgccatggggctccctccatcttcaagtcaacaacagaggatttctcatgtgctgaatcccccacatgcttcaaatccctgacttcctcctcttctaccagcagaaaactactttgaataggctcatgtggttagggcaaggctcacactcaaatactttccctatcttcaggtcagcttgctataagacagaacccaaccatgggcataaaatccctttgagaagccgggcgcagtggctcacgtctgtaatcccagcactttgggaggccgaggcaggcggatcacctgagaccgggagttcgag

SEQ ID NO: 10440 - DNA, 408 bp, Homo sapiens
tgatgttatgctatggaagctaagcagcagaacctgggcagacagccatggacacatggatggctcctcctaccatatttgcttgaagtaaatgagattcagatctgagcctcagaggaatttcaaattgcaccctgccatggacctttagcctcttaccttccccaactcccccctctccacccaccaacaaatccattaaggtaaaatatctatagtgtttttaactgttcaaaatagttttcttcaaatgtgccaagagggcatttgcttaggcagattaagaaatgggccaggcatggtgactgacgcctgtaatcccaacactttgggaggtcgaggtgggcagatcacgaggtcaggagatcaagatcatcctggccaacgtggtgaaaccctgtctctact

SEQ ID NO: 10441 - DNA, 327 bp, Homo sapiens
ccattaaagatttaggttaagacagtgtaaacaaatgacttattataatgcaaatattccagagtttcccattcaataaaagatactcatgaaatatataattatgatttataattatgaataatttattgaatatctaaattatttattgcatagatattaatgcttagtaataataagcatttctatttcctcctgtgtaataggcactgtgatagatattttatataaattatctttaaccattccaactctacaagatagatgttatcacctccactttataaataaggaaactgaagcccaaagaagttaaatcacctgcat

SEQ ID NO: 10442 - DNA, 555 bp, Homo sapiens
tatttagtgggatcctcccagtcctacggtaccagcttgcattgtgaaggaaaatgaaggacagaataaagcccttctcccagtctggtttatttctgtacacagaacctctgaaaacaggaggccaaggctgacctctttagtcaagagtcagctcaactttaaaattataattgcatgtgaaagctaaaatgggaaagagaaaaaatcagttctcaggaccgaaatgctaaaaacccttgggtcacattccagttagggtcctggccgtgcacacagagctcccattgggggaaggtgggcaagagaccagccaagaccaattcaaactatagggtgttggggatcatggcatttattctagaagtgtccagtttacagataaaggaatgtactatagtgataatgctatataatcttttaaaaaatagaagcttatggtcagatctcattattgagaaaggtgccaaagaatctacccactccaagtgaactatttgcagtaaagaaatcagaggaggctgggtgcggtggcttacgcctgtaatcccagca

SEQ ID NO: 10443 - DNA, 563 bp, Homo sapiens
agattgctactggagttgagggtcttatgtagaaaacatgcttgtatttttggaagcctgcatatcttctcagagcaagagaacatgaaatggtagtatcagtagaaccacaggaaaaggacaaaaggaaagtgctcaactctttccacaatccaagtttattttctgtgagagagatgggatggggagatcatctgctgacctgggatgggctctctctttggaagccaggctctgtgctctagggaccccatgaattcctcaggaagtttccttgtggttgacatgctggaaaacaggccctgagagtttaggatgagccttcctagatgctgttttaggaggatcctataggaggctgggctctgagtatgttgagagactgaacatatgtggcacggattcacaggtctctagggagctaaagcaccctcccctacacaactcagcctgctgacccagctcacacagtttatttatagaactcactggcatgtatccagggcatgcttaaagtgtaaagtcctggccgggcgtgatggctcatgcctgtaatcccagca

SEQ ID NO: 10444 - DNA, 444 bp, Homo sapiens
atggaggcccagcactcccctagtatagctttaaaaggcaacacaaagcttattatggttgtggcttatccagactcccacccaagtacagcaagtaacaggcagtgactcaatgtccatttaaaaaaatctgagtcttgggccggccatggtggctcatgccggtaatcccagcactttgggaggtcgagatgggcggatcacgaggtcaggagtttgagaccagcctggccgacatagtgaaaccctgtctcaactaaaaatacaaaaaattagctgggcatggtggtgggtgcctgcaatcccagctacttgggaggctgaggcaggagaatggcttgaacctgggaggcagaggttgtagtgagccgagatcgcaccactgcactccagcctggatgacagagcaagactccatctcaaaaaaaaaaaaaaaaaaaaaaa

SEQ ID NO: 10445 - DNA, 309 bp, Homo sapiens
ttcttatttgtactccagtttatgaatgaattatctattccactgttttaatctgttattaatcctatcccatgaattttttaactggggtaatggaatttttttattttatttttattttttatttttttattttattttttttgggacagagtctcgctctgttgcccaggctggagggcagtggcagtctcggctcactgcaagctccgcctcccaggttcttgccattctccagcctcagcctcccaagtacctgggactataggtgcccaccacaatacccagctaattttttgtatttttagt

SEQ ID NO: 10446 - DNA, 511 bp, Homo sapiens
tgctgatatcgcaccactgcgctccaacgtggtcgacagaacaagactcgtctcaaaaaaaaattaaattaaaaagttgtaccttattataataaagacaatagaaagggaggaatctaggagaataagttgttgtaagggtgaacaaggttcataaaacacacacgcacacaccctgtggtggttgtgaggactggtgtggtacaacagaggaagagaaggcagggagaccagagttgaaggctattgcatgttgtccacgttttaatctcttaggcagaaaagggcaaagacatgcccttttcattgtcaccagctttacttttaccttttaaaagtaaattgttggctgggcgtggtggctcacgcctgtaatcccagcactttgggaggccaaggagttcaagaccgcctggccaacatggcaaaaccccatctctactaaaaatacaaaaagtatccatatgtggtggcgggcacctgtaatcccagctactcgggaggctgaggc

SEQ ID NO: 10447 - DNA, 277 bp, Homo sapiens
cagaccttctgccaccttccattccctggattaaagttcctcttttgtaaatactcaagtgtttcctggttagacactgacccatacacttccctaccaggccacaagcttcctgttgggaagggccctgccttgtatccccagggcttggatacagagaagctgcccaaaggttaatgaatgaatgaatgtcttttgattacatggcttgtctagccagattctactctcatttagcaaaagagaagaggcataagggaatgaattgctccctggg

SEQ ID NO: 10448 - DNA, 280 bp, Homo sapiens
gagcgctttatgtattgaggggattagctttgtatttgtaatatgagttgcaaatgttttcccctaccttgtttttctggattataagaaattcttggccgggtgtggtggctcacacctgtaatcccagcactttgggaggccgagacgggtggatcacgaggtcgggagatcgagaccatcctggctaacacggtgaaaccccgtatctactaaaaaatataaaaaattaaccgggcgtggtggcgggcgcctgtagtcccagctactctggaggctg

SEQ ID NO: 10449 - DNA, 175 bp, Homo sapiens
acagaagggttcataagaatgcatggttcttaaggtataaacataggatactcagttttgctttgactgtttttatttttctgtggtagggataaattgcaaattgttttggacactatctcttaacccattcccgtgagcaaagcacatttttctgtaagatgactaagctaat

SEQ ID NO: 10450 - DNA, 317 bp, Homo sapiens
gtagagacagggtttcaccatcttgtccaggccggtcttgaactcctgacctcatgatctgcccacattgacctctcaaagtgctgggattacaggcgtgagccactggctgcaagctggtttttctgtgtacttcacttatgcgtgtctattgaacacctactatagctccatgcaaggcattggaaacacgtatagaacagacgtacttcatgtccttgacatgaagaattgaaaaggttagagaaaagtgtattaataggagaaaagagtttctgaagtggacagtaccatctaagaagaaaaattggaagtaa

SEQ ID NO: 10451 - DNA, 366 bp, Homo sapiens
tttcagactggagttctgtcagtagagaactcttaacagttaagatcatcaaaggtaaaatgagctgctgcagaactccctgagcttcccactctcagaggtgctcccggaggggtagaacccatagaccatttgatggaaaatctgtataacagatttttagatggtgagagtcaggaattcaaatttctggcacttacaaagatattcttctactttaagaacattaggcggccgggcgcggtggctcacgcctgtaatcccagcactttgggaggccggggcgggtggatcatgaggtcaagaaatcgagaccatcctggctaacaaggtgaaaccccgtctctactaaaaatacaaaaaatt

SEQ ID NO: 10452 - DNA, 434 bp, Homo sapiens
tacagtggcagtgaggagagcgagcactggcctgaacacggtcgtcatggggaccctgccctacacaccctgaggccagtaaccgctaaggagagtgggcacagggcacgtgttcaggaggcccggggaacctaacagccatggcctgtcctgaggccatctttgccttcatgtgcctggggtggccctcaggtttccctgaggagctggaaacggtcttcaggctgacctgcaccacccctgtcccagcctcctcctctgagcgtcagtgtcctccctgggagcacgaggacaacgtcagccctgaaaggccacagtacacagtaagacgtgaatgatgtttccctggcctggccagtgcctggctcagccgcgtagccactggtgtctggtattcctgaagaagtggaaggaaatccttggcagattaaaaa

SEQ ID NO: 10453 - DNA, 453 bp, Homo sapiens
gtttctttgttctaggaccccagattagcctctgttaactttgtatgcgtgtgttggtgtgtaggggggttagtaagcaaactatatttgaagaataatgagaagaataaaagctgctaacctgtttctctttctccaaaaacaacgccataacatctggtgtgtgtagaaaaaagatggcgggccgggcgcagtggctcacacctgtaatcccagcactttgggaggccgaggtgggcggatcacctgaggtcaggagttcaagaccagcctggccaacatgatgaaaccctgtctctactaaaaatacaaaaaattagccgggtgtggtggcatgtgcctgtagtcccagctactcgggaggctgaggcaaaagaatcgcttgaaatcgggaggcggaggttgcagtgagccagcactgtgccactgcactctagtctcagcaacaagagc

SEQ ID NO: 10454 - DNA, 409 bp, Homo sapiens
ttggacaaatgaaaacacaaccataccaaaacctatggaatgcagcaaaggcagtggttaaaatgaaatttatttatttatttctctttttttgaaatgcagttttggtcttgttgcccaggctggagtgcaatggcacaatcttggctcactgccacctctgcctcctgagttccattgattctcctgcctcaacctcccaagtagctgggactacaggcacacgccatcacgcctggctaattttgtatttttagtagagatggggtttcaccatgttgcccaggctgctctcaaactcctgacctcaggtgatccactcatctcggcctcccaaagcactgggattacaggcgtgagccactgtgcccggccagaatgatatttatagctgcaaacacatgcaatt

SEQ ID NO: 10455 - DNA, 418 bp, Homo sapiens
tccttccaggtcaatggcctccccagttgcaggagaatggcttttctgcgaagaggagaaaatgatgcactcccaatagtacctcggactcacagccttcccagggagggataaagaaatagaaatgagaataactaaaaattatgaacaattattccctaaactagcacacgtaagtaagaatgataaaataacatgtttgtaaacatggaggcatgtttgtacattctcagtaacattaatgtttctgagaggaagtctagcactatataaagtaaaactgtttatgtcatttgaactgtattgcacgtacaaaaaaaaaattaaaagaaaatcccaaaagaaagttatgtataacttattaaagaaaaaattaaaactgcaatgtccaatattaaagaaatgctgacttggcatg

SEQ ID NO: 10456 - DNA, 457 bp, Homo sapiens
attatccctaagaatatgtaaacgaggtcaaaccccgatcctatttgcattcccctccccacgggtaactatcttgaatcagagccaatactacactattgcattagggtataatttaatcattaggggatagttttcatgcagaaactagaaagcactgatgagattctactcatgttcctttaccagctttagttataaaggggaagcgggaaaatggaagcacgtagaggataaggtgataacctccaccttaccatcttccttcttcccccttaaaaaagaaatggaatgttgagtctatctggaatgttgacaggttaaaaaggagctgttgaagcctgtcgttcacagtagcatcgaaaggtgaaaatttgtctccacttgagtaccttgaaatggcaggtgtgttattggaatattgggctattgttggtcagtactgctgagtatagac

SEQ ID NO: 10457 - DNA, 626 bp, Homo sapiens
ccttttctggcatagtagttttaaagcagaaaatacacctagttagtgttgcctataatatacatacttccttgccttgttaaggtcattttaaaagttactgcacaagccatattgtgattaaaaaaaaatcggcctggtctcaatcatccattaagaaaaatctactattaaatattccaatacagaaatttcttttaaagagcgtaatttttagttttctggtctctttctacaatgtacttgcctccctagtacctgcctcaatttccgacatggtttttagaagaaaaccacttctaatctcctcttagctgagaagccaaataatcttattaagaaatatatgttggccgggcacggtggctcacacctgtaatcccagcactttgggaggccgaggcaggcggatcacgaggtcaggagatcgagaccatcctagctaacatggtgaaaccccgtctctactaaaaatacaaaaaattagccgggcatggtggcgggcgcctgtagtcccagctactcgggaggctgaggcaggagaatgtcgtgaacccgggaggcggagcttgcagtgagcggagatcacgccactgacttccagcctggacaagcgacagagcaag

SEQ ID NO: 10458 - DNA, 390 bp, Homo sapiens
gggtggggagaggaacaaggcaaggctggacggacagcagggaccaggtgggaaacaaggcagacactgaagacagcatctgtgaggtgaggcctggacactggcgtaagagatcagagtaggctgtggacgatgttaaatgacttgacggtggtcaattagatggagagggcaagaaccttgaaggtcctgacacttgttgaatggaacttaagtattctcaggagtgatcaaattggagactggacatcaaaaactatacctgatattaaaaacagcaacaaaaggcttagctcacacttgtaatcccagcactttgggaggccgaggtggacagatcacgaggtcaggagatcgagaccatcctggctaacacagtgaaaccccgtc

SEQ ID NO: 10459 - DNA, 591 bp, Homo sapiens
ggcacgaggccatctccaaatactgcggttgttcagaagctcttagtttgtgggctgtccttgttatttcacttgaccatctgtacaacattacctgtggagtacaacattgatgagcattttcaagctacagcttcgtggccaacaaagattatctatctgtatatctctcttttggctgccagacccaaatactattttgcatggacgctagctgatgccattaataatgctgcaggctttggtttcagagggtatgacgaaaatggagcagctcgctgggacttaatttccaatttgagaattcaacaaatagagatgtcaacaagtttcaagatgtttcttgataattggaatattcagacagctctttggctcaaaagggtgtgttatgaacgaacctccttcagtccaactatccagacgttcattctctctgccatttggcacggggtatacccaggatattatctaacgtttctaacaggggtgttaatgacattagcagcaagagctatgagaaataactttagacattatttcattgaaccttcccaactgaaattattttatgatgttataacatggata

SEQ ID NO: 10460 - DNA, 120 bp, Homo sapiens
gccccaggaggaaaggagcacaattggtgttcttttgtttatgaacatcagctattataaagaaacctgcatttaccattttctgcatgtcttttggtgagcttatggacagcttgtttt

SEQ ID NO: 10461 - DNA, 576 bp, Homo sapiens
ggcacgagcccttatacaaacatatatgaacatatatactttttttgttgtataaaaacaggatcacattatagatattattctgtaactttctgttttcacccaaaatacagcagagcactattttccagaagcacgtagttctaacttattctttctgatggctgtataatattccataaaatggatatgccaaactttattcaagtacttcacattttaagtggacattccatttgtctgctataatttacaattatagcaatactttgagaaaggtctttgcaagtatatccatatgaactaatgtctatgtagaagatatgctggctcaaatattatgtacatttaatgtcttaataaacaccgctagattactttccaggaagcatgcagccatgcactctctcacctacccccatcttcatttgacagcttattttcccacatcttatcagcattggacactattcatcttttcaatttttgccaaactgatgtgtgaaacaagagggtatctcattgtggtttatgttcattacactatgagctggataactttttggttattggcta

SEQ ID NO: 10462 - DNA, 246 bp, Homo sapiens
ttttttttttttttttttttttttgtttttttttttttttttttttttttttttaaaaaaagaaaaaaatttttgtaaccccccccccaaaaaaaaaaaaaagaagggagccccccgcccccaaaaaaaaaaagatttgggggggggggaaaaaaaaaaaaaaccctctaaaagaggggggggacaaaaaaaaagggggggagcaaacatttcggaggatagaggggggggggggggggcaaaaaa

SEQ ID NO: 10463 - DNA, 266 bp, Homo sapiens
ggcacgaggtactcccctgtctcacctggggcaacctcagagccccactaagctgaaggccccctgggggagggggaagcatggtccttatcatctgccctatcttgccccttcctgtggagtgggcagaagggctcccgggatcctcagagctcccaggtctgagcagccaaaggcccagctgggcctccaggaccagcgcgagcccctgccccaccctcccctgccacatgtgccctgctttgggacctgtgatgaccttgctg

SEQ ID NO: 10464 - DNA, 64 bp, Homo sapiens
gggtggaaagggagggatgaattggggtgatagaaccctggtgaattcagagtaatctttcttt

SEQ ID NO: 10465 - DNA, 64 bp, Homo sapiens
gacaggcagagctccaggctggcaccatggtaggcctccagggaaagagctgggaggcaggaat

SEQ ID NO: 10466 - DNA, 556 bp, Homo sapiens
ggcacgaggaaacgggatggtttataggagttcccatttggttgaaagctagaagccctaattgaccttaaagtaacatgctatgggatggtgggattgtcccctctgacagcacatatgaaatagttcatctatataatagaaacgcacacacacgaaagagaatcttctgacttaaatacaactttcatggagttcttcaccacttatctgtctctgttaaaatctgaaaatctagcccatggctaaaatctattatatgtgttctccatatttcttgtataagccagtccccagcatctgatgttttgagaagtgcatggagtttcctaaactttgcacagaagaatatcctggggccgggcatggtggctcacgcctgtaatcccagcactttgggaggccgaggcaggtggatcataggtcaaaagatcgagaccatcctggccaatatggtgaaacctcgtctctactaaaaatacaaaaattagctgggcgtggtggcacgtgcctgtagtcccagctactcgggaggctgaggcaggagaatcgcttg

SEQ ID NO: 10467 - DNA, 70 bp, Homo sapiens
tttacatagacacaggtgataatgtatctatgtaaatgccttttgattctgcaactgcaggatactctca

SEQ ID NO: 10468 - DNA, 371 bp, Homo sapiens
ggcaccaggggaggctgaggcgggtggatcacctgaggtcaggagttcaagaccagcctgaccaacatggagaaaccctgtctctactaaaaatacaaaattagccaggcatggtggtgcatgcctgcaatcccagctacttaggaggctgaggcaggagaatcgcttgaacccgggaggtggaagttgaggcgagcaaagatcgtgccattgtactccagcctgggcaacaagagcgaaactccatcttatttaaaactggaggagctcaaggcgcccggccttcacaaaaaagtggggcggactatccggaattccgaacatgaaaaagaccttggagaagttggcgcaaacccttcttgatatcgtgg

SEQ ID NO: 10469 - DNA, 390 bp, Homo sapiens
tgcacgaggagagagagagagagagagagagagagagagagagagagagagagagagagagagagagagagagagagagagagagagagagtgagagagagcgtgagagagagagagagagagagagagagagagtgagagagagagagagagagagagagagcgcgcgcgcgctctttctctctctcttttttgtgtgcccacttacccacatatatatatgcccgcccacacggggtgtgtgttcttgagagagatatttttttctctctaccccctggagagcgcgtgtttttccccccccggggtggtggtctcttctctcttgagggggctgttatctaacctctcctctcccctttttttctcttttctcccacacaccgtggt

SEQ ID NO: 10470 - DNA, 599 bp, Homo sapiens
ggcacgagactctatctaaatggtaaccacctgaccaaattaagtaaaggcatgttccttggtctccataatcttgaatacttatatcttgaatacaatgccattaaggaaatactgccaggaacctttaatccaatgcctaaacttaaagtcctgtatttaaataacaacctcctccaagttttaccaccacatattttttcaggggttcctctaactaaggtaaatcttaaaacaaaccagtttacccatctacctgtaagtaatattttggatgatcttgatttactaacccagattgaccttgaggataacccctgggactgctcctgtgacctggttggactgcagcaatggatacaaaagttaagcaagaacacagtgacagatgacatcctctgcacttcccccgggcatctcgacaaaaaggaattgaaagccctaaatagtgaaattctctgtccaggtttagtaaataacccatccatgccaacacagactagttaccttatggtcaccactcctgcaacaacaacaaatacggctgatactattttacgatctcttacggacgctgtgccactgtctgttctaatatt

SEQ ID NO: 10471 - DNA, 389 bp, Homo sapiens
  misc_feature 36, 37, 38: n = A,T,C or G
ggcacgaggagagagagaactagtctcgagagcagnnntttttttttttttttttttttttttttttttttcccccccccaaacttttttttggggcctaaaaagggggccccggggaaaatttttttttcccccaattttgggccccccgaaaaaaaaaaaattttgaaaatgaacagggggaacccccccgggttttcaaggggtccccccctttcaaaggcccgcgggggtgggcctaataaaaaaagggcgggccctttcggtgaacttttcaagcccttccccccccccgggggggcaataaaaaaaaacctctcccaccccaagggggggggggggattttttttttttgggttccccaagagcctttgaagaggggctgccc

SEQ ID NO: 10472 - DNA, 543 bp, Homo sapiens
ggcacgagggtacacctgtcccatactggtgtccacagagcagccatcttagctggcaggtgtccagtgcctcccccaccccccaccatgtgcttgagtgcacacccggcgccaagccctgatcctgtcacttcttgtgaatcacaccgagtcatacccatgactaccattgcacagcggggaaactgagtctagaaaggcgaactaacatgtctaaagtcatgcgaagggaataagctgacgacatggagccagttgccctgtgacaggagacctgaaaagtactcactgctgggggtagaccggacctcaccagcttcctggagagtcacatgtttgactgcatcctcagggggctcgccggcactccagcccggactgctgccagaagctttctggaggtggcagttgtcttaaaaggcaccattccagagcgcaagcccatgatgggcgcagaaaattctggacataccacgtagaggtgggctcccgaacatgtgcggacggcaccaagccgcccaaggcatcgctgtcacctgagct

SEQ ID NO: 10473 - DNA, 325 bp, Homo sapiens
ggcacgagcctccctctgactctaagaattctctcttctggaatcgcttgaacccaggaggcggaggttgcagtaagccaaggtcatgccactgcactctagcctgggtgacagagcgagactccatctcaaaaaaaaaaaaaaaaaattttttttgacccatcaaaatttttaaaaaaaagggaaacctttttttttgggaacccttttttgttgggaaaatttccaagggccctagggggacccaaaaggggggggggcctttttgggggttgggggggggggggcccctaaaaaccttaaacaccctaaaacccgggggggg

SEQ ID NO: 10474 - DNA, 537 bp, Homo sapiens
ggcacgaggaggtgatgagcctcaacgagcactccatgcaggcgctgtcctggcgcaagctctacttgagccgcgccaagcttaaagcctccagccggacctcggctctgctctccggcttcgccatggtggcaatggtggaggtgcagctggacgctgaccacgactacccaccggggctgctcatcgccttcagtgcctgcaccacagtgctggtggctgtgcacctgtttgcgctcatgatcagcacctgcatcctgcccaacatcgaggcggtgagcaacgtgcacaatctcaactcggtcaaggagtccccccatgagcgcatgcaccgccacatcgagctggcctgggccttctccaccgtcatcggcacgctgctcttcctagctgaggtggtgctgctctgctgggtcaagttcttgcccctcaagaagcagccaggccagccaaggcccaccagcaagccccccgccagtggcgcagcagccaacgtcagcaccagcggcatcaccccgggccaggcagctgccatcg

SEQ ID NO: 10475 - DNA, 578 bp, Homo sapiens
ggcacgagccagaacataaggggcctaaagagagaggaagcaaaaaagattatattcaggaaaaacagaggagacaagaagagcagaggaaaagacatttagaggctgccgctctgctgagtgaaagaaacgcagatggtttaattgtagctagtcgtttccaccccactcccctgctgctgtctttgctggactttgtggccccttcaaggccgtttgtggtctactgtcagtacaaagagcctctgttggaatgctacacaaaactgcgggagaggggaggggtcatcaacctcaggctgtctgaaacctggctcagaaattatcaggttttgccagatcgaagtcatcctaaactgctgatgagtggaggtgggggttatcttctctccggcttcaccgttgccatggacaaccttaaagcagacaccagcctcaaatctaatgcaagcactttagaatcacacgagactgaggagcctgcagctaaaaaacgaaaatgcccagagtctgactcttaacccttttgagaattgctctgaattttgttctcaggcattatacagttagtaattaaa

SEQ ID NO: 10476 - DNA, 552 bp, Homo sapiens
ggcacgagctctcccgggcttagaaggcccggctactgacgcgcagtgccagaccttagccctcacggtccttaagtctcggtcgccctcgcctcgcagcctgccacccgcgctcagctgcccgcctcctcagccagccatgctggagcatctgagctcgctgcccacgcagatggattacaagggccagaagctagctgaacagatgtttcagggaattattcttttttctgcaatagttggatttatctacgggtacgtggctgaacagttcgggtggactgtctatatagttatggccggatttgctttttcatgtttgctgacacttcctccatggcccatctatcgccggcatcctctcaagtggttacctgttcaagaatcaagcacagacgacaagaaaccaggggaaagaaaaattaagaggcatgctaaaaataattgaggttttcatgattcagcacctgcttttgtttctgtgagatgagctaaattgctttcataccccagataagagctaaaaccacctaatgctcttatggcacagct

SEQ ID NO: 10477 - DNA, 353 bp, Homo sapiens
ggcacgagaatcgcttgagcctgggagatagaggttgcggtgagtgaagatcacactgctacactccagcctgggtgagagagtgagactctgtctcaaacaacaacaacaacaacaacaacaaccacaaaacaaacaaaaacccctgattcctggagatcctgattccataggtgtggtctctgcaagcaattttatctggaattgaagaccactggtgttctgggacaaaggttttgaaacagacaggggtccaaattctggctctaccacttattgaggtgtataaatttgaggaagttactaaatgctctgaacttcagtttctcctggaaaatgggataattatgtct

SEQ ID NO: 10478 - DNA, 311 bp, Homo sapiens
taaagacagaaagttacagagttgtggggaaaacatccactcttttaatagagaggactcagttttcttaagtaatgaaagacctgataaaacacaagatcaagtacaggaaattattttgataaaacacaaaatctttctttggcagattacttaaaaggtgaagaaaaacctcttataatttttttccttccgtccttccttccctcctcctccttcctgctccctccctctcttcctttccttttctttttcctttcctttccctctctttctctttctttctttctttcctttttttttttggacaa

SEQ ID NO: 10479 - DNA, 450 bp, Homo sapiens
tcatgaaattccagtcattttacttttattaacatgcagctagaaccatgctagtgaataacttagatattagatactgtgcagccatattcaggcaggtcttaaatataactggatgcttgaaactttatctgagtcttcctaaaagtatctgggaagttaaggagaacgtttttgttggctggaagccatccttcctcatacaactaaatgatatttaatttaaaatatgaactttaccttaaatattaattagaacctaaaattaaaatattggccaggcgcggtggctcatgcctgtaatcccagcactttgggagcccgaggcgggtagatcatgaggtcaggagatcgagaccatcctggctaacatggtgaaaccctgtctctactaaaaatacaaaaaattagccgggcatagtggcgggcgcctgtaatcccagctactct

SEQ ID NO: 10480 - DNA, 571 bp, Homo sapiens
ggcacgaggacggagcggaagtgctcgctgcagcttcccggagccggagcgcagcgcctgcggccgcccgtgccccgccgtcctccttcccgcggccgtgagggagaccgcggctcggccgtagcggagctgcgagttacagaatgtctgaaggggacagtgtgggagaatccgtccatgggaaaccttcggtggtgtacagatttttcacaagacttggacagatttatcagtcctggctagacaagtccacaccctacacggctgtgcgatgggtcgtgacactgggcctgagctttgtctacatgattcgagtttacctgctgcagggttggtacattgtgacctatgccttggggatctaccatctaaatcttttcatagcttttctttctcccaaagtggatccttccttaatggaagactcagatgacggtccttcgctacccaccaaacagaacgaggaattccgccccttcattcgaaggctcccagagtttaaattttggcatgcggctaccaagggcatccttgtggctatggtctgtactttcttcgacgctttcaacgt

SEQ ID NO: 10481 - DNA, 463 bp, Homo sapiens
  misc_feature 365: n = A,T,C or G
acgacagaagggtacggctgcgagaagacgacagaagggtacggctgcgagaagacgacagaagggtacggctgcgagaagacgacagaagggtactgctgcgagaagacgacagaagggtacggctgcgagaagacgacagaagggtactgctgcgagaagacgacagaagggtacggctgcgagaagacgacagaagggtactgctgcgagaagacgacagaagggtacggctgcgagacgacgactaaagggtaccgctgcgagagacgacataagggacggctgcgagagagacatatgggacggctgcgagaagagacataatggtacggttggagaagacacataatgggatacctgangcagggagttcagaacagcttgccacatagtaaaccctgtcttctaaaatacaaattacgagggtgtgcgcaccctgtatccactcttggaggtagga

SEQ ID NO: 10482 - DNA, 605 bp, Homo sapiens
  misc_feature 559: n = A,T,C or G
ccgcctcctgggttcaggccattctgctgcctcagcctcccgagtagctgggactacaggcgcctgcaaccacgcacggctaattttttgtatttttagtagagacggggtttcaccatgttggtcaggatggtctcgatctcatgaccttgtgatctgcccgcctcggcctcccaaagtgctgggattacaggcgtgagccaccgcgcccacctaaaacatttcaaaataagatacgcaagctctatgtggaagcgaaagggggaggcgtgggagtgtcgatctacaaaaagagttttatgaagtgaaatgggtatatctcaaactgggttggatggatgcacaggctcatgcctgtcatctttgttatttggaagcgcgggccgggcggaaacttgtttttttttttttaaaacacaaaaaaatgtttttggaaccctttttttttgggaggggtgaggttttttggttcttttgccactcctttgggggagaaacctctaccccaccccccccctatttttttttccagccccgcggaacgcgcggatggtggttntttttattaaaaaaagaggggggggcgccgcgctgcctcaccccca

SEQ ID NO: 10483 - DNA, 462 bp, Homo sapiens
acgacagaagggtacggctgcgagaagacgacagaagggtacggctgcgagaagacgacagaaggatacggctgcgagaagacgacagaagggtacggctgcgagaagacgacagaagggtacggctgcgagaagacgacagaagggtacggctgcgagaagacgacagaagggtacggctgcgagaagacgacagaagggtacggctgctagaagacgacagaatggtaccgctgcgagaagaccacagaaggaaccggttgaagaagaccacagaaggtggggcaaaaaagacttttttcttttcttttctttctttttttttttttagaaggggggttatttttggccccgggtggagggaaaacatgattgggctcattgaactttgcccccggtaaggaatcttccccctacccccccaggggggctcggaaaaaaaaaataaaaaaaaaggggggt

SEQ ID NO: 10484 - DNA, 438 bp, Homo sapiens
cgctcgctgtcgaaagcttttacgggattattttcagtgtactactggactccaaatacagacatcatgagatgtccacttgcccacgtgtggacacacaggcaggagcggcccagatcctcccttgtctgtggcctggtctttccatctcacattccctaacaggttttgtacgagtcacatactttaggcttaaatgtcatttattagtcatatcttttctctgcagcaataaaatatagatataaatattaaagtttgtctatgagtaacaaaattgataaaacccaaaaatataacaaattcttataaaaccaaaaattaaaatgttactgaagatgcctttcttagtgtatttagctttaaaggaaaccacctgattcgttctgtattcactgatggttgcacagtcctagtgtcaacactgagggcctgttt

SEQ ID NO: 10485 - DNA, 377 bp, Homo sapiens
gccgtcaggtgcgggcccaggtggcaggcgcgcccgttgggcactgggggacgcgggcgcgtcaggtgaagactgggggccgcaggcgcgctaggagaactatgccatttttgggtcaggactggagatctcctggatggagttggattaagacagaagatggctggaagagatgtgaatcttgtagtcagaaacttgaaagagagaataaccgttgtaacatcagtcacagcattatcttaaatagtgaagatggagaaatattcaataatgaagagcatgaatatgcatcgaaaaaaaggaaaaaggaccattttagaaatgacacaaatactcaaaaggcatggctattgcaccttgggagaagcctttaatcg

SEQ ID NO: 10486 - DNA, 649 bp, Homo sapiens
caaggaactgaaggacatctggcaatgtactgagtgaggaactgaggcccacagtccagcagtctccaaggaatcaaatcccacaacagccatgtgagtgagcatggaagtagatcttccccggtcaagcccccagaaggacccagccctgcggacaccttgaccgaaacctgtgagagctccggaaatagaggaaccagcattccctctggaatacatcagcactgttgcctttgaggctggcctgcttgaatgcacacctgagctccggattcacaggtaggtgtgtgacctttcttaacttctctgggcctcagcatactcctttttacagtgggaataacaatagcacctctcacacgaagttctggagggagtcgaaaaattggcacaggcaagcactccataaaatctgcagtgggctagaatccacactgcataccttggtcaccacagcccccctcctgccttactccaaccaggtcttctttgatccctgctttctttacacactctagcctcatccacaccttcttgtttccaaacatgacaagctcactcccacctctaggcctttgtccttgcagatcttctccctgggaggctctttccaaagactttgacaacatctacttgtcacatcattctg

SEQ ID NO: 10487 - DNA, 439 bp, Homo sapiens
tttaaatttagaccttttgagttaactcttctaatagtttgtgctccaagagagcccagcacacccttccatgaatggtgtcttttcaaagataactgtttttgaatgttcattgaaaaaattgtagagtagtcactcatcattttttcagttacactcaaataacaactattagtagacgtgttatttttataaagaatgaacagatgaggccaggaacagtggctcatgcctgtaatcccaacactttgggaggctgaggtgggcggatcatctgaggtcaggagtttgagaccagcatgaccaacatggaaaaactccgtctctactaaaaatacaaaattagttgggcgtggtggtgcatgcctgtaattccagctactcaggaggctgaggcaggagaatcgcttgaacctgggaggtggaggttgtggtgagc

SEQ ID NO: 10488 - DNA, 530 bp, Homo sapiens
aataaattatggtacatttccttcaatgactgtgcagtcctcagaagagattaggctgatctttaccaattgacgtgaaaagatgatgatattaagtgaaaaaaaaacaggttgctggctgggcatggtggcttatgcctataatcctaacactttgggaggccaaggtaggaggatcgcttgagcctaggagtttgaggctatcctgggtaacaaagtgagacccatctctacaaaaaaaatcaagaaattatctggatgtggtggcacatggtcccagctacactggaggctgaggcgggagaatcacttgagcccaggaggtggagtctccagtgattcatgtttgtgttattgcactccagcctgagcaacacagtgagaccctgtcttaaaaagaaaagaaagagaccgggcgtggtggctcacgcctgtaatcccagcactttgggaggccgaggcgggcagatcacctgaggtcaggagttcgagaccagcctggccaacatggtgaaaccccggctctacta

SEQ ID NO: 10489 - DNA, 347 bp, Homo sapiens
ctaccccagtgccggggagggttctgctgcttcgaaagctgctctacccttctccaaaagaagagccaagagaaggtccttttctacaaatatcagagccatggctcaggagtcagtgatgttcagtgatgtgtccgtagacttctctcaggaggagtgggaatgcctgaatgatgatcagagagatttatacagagatgtgatgttggagaattacagcaacctggtttcaatgggtaaggacatctgtccatagtaatttagattctgcccttggaaggcctacttcctccaatgtgaaatgctcacctggctttcaaaaaccagtcgaattttgatatcctgtt

SEQ ID NO: 10490 - DNA, 381 bp, Homo sapiens
  misc_feature 326, 351, 375: n = A,T,C or G
cttgacagctcatgttggtgtagtcttgtttagattgaatcttttgaccttctggtacctgaagatttatgtttttcatcagatttgcaaagttttatgctattatctctttaaataatctttctatccctttgtctttctcttctcctctatgaatttctgcaactcaaacatttgctcttttcacagtctcataaatcctgtaagtgttccttattacttttcattcttttttctttttccttctctagctgtattttcagacaacctgtctgagttcaaattctttcctctacatgattaattctgatattgatgctctttgntgcattttttcattttattcattgnatttttcagctccagaatttctgnttcttt

SEQ ID NO: 10491 - DNA, 81 bp, Homo sapiens
aaatgtgatacagtttaacaaaacccattgttctgtaactatacatagattttcaaaatgtcataaaaagtgcagttatga

SEQ ID NO: 10492 - DNA, 465 bp, Homo sapiens
aaaaaaagcttaatagtcataatatatatgggatttttacaaaagaaaaacaccaaaatagaaacatgtataaaggaaattaaaaggaaatcaccaaagacaaaataagaaacccctcaaaaaacagcaaattaaaatgagacatttttgggttgggcgtggtggctcacgcctgaaatcccagcactttggcaggccgaagtggctagatcccttgaggccaggtgtttgggacgagcctggccaatatggcgaaacccctctttactaaaaatacaaatattagccagtggtggtggtgcacgccagtaatcccagctacctgggaggctgaggcatgagatcacttgaacccgggaggcagaggttgcagtgagccaagatcgcaccactgcactccagcctaggtgacagagcaagactctgtctaaaacaatttttttaaaataaaataaaatgggacat

SEQ ID NO: 10493 - DNA, 590 bp, Homo sapiens
tgatccagtaccactagtagtgacaatagaacccacccattgttctaagtgacaacacactgatgcaggtactattattttctcaaacaattggaatatagtctaatttgccgacagctgcaaagcagcagagccaggattcaaacccaggcagtctggccccagagtgcctgcttcaaatcactacatctcttcctctcttatacttattcatcagtagatgcctagatgtggggctttacacttcagcagatactaagagggccatgtaccaagcgccaagtactgaggaatacaaacataaatactgcttgagggccaggcgcggtggctcatgcctgtaatcccagcactttgggaagcccggctcaacgaggccaggagatcgagaccatcctggctaacatggtgaaacgccgtctctactaaaaatacaaaaaattagccgggcgtggtggcgggcgcctgtagtcccagctactcgggaggctgaggcaggagaatggcgtgaacccgggaggcggagtttgcagggagccgagatcacgccactgcactccagcctgggtgacagagcgagactccgtctc

SEQ ID NO: 10494 - DNA, 550 bp, Homo sapiens
tacaggctcatgcctgtaatcccagcactttgggaggctgaggtgggccgatcacttgaacccaggagtttgagaccagcctgggcaacatggcaaaaccccatctctacagaaaatacaaaagccagatgtggtggcgcatgcctgtggtcccagctacttgggagactgaggtgggaggattgcttgagcccaggaggtggaggttacagtgaaccaagattgcaccactgcgctccagccagggtgacagggtgagaccctgtctcaaataataataataataataataacaacaacaataataatacctattgttctgattgccaatctttattgtttataatctgtttcatgtttagagacttttagaggaggctgtagagtctcctactgtcttctgccttactgtttaaccaattcatggtgaggaaactattctaacctaatctttcttgctgctaatgaaccagctcttaatctgtttattttaatcaagaatagcatgggagctgggcatggtggcactcacatgtagtcccagctactc

SEQ ID NO: 10495 - DNA, 423 bp, Homo sapiens
  misc_feature 334: n = A,T,C or G
gagtctgtgaataaaacaataaaagccgtgggttttatgaacagtttcagtttggattttcaagaagcaaaagaaggtgtcaaaagaacgaccaaggaataagaggctttcagaaataaccaagaacatcaaaaataaagaggacttttacaagtgaaaaatgcagtaatcaaaaatgaactcaaaagagagattaaatagattagacacaactgaagagaaacttagtaagtgagaagctctatcagaagaaattatgcctaatacatggagacaaagaaatggaaaatattcaagaggagttaggaaacgtgtaggaaagaatgaacagctntaatgtatgttgaattgatatgcaagaaataggaaatgcaggcccggtgcaatggctcatgcctgtaattctagcactttgggaagctg

SEQ ID NO: 10496 - DNA, 449 bp, Homo sapiens
aaatcacctgggatgttttaagtctcagctcccaggcttcaccccaggttattatatgaaaatctggggttgaaactcaggcatcagtgtatttcaaagctcaccatgtgattccaaggtatgtgcatatttgagagcctttgccttaaaagaaggagcaggtgactcatactagcaagatagtgaacagatcaccaggccagccttgtgggtagaaataatcgtgacactctgacactgttctctactaagttaatcaacatgtttaccccatgtactacataaaaattacttaatcagcccgggcgcggtggctcatgcctgtaatccctgcactttgggaggccgaggcaggcggatcatggggtcaggagatcgaaaccatcctggctaacacggtgaaatcccgtctctactaaaaaaaaaaatacaaaaaattagctgggcct

SEQ ID NO: 10497 - DNA, 566 bp, Homo sapiens
cagggatgattccctcttacaacattttgttttgttcattttgcttttccaagaggtagaaactgaatttacatctaaattcttggtaagaaaaattcctgaataagatttgagggtgtcaggtcttagaacagagatgctcatctcaggcaaaatggatcctaagggggagcaagccacactagacattcaacaaaaagcagcatcatgaacattttcaacagctcattgttaatgttcctcataaaaaggacaggttcacttgcactgaggattcttttagggtaagagccattgaatagcccttcttggggccaggcgcggtggctcacacctgtaatcccagcactttgggaggctgaggcaggcagatcacttgaggccaggagttcgagaccagcctggccaacaaagtgaaaccccatccctactaaaaatacaaaaattagccaggaaccggtggtgaacgcctgtaatcccagctactcgggaggctgaggcaggagaatagcttgaacccaggaagcagaggttccagtgagctgagatcacaccactgcacgcca

SEQ ID NO: 10498 - DNA, 610 bp, Homo sapiens
tgggattagaggcgtgtgccaccatgcctggctaatttttgcatttttagtagagacaggatttcatcatgtttgctaggctggtctcaaactcctgccctcaggtgatccatctaccatggcctcccagagtgttgggattacaggtgtgagacaccgcacctggataacagtctgttgttgatcaccagtttttatataatttttcttttgaacacaagtatattataaaaatacttgaaaggagtattcaaaaattgattttgaataccgggttaaagattcaggtatggtcgttttcctacttcgaaatgcaaaggaggtaaactcacagaagaaaacgatgtccacagaacaccaagagattggggattgtggcatatctctgggtgaaaggaagcagatgggaggatgtttactgacgaaatagtatgagaagttgtagttaaaaacacaaattaggccgggcgcggtggctcacgcctgtaatcccagtactttgggaggccgagtcgggcggatcacgaggtcagcagatcgagaccatcctggctaacactgtgaaacccctccggctaactcagtgaaaccccgtctctactaaaaatac

SEQ ID NO: 10499 - DNA, 506 bp, Homo sapiens
tcttagagcacactgacttccttgtttccactagcaatttatttttttcttccacaatattctacatattagtccttgtatacttcttgacttttccaggtttgtctatttatgtaaactgcattgccttacaaattattattttaaatttattttaactttatatcttcatctaaaccataattcattgcattctaaaaaatatcagaactggtcactaatcattttcatgaaatagtgtccaactacatgccagatagtaattctaatccaaatatttctgcaacacagaaatttttattttcacttgacagattaaaaactgaggctaggccaggcacagtggctcatgcctgtaatcccagcattttgggaggtggaggtgggcggatcacctgaggttgggagtttgagaccaacctgaccaacatggagaaaccctgtctctactaaaaatacaaaaattagccaggcgtggtggcacatgcctgtaatcccagctactc

SEQ ID NO: 10500 - DNA, 411 bp, Homo sapiens
gctaccgtgtcaccacttacagctctgtcattatcactagttgtccttcccaatgtcccttaactaccttttcagtcgtatctcctgctactccccttctcattgtctaccctctccctgcccctcaacacacacctgtgttttaaccagatagaactacctggaagcttcttagaaggtaaaacctctagccctatcttcagacctatgaattgcactttatgagtatcccagggtattaaatatgcacattgaagtttaagaagcactggtctggctgggcgcagtggctcatgcctataatcccagcagtttgtgaggctgaggtgggtggattgcttgaggccaggagttcgagaccagcctggccaacatggcaaaacctcgtctctaccaatatataaataaata

SEQ ID NO: 10501 - DNA, 558 bp, Homo sapiens
aggtttcagtgagccgagatcacgccactgcactccatccagcctgggcgacagagcaagattccatctcaaaaaagtaaaaataaaaataataaaataaatagaatgcacacctaaaatgttgatgcataattccagctctctctcttgaccttccctagttgggaaaaactgtactgatttaacacccttaaaagcagaatggatgtgatggctcacaactgtaatcccagcagtttgggaggccaagatgggaggatcacttaagcccgggagttcaagaccagcctgggcaacgtagcaagacccagtctctacaaaaaaaaaattaaaaattagccaggtgtgctggcacacccctatagtcccagttacttgggaggctgaggcaggaggatcacttgagcccaggaggttgaggatgcagtgagccataatcacaccactgcactccagaccaggcgacagagtaatttaaaattttgatgcacagttctaacttattctttctattcccccaaggggagaaaactctactgatttaacacccttaaaagc

SEQ ID NO: 10502 - DNA, 623 bp, Homo sapiens
  misc_feature 558: n = A,T,C or G
tgtcaagttactattattccctttataatttgcagtttaagatgaaatgcactagttttagtgcttcatctgtaaaactacttttttatgtgaatttattttttaaaaaatgtctgtcactaaagagaaaatcatcatcgcttggcatggataaaaacactaactgccaaagtcattaacttttggccaaataccaaagccagctaaagtcacagggccttggcctgtattctttgttaaaaagagattaacaactgtcgggtgataaacataagatataccagcaccaaactgaactttctcctctaaataatcataaggattgaccaaaaactgaaaagcaaattgcttgctcactatatgtgattccttgttacttagggtcacctccgtataccctctaaaattgttacttacatgctttgcagttggacatattttggtttaaatcccagctccaccaacacctcagacttcatctcctaagcctcggtttccttctctgtaaaacagggataatagtagcacctgcctaagggcttgtgcaaattagattgngatagtgaatgatgtatagttggtgcttgcttaatgaatgacgtggtcagtgtcaatggcgtgtc

SEQ ID NO: 10503 - DNA, 504 bp, Homo sapiens
gccctgctaaaatgatgcttagcctgaaaaatcggagtattacttctcaaatttatttttccaactcagtaattaaaaaaacatttacttcctgcctactgggttgtggaatattgtcaggatctctgggttccaggtgagggatgcagaatgcagggaaagacaggtcccctgccctccagaagtcggtggcgccttttcagagtaacacacactggagcagacccctggaaaaggacagtccactggtggaccatgaccttggtcaaaagagggaccaggtctggcttgctcactgttttgcacccaagaagtatttgctcagggaatgagggggttagattcctcctcattcattaccattcttactaggcagaggcctcattgggattaaaagacaggaatgtaactctctgcccactgatagggaatgtgtgtttgctctttgtatcccaggggtgtgatacctctttcctgtggtcactctgcacttaagatattttg

SEQ ID NO: 10504 - DNA, 572 bp, Homo sapiens
gggtttgaaaaacaaaccgaaaaagatgggctacataaagccagacttgattgacgttgacttaatcagagggtcaacatttgccaaagcaaaacctgaaattccatggacatctctgactcggaaggggcttgttcgagttgtattttttccattgttcagcaattggtggattcaggttacctctttaagaatctttgtttggctgttactactttatttcatgcaagttatagcaattgtcttatatttgatgatgcctattgtgaacataagtgaagtacttggacccttgtgccttatgctactcatgggaactgtccactgtcaaattgtgtctactcagataacaagaccatcaggaaacaatggaaatcgaagaagaagagtttcgctcttgttgcccaggctggagtgcaatggcgcaatctcggctcactgcaaccgatacctcctgagttcaagcgattctcctgcctcagcctctcaagtagctgggattacctgcgtatgccaccacacccagctaatttttttttttgaatttagtagagatgggatttcaccatgtt

SEQ ID NO: 10505 - DNA, 588 bp, Homo sapiens
ggcacgagctttcttaaaaccatctaaaataaaaccttcttattttagtagtgtcagtgaaaataagcagtgacatttcttagaattctcagctttcaaatctacatgctgtgatcctgtctgcctaccatctggacagtttttgtttactcttgggttcccccatggagtaaaagtctcaaatcatctagcattgtttctcttatcctcaggtgatccacccgcctcagcctcccagagggctgagattacaagtgtgagccactgcgcccagcctacagaggactattgagcatccaatgactatgctaggtatgcaggtatagtactaagtaacaggagttcctaatcctaagaggttctccatctagcagaagaaaaccaaacacttatgtggtaaatgaagagggctatggatagccattgaaaaaaggctgtggatggaggtaagagagtttggcatgttcatggacttacaaataggttgggtgttcctgagccaggatatgtgaggggagagtggtacaagtgggtattagaaaggtagttaggggccaggtgcggtggctcatgcatgtaatcccagca

SEQ ID NO: 10506 - DNA, 569 bp, Homo sapiens
tcgattcgcagaaaactagcaggttacattttataggctattgtagttttatttaccaaatgatattctctaaatcacttcgaccaataaatgtattctcctccttaaagcagagttgtatcaactctgtgggagcatttatgagctgtcagtccccacacttctagccagaatcacaataaggtctggctgggtgtggggtgctgcataggaaagggtctctggagaagcaagaagggcacaatcatggcccactgctcccctcttcttctcagtgctctttgccctctcctgctgcgtgcttcctcttcactccagtgctgatcctcctgctctctctggcagcttccacctcacccgcccctcttccacactataaccagtatggttggtgctggggcattgactcagcccccctgctttctgcatttgtaatagatattaatatgatttcctaaaacagaagattttgttgctttctttgaacttgtattgaaaaccatacagtctcactgttttgctataattcctatccacactataaatggaagaaaaaaattaatagcttc

SEQ ID NO: 10507 - DNA, 507 bp, Homo sapiens
ggcacgagacaataatgttctgaatccttcctgttcatgctgctttcttaattcatttctccatgtcatcaagaggttggataacttatttctaagctcaaggttaaaaatcatgtcacctttttttttttttcccccaccccaaccctaaaaaaattggcaatggagaaagaaccttaacccaaaaggggtggctaaaataaggcaccccaacccttgggtttttccaaaaaccccgttttaacttttctttttccctaacccctcccccaaacctaaccaaagggggaggggccttaattgcaaaaaaaaaccggggaaaaaaacctaatggctgaaaaccggaccttttatggccgggttaaacctaaccggggcccttttaagttggttttaacacctaactagggaaagaatttggcccttttttggcaaaaattcctggaaaaccctaccagtacctggtttggttcttaacggggggtataaaaccaaaccctaaaggtt

SEQ ID NO: 10508 - DNA, 388 bp, Homo sapiens
ggcacgaggatctttatgcatttcccactactcccttactgtcttttagcattcacagaaaaagccaacttgcttaaagaggaatcacttaaaaggtaggcatatctaagatgctcatagaagaggaagaatgggacatggccccatgcttatttttgtttacaacgtaacatggcatgagagagggcagagaaactaagttgctggggaaagttagaggaactgaaagtttgggaataggctgaccacatattatgccagtgaccagtatgacaggagatggggccctgctgccagtcatctccactgaataaagaataatgctcctctttcagggtaataaagtggggaaaaggaacgtcttctcaatgcaagaacataagctttt

SEQ ID NO: 10509 - DNA, 545 bp, Homo sapiens
ctataaatagaactgtcgtgaagatgcaatgagatgaattttagctcagagcctgccacctggtgacttacccatgttaggtattgtggttacagctctgctgtcaaaccacttctccaactctctttctagcctcagttcatttgtcaaagggtttggccccagtattttgctggatattcagaagtacgacctcacgtctgcagaatgccactgactttcacacgaggcctcccaggaagggatgccaggcctcagacactagctgttggatctcgggacttgccactccactttggcatttttcaggaccacacggcatacagttgatctaacagtctttcctgtcctcccagtggtcagctgcagcccagttctagggcttctgtgggagaagacaggagagggctgggagtcagggcacacagatgtgtcagatgaggctttgcttgcaaggagctcaccacttgggtggtggagaaggcccagaaggcactactacagtgctcccaaatcaggaaaagattgctaaatgcccgtatact

SEQ ID NO: 10510 - DNA, 501 bp, Homo sapiens
gtgggctgcctgcctgctctgagctctctcttgcacgctctctcttctctcccaggctctggctcatgcacatgcaacaggtgcgtctgtctatatgtctgggttcttgacttttgtggtctgtttgtcttttctacctctttctcttgcagtgatagactgagggggtaaaatcaagagaaaaaactctcaggaatcaaggaacataatcctgtggagggtaatccattacatgagcttctcctgttcttccactttcctgcctggctttcactccttcccctgctctgcccagcctttccctcccacccactcctccttctgcaaatgccctgaaggccagcccttaccccaacacccacttccccacctccttaggccccagatacatacatgcccacatgcacgcttacatgtttagagccatccttgtttccaaatatgacccttcgcttgagggcaactgcataggtacatctaactctggactggcatgcacat

SEQ ID NO: 10511 - DNA, 484 bp, Homo sapiens
gaggagccccagagtatctcaagggacttgcaggaactgcagaagaagctgtctctgctgatagactccttccagaataactcaaaggtcagtttccaatcactatgtataatggaaaatcccaatataacactagcataaacaagatagaaagttatttctttctccagtagaaggaatttggaggtaagtcaagaatctttctggcttaccgccctgccatgtctatgctgtgaccttcaaactccttgtctgagatgactgcaagagcatcagccattgtatccatctttcaggcaacaggatttgaggaggggggaagagagaagtgcaagccacctacaatttaaggaaacttctgggagtcgcacacaatacttccaattacatcccttaagccaacattgagtcatttgccactaatggcaaatgcaattctttagctggataaagaagtctgtgcaacagatatcatccttttttt

SEQ ID NO: 10512 - DNA, 414 bp, Homo sapiens
cgttgctgtcggggaaataagaagaatgaaagcctctctttctgtccgcagatcctgacttttccaaagtgccttaaaagaaatcagacaaatgccctgagtggtaacttctgtgttattttactcttaaaaccaaactctaccttttcttgttttttttttttttttttggggcccctccccttccgggcaagggggggggtccttttttaaacccagggaaaaaccggcccccccctttggtggacgaagggctctaagggcccccccgggccccagggcccacccgggccccatttggcccgggtggttgcccggccccggaaaaccccggggccccggttcctttacgggggatttaggggcggggggtccagggaccattccctttcccggggagttataccgcgaaag

SEQ ID NO: 10513 - DNA, 557 bp, Homo sapiens
gcttgacatatgtagtttccagaaattttgtcagtgtttcttagaacttgtttaaggtgccatgaaatatagcagtgaaatgtaaagtgttggaattgtttttctaggaaaactcattgtagatggagagcaaggtatctaataggatgtggaagttataaataaatacaagaagacatgaggcagcagagagaaagagaaagtagcagagagaaagtgaaagtagcagagagaaagtagccaagagaaagtgatggtccattcatttgtttatgtactcaacatcttccagttactgcctactatgtgccaggcaatatgcttgatgtttgggggatatgttggtgaatgacagagacacatccctgtcctaacggaggtttcaccctactgggacacacaggcaagaaattagtcccactgttcacgggatatttcttataatcagattgctcacatttcagtagatatacagagaatactagaagatgtttacatcttattattgctccttatatatcctctgttcttttaattctctagtaatcctatttcac

SEQ ID NO: 10514 - DNA, 234 bp, Homo sapiens
  misc_feature 234: n = A,T,C or G
acgacagaaggggttaatatcaaatcacccaccacataacaatgctttggtaaatgatggactgcatggacacaggtggttccttaagattaccatggagccaaaaaattcctagcacctagttgtgaatcacaacgcattactcatgtgtttgtggggacattgatgtaaataaatctactatgctgaccatcatagaaaaatattgcacataccattatggacgaggccttn

SEQ ID NO: 10515 - DNA, 543 bp, Homo sapiens
gtcccagaacttgtctcattgctgtcaaacatgacaccatagtccttctctggttcttcctggcaaagaccttctgaaaatcgttttgtgatgaaagttagcacaattcactgtgaaaggtcccctgggtaggtgggtcacaaccctgctcctcctcttgctctctgactacaagactttggtgaggggctccctgtcccagagtcttctttcttcgcttgttagcataatcacagtcctcactacaaagccagcctgtaaggggtaggtgagttagcaaacgtggaggcctctgcccagcacccagctcacagacggagctcaccctccagaagctagaatcatgtaatataaaaatacattattctggccaggcgcggtggctcatgcctgtaatcccagcactttgggaggccgaggcgggcggatcatgaggtcaggagatcaagaccatcctggctaccacggtgaaaccccgtctccactaaaaatacaaaaaattagctgggcatggtggcgggcacctgtagtcccagctactcg

SEQ ID NO: 10516 - DNA, 415 bp, Homo sapiens
cagttctgatagaatgcagaatttctccaatagaactaaacaacaaaagatggaaagcaatagtggaaaagtatgttaagctctacaaaccagagtacactatatttacaaaattttaaaatcctgaatgaatcaataaatttaggtaattttttttgtcagtgtcaaaatactagctgagaagagtttcatcataaatgttctgaactctacttttaaatatcattgattcccaaagaaatttaagctgataaaaagtaccagaatttcttaaaaagaaactcttcctgtccttttccttccttcattcagtcttttaaaggttatttgtccttctcttcactacgagaataaaggatgagaatttttacttttctactgcttgacttcaggaatattaaaaacattattaaaa

SEQ ID NO: 10517 - DNA, 373 bp, Homo sapiens
  misc_feature 78, 282: n = A,T,C or G
acggtccaatgaagagtggaaactttggtggtagcaggaacatggggggaccatatggtggaggaaactatggtccangaggcagtggaggaagtgggggttatggtgggaggagccgatactgagcttcttcctatttgccatgggcttcactgtataaataggagatgatgagagcccagaggtaacagaacagcttcaggttatcgaaataacaatgttaaggaaactcttatctcagtcatgcataaatatgcagtgatatggcagaagacaccagancagatgcagagagccattttgtgaatggattggattatttaataacattaccttactgtggaggaaggattgtaaaaaaaaaatgcctttg

SEQ ID NO: 10518 - DNA, 387 bp, Homo sapiens
cgttgctgtcggacatcgcaaacgtcgcaggacttccagcaagtcggaggcaggggctaggggtggaggccagggttccaaggaaaagggccgagggagttggggaggccgccaccaccaccaccacccactgcctgcagcaggcttcaaaaagcaacagcgcaagttccagtatgggaattattgcaaatactatgggtaccgcaatccttcctgtgaggatgggcgccttcgggtgttgaagcctgagtggtttcggggccgggacgtcctagatctgggctgcaatgtgggccatctgaccctgagcattgcctgcaagtggggcccgtcccgcatggtgggcctggatatcgattcccggctcatccattctgcccgccaaaa

SEQ ID NO: 10519 - DNA, 636 bp, Homo sapiens
tgggtttaccacctttctctaccccctactcacatcctggttatccaagagaacattatctcttttcttccaactgccttttcttcacctgtaatataaggaggctgaattctgatgtccatgccagcattcttatcctgtgagctgagcatcaggttttaagattttactcgttctctcatgcctgatacgggctgtgcacatgtagactattgactgacccagagaaaaaaccctgagggtcaggaagtgttacccaatgtggctcacttcgtaacaactcacaaggccaggccagcggagcccagaaagcaggcgctgatgccgagagtgatttgctcttctcactctactgctgctgcctggcctgtcggcctagagcggacagaactgtgtgctttgagccatccaggtccagttctctaaagacattgtgtggagatcagaggaagggagagactggtccctgcacttgtgggactagcctctcatacattaggatatctttcaaaaacacaaatataaaaggtactaaagcagctgcatgctggggagatagagcagatgaacaaacatgaatgggtaccatgcaggagagacgtcctttgcgtgggatgtggaagggacagaagctac

SEQ ID NO: 10520 - DNA, 578 bp, Homo sapiens
tctgagaactacatttacaagagaagatacgtgatatagttaaatgaaacagtgtgtgcaggctgaaagagttctagagcacatggtaagggtgggaaatgatgtgcaaacctcctgacagagataaagaaggcaattgtagcatttgtcctcaaaattcacttacaattcaaatgtttcaggggaatttccttatgttaatgtatctcttgtaatgtggctgaatgtacaaggaaatttggatttcctctacataaatttgataagaacattctatagctaacctgtgtttttgacaagttctataattaagctaattataataatagcttgatggtaatcactacaataatagctaacatttattgagtacttgctgtgtgtcagcactgtgttaaattactttaattgtgctctttcagggaaattaagagacttgcagaatgaaagagccacagcaggataaacaattgccagtctcccttgttggggactggctgactttataaagcaaacaaggcattctgtagtcactccaatgagtgggagattagaatgagaacggcattagaaagcac

SEQ ID NO: 10521 - DNA, 539 bp, Homo sapiens
ggcacgaggtagctaaggcagcttcaattaagactagggcattgttccaactaagggcagattttattctttaccttcctagctataaccttaggtatcctgaggatctaacaatgaaaatttttaaattatgaggaaaaacactaatgaatgtattcactattttgcattcaactatcctacatgaacatgaaaaaaagggaaatatatgtggcttatgtatataatggtatcattttaaatatcataaaactgggtttcttttcccttctctaaaaatagacctcaatagaaacctagtattaagtaacctagaatcaggaggtattccattactgctgattaagaagtgggaataggcaagtaaaatattaagtttcttttcaaactgcaaactatcttctaaaagatcctttctatatttgaagcataattttcactctgctctgtttaaacaatatttatcagtttaagttgtatttatttttagcagttcaattaaacaagaatcattactttggaaagcatattaattataa

SEQ ID NO: 10522 - DNA, 578 bp, Homo sapiens
gataacgtctggtttgattcacttattaaaagtagtccaaaggtccttcttggttgttggttgctccgcagttgctataattacaaggccattaatttggaaaccttttgtttctcatcttgctctgaggtcctcagctaacttacttaaccctgtagcttccttatccttttcctctctctctttcttgtttggtaatgttgtggggagactccatttacaaaaaggacagctaggattagctgaattgatgtaatgcttggaatgctgtaggaaaaacaaaaggtccaagtgggctttgaaattagtaacagattcatttttcttttgtctgcaggtctggtttagtgcaggtgggaaacactttaggaatggctttcaaaagcttatttatggccgggcatggtggctcacgcctgtaatcccagcactttgggaggctgaggtgggcggatcacgaggtcaggagatctagacaattctaggtaacatggtgaaaccccgtatctactaaaaatacaaaaaattagcttgggtgtggtggcaggcgcctgtagtcccagctactcgggaggctg

SEQ ID NO: 10523 - DNA, 79 bp, Homo sapiens
tgagtggacatgtgggttgtttctactttttggctagccagcttcctttttgtattccagacataccaggctacctttt

SEQ ID NO: 10524 - DNA, 561 bp, Homo sapiens
catgctctctacttcaactatagtaaaacgtccataaatgtttgtttagtaaatgaaagaaagagacacgctctgccccattttctctaagtgtcccaactctctgttccactaccatcttcaagtcttaggaatatgctattcattgtgccagaaatgtctcccagttgctcccaagactgtatttccctttctgtcttacaacgcagcaatagtcacctctttcatggcattttcttaaattacacctccttggtttggctttatagtcactcttaaaaacttgcacggtggctcatgcttgtaatcccagcactttgggaggtcgaggtgggcagatcacctgaggtcaggagttcgagaccagcctgaccaacatggagaaaccccatctctactaaaaatacaaaattagctgggcatggtggcgggcacctgtaatcccagccactcaggaggctgaggctggagaatcgctcgaacccgggaggaggaggttgtggtgagccaagatcgtgccattgcactccagcctgggcaacaagagtgaaactctgtccc

SEQ ID NO: 10525 - DNA, 618 bp, Homo sapiens
aggatggaaaaggaacttgagaaaactggaaggcatgggaagaccctgcttaccacacagggacaagtgtttaaaagaagtaacagttttaacagaggatgaagggaagtaaagaagggagagtgagagaacatggagctccaaccgcacatgctatttactgaataaatgtgctgttcagggtgattttagtccatcaacaaatattttgtgagccctactataggccaggcaaacagtaatgaaaaagcaggaagcatcctttccctcatggatcttacttctagtagttaaaacagacactgagcacaccattatatgtaattaattaatcgcaagtggataaatgctgtgaagaatatatacatagaagtgtaggaagataggctgggcgcagtggctcatgcctgtaatcccagcactttgggaggccgaggcgggcggatcacgaggtcaggagatggagaccatcctggctaacacggtgaaaccccatctctactaaaaatacagaaaaattagcttgggcatggtggagggcacctgtagtcccagctactcgggaggctgaggcaggagaatggtgtgaacccgggaggcagagcttgcagtgagctg

SEQ ID NO: 10526 - DNA, 584 bp, Homo sapiens
gttacagaatttgtgcggtacatttctacaacagccttatgcaatgaggttgaaagaatgttggaaaggcatgaacgctttaaacctgaaatgtttgcagaattgctacaagcagcaaatacaacagatgactataggaaatgtcctagtaactgtggccaaaaaataaaaattcgccgtgttttaatgaattgcccagagattgttacaattggtttagtctgggactccgagcattctgacttgaccgaagctgttgttcggaatctagcaacacatctttatcttcctgggcttttttatagagttactgatgaaaatgccaaaaatagtgaacttaaccttgttggtatgatctgctacaccagccaacattattgtgcctttgcatttcacaccaaaagttccaaatgggtattttttgatgatgcaaatgtgaaagagattggaactagatggaaagatgttgtctccaaatgcattcgatgccactttcagccactacttttgttttatgcaaacccagatggcacagcagtttctactgaggatgcactcaggcaggtcatcagctggtcacatta

SEQ ID NO: 10527 - DNA, 379 bp, Homo sapiens
ttcatctgtttgtttttacttttcaatatagtaactagaaaattttaaattgcgcatgtggttggcattatattcctactagatagcactactatagaatataagtctttaccctctttattatgcagccttcagatttttgaaagactgctatcgtttttccctcaaacatttttaaagggtagacttatcaggttcttttcaatgttatttatttaacataatttccttcaccattaaatgtgttctagcttttcagtctctacattgagctgaataccgtaagctgaagattagaattaagatgtaccatgccctgccaggtatcctggctaacacggtgaaacccccgtctctactaaaaatacaaaaaaaaatt

SEQ ID NO: 10528 - DNA, 378 bp, Homo sapiens
cgcctatccatggtcctagtattcttaaggataagcaaacagtcattttattcttcaaagaaaacagaacaattttaaacagactggttaatcaaaactagacaaagccccaactcctgcagttaggagtagatcaggacttctgtgggaaagagaccaggggaatctggcacagcttatagatattcaacaagcaaaaaatactgggatggaataaagtggcaggatggataaaagaaattgtattggggaaaaaaaactatgttttactttctttgttccctaactatgagctattcctacttcactatatatgtgaatgatggttctaaagagggaatcagatcattcatgtattcaacattcagcaaatatttg

SEQ ID NO: 10529 - DNA, 252 bp, Homo sapiens
tccgcctcccgggttcacgccattctcctgcctcagcctcccaagtagctgggactacaggcgcccgccactacgcccggctaattttttgtatttttagtagagacggggtttcaccgttttattcgggatggtctcgatctcctgacctcgtgatccgcccgcctcggcctcccaaagtgctgggattacaggcgtgagccaccgcgcccggccgatatcaaattttttaaatacaggaaaatgcaactc

SEQ ID NO: 10530 - DNA, 551 bp, Homo sapiens
agaactaacaattaaaggagaatgtgtattttctttcttcctttctttttttcaagaatcagggtctcactctgtcgcctaggatggagtgcagtagtatgatcatggttcactgcagcctcaacctcctgcctcaaacaatttttccatctcagcctcttgggtagcagggactacaggcgggtaccaccatgcccaactaatttgttagtgcgtttttttgtagagacagacagagtcttactatgtttccaggctagtcctgaattcctagcttcaaatgatctaaaggagaatgtttctacagcaggttagagacagtgtatctagtggggaaatccagctgttcacctcctcttttctgaaataaagtactactctattaattatgatatgaaatcatatatttgggtctactaaaaatttgttctctttattgaacttaatctccattttaggtttggtgaggctacttattaattttcaattgaacacttgtatttaaaagcatttctggctgggcatggtggctcacacctgtaatcccagca

SEQ ID NO: 10531 - DNA, 649 bp, Homo sapiens
caagatcctgtttctaaaagcaacaacaagaacaacaacaaatacctagaaagtgttagctaaaaatgttaacatggatggtgggctgaatggtattaaagtaaaattttgggcaatactgagcaaaaggcagggggccaagagtaaaagatgaactgggcagcccaaagagacatttaaggaagaaagggcctccatcctgggaagaggtgtcacagttgagcttcacggcccaagtcaatggctattacgtcctatatcatgagtgtactcaatcactagataaaaatgtcagaaaacccaagatggaacagctcaaaggacaaaatgcacctcaaaatattacaataagtatattatatatttttacatatttttactcaaaatatccagaactgtctagacattcatccttttctttcctagccttttaaataatatcaaagaaagactgtctcttctttcttttctcacttcttacctgtcttttgttcttcagatttacagggtgagaagaaagtgggagaagtaaaaacaattcagacaagaatcaaactggcctctaattagtcttaaggtaaaactggtaaaccaaataaagtatgtttagagatctgaaatccaacaccaaaacactataacacatgct

SEQ ID NO: 10532 - DNA, 427 bp, Homo sapiens
cagagttccaggatcctggattatgaggttcacaagagctgattgagctctctcatagcaacttacgtaaagggaaagctattgaatgactggtattgtttgagccctgggaactagtgcagacatctgtgtgctttcggatgtatggagttctttgtgtaatcagtccatttagcctagactgaaggaagatttttattcctctctctaaatttggcctctattatattagtctgagatttttttttccttataataatgactagcagtgtacagttcagactaagcaacgggaagatgtgtgtatgaaattgttagagaaatgaacaaccagagttacagtaaacagttgtcttatgttacagtgagtagaggtgattcctatgtggctgctcctaatgctggagcccctcagtctgattccaca

SEQ ID NO: 10533 - DNA, 569 bp, Homo sapiens
ccaaaggatgataccatgctttgtggctttccagatatccgccacccctaaccaataggacattggcaagtatctatgaaatcagattctcttcctgtcagtaagtgggggagttcaggaggccacttagatatatagtatgtcactgatcactggaacttcagcaagtcacagcctttctttaattgaatatgctttttcacaagtttctaagttaaataaaagaagtagaatgtcatatgaagctattcctaagaattttaggagactctagagaaaggtcagtttattctctagatcacattagattttcttttgaaggaagtatgccatttagctgatcattttaaatagtaatgaataattgtgtctggttaaataccaaggcccaagatctataaattaaattctttaaaaacaaaaataatctgattggtcagaagcagtggctcacgcctgtaatcccagcactttgggaggtcgaggcgggtggatcacctgaggtcaggagtttgagaccagcctggccaacatggtgaaaccccatctgtactaaaaatacaaaaatc

SEQ ID NO: 10534 - DNA, 435 bp, Homo sapiens
taatatttctgacttgagtgttattactctagcacactactcaagtgttttttaataaaaaaactactataccatttaaacttatcaactccatttgcatttgcattttttttgtcagtaaaatttttcaatttgctcacttcttttccttatggccaataaaagtggtgtgtggccagcctttaaaacagcaaaaacaatttataattcatgaaattacatatttctcagctgaattgaataccttatataatatcctatgaacttaaacaatggaaagtaaatcaatagcaatcccttctttctcacttttctgtgctttcccatgcactgcaccttctcttgtaaacattcagcctctgcatcatcacattaactctggttatctccaaaaatcattacattgtaatgattttattgtttcccatgtaaacc

SEQ ID NO: 10535 - DNA, 520 bp, Homo sapiens
gattataatcaagtgtaggcttcctgggttttgacatccttttagaacttgggtctggaattccagaaatgttaattgctgcttgtatttgttcttgtttgttttttagccagtatttgccctttctatccagccttatgaataatagcagtaaaatcacagtatcttggtcaggctgtattttttccttttttcttttttaagagacagtcatccaggccagagtgcagtttgatgatagcttgctgaagcttcccactcctgggctcaagttatccttccattttggcctcctgagtagctagaccataggtatgcatcaccacaccctgctaattttttaaatttttttctagagagagggtctcactgtgttgcccaggctggtctcaaactccaggctcaagcaatccttcagcctcggcctcccagagtgttgggattgcaggcgtgagccactgcacttggccaagttatttatttttaatctctcttgcccttctcccaaggcaggcttaag

SEQ ID NO: 10536 - DNA, 484 bp, Homo sapiens
gcacactttgtcatccagacataaccatcgttatcaaccggtgaacgtcagtcttacagaggttactcttaaaatttgcttcttctctcctctgctttcccaaattggcaaatattaccagaattgattcaattgcttgggccaaaacctgggactcatccacaatctttctctttatctcactccctgcatcagccacttatactgactctgcttggaaatacattggaatcttaccttgactactgtcattatggtccaggttatcatctatttcttgcttagattagccttctgaatattctctccacttccatttttgcctcatcagttgtattctctacacagtagccagagtgttttaaaaaacataatcccctttcccatcaaaattatttcagtgacttcccaccatatttagaattaaaaattcttggccaggtgcagtggctcacacctgtaatcccagtactttgggaagctg

SEQ ID NO: 10537 - DNA, 590 bp, Homo sapiens
ggaagaggatatggaaaagaattatcacatacccccactagacatcaaccatgtgtcttttttttctctttgagatggagtcttgctctgtcacctaggctggagtacagtggcacgatctcggctgactgcaacctccacctgtcaggttcaagtgattctcaattctcgtgcctcagcctcccaagtagctgggactacagacacccgccaccacacccatctaatttttctatttttagtagggacagggtttcgctgttttggccaggctggtctcgaactcctgatctcaagtgattcacctacctcggcctcccaaagtgatgggattacaggtgtgagccaccgtgcccggcccatctcctactaaatctataatcatctccctccactgttcccctttcttccctccaggtacaattgtaatgcatccctcccctgtccaaggccaattcctatgctcatgccttgcacacaatccctgcaccatctcagggacttcctccttttattatcacctctatctctaacctcatcaagcttcccctttctcctggattattcccatcagcatgcaaacattctga

SEQ ID NO: 10538 - DNA, 301 bp, Homo sapiens
atgactctgtatctaattattttataacatcaatatatccatgatatagtatcacataagacactgatacattggctattatatttgtaagccgaacttttaattttaaacagggcttgtactttgattatttatcaaagtatcaaattccacaaataaaatattcttttactttgaaatctctgtcttcactttatggctttttattatgaaactttatcttggtattactgatgtaccttgacttcattatactaaacaacactcatattagtacttcagtactggcaatacagctaag

SEQ ID NO: 10539 - DNA, 404 bp, Homo sapiens
aactgggggtgtctaatgtctgcaacataacaggactattgtaggaaattctgagactctataagcacttttaaatgtgaaaattaagaaggcatcccaaaaatgaatgggtccagtgctctgatttaagagtgtgtgacctgtcgtcattcatccagcagacccaagcaggcttagagaaagtaagacaggttagtattatattaagtttattttccctttattatgtatttccttaagaaattgcttaacttttctagcctcaaatcatctatcatgctcttcaagaattaaatgaaataatgcatcaatatagtacttcaaaaatcatagcacctgaaaatatagtggtcatgatcataaaaatgatctgggctgggcacggtggctcacacctgtaatcc

SEQ ID NO: 10540 - DNA, 523 bp, Homo sapiens
cccggccgccgccacgcagcacgagcgctccgagggacttttgaatggagacggagtcttgctctgtcgccaggctggagtgcaatggcccgatctcggctcattgcaacctccgcctcccgggttcaagtgattctcctgcctcagcctcccgagtagctgggacaacaggcataagccaccactctcggcaaattttgttgtatttttagtagagacagggtttcaccatattgtccaggctggtcttgaactcctgacctcatgatctgaccgccttggcctcccaaagtgctgggattacaggcgtgagccaccgcgcccggccaaggaatacttcttacaactgagtatcagaaagaaaatggccacccctgaagaactggtaggtttcttcttatcagataagaataactgcttcccttcctttacctcccttctttgactgcctcgaaaggtggagctccatttcatattctttacaactctagttgaagtgtggagtatattttcttcctccttc

SEQ ID NO: 10541 - DNA, 531 bp, Homo sapiens
atagctcatatttttgtgaccacctattgaccatctgttgactattttctatgacaacaaccaaattttttttttaagtcttaaatgtttaacttattttaaaatgcaacaaaatgaaacaaagaaacaaccctctaggaaagtgagcccaggagaagggagaagatgtgtattgtgctctaggcttagcttattcaaccatttagaacaatactaaagatttcaggccaggcacggtggctcacgcttgtgaccctggccctttgggaggccaaggtgggcggatcacttgaggtcaggagttcaagaccagcctggccaaaatggtgaaacccctgtctctactaaaattacgaaaataagcctggcgtggtggcacgtacctgtagtcccagctactcgggaggctgaggcaggagaattgcttgaacctgggagacggagggtgaagtgagctgagatctcaccattgcactccagcctggcaacagagcgagactctgtccaaaaaaaaaaaaaaaaaaaaaaaaa

SEQ ID NO: 10542 - DNA, 477 bp, Homo sapiens
gagcctggggactttccacacccccgtctcccgggttcaagcgattctcgtgcctcagcctcccaagtagctgggattacaggcatgcgccaccaccccggctaattttgtatttttagtagagacggggcttttccatgttggtcaggctggtcttgaactcccgacctcaggtaatccaccagcctcagccttctaaagtgctgggattacaggcgtgagccactgcacctggccgagtagttgatgactttttaaactgtggttgaggttccatgcacttctgacgcctctcccatgttggttcagcagctttgcgccccctgcctaactgcagacgtggcgggagatgagtccccgaacgcttggctgctcggtcaggcactgccacagcggccagcgtgctgcaggggttgctcagggagctcctccgtgttgtgaggccttattgctcacggcttacgtccagctcttctc

SEQ ID NO: 10543 - DNA, 524 bp, Homo sapiens
tataaaaagtctcacagaagaatgtaccccttcagcaagaagtaaaatgaacctaactgaatacaactcaggactctcaaccaagtgggaggtcagagactcaggagagagtcacctcagtcacctgtaaccatggaggagccgtgggggctcaagtggcctgtgctggtaccggggtgctgggtccccgcagtgttccagacgtccctgagcagtccactctgagtcctatctgggtcactgtgattttcatctaaggaaaaaattaaacttttagagaatggggcctggtgcggtggctcacgcctgtcatcccagcactctgggaggccgaggcgggcggatcacgaggtcaggagatcgagaccatcctggctaacacagtgaaaccccgtctctactaaaaatacaaaaaattagccgggagaggtggcaggcacctgtactcccagctattcgggaggctgaggcaggagaattgtgtgaacgcgggaggcggaccttgcagtgagccgagatcgcgc

SEQ ID NO: 10544 - DNA, 488 bp, Homo sapiens
ggaaactgggaagttcagtggagctgaggtacagactccactccaggaggaacaagggcacagaaagaagactgcagagcagggctgagcttgattgcaaaggttatactgcatgctgggaagtttacaattaatctgtagacaataagaaaccactggaggtgtggaagccaataaatcactcaatccgagaaaactggagcagagcaaggatggattactagtagggaggaacagatggcaagcaggccggttaggtgtctaatctgggcaagctgacaataaagcctggtagtgggaaatcaagaggacccagcatagggtaacaatctggagataaaattaatagactcaagaaacgcattagatgggaagtcaaggaagatgctgagatttctggtcaaggtttccacccggtcaataaagtgggttcttaaaccattaatgaagacagagatttaggaacagggagaagcagcaggaagagc

SEQ ID NO: 10545 - DNA, 433 bp, Homo sapiens
ctactcgggaggctgaggagaatcacttgaacccgggaggcggaggttgcagtgagctgagattgtgccactgcactctaacctgggtaacagagcaagactccgtctcaaaaaaacaaacaaacaaaaacaaaaataaatatacttgcaattcatggtggtttagaacgtttgcatcttatacttcattcttgtgatttatttagttgttttaaaaacaaactttgtgcttggtttctaaatgaagagataagagagaagatatcacctcctcaaacaacccatttcagctatgaatagctgctatttccaaaagatgaaaagctaaaatgactacattttctcttaaaatgttcatttttgaagttctagattttttttttggtcgggtgcggtggctcattcctgtaatcccagcactttgggaggctga

SEQ ID NO: 10546 - DNA, 364 bp, Homo sapiens
gaataaagatagttttattgcttcttttcccatctgtatgccttttatttcttcttcctgacttattgcactggctagcacgttcagtacaatgttgaataaaagtgatgagaacatacctacagggaagaggtcagaaagaaaaaaacaaacacaaagaagtggggagagcaaatgtttttgctttgttcctgatcttgtggacaaagtaatcattctttcactattaagaatgatttgccaggcgcggtggctcacacctgtaatcccagcactttggcaggcagaggtgggtggatcacgaggtcaggagttcaagaccagcctagccaagatggtgagaccctgtctctactaaaaatac

SEQ ID NO: 10547 - DNA, 480 bp, Homo sapiens
aggcgtgagccacagtgcctggccctagagtagtttctgtgttctttactgataaaagcaaatggctgtatttgaagctatactacccttccacataaaatggacccaaaaaataaagagttgtaaaacaggaagaaaagatcacagtattagagaacaagttcaggaagcccaatattcaaataggagttctagaaacagaacttggaggaaaactgagagaaggaattcagcaaaaaaaaaaattcaaggccgggcatggtggctcatgcctgtaatcccagcactttgggaggccgaggtgggcagatcataaggtcaggagatcgagaccatcctggctaacacggcgaaacccagtctctactaaaaatacaaaaaattacccgggcgtggtggcggggcctgtagtcccagctactcgggaggctgaggcaggagaatggcgtgaacccgggaggtggagcttgcagtgagccg

SEQ ID NO: 10548 - DNA, 85 bp, Homo sapiens
tctgtgcccactgttcgatttgttgggaatggggtgttaacatatgcaacaggggccgggcgcggtggcttcacgcctgtatccc

SEQ ID NO: 10549 - DNA, 605 bp, Homo sapiens
gcctcagaagcagcgctttgcggggaggagagggctgggtttcgaacccacaaggccttcaggacctgtgagggccccagcaggtagaggagcggaccatgaaccaggtaggagagagggaagaggggactgaaaaggtcgtcaggccatcagagaagttaatgaattcacctcaccctttcaagccaggagttctaaccaagagatcaagggcagaggcccctgggggcaggaaggtggggaccggaaagcagtgaggagatgacacagtgtcctctggaatctgggtaacaagctctgaagggccagagctaaaagggcatccctcctcctctgagactcttagggagtggccatggggtccaacagggtcttggactctggctcaggctggaggtttgaatgagcagggtaagaaaaagagagcctggctgcgcgcattggctcacgcctgtgatcccagcactctgggaggctggggtgggtggatcagctgaggtcaggagttcaagaccagcctgaccaacatggtgaaacccggtctctattaaatacaaaaaaaaattagccgggcatggtagcgcatgcctgtgatgccagctacc

SEQ ID NO: 10550 - DNA, 373 bp, Homo sapiens
cttaaattggtaaatggcatcagcgtatcaatgattacctccactcccatccccaaatccagtcagtcaggtatatattacctaccaaatataactcattatccttctagttttctgtgtccttgctgttactaaagaccaagttgggctgggcacggtggctcacacctataatccagctttgggaggctgaggtgggtggatcatgaggtcaggagatgaaggccagcctggctaacacagtgaaaccccatccctactaaaaatacaaaaaattagctgggcgtggtggcatgcacctgtagtcgcagctacttgggaggctgacgcaggagaatcacttgaacctgggaggtggaggttgcagtgagcc

SEQ ID NO: 10551 - DNA, 310 bp, Homo sapiens
agaactggggctgggttgcagcagggttggaaaagagagatagcggaaaaggtagccaggagcccaaacaggaagccaagccgagcagttaagactttatctccaagatagctgagcaatcaggacaggattttaaagacgagagtgacttgctaagactggcatttgaaagagctctggcttctggataatgcaggagaggggcaacactgaagaccagtttggggccatcacagttttccagggaaaagatgctggtgacttgaactgaaagtagtggaggagggtaaagagaaaacaaggaggttgt

SEQ ID NO: 10552 - DNA, 448 bp, Homo sapiens
aatttaaaataattgaaaagaactctgttgaaaccttgaagtagacttaacatgcttttcaaaagtatgtgtactctgactaagtgaaaaaacagttctggacaatgttttttcactctccaattaaaggtttatatttttaaaagcattaaagtacactttagaaagcaattatatttacctatcaattttagaaaatcaagtatttaaccaaataatttttggtttgtatccaaatgtgatcattctaaagtttgtacatactgtaaaatgaaagaactttgggaggtcgaggcaggtggatcacgaggtcaggagatcgagaccatcctggctaacatggtgaaaccctgtctctactaaaaatacaaaaaattatctgggcatggtgacatgcacctgtagtcccagctactcgggaggctgaggcaggaaaatggcgtgaacc

SEQ ID NO: 10553 - DNA, 563 bp, Homo sapiens
cagctactcgggaggctgagacaggggcctaggattaaataaggagttttggcaaaactaggctggaactccaaaacctgctacgtaagtactcacgagggttgctagttattagtattattactttgttgttatttttaggagtggagcaggttgtatttgtatcttacatcaccggctctggtcagatttcaattaatgtcacagataggatttaaacatttcttttattatttttaagattttaggccaggcacggtggctcccagcactttgggaggctgaggggggtggatcaccagaggtcaggggttcgagaccagcctggccaacatagtgaaactccgtctctactaaaaatacaaaaaaaattagctgggcatggtggcacgtgcctgtaaccccagctattcgggaggctgaggccaggagtttgagactagcctgggcaaatagtgagaacttgtctctaccaaaacaaaacaaaacaaccaacaacattaggccaggcgtggtggctcacacctgtaatcccagtactttggggggccgaggcaggcagt

SEQ ID NO: 10554 - DNA, 370 bp, Homo sapiens
ctcccaagtagctgggattacaggcacctgccaccatgcctgcctaattttttttgtatttttagtagagacagggtttcaccatgttggtcaggctggtctcgaactcctgacctcaagtgatctgcccacctcggcctcccaaagtgctgggattaaatgtgtgagccaccatgcctgttctcagtagattcttatattgtcttttcttctttaacctcttagaaagccaaaaggtaaaatttcagggtttagagagggtatggaaagtctagcttctcatgcccatctggatagagccagctgtttgtcctcattcaagaagatacttgccgggcacggtggctcacgcctgtaatcccagcacttt

SEQ ID NO: 10555 - DNA, 588 bp, Homo sapiens
atttacccttgtatttcccacagtacttcccatagtgagttacccttagtaaatactcagtaagtttaattgaatttaaattacctgtaagtcttaaaatgtgggattaaattaagaatatattgtcctggaaatacccaaatgtctattgatggatgaatggataaacaaaatgtggtatacacataatggaatattattcagccttaaaaaggaatgaaattctgacatgtgctacaatatgatgaacctggaagacattatatgtgaaataagccagacagaaaaggacaaatactatatgattccacttatatgaagtacctagagtagtgtaattcatagaaacagaaagtacaggttgacatccaaaatctgaaatgagaaatgctccaaaaactgaaactttttcaatgccgacacgatgctcaaagaaaatgctaattggagcatttcagattttggatttttggatttgggatgctcaactggcataatgtgaatattccaaactctgaaaaaatctgaagtctaaaacatttctggtctcaaggattttggataaaggatactcaatgtgcaacatgt

SEQ ID NO: 10556 - DNA, 530 bp, Homo sapiens
gatggaaggatgggtgaatgaatgagggaagtcaagcgatccccaagcgacttaggaatgtagttgctcccctgagaaaccaggcagctgccattctccgaagtgccccggcttgccaggcacagaaggtctcatggcacctcagagactggccctgcaagggacatggctgatggccaaatacagtcaccacctcgggctgcccaagctctgtcgagctggaatatggcagggctaacattacagaaaacaagttgacggcgtcagaaatgggagtttcatcaccctcagacgtgtttagccccaactgtgtgtcagtctctgctggactccagagcataaaggaagcaatcattgtccaaggaacagagtccctaaaggaggtagtggggtcaggggaaaaggaaggaaggaaagggacatttattaagaaatttattgtatgctgcagtttactctattatctcatttaatcttctgaacaatcctacaagactgaaggtgtaagagccatttctccacctggcagg

SEQ ID NO: 10557 - DNA, 535 bp, Homo sapiens
tctccatgagaaggtaagctccaggagtgcagggatttgatctttttgttcagttttgtcttaccagcacataaaacagtgcctggcctcatgatggtgacctccttatcttcagtcatctccttgatctcagcttagtccctcacaaactcccatgattttttttaaaggacatggatcttttactttttaaccttaaaaaaaatttactgccaatatctgtctagaccccttcctagtcttaaggaatctgctatctgagtgagctttggggtgacacaaaccctttctgctacaacggaagccaaattgagggatatccttactttctttgcccttaggtaaaatgagcaaggaaaggcacatgacctgggctcagacaataggtttcacctgcttgggcatatgactcttacagggggcaactaaaagacaaaggatgagattcatggttgtgttctaggccctagcagtatacagtggcagtgtcagcatcctgactgcgttgtttctgctactcagccttttctgcttt

SEQ ID NO: 10558 - DNA, 387 bp, Homo sapiens
gtatcctctctttttcatctccaccaacctctgtttactcctcttctctactacgtctaccagatatattaagttaataaaggcattcatatacttcagcaatgtttttggagtgggatgtgtgtgtgtgtgtgtgtgagagagagagagagagagagagaataagaacatgcatgctgaagtgctgaagcacctgcatcaacattactatcactacagtcatagtccaggaaagatgtctctgctctcaagcaagaaacaagaactaccatgatggtttgggaatgaggaaaaataagagggtgaaataagagagtgtatttgacattaagttgggaaattgcagaggaagcaacctaacattaggtgttaaaagacctggattct

SEQ ID NO: 10559 - DNA, 612 bp, Homo sapiens
tgatagcaaatataaatgtttatgagtaggggcatgggtggtgtagggttgattgatacacaaaggcctttgtgaggactcgtcttcatggaagtttaattattgcaagtacttttttaagaaagcatgacaggaacaataaaccttaaactcaacaatgattgctacctagaaaaatatgcttgaaatattgtctttttactatattagaaaagttgattcaatacaaaataagctcctaatgtagaagtgatcattaaaaaggtaaaaaagtgaggttggccgggcgtgttggctcacgcctgtaatcccagcactttgggaggccgaggcgggcggatcacgaggtcaggagatcgagaccatcctggctaacacggtgaaacccagtctctattaaacacacacacacacacacacacacacacacacacacacacaaagttagccgcgcgtggtggcgcgcgcctgtagtcccatctactcgggaggctgacgcaagagaatggcgtgaacccaggaggtggagcttgcagtgagctgagatcatgcccctgcaatacagcctgggcgacgagccagactccgtcccaaaaaaaaaaaaaaaaaaaa

SEQ ID NO: 10560 - DNA, 486 bp, Homo sapiens
cagagaagtggaaattacttcagattgtcatgaaaaagacaaatggagaaggtgggatgcatgaaaaatagacttttaaaattcctaaatcaatgccctcaagtcatctaaaatgattagaaacagtctatagttgtcttttatgaggagacaagaattatatgtgttccttgttttttttctccttctgcttgctgaagagttctggtttcacttgtcttgtccttttccttccctttgtcctgccttgagagactggttatattaagcttttgtgaggaatttcaggtgagagggaatggaggaagaaaaaagagacttagggacacatattcatacccatgtgtgtatgtgtatttatgtgatatatgtataattttatatatgtgataaatacatacacattacaaatgcaattatactatacttaatctttcatatgttttaaatccttcaagtttattatgaacatctccccatgtcaac

SEQ ID NO: 10561 - DNA, 552 bp, Homo sapiens
atcacaagcgtgtgccgtcattcccagctaatttttgtatttttagtagagatggggtttcaccatgttggctaggctggtctcgaactcctgacctcaagtgatccacccgccttggcctcctaaagtgctgggattacaggcggggggcaccatgcccaggccctggcttattatttttaaaaagtaggacttgagtttcccaccatgtgatcttcccacttccaaatttattattggagagagagataaagcagaatgcatagaagttcctttgcaagctaacctggcagtacggcatgggggaggaggaaagggatgaagggagaagtgccacaagtggtttttaggtaacttagcagtttgatttccaagctgtttcagggctgctagttttgtgtgtgcggctgctggatggactgttttgcatatcactgatttatatctctacagaacaaatcttgtgtttcttttggagatccacgagcaactggcatttgaaaaaatcaggcattattgactttaaaacacagtaatgttttctatatctct

SEQ ID NO: 10562 - DNA, 513 bp, Homo sapiens
gacagaagggatcctactcaggtgaaaaataagaattccagatacctcaagcatctggattgtgatagaatacctagacaaagcatcccttcttaggccgacctcatcctcgcttctcctcaacccctgaaaataaaaaacacatctgatagaaaaataatttccttgattatgaacatggataaagaaaaacttaaaactaaaaggatttgataaaaataattataaaagttcaacagaataagaatatttcaaacacaggcatgcatgccttacacacacgtatttctaaaaattatagggttttaggctgggcatggtggctcatgcctgtaatcccagcactttggaaggccgaggtgggtggatcacttgaggccagagaccagcctggccaacatgacgaaaccccatctctactaaaaatataaaaaagttagctgggtgtagtgtcacctgcctgtaatcccagctacttgggaggctgaggcgtgagaatcacttgaacctgtg

SEQ ID NO: 10563 - DNA, 662 bp, Homo sapiens
gagccaactcttagggcacattaatcttgaacttctggcctccaggattattaagaaaaattttctgttgtttaagccactcaggctgtggcattctgttctggaagcctgagctgactaaagcagaatcatgcactcactaaagaaacttctgaaaaatgcacataaggaagaagaactgaaatcaggaataaaatgatgagtaaagttacagtgatgcatatcagggaagatcaaaataagtaatgactgcacaaaacaatattaaatataaggattggattgagagaatatatgcaactgtaatagaattattgagcaacaataatatgcacatttgaaaacggtgataaagaatacaaaagatctattatttggaaagaagtagagatatgactcttttgtctttaacttaagaaagcacataaggccccgcgtggtggctaacgcctgtaatcccagcactttgggaggccgaggcgggtggatcatgaggtcaggagatagagaccatcctggctaacacggtgaaaccccatctctactaaaaaaataaaaaaaaaattagccgggcatggtggcgggcgcctgtagtcccacctactcgggaggctgaggctgaggcaggagaatgacatgaacccgggaggctgagcttgcag

SEQ ID NO: 10564 - DNA, 532 bp, Homo sapiens
ctctaggtcaagatttatcttctctaaggtaaaactcacaagggactgtcacattgttgggtgtgtataaatgaattttaaaaatcgtaataggccaggagatggcaccttttcctttaacataagctaaaaggatattttgtgagaactggaaattaaattagggccagccatggtaatgagctgtcaataagccagtcaactataacagagttaaataatatagtatttaagaactggagctggagtcttcattttctctatctttgcacctttacctaaacaaatacatacaccagtaatcttaataatcactttcagggaactgatgatttaaagttattgaatcaaggccaggcgcggtggctcacgcctgtaatcccagcactttgggaggtcgaggcaggtggatcggatcacctgaggtcaggagtttgagaccagccaggccaatgtgatgaaaccttgtctctactaaaaatacaaaaattagccaggcattggtggtgcacacctgaagtcccagctactc

SEQ ID NO: 10565 - DNA, 313 bp, Homo sapiens
atttttagtttactaacaggaagtaatttctttcccttaaaattcccttattttaaaagaaagattgtgtataacatatgaatcctgtcatttttgtcttgttggtcaggaatcgaaaataaaatttaacaggttttaacaagtgtgattgagatttgtttcctaatcactctacatgttttttctcttttgcatatatgtcattatttataagcaacttcaaatagaacagaaggtagggcataaattatcaacaactttagtccaaaaagatgttaatgaaaaaagtaacaatatttgtggtataatatat

SEQ ID NO: 10566 - DNA, 186 bp, Homo sapiens
gaagtatatgaggaaaactaatggaagataagggctatattaataaggtttgtttgtgcagacaaacaatcagtgtcaattctccatttccattgataagaatgttttctttctggttatgggagagcacctttctcatgggaaatgtatgtcaggccaggtgtggtggctcacacctgtaatccc

SEQ ID NO: 10567 - DNA, 480 bp, Homo sapiens
actgcttgagcccaggaggtcaaggctgcagtaagccttattcaagccactgcactccagcctgagtgacagagtgagaccctgtctcaagtaataataataatttatcctcaaagaccctacagtctagcaagggagagaagactattcacaaatattccttttgcaagtttaaaagtgctcaaaatcacaaggaagacataactaaaatgctatgatggctcaggaaaggaagaacttgcctctataagaatatgtaatcatactaattatgttttcataaatttagtgaggcatcatagcatagttataagaaggttaggcatggtggctcgtgcctgtaatcccagcactttgggaggctgagatgggaggatcacttgagcccaggagttggagacaagctggggcaacatagtgagattcccatctctacaaaaaacaaacaaaaaaagtagctaggtgtggtggcatgcacct

SEQ ID NO: 10568 - DNA, 608 bp, Homo sapiens
ctgggtgcagtggcaggcgcctgtagttccagctactccggaggctgaggcaggagaatgatgtgaacccggagggcagagcttgcagtgagccgagatcatgccactgcactccagcctgggcgacagagcaagactccatctcaaaacaaaaaacaaaacaaaacaaaaaacaaaaacaaacaaacaaaaaacaacaaacaaaaaacccttctatacatgccattatttacattggtgcatactttttcccaaaaacaaaatccttacagtagaattttgggtcaaatatgtgaaagtaatttagagctttgctatacctttcaaactgaactgacttatactcctacttgtgcactaatgcttttgtaacactatgcttttataaaaagtaataggagggccaggcatggtggctcacacctgtaatcccagcactttgggaggccaaggtgggcagatcatttgaggccaggagttcaaaactaacctagtcaacatgatgataccccgtctctacaaaaatacaaaaatcagccaggcatgggtggtgcacacctgtaatcccagtcactagggaggctgaggtgggagaatctcttgaaccc

SEQ ID NO: 10569 - DNA, 413 bp, Homo sapiens
acctgagtctgcaggttgagtgagaagagagttgttgacagctgagtaggctaagagtgtggctacagtcccaggcatctcagctgcaggtatagggagtatagaagtgacactgggagaccaggtggcctggatctgactggaggaggtgctgaatgccaagctaaagagcctgagtgttattctacaggcaatgacagcccaagaaacaggatatcacaaaggttaagaacaaggattctgggtttgaatcttggctccatctcttaagagctgtgtggcctttggcaaggtacccaagctctctatgcttatattttctcacctgtaaaatcagttgtagtgagaattacatgagtgttgatatgcaaagtgcttagaacagtgcctggcacatagtgacatacataagt

SEQ ID NO: 10570 - DNA, 571 bp, Homo sapiens
ttatcaaacgtatacttaattctttgaatgtgttagtatgtgttcaaagtacaccttaattttatatatacatatatttaaattacataaaataaataagccactaaaaatttttaaagattttcttatatttcctttcagtatttttatgtgcatgcatctgtacttggtaatattgttgaattcatgtttgcattgacaaagcctctccccttgcccaaactctagtcaggatcctctaagcctcctctcagccccagccttcagtgttcatcctagtctggcccacatctctcaggtttagtaagaaacttgcaaagaatcccctactctcagtactgatcacctttgatatctgatcaaatttgttatctcccaccaccctccagatgatttctgatcagtctggcctgccttcagtaagaatcctgttcgatctgtttaacccaaatcccctttgcccctgatgtttcctcttagtatccccagttgagccaattttcaaccattaaaaaaatcttggacaaaattaagttcagataggttccagagtgcttatgttcagttcttg

SEQ ID NO: 10571 - DNA, 300 bp, Homo sapiens
ctaatgtctgttcatagcataccgttccatcaccctgtttcacagcactggctgaagtataggacaatggactcaggttgtctccctcaggggcattcaaactgacatttaaaggcaaaacaaaccttcgagggaaagatttggctgctgaattatggacctgtttgggaagaagaaagagatgaaaattgtcattcatatggtaacagtatgtcccaataatttagatccagtcaacatcattggcattcctaaatatttaaataaatgataatttccattcattcatctacttaatat

SEQ ID NO: 10572 - DNA, 627 bp, Homo sapiens
tgcgcctgtagtcccagctacttgggagactgaggtgggaggatcccatgaactcaggaggtcaaagctgcagtgagctatgattaaaacctgagctccagtctgggtgacagagcgagacctgtctggaaaaaaacaaaacaaaacagaaaagaaagtgttgagtgaaaacgtcttcaggtgcctttcaccttgagagagggcacgaggctgagggcgccttcccgtcctccgaagcctccatccctcccctggcattttgcctttcacactgtaatttctttcttgagaatcagccgaccgaaattaagtctcccaaattcctgagtaagccgaaaagctatttttcttgcaaatcttagatgaacataatttaatataaggcataaactaatgcaataaagaccatatattacagcagtggcacaattaaaaagcaaaagccgacggaagagactgacagacagcgtgttaaccacagggaaaataaaatagaaataagaggtaggttatattctgtgcataaataactttaaagaggaacaataaatgacttctataacttttaatatatgtgttggagattatttaattgcagtgaagtaagaagtgataaattgagctgaa

SEQ ID NO: 10573 - DNA, 54 bp, Homo sapiens
ggcacgaggagagagagagagagagagagagagagagagagagagagagagaga

SEQ ID NO: 10574 - DNA, 211 bp, Homo sapiens
aactagcacatcacagccccagagtgggctccaaaccggtagaccagaaagcctgcaggataatttcccccttaagatgggtagatttactgttccacagccaacaggtggatacgcgtaactagaacaatctgtcatgggactaagtggaagaatccatcagcactacacagcatcttttcttcaaatacaactgtaaaatctccactga

SEQ ID NO: 10575 - DNA, 322 bp, Homo sapiens
gagagggaggtgggtgctggtgtcttctgagcctcactttgccctttggcaggctcctgggaagcagccacagaaatgaagcctgttccccaggagccccagggatggggacagaccccgtcctccctttgaggagctcccaggttagaggagaaggcagctctgtggacagacaaggattcggtcgggggcaccagggctgtgatcaggaggtgccggagaatcggggattggaagcagagagattcttggcagttgaagcaaaagtcggatctttggtttcagatgttaaaagcaacatgcattgcttgtttctggttct

SEQ ID NO: 10576 - DNA, 621 bp, Homo sapiens
ggcacgaggaggagtagagttcattggagtcttaaactctctgatatcacttaaagctggagtttattttaaaacaaatgaagcatgggccacctcatgatgcagtggctcctctctggttgaggagagggaaaattggaaaaactggtcgagtaattatcaataattttttttaaaaagaggatcccaaactgtaaaagattgaaataatctttctcaggattttttaaatgtctaagattatgatgtcatatctcccacttaccttataagtaaaaaggttaatatcaagtaacttattagctcttaaagtaaaattgaacttattaaaagctatctatgatttaatagatttaataaaattccttcacgacctggtacccttgtgaaactgtaaaatatatcatatggggggagttttttaactcttattttttgaaaatttactgtagcttctatttcgtgaataagaatgttttgattttgatcatacaaataacttttgtagatttttgtttacttttgggggggttcccttagaagacattaaaaaaaaatactgccttggtctgtgcaggctgctgtaatgaaatactatgaacttggcagcttataaacaac

SEQ ID NO: 10577 - DNA, 384 bp, Homo sapiens
ggcccgggcgagagagagagagagagagagagagagagagagagagagagagagagagagagagagagagagagagagagagagagagagagagagagagagagagagagagagagagagagagagagagagagagagagagagagagagagagagagagagagagagagagagagagagagagagagagagcgagagagcgcgccccccccctctttgtttttttgggaggggggagggaaagaacacacactcacgcgcccgtttttttttttttccgcactgcacgaaggagagacccgcgtgtcttttttttatactctctatatatgtacacgcagagagagagacacacacatttatttctcgcactctccctcccct

SEQ ID NO: 10578 - DNA, 524 bp, Homo sapiens
ggcacgagcttgagtgcaggagttcaagaccagtctaggcaacatagtgagaccctgcctgtaaaaaaaaataataaaaatagttggatatggtggcatgtgtctgtagtcccagccactctggaggctaaggtgggaggatcagtagagcccaggaggtcaaggctgcagtgggccatgatcatgtcactgctctccaacctgggcgacatccagaccctgtctcaaagaaaaaagcagaagaaaaatgttcagacaaggttttgtaaaggtttgtagcatttatatttctacaagtatcaaagcttaaaattacactgaacttttggaataccttgtatctccataaaatgccctctttttaaaagtagttacccgcagagctgtgctctatatgctttgattaccgcagtttctttaaaggaagattttgaagagcagtgttaattaacatgtaataaaaggaattggaccctaattatagaaggtgatatgaacagctgttttatcatcctacatgctac

SEQ ID NO: 10579 - DNA, 436 bp, Homo sapiens
ggcacgaggagagaactagtctcgagactagttctctcctagtctcgagagcagttttttttttttttttttaaccaaaaaactggccgggttttttaattaacctttcccttaaataaaaaaaggggcttaaaaaataaacttgtttaaaaaccccttttttttacaactatggcccctttttacttttacattcagcttttcgaaaaaagctttcagcattattatttttggaactattaaagatttttccttcttccctggcccggggggttaacccgggggggctttaaacccatttccctttttttttttcccttttttcccaacccaaagctggggaaaaccccggggaaaaaaaccgaattggtttcccagaaaaaaggggcaaaaaagggttttttttttaaaaaaaaacctggcctttggggggcct

SEQ ID NO: 10580 - DNA, 640 bp, Homo sapiens
ggcacgaggcgggacgcgacaaagtcatggaccgcaacccctcgccgccgccgccgggtcgcgacaaggaggaggaggaggaggtggccggtggagactgcatagggagcacggtctacagcaaacactggctcttcggcgtcctcagcggactcatccagattgttagccctgaaaacaccaaatctagctcagatgatgaggagcagctgacggagcttgatgaagaaatggagaatgaaatttgcagagtatgggatatgtcaatggatgaggacgtggctttatttctccaagaatttaatgctcctgatatattcatgggagtactggccaagtccaagtgtcctcgattaagagaaatctgtgtgggaattttacgtaatatggcctgtttccaggagatatgtgtgtccatcagcagtgataaaaatcttgggcaggtgttattgcactgtttgtatgattcagacccacctactctgctggaaacaagcaggttgttgcttacttgcctttcccaagcagaagtggccagtgtttgggttgaaaggatccaggaacatccagctatttatgatagcatttgcttcattatgtcaagttcaacaaatgttgacttgctggtgaaggtggggga

SEQ ID NO: 10581 - DNA, 575 bp, Homo sapiens
gaaagtagaatgctgtgcatcgctggagtttcagctcatgtcattatttatagattcagcaagcaggaagtaatcacagaagtcattccgatgcttgaagttcgattattatatgagataaatgatgtggaaactccggagggtgagcagccaccacctttgccaacacccgtgggagggtccaaccctcagcccatccctcctcagtctcatccatctaccagtagcagttcatctgatgggcttcgtgataatgtaccttgtttaaaagttaaaaactcaccacttaaacagtctccaggttatcaaacagaactagttattcagttggtttgggtgggtggagaaccaccacaacaaataaccagcctggcagtcaattcttcctatggactggtggtttttggcaattgcaatggcattgctatggttgactacctccagaaagcagtgctgctcaacctgggcactattgaattatatggctctaatgatccttatcggagagaaccccgatctcctcgtaaatctcgacagccttcaggagccggtctgtgtgatattagtgaagggac

SEQ ID NO: 10582 - DNA, 557 bp, Homo sapiens
ggcacgagggctggtttgtctggggagacagacaggatgttgtggagctggggtggaacctggtatggagggattaactcagtcatggcattctccgaccaaaaccacacctgtgtctctggcaggctggctggccttgctcccatccctagaactgctgcctctccctggatattccagctcaattagtgccacatatgggggaaacgacacatcccagtgggatttccaacactccccctccccatgcaacaaagcaacttacttctggagttctctcccaaggagaggacacagacacagttgtttgctgtgttatatgttagctccgaacaatggttctcatttggctaagcatcaaaatcacctagggagtcggtgcaaaacaaaatatcccagtcccctcccctgaaacactgactcaggaggtttggttgggggccaggagtctgttcctaaatattccaggtagttctggtgcaggtaagtggccctgagacagtatgttgggaaatgctgacgtaaaggtatcagggccgggcgctgtggctcatgac

SEQ ID NO: 10583 - DNA, 508 bp, Homo sapiens
gatagaggcaggtggatcccttgagcttaggaatttgagactaggctgggcaacatagtgagacctcatctctaaaattaaaaaaataaaagccaccagaaaaaaacctaaaaacatgccaagtgacatcagtctttgatgaaaatggcagcagaagagtgatgccatgggtgggggtgggaaatgctatttcagcagagagggagctgtcacggaagacaccatgtggctgggcgcggtggctcacacctgtaatcccaacacgttgggaggccaaggtgggcagatcacttgaggtcaggagttcaagaccagcctggccaacatggcaaaaccccatctctactaaaatccaaaaattagtcgggtatggcagtgcacgcctgtggtcccagatactcagaaggctgaggcaggagaatcatttgaacctgggaagtggaggttgcagtgagccaagatcgtgtcactgcactctagcctaggtgatacagcgagactcagtctc

SEQ ID NO: 10584 - DNA, 375 bp, Homo sapiens
cgttgctgtcgagagaagcagcaccgcatggtgtggcaggagaaggaggacatgcacaagcaattggttgaagcttcagagacattgaaatcccaagccaaagaactgaaagatgcccatcagcagcaaaagctggccctgcaggagttcttggagctcaatgagctcatggcagagctctactcccagaagcagaaggtgtgggacaaggaggaggagatggaagtagccatgcagaaagctgacatgatgtggcaggagatctgaagatccaagaagctcagaaagaggatgctgtttagccagatgcggtggctcacgcctgtaatcccagcactttgggaggtcgaggcgggtggatggcctgaggtcagg

SEQ ID NO: 10585 - DNA, 499 bp, Homo sapiens
aggaaacaagttctgctagtgatgctttcatttgatcaggggagagttagaagccagccacccaattagtgacttgcacaaaacccagtgaattaagtacacttgacaaataccaaatgacacatttttgtgccagaccagagcaaggagaaggctgttctgacccaacagaaagggctccccagggcagtgttttcctaacttccctgtgaatgggaattgcctgggacattgttaaaacacagcttcccagacccctctcttggggctcttgatttagtgcttctgggatgggcccaggaatttgtatttttagcaagcatctcaggtgattcttacaagaaattctgggaatgcttgctctaaaaaaagcccttcctgctgggtgtggtggctcacgtctgtaatcccagcactttgggaggctgaggcaggtggatcacctaaggtcgggagttggagaccagcctgaccaacatggagaaactccgtctctact

SEQ ID NO: 10586 - DNA, 568 bp, Homo sapiens
ggcaccagatcacatgtatgatttatttttaatatttgataggaactaggtttcagtgaaatgatttgaaagcatagcaggatgtggctttttaaatttatgaaactttcgaacagtagcaactgaaatttgtcacttttctgttacgcagagaatcagaccttttgataatatttgggagggtaaaagaaatatgccaaatatgaaacttttttgtcagcactacatacatcttttttttgcggggggcgggggggacagagtctcactgtgtcactcagactggagtacagtgatgcgatctcggctcactgcaacctccgcctcctgggttcaagcgattctcctgcttcagcctcctgagtagctgggattacaggtgcacaccaccacgcccggctaatttttgtatttttagtagagatggggtttcaccatgttggtcaggctggtcttgaactcctgacctcgttcctgccttagcctcctaaagtgccgggattacaggcgtgaaccaccgcacctggccagtactacatccattttattgaatgattttgaatgactt

SEQ ID NO: 10587 - DNA, 306 bp, Homo sapiens
acagacagcactgagatatacagaaagtaagaactttcaggctgggcgcggtggctcacgcctgtaatcccagcactttgggaggctgaggcgggtggatcacgaggtcaggagatcgagaccatcctggctaacacagtgaaaccccgtctctactaaaaatacaaaaattagccaggtgtggtggcgggcacctgtagtcccagctactcaggaggctgaggcaggagaatggcgtgaacctggaaggcggagcttgcagtgagccaagatcgcgccactgcactccagcctgggcgacagagc

SEQ ID NO: 10588 - DNA, 221 bp, Homo sapiens
ccgctgccgtcgcgcgccttggtttttctgtaccttttttttttttttttttaaaactcccggcaaaaacacccccccccttaaccccaaaaaaactaaattacaaacggggcccctttgccccaaaatgggcctaaaccctaaaaatggaaaaattttttttttaaaaaccccccccccgggaaaaaacgggtggcccttttttttgtaaaaggggttta

SEQ ID NO: 10589 - DNA, 362 bp, Homo sapiens
  misc_feature 101, 102, 103, 104, 106, 115, 118: n = A,T,C or G
ggattcgagtgattctcctgccttagcctccagagtagctgggattacaggtgtgtgccaccacgcctggataattttgtatttttagtaaagatgggggnnnntncatgatggnccngggggggtgaaactcctgtcctcacgtgttctgtgcgcctggcccttcctaagtgctgggagaactcccctttaagtttgctacctagtttggacttccagtgccccctgggggggggggataatttgtgcctttttagaacagacggattttttccttttttttcacgaaagtgtggttctcctaaccttgagcgattcgcccgggtcggtttcctctttttcttggcctccccgccctcgcg

SEQ ID NO: 10590 - DNA, 110 bp, Homo sapiens
gtgaagttgagctcctttttctttttaatctccatggaacaatttgtataatttcttgatttaaattgctaaactgagctcttcattcaaaatactaaacaataatttct

SEQ ID NO: 10591 - DNA, 392 bp, Homo sapiens
ggcacgagagttggaccagaactccctcctggacacatcccaattcaagtgatccgcaaagaggtggattctaaacctgtttcccagaagcccccacctccctctgagaaggtagaggtgaaagttccccctgctccagttccttgtcctcctcccagccctggcccttctgctgtcccctcttcccccaagagtgtggctacagaagagagggcagcccccagcactgcccctgcagaagctacacctccaaaaccaggagaagccaaggctcccccaaaacatccaggagtgctgaaagtggaagccatcctggagaaggtgcaggggctggagcaggctgtagacaactttgaaggcaagaagactgacaaaaagtacctgatgatcga

SEQ ID NO: 10592 - DNA, 534 bp, Homo sapiens
cggcagtggtgctgggagtgtcgtggacgccgtgccgttactcgtagtcaggcggcggcgcaggcggcggcggcggcatagcgcacagcgcgccttagcagcagcagcagcagcagcagcatcggaggtacccccgccgtcgcagcccccgcgctggtgcagccaccctcgctccctctgctcttcctcccttcgctcgcaccatggctgatcagctgaccgaagaacagattgctgaattcaaggaagccttctccctatttgataaagatggcgatggcaccatcacaacaaaggaacttggaactgtcatgaggtcactgggtcagaacccaacagaagctgaattgcaggatatgatcaatgaagtggatgctgatggtaatggcaccattgacttccccgaatttttgactatgatggctagaaaaatgaaagatacagatagtgaagaagaaatccgtgaggcattccgagtctttgacaaggatggcaatggttatatcagtgcagcagaactacgtcacgtcatga

SEQ ID NO: 10593 - DNA, 354 bp, Homo sapiens
ttgcttatactctcactggaaccaatgcatggaacaggtggtgcagacctccagctgataatgcattgaagaacaggcatcatatgctaaatgagtgaagctagagatctattcgacaccataaggacctgcatgaaacaaaatagcatcaccacttgcatacgtaacatgatcaacccacaggcctatatgttggaagtgctgtccggggctgttactgtctcttctggttataaagcagacatgtggccatcttttccgcagggttagagtgggctcctttctttttggaatccttttcttctcctttggtagcagctccctgcctccagggcttccgccaccagcgtctct

SEQ ID NO: 10594 - DNA, 568 bp, Homo sapiens
attctttaagattctcactttcataaatagtgttgtagtgaaattaattgattcatgaggaatattttccacatgtttttctgcattgtgggaacatgttcatatagcacattattaagactgctggccaggcgcggtggctcacgcctgtaatcccagcaccctggaaggccaaagcaagtggatcactttaggtcaggaattcaagaccagcctggccaacatggtgaaaccccacctctactaaaaatacaaaaattagccgggggtggtgactcatgtacctgtaattccagctacttgggaggctgagacatgataatcacttgtacccagggagcggaggttgcagtgagctgagatcctgtcactgtactctagcctgggcaacagagtgagactctatctccaaaaaaataaaaacaatttttgtgacaattgctttggatccaagtttatgtttgctctttttttgtttttgttttgttttttgttttgagacaggttcttactttgtcgccctggctgcagtgcagtgatgccatcatggttcactgtagcctctacc

SEQ ID NO: 10595 - DNA, 95 bp, Homo sapiens
gacccagaattatctgggtcaataaaaataattggcctattcttctataattgttggtgctaaaatgaccaaataaattagttcacttcagtaac

SEQ ID NO: 10596 - DNA, 203 bp, Homo sapiens
  misc_feature 203: n = A,T,C or G
gcttcacgacttatggcatgtcttatttaaaaaaaaaaaaggactaggggcaaataacattttgagggggtatttaattaaaaatccatgcagggacagctgagttcgggttttatgttgggctaatacttcctaaaattatttagaacaggactggctagaaaaactttctgcgatgatgcaagggttctatgtctatgctn

SEQ ID NO: 10597 - DNA, 354 bp, Homo sapiens
aaccagaaccatatagtgagtgggatctgggaaagtagttcccagcttaacagttaacacaccacgcaccaccagtacaatttgtgtttttgttctggtggttaccattatattaatacctttatatggtattctaatttccttctcttttggggtggaggggtattatgtgttggttttttactctgagcaatattgaaatgaactagaaacctcctttcctcatctcctttttccctagcattttactctcagtttataacaagacaatcaagaaacatattctactatttatatgctctcaccaccctccctctcctcattttgataattggattggatctatattatcaa

SEQ ID NO: 10598 - DNA, 156 bp, Homo sapiens
cgtccgctgtcgaaaatgaaaagacaagccatagactgggagaaataatttgcaaaacatacatcttacagagcacttgtgtccagaatgtataaagaactctttttatttgcgtgtgtgtgtgtgtgtgtgtgtgtgtgtgtgtgtgtgtgtgtg

SEQ ID NO: 10599 - DNA, 453 bp, Homo sapiens
aattatgtaacatttctgtacacagtacatcagtggacttaattagggtgcctcctacctcttacacaaatgaaatgctttgtgacaggtattcttcctcttgaaaggcttttttaagaaaaaaaataatttttaactgtatactagataatctgagattgcaaaaggagcaccagataagggaggtgttaccatgctgtgcagcagaagaaggcttataattaagtttactacactttaatgttggggttattctgagctcaagatactcatagacctttgtctgatttccagggtcttatatctcacttcaccctttgtgtttagttactgaaagtttagggatgaagatagatttacagtttatttttacaagaaacttcatactgtatgctttgcttccagtctcttgaagattatttgaattcatctgtgggtttatgcccatacaca

SEQ ID NO: 10600 - DNA, 502 bp, Homo sapiens
cagtgttctaacaagtactttaatggatagggtttgctgtctaaaacatgaagaggtaactcaacattcctttcagtgccacaggttaagaacttggagaactggctttcctgaggagcttctagctccagaggttgtacatgctcatggcagcaacaacccattgaccacttcttcaaagtagttcactgccaaggagaatcaaaattcaatttggattcccaatactcagcctaccttcaatttcccatcaagcctatattcttagcctttagtttaagtgtgggttatcttaacagctcacttggcctcagttcaaagtgaaatttcctgagtccttgaaagaagtagaaacccaatcaatgagtttttctcttggtctctactttgtgagaaggatacatttctagaaatttcaataccttccaagtgtcagaaggaaatataatgtagctgttgaaatttgcgatgtaggataataaggtactcccttagtgccagg

SEQ ID NO: 10601 - DNA, 480 bp, Homo sapiens
gagctctgtggtccgccgttgtgttcatcgagctactggccacgagtttgcggtgaagattatggaagtgacagctgagcggctgagtcctgagcagctggaggaggtgcgggaagccacacggcgagagacacacatccttcgccaggtcgccggccacccccacatcagtgaggctgtcttccttgctcctgttagcagacgacctcccacctcctgctggccctgcccatagcccacttccgccaacattgcctccacacctctcctcccttcattccactaaagagtggccatccgttgggcgcccactgcctcctctggttctcctttcttcccagtaacagcccgctgctgtcccagggtggccaagccccgttaatgtgcatccactcctttccatctctgtctctctgcctctcttcctctctccctagtcaccctcatcgattcctacgagtcttctaacttcatgttcct

SEQ ID NO: 10602 - DNA, 750 bp, Homo sapiens
tcaatatttttttaggaatatctgcacatgtacatttacattcaagttgataacactggtggtttcatttcaatacaaattatgctagagaactgacatttcagacatggtcatatatatgctatttgaattcctttatcttgatacagatcttgattgtgaatctcttgatgatagatgtgcagctaatttgtcccgaaactcatgaagataattgtattgcttgatggtctgtattgccccggatcctcttaggtctcgcaggctgtctatggcttgctctggtgatattgtgtcagacaggtatagtaggagacaagcagctacaagacaagatctcccaagtcctccatagcagtgtattaaggtttttcggtaatttttaaggcaggttgtaagctcttccattatttcacagcagctggctatgtcaggagtccctccatctgcgattggatgatgatgggtgataattccacattgctggtagagatcacagaggtttgggactctatattatgacagttcctctctggtgcagaaaacaaatatgtcttgtataccacagctctctagttcttctgtatcattttggacattacttctaacatcgttaaatgtacaacctgcaagagcacataaaccgagatactgagtacaattcactcgtgacacagatagccatgatatatgaaatggagtctgttcatcttcaataggctcgttatctgatgagtcagactcacttgt

SEQ ID NO: 10603 - DNA, 577 bp, Homo sapiens
cggcacgaggcgaggggccaacgactccacttcagccatgcccgagcagatgaaatttcagtggatccgggtgaaacgcacccatgtgcccaagggttggatcaagggcaatgccaatgacatcggcatggattatgattatgccctcctggaactcaaaaagccccacaagagaaaatttatgaagattggggtgagccctcctgctaagcagctgccagggggcagaattcacttctctggttatgacaatgaccgaccaggcaatttggtgtatcgcttctgtgacgtcaaagacgagacctatgacttgctctaccagcaatgcgatgcccagccaggggccagcgggtctggggtctatgtgaggatgtggaagagacagcagcagaagtgggagcgaaaaattattggcattttttcagggcaccagtgggtggacatgaatggttccccacaggatttcaacgtggctgtcagaatcactcctctcaatatgcccagatttgctattggattaaaggaaactacctggattgtagggaggggtgacacagtgttccctcctggcagcaat

SEQ ID NO: 10604 - DNA, 331 bp, Homo sapiens
actggggaaaaagtcccatctttttcaatttgattcaaaaaaaaaaaaccaaatttcaaaaccaccaaatttttttggtccccaaagcatttcaaacctgaaaaacagcccatttttccaaaataagtttacttcaagaggatttcatttcaacaaaattataaatagtttactgactttctcattaacaggattggatctgtatattatgctacctttttcctaggaacatttttaccctccttttttacctacaatttagccaacctttttagaacatgctaactgagtcaatcctaagggcaatccagttccttaattttaaaaacct

SEQ ID NO: 10605 - DNA, 357 bp, Homo sapiens
tctgagtcccgctggcatccagctccctgctcctggccagtccctccccagcccagcagtccctccaggctacatccaggagtaagctatggggaacaggttgggaggtggccagtgctcctgccagctgtgcacacatctctgtatcccgctagagttctgtgtttttgtatcatgttgtcagggacgctagctgggtcagggttaccccatagcaggcagggacaaggaccactcataatatgcccattggaccacagttaagatccagcctctctcacctcttcagggctgagtgcatgagtctgcacctccaggcaggctctgtgcagtactcaccccctccgtctgctccct

SEQ ID NO: 10606 - DNA, 442 bp, Homo sapiens
aagaggactgaggtagaggagaaccttgttttacccattgtctttttaaattttttatcattatttttattcttgtgaccctcccagaacacaatactcattgtctttttatttatttatttatttatttctgagacagcttcctgctctgtcacccaggctggagtgcagtggtgtgaacagggctaactgcagcctcaacctgcagtgctcaaggaatcctctcccatcagccttccaaatatctgagactacaggcgggcaacactacggccagctaatttttaaattttacatagagatgaggttctcactgttgtccaggctggtctcaaactccttggctgaagtgatcctgtcgtctcggcttccgcaagtgctgggattacaggcgtgagctaccaccatgcctggcttccattgtctttgtgtgtgtgtgtgt

SEQ ID NO: 10607 - DNA, 581 bp, Homo sapiens
  misc_feature 485, 501, 523, 536, 575: n = A,T,C or G
gggacccaggaatctctgatgggtgtgaagtgcggtcgtgggccacagaaaatgaccgtcatggagaccctgctaaaggtcggaccctgagcccaaaggggtattcagaagtggagatgattttggccccactcatagatgggtggcaaatctaagatttgtataaagcatataaaatagggtgatcacccccgaggcagaggggccagcatttgcaaaggcacagagctaagaggagctgggcaaagaaaggaaagccagggaaggtggtgggagatgagtctcaaagctaagtagtggaagctgggcacagtggctcatgcctgcaatcccagcactttgggaggccaaggctggaggatcacttgagcccaggagttttatatcagcctgggcaacatagcaagacctcatctctgctaaaaattaaaaataaataaattagctgggtgtggtggtgcatgcctgtgatcctagctactcangaggctgaggtgggangatcgctagagccaaagaccangctacagtgagcntgatcatgctactgcctccagcctgggtgacatgagacntggctc

SEQ ID NO: 10608 - DNA, 421 bp, Homo sapiens
  misc_feature 1, 17, 19, 25, 27, 52, 57, 85, 124, 131, 138, 143, 169, 175,176, 182, 195, 200, 208, 218, 219, 222, 223, 230, 245, 249,264, 282, 299, 302, 315, 320, 322, 323, 324, 329, 331, 339,355, 372, 376, 381, 398, 414, 417: n = A,T,C or G
nctacggttagcaagangncgacanantggtacggctgcatattagacgacncacanacccggcatgcttgaagacgactttatnggtaccgcatgcaagatgactatataatgttacctttgntagaaancgacatngtggntcggctgtacctttacttctcacctntgcggnngtattnctacgacagaggntactnctgcaatnttacctcagnntgnnacgggtncgactgactccattntttnatgcatgcacctttntatcgaactgctggcctnagcatcctcctcctggnctntcaagtgctaggntacangnnnagccncncactttgngaatttgtgctgcttnttgcagtctgggatttnaganattcncaagtcttccttgaganttgcttatgatcccanaanaaat

SEQ ID NO: 10609 - DNA, 741 bp, Homo sapiens
  misc_feature 685, 715: n = A,T,C or G
gggggctttccgtgcggtgcggcgagtgaggctccggtcttcctcctcgtcctgccgcagggccagaacccctgacggtattcagctgcgcgtaagtctggccggtgccatctgtctccgcaatgccccccaagaaacaggctcaggccgggggcagcaaaaaggcggagcaaaaaaagaaggagaagattatcgaagataaaactttcggtttgaagaataagaaaggagcaaagcaacagaagtttatcaaggctgtcacacatcaagttaaatttggtcaacaaaatccacgtcaggtagcacagagtgaagctgaaaagaaattgaagaaggatgacaagaagaaagaattgcaggagctaaatgagctgttcaaacctgtagttgctgctcaaaaaataagtaaaggtgcagatcccaagtctgtagtatgtgcattcttcaagcaaggacagtgtactaaaggagataagtgtaagttctcccatgacttgactctggagagaaaatgtgaaaagcgaagtgtttacattgatgcaagagatgaagaacttgaaaaagatactatggataattgggatgagaaaagctggagaagtagtgaacaagaagcacggtgaggcggaaagaaaaccaaaactcaaatagtgtgcagcattcctggagctttgaaacacagttngctgtttggttgcctggaggggtatattgntgtatcgctgccttctctggttggtg

SEQ ID NO: 10610 - DNA, 890 bp, Homo sapiens
  misc_feature 1, 9, 643, 701, 703, 746, 759, 781, 783, 794, 798, 805, 815,843, 864, 866, 872, 876, 877, 878, 879, 881, 889: n = A,T,C or G
nacgacagnaagggggagaaaatcgctgctgctgagatggactccagaagaagaaactgtttctccaggcgactttgaacccattttttggcagtgttcatattattaaactagtcaaaaatgctaaaataatttgggagaaaatattttttaagtagtgttatagtttcatgtttatcttttattatgttttgtgaagttgtgtcttttcactaattacctatactatgccaatatttccttatatctatccataacatttatactacatttgtaagagaatatgcacgtgaaacttaacactttataaggtaaaaatgaggtttccaagatttaataatctgatcaagttcttgttatttccaaatagaatggactcggtctgttaagggctaaggagaagaggaagataaggttaaaagttgttaatgaccaaacattctaaaagaaatgcaaaaaaaaagtttattttcaagccttcgaactatttaaggaaagcaaaatcatttcctaaatgcatatcatttgtgagaatttctcattaatatcctgaatcattcattttagctaaggcttcatgttgactcgatatgtcatctaggaaagactatttcatggtccaacctgttgccatagttgttangctttcctttagtgtgaatattagatgaaatttctctttaagttcttatagggtaggngnggaaagcttattataatctgagggttgggttattgtcaaaccnataactgatgaanaggctgggcaatttctgctganantggtagtgganaacntagaggnttttgccaangcccaaagctagaaaagctgctttaatngtttggctttttaagcttttntnccgacnaccnnnnantgttttgna

SEQ ID NO: 10611 - DNA, 170 bp, Homo sapiens
ataatttaatcatcttcaataaatagtgctgtataaacatgtttatttgtaattttttttcttttttttttgaaatggagtcttgctttgttgcccaggctggattgcagtggcacaatcttggctcactgcaacctctgcctcccaggttcaagtgattctcctgcctc

SEQ ID NO: 10612 - DNA, 764 bp, Homo sapiens
  misc_feature 628, 670, 707, 718, 729, 736, 741, 756, 763: n = A,T,C or G
tattctttaatcttacaaaactcactgcatttcaccttttctctaaaaccttcctagtctatcattttcatcccctacctccgagtgaagcatttcttcccttttccctcccagcatgttatattccttctgcataactcctgatggcacagaggtgttcacctggcattctgcccccctagcccgagctccttgagaacagggtggttatcagtcatctcttttcacagcactgacagtgcctggcacacagtgagcgccccactaatgcatcctcagtgaaggagggagtacctctggtttctccacccctctttctattttagccacttcatttttgcttaaaccaggtacttgtctaaaaatggtcttggaatctgtgctttgttatttaaatcctctgatgcttagcttttatttgggccactgctagctacattgtaatctttttacggtcaggaaccatgtggtattgctggctctatccctcatgatacattgcatgtaatatgcactcaagaagtgcctattggccgggcatggtggctcacacccgtaatcccagcactttgggaggcaaggcgggcaggtcacgaggcaggagttcgagacagcctgacaacatggngaactccgtctctactaaaatacaaagtagctggcatggggngatgtctgtaccccgtctcagagctgagcagaaatcnttgaccgaagngaggtcaggancagatgncatgnctcacctgggacagnagatcgnt

SEQ ID NO: 10613 - DNA, 643 bp, Homo sapiens
agcttcggttattgtcatccattgtggaagagctgctggatcggtgcctggcaccagacacttctggggatggtacagggtgtgacaacatgacctgcatcatcatttgcttcaagccccgaaacacagcagagctccagccagagagtggcaagcgaaaactagaggaggtgctctctactgagggggctgaagaaaatggcaacagcgacaagaagaagaaggccaagcgagactagcagtcatccagacccctgcccacctagactgttttctgagccctccggacctgagactgagttttgtctttttcctttagccttagcagtgggtatgaggtgtgcagggggagctgggtggcttcactccgcccattccaaagagggctctccctccacactgcagccgggagcctctgctgtccttcccagccgcctctgctcctcgggctcatcaccggttctgtgcctgtgctctgttgtgttggagggaaggactggcggttctggtttttactctgtgaactttatttaaggacattcttttttattggcggctcatggccctcggccgcttgcacccgctctctgttgtacactttcaatcaacactttttcagactaaaggccaaacctaatcgtgg

SEQ ID NO: 10614 - DNA, 392 bp, Homo sapiens
tggtacgcctgcaggtaccggtccggaattcccgggtcgactactactactaaattcgcggccgcgtcgaccttttactaaatattcggtataagaaagtgaaggttattggccaggcatagtggctcacggctatattcccagcacttcgggaggctgaggcgggaggatcgcttgagcccaggagttcaagaccaacctgagcagtatagggagaccttgtccctacaaagaatttaaaaattagccgggcatggtggcatgtgcccttggtcccagctactccagaggctgaggtgggaggatcacttgagcctgggaggttgaggctgcagtgagctctgatcacatcactgtactccagcctgggcaatagcgtgagaccatgtctc

SEQ ID NO: 10615 - DNA, 482 bp, Homo sapiens
ttggtgttttccatgtgtacctttatttaatgctcacagcatccctatgagataggacttcttatacctacttcacagagaagaaaatggagacatggaaggttaaggagcttgtgtgacatcatacacttagcaaatgaaagagcacagatttgattccacgactctctgcttgcaaagtctaagatgatgttaatatagcaggaaactcacataatgtctataaacccattgcctgtggggtgttaaatctccaagaatcagcctttggtccccgacctgtagaggatgtggatcttctagctgagcctgatgctcttgtgggttcctcactgggtcctgacctctgagtattcggtggaggtgtccttggaaggattcatcccatgaaagttgagggaagcataatgcagctcctcatccatctccacagtaggggcggcacctgaacagcttgaggtttcagtggggccatgtaactt

SEQ ID NO: 10616 - DNA, 722 bp, Homo sapiens
  misc_feature 573, 644, 656, 678: n = A,T,C or G
gtacaaaaatatatttatttggtgtaatagttacaaaatattcatttccacaataatattttagcaatgcattggaatgttaaaaaaaattctttgtattaatgattcttgcaaagaccctcaaaacatcccaggggtagaactgtggttcaagaggaaaagcaatttccccaagtctctgtatctaaaaaacactagtaccatgaaagataaacttaaaacatcaataacttaaataagaattaacattacttaaggcataatgtttcacatcaacaaacaaaattcattataataaaataaaacagggtgtctggggaaagctaggggaaaataagttagctgcagattcttgggttgtggagtgagtgttcaagtcttcggagtttgggtttgcttgtccaggtggtccatggaatcctgaacccacttctgcttggggtcagcacagatcttcttggccacaatggtcttgaagatcacagcttctttgggacacttgctgctggtgatcttctatagctcgcgagcctctgcactgagatcttcctattggtgaaagtatagcagcangtgactggggcattgattgcatcttgctgagcgagcactttgggaatgaaagtggctgctatgagcagcangcacagaagggncgcagagactttcatgctggangcgagagtgcgagcttcagtttgagaatttgatgtttctgggtt

SEQ ID NO: 10617 - DNA, 416 bp, Homo sapiens
tatgacgtcgcatgcacgcgtacgtaagcttggatcctctagagcggccgcctactactactaaattcgcggccgcgtcgacggtgactttgcacactgaaaccaataatttatttaaatttttaaaaattgggaccgtgcgtggtggttcacgcctatattcccagcactttgggaggccgaggcaggtggatcacaaggtcaagaatttgaggccaacctggccaacatggtggaacccctgtctctactaaaaatacaaaaattagttgggtgcagtggcaggtacctgtaatcccagctactcgagaggctgaggcaggagaatcacttgaagccagaaggcggaggttgcggtgaactgagttcacgccactgcactccagcctgggtgacagaacaagactccatctcag

SEQ ID NO: 10618 - DNA, 499 bp, Homo sapiens
actcaaatggtttttattttggtatctgacatttctaacaaaacgccaggtagacggagttaaaaagaatccaccgcacgaaaggtaaacaaagcagaccctcagaaactccctggcaaggatgttcccctccccagattggcccagtttcaccagcaactggtctcagctcagccttatgcctttccactgacaccccccacccctccacattctcgtgattcagaccaggaacttctcggctgattgtgtccgtgtgtctgagggaggggcacgctggaacctgggaacctactgggcacctctaatgcagatgagaaaaacttgagaatgtgaaagtagatcagtccccgctcccacccgaaggtgcagagacgcgggacattaaccagcagcacgcgggggtgaagtaactcaggccactctcctccccactgcccagggcgggtgcacgccccaggacctcctcccaggccccacacccacgcaaggcgacagg

SEQ ID NO: 10619 - DNA, 546 bp, Homo sapiens
gcggccgcgcccgaagcgcctgtctacgcgaacctgagcagctacgcgggcggcgccgggggcgcggggggcgccgcgacggtcgccttcgctgccgaacctgtgcccttcccgccgccgccacccccaggcgcgttggggccgccgcgcctggctgcgctcaaggacgagccacagacggtgcccgacgtgccgagcttcggcgagagcccgccgttgtcgcccatcgacatggacacgcaggagcgcatcaaggcggagcgcaagcggctgcgcaaccgcatcgccgcctccaagtgccgcaagcgcaagctggagcgcatctcgcgcctggaagagaaagtgaagaccctcaagagtcagaacacggagctggcgtccacggcgagcctgctgcgcgagcaggtggcgcagctcaagcagaaagtcctcagccacgtcaacagcggctgccagctgctgccccagcaccaggtgcccgcgtactgagtccgcgcgcggggcgcatgcgcggccaccctccccaaggggcgggctcgcgggggg

SEQ ID NO: 10620 - DNA, 518 bp, Homo sapiens
tcggcacgaggctgtgcgcagcttccacctgaagaactttggaagaactaccagaaacgagtgggaaaacaacccggagattcttctttaatttaagttctatccccacggaggagtttatcacctcagcagagcttcaggttttccgagaacagatgcaagatgctttaggaaacaatagcagtttccatcaccgaattaatatttatgaaatcataaaacctgcaacagccaactcgaaattccccgtgaccagacttttggacaccaggttggtgaatcagaatgcaagcaggtgggaaagttttgatgtcacccccgctgtgatgcggtggactgcacagggacacgccaaccatggattcgtggtggaagtggcccacttggaggagaaacaaggtgtctccaagagacatgttaggataagcaggtctttgcaccaagatgaacacagctggtcacagataaggccattgctagtaacttttggccatgatggaaaagggcatcctctccac

SEQ ID NO: 10621 - DNA, 614 bp, Homo sapiens
caaatgaaaagtactatattactagggaaactgcattataataattcacaaaagttattccaaaggggaaaaaaataaattatctcatataaaataatacatggtatgtgtgaataatcttggctactgtcttcagagagcctgtttgctgccagccacctgcacccctgtggggggagcagatgttgtctggaggtgactctcctccagcgcgatggagctgggtccctcctccaggagctggattggggtgattaaatgagtctggagttttggaggaactggatgaggacttggtagacaaacttgtactgagcgatagtctggatcatgaacatcctctgctccctgaggagcctcagcatcatgggcacttccaccttttcgttatgttccaagcagtagatcatcagctcagaaagaatgagcacgccggtccttcccaccccagcactacagtggaccacgatgggcgggtgccggttcttggtgccttccagcatgctgttggtatggcgacggaccgactggatctcctccaagtaggataaaaatccttggacatcctctggacagccgtgatctggccagtcagtatattgtaaatgccacac

SEQ ID NO: 10622 - DNA, 568 bp, Homo sapiens
tcggcacgagggtggctcagctcctgacgggcagccctgagctccaattgcagttctccaatgatatctacagcacctatcacttgttccctccaagacaactgaatgatgtaaagacgaccgtggtttaccctgccacagagaaacacctgcagaagtacctgcgccaggacctccgcctgatccgagagacgggagatgactacaggaacattactttaccccacctggagtcccagagcctcagcatccagtgggtgtataacattctcgacaagaaggctgaagcggaccggattgttttcgagaacccagatccctctgatggttttgtcctcatccctgacctcaagtggaaccaacagcagctcgatgacttgtacttgatcgccatctgccatcgccggggcatcagatccctacgcgaccttactccggagcacttgccgctgctcaggaacatcctccaccaggggcaggaggccatcctgcagcgctaccggatgaagggagaccatctgcgagtatacctgcactacctgccctcctactaccacctgcatgtgca

SEQ ID NO: 10623 - DNA, 484 bp, Homo sapiens
tatttagtgacactatagaaggtacgcctgcaggtaccggtccggaattcccgggtcgacccacgcgtccggcagagcctggagcatctccactatggcctgggctccactacttctcaccctcctcgctcactgcacaggttcttgggccaattttatgctgactcagccgcactctgtgtcggagtctccggggaagtcggtcatcatctcctgcacccgcaccagtggcagcattgccagtaactatgtgcaatggtaccagcagcgcccgggcagtgcccccaccactgtcatttatgccgataacaaaagaccctccggggtccctgataggttctcgggctccatcgacagctcctccaactctgcctccctcaccatctctgggctgaagactgaggacgaggctgactactactgtcagtcttatcagaccaacaataatgctgtgttcggaggcggcacccacctgaccgtcctc

SEQ ID NO: 10624 - DNA, 423 bp, Homo sapiens
tttgtacaaaaaagcggctggtaccggtccggaattcccgggatatcgtcgacccacgcgtccgatcgtatatattctcaaagaattcacacataggcaatctcatttaatactcaaaatgttctcatttaagactcaaggctaggcacagtggctcatgcccataatgctaagacttttaaaggccaaggctggaggattacttgagctcaggagtttgagaccagcctgggcaacagagtaagacctcgtctctacacaaaattttaaaagttagccgggtgtggtggtgtgcatctgtagttccagctactccggaggctgaggcaggagtatttcttgaacctgggaggcagaggttgcagtgagccgagatcacaccactacactccagcctgggcaacaagagtgaaactctgtctc

SEQ ID NO: 10625 - DNA, 319 bp, Homo sapiens
tatgacgtcgcatgcacgcgtacgtaagcttggatcctctagagcggccgcctactactactaaattcgcggccgcgtcgacgaaggaagttgtggaagaggcagaaaatggaagagacgcccctgctaacgggaatgctaatgaggaaaatggggagcaggaggctgacaatgaggtagacgaagaagaggaagaaggtggggaggaagaggaggaggaagaagaaggtgatggtgaggaagaggatggagatgaagatgaggaagctgagtcagctacgggcaagcgggcagctgaagatgatgaggatgacgatgt

SEQ ID NO: 10626 - DNA, 360 bp, Homo sapiens
  misc_feature 18, 109, 321, 338, 348, 357: n = A,T,C or G
agaagagggcagagcgtngcatggggctgctccccaggacctgagcaggaacctggagttttcagagctgcctgatcattgctacagaatgaactctagcccagctggnaccccaagtccacagccctccagggcaaatgggaacatcaacctggggccttcagcaacccaaatgcccagcccacggacttcgacttcctcaaagtcatcggcaaagggaactacgggaaggtcctactggccaagcgcaagtctgatggggcgttctatgcagtgaaggtactacagaaaaagtccatctttaaagaagaaagagcagancacattcatggcagacngcagttgtgntttctggangaa

SEQ ID NO: 10627 - DNA, 662 bp, Homo sapiens
actcagctaagaggtatttattcagttgctggcacctctcccagtgtaaatctggacttggctccagagaaggtgtttcattacagcgggggcttagtttgcttcctgtagttagtagcgtttcatggttttctttatccagtgtacaaagcttgagactttggtgcaggctcgtggaggcatgccattgtttcgtccataggagacaatgcccctgggccaccttgttacacacaagagggcctccagagtcccccttaaaggaagtctttttaatctctgggtcccccacgcacaactcaatggtactgtcgtaataatggcgtaagtcagattcgcactttcgatcttcctgcactgtcatcttcacctcttgtagtgtgtgtgagtgttttcccaggggggccgtctgcccccagccggccacactgcatgtctgccctggcttcacctgagccttgttgctaggtagcctgaggggctgcacagctctggtccgcttggcctctctctccagctgcagtagcatgatgtcgttggagaagttcttaggattataggctggatggcggatgggtcctttcacagggataaactgctgcgacggctcctgtcctttgatattgtgtgccccccagggtgacaatttatggagcttaccc

SEQ ID NO: 10628 - DNA, 510 bp, Homo sapiens
tcggcacgaggccccttcttcccctcccactgggacctaccagaatgccccagagaatccttaggtgttggctgccagtctcccagcccccttactctgcccccttgaagaagaggtcagttctgtggaccagccccgggggcattcttcctatgccagactctggagggacaagactgcacctagctttattctcaggaccgtccttcccgcagtctaacttcagtttctcctgcttcaactagagtcctctttttattcctctcacagggatatagtgaatggtcagtgcatttgcaggtggggtgatgatctattttggacactggtacaggagagggtcttgcaatataagaaacaagagctgttatgaaccaccaccttctgggtgcattgggcttatagactcagtaatttattttcttcctgatctgacatcctacatggggcagccctccccacattattaccttattcgaagtatgaaccaacatgttcaccccaccccca

SEQ ID NO: 10629 - DNA, 471 bp, Homo sapiens
  misc_feature 302: n = A,T,C or G
gcactgcctcgaaagcaaagagacaagtcacccagcagcctcttggaagatgccaaagagacatgcttcaccagggataggaaggggggcttcttcagctccttcatgaagaagagaaatgctcctacaccccccaaacgcagcagctccttccgagaaatggagaatcagccccataagaaatacgaactcacgggtaacttctcatctgttgcttctctacagcatgctgatgggttctctttcactcctgcccagcaagaggcgaatctggtgccacccaagtgctatggggggagctntgcacagaggaacctctgtaatgacgaccgtggtggcggtgggggcagtggcactgttgggggtgggtggtctggcatcacaggcttctttacaccacgcttaatcaaaaagacactgggcttacgagcaggtaaacccacagccagtgatgacacttccaagcctttt

SEQ ID NO: 10630 - DNA, 684 bp, Homo sapiens
gggggtacacaattttttaccacaacacaaagcaaaaacagatcttgccatttgttgtcatctctgctgagtgctaatagtgggggttcaaagttttccatttgtttaaatgctgctttgaagtttccatgaagaattacagtttggtgacactttttatccaaggtacaaaggctgagactttggtataaacaccaggagaatccttgactccacagccatacccccaggaggtcaccccatacaccacccagctctctccgggccgttcacacatgagtggtcctccgctgtctccctggcagctgtccacgcgtttgtgttcatggaggtttccagcacaaagcattctccctgtaaaccgacccttataacgttcttcacaaaaccttttaggaagtaagggaatggctgcttgttgtagtgttcttgaataggctcgtcctgtgtcaccccatcctgttatgtaacagttggatgctgttttctgtggcctctctctccagagtggtaaacaggctggcaaaacattggctgctgaatctggcacattgctcttctggtccttgtaatctaaccaaggctatgtcataatcactgccggtcggttcgatactcccgatgaatcaccatctgttgaacttcaatttcttcctcaaactcctctggtacccaaatatggta

SEQ ID NO: 10631 - DNA, 459 bp, Homo sapiens
  misc_feature 197, 293, 298, 346, 355, 362, 433: n = A,T,C or G
ctgtacttggtagtatatttaattgttgtgacaatgacaatataaagaaaagaatgaatatccaataagtaatttttcagttctgctcagtctttacacatgaacacagtctctatattgcagtctgaaaatgtgcttctgctataggctggaaagtgttatatcaggagcagcataaacaaaattactaatttganctaaatttcaagggaatcttttgtttcctgccttgttcatttctaaataatagacaatacagagaacactattaaaaactagctaaattacattangcctngctactttccttaaaatgaatgaaaatgctgggccagcatcctatatncattcttancagcacncccaaatttccttcttcaatgcttggcctttttccccgaagtgggttccaatgggaagaccgggagttgcngaaatgtgggacgcctttctgggaag

SEQ ID NO: 10632 - DNA, 142 bp, Homo sapiens
ctctcgatatgagctagtgctgaacattggtgtcggtgcctatggcacagtgtacaagtcccgtgatcgccacagtggccacttagctgctctaagagctgtgagagtccccagtgtatcagcaggtggaggaggcattgca

SEQ ID NO: 10633 - DNA, 486 bp, Homo sapiens
  misc_feature 467: n = A,T,C or G
gctggaggcctcccaggcacctttcctggaataccatcagcctctcctgcgggaaggggcatccagcagccgggccaaaagtggttcatctcaccttatgttcaaacccaagctaaactgggctgagctgggaggtggggaaagctttgggattatgggaactgagaggggcaagcaaagcgtggctctggggttagcgagaagtcaaaccccaaacctttgcacagggtccttggggtcggtgatgggggtagaaggtgtgtgtgtggatcacctactgtggggcatggtgcgcgcaaagacgaaggtggcggcgctgcagcccacggtgtgcgccgcgtggttgcaggcatggatgtcgatccggtattccgtgaagtggcgcaggccgctcagcaccgctcgctcacggggcaccttgtcctcctggatctcgaaatccgagctgttgccccccagccggaggngcccagctgcccggctgtg

SEQ ID NO: 10634 - DNA, 168 bp, Homo sapiens
gggtaccgggccccccctcgaggtcgacggtatcgataagcttgatatcgaattcctgcagcccgggggatccactagttctagagcggccgccaccgcggtggagctccagcttttgttccctttagtgagggttaatttcgagcttggcgtaatcatggtcatagc

SEQ ID NO: 10635 - DNA, 394 bp, Homo sapiens
  misc_feature 206, 286, 374, 376: n = A,T,C or G
agccccgaggctctgctcgcccaccacccaatcctcgcctcccttctgctccaccttctctctctgccctcacctctcccccgaaaaccccctatttagccaaaggaaggaggtcaggggaacgctctcccctccccttccaaaaaacaaaaacagaaaaacccttttccaggccggggaaagcaggagggagaggggccgccggnctggccaatggagctgctgtgccacgaggtggacccggtccgcagggccgtgcgggaccgaacctgctccgagacgaccncgtcctgcagaacctgctcaccatcgaggagcgctaccttccgcagtgctccttactttcaagtgccgtgcagaaggacattccaaancnctacattgcgcagaatgg

SEQ ID NO: 10636 - DNA, 301 bp, Homo sapiens
  misc_feature 130, 173, 184, 207, 209, 218, 224, 240, 243, 252, 265, 270,279, 280, 281, 282, 285, 288, 290: n = A,T,C or G
gggggactccgccttccacgtgcacccactgcctcttcccttctcgcttgggaactctagtctcgcctcgggttgcaatggaccccaactgctcctgtgccgctgcaggtgtctcctgcacctgcgccanctcctgcaagtgcaaagagtgcaaatgcacctcctgcaagaanagctgctgctnctgctgccctgtgggctgtgccnantgtgcccanggctgntctgcaaagggcatcnganaatgcactnctgccctgtgtcngacanccctctccnnnncantanangaccctaaatc

SEQ ID NO: 10637 - DNA, 385 bp, Homo sapiens
  misc_feature 139: n = A,T,C or G
tacgagcagttcatctttgcagatcataccaatatgattcacgttgaaaatgtctatgaggagattttacatcagatcctgcttgatgaaactctgaaaggtaagaaaggttacctggtgctgcagggacactccatanaggggagcatccctgaaataggactcggtaaggccagtcagggaggaaaagagaagaggaaatggacattggtgagggagggagacagacagtgaggagagggaaggaaagaaggaaggatactaaccttgattgagtgttatgattaagcacacacaaagctggcactttagatgttattttccctttttaatacacaaatatgaatgctgtgagatgggaattttaagtttcattttacagatg

SEQ ID NO: 10638 - DNA, 353 bp, Homo sapiens
  misc_feature 9, 13, 15, 30, 31, 37, 56, 57, 63, 65, 72, 75, 94, 100, 105,119, 126, 139, 176, 177, 185, 191, 194, 229, 236, 241, 266,285, 297, 301, 314, 317, 319, 323, 324, 331, 337, 343, 348,349: n = A,T,C or G
ccgatgaangtgncntggcaaacgctgccnngaactntggctttgccttcctctcnngggccnanaccaccntcnccatcgctgaactgtgccntgaaangactnacaatgttcttgcngttgtgntcttcatcagtgnccggaagcggaatgagctatcattgttctgaacctcnnaaggcggnatcacnctntactgtaacggcgctgacactgttatttatgagcngttacanccaangaatccttctaaccaagaaacacangatgccctggatatctttncaaatgaaactnttanaaccctatgcctntgntncctnnaatttgnacaganggaatntccanngtgg

SEQ ID NO: 10639 - DNA, 645 bp, Homo sapiens
  misc_feature 1, 9, 488, 502, 510, 515, 531, 551, 568, 571, 578, 598, 600,601, 614, 615, 625, 626, 637, 640, 644: n = A,T,C or G
nacgacagnagggtgactctttggcaaagggtgatacttttcactaaaaatgcctactcttcctgttgatgttccttttctgtttttaccttgtccaatttccacactagtcattttttttattttttagaggatcagattttagcgctggaaaatgagttcaaaaatttcagtgtaatgtcataaggatgttgggatacagagattttttttccttggaaacaaatggactgggaagaaacacagcatggctttgctctgagtttcaatctgatgattatgaccatggaagatagtcttatgtaaaggttaaatggtgtttacaagtggatagataaggcggagatggtgagaagccgggttttctctatgctaaatgtgtctactaagagcagcacttcctactagctaagcacaatcatagccccaccgtgatgagctgctagtctgaataacattccctgacttagggaaaggcccccaaaacntataaagaatatgnctattttntatgngggaactgcagagccntggattcctaaaaaaaaggntctctttttctggatcntancaatgcntttttccctccttccaaccntnnctgtggttccaannccccctgtcnnttgaaaaaaanaanaaang

SEQ ID NO: 10640 - DNA, 415 bp, Homo sapiens
atcactcctatcctaacccagagtacgacaactggtgcaaacaaactcaagtgcaaaggaaacgcgacgaagaacttgccaaatctatggccatatccttgtctaaaatgtatattgaacaaaatgcatgctcttgaaatgtctcaaaaccttacaccctgggaataattgcatatataacttgtgtttggagaatcacatgaactttaatcagggtaatagcactttcaaacttgctagtagattttactgtaggtgtaatgccttaatcatctttttgaatgttttctcagagctggaggttgctgggcacctaaatgatgtttcatgatagctttgggtgattttactgctatttataatttgctgtataaagtgagcattacttaatttgcaagctgatttctcacagtgt

SEQ ID NO: 10641 - DNA, 760 bp, Homo sapiens
  misc_feature 2, 3, 11, 13, 16, 21, 32, 43, 45, 61, 64, 71, 76, 89, 636,672, 722, 729, 745: n = A,T,C or G
tnntttgaccntncgntaaancttgcttgttncttttggccgnancggcctaggctgcganagnagacagnagggnattacccacttgnagcttaagtatatgtcttttacaatttattgtctatttcatgctgacgtgaggtttgatgtagacagtaaatagattaagcgtccttgggaagaaatgcttataggctaggcgtggtggctcacacctgtaatcccagcactttgggaggccaaggcgggaggatcgtttgaagccaggagtttgagaccagcctgggcaacatagtgaaaccccatctttacaaaaaataaaaaaaattcactgggtgaggtcgtgtatgcctatagttctagctacttgggaggctaaagtgggaggattgcttgaaccctggaggtggaggctgcagtgagccacgatcatgccattgtactccagcttgggcaacagaattaaaaacaaacaaaaaaaagctggtcaggtggagtgggtcacgcttgtaatcccagcactttgggaggctgaggcaggtggatcattttgagttcaggagtttgagaccagctcggccaacatgatgagaccctgtctctaccaaaaaattacaaaaattagccaggtgtcgnggtgtgtacctgtatcccagctacttggaggctgangcaggagaatcgcttgacccaggaatagggctgttgtaagtggagatcgnccactgncttcacctgggcacanacgagactctgtccc

SEQ ID NO: 10642 - DNA, 320 bp, Homo sapiens
actgtcttgaggcctcgctttgtaaaagccgcaaaatccaggtattttacagcaccaatctccttagccatagctagattctgcggatatgtgatgggattcagcttcttctacatcagtttctcgatccagggcttatcatccgccagattaagtttagctccactaagatgaatgcgagtaatcgcccagtggtgcagcacctcaggagtaccacatttggacggacattttcaaactgatggcatgactcagcccggtgacaagcctatttcgaacacatctggtttccgtatagatcaggggacgaaatccgtcat

SEQ ID NO: 10643 - DNA, 444 bp, Homo sapiens
cactcttgcactcctgtaatgagcctggcactgtgatgaaacacttttcccgtgtcgtttgagtgcatcttctcaacaaccctaggagggttcttgaagcttttgagattaacaatggcaggaaaatcatcactttttaaagtaattctccttggagatggtggagttgggaagagttcacttatgaacagatatgtaactaataagtttgatacccagctcttccatacaataggtgtggaatttttaaataaagatttggaagtggatggacattttgttaccatgcagatttgggacacggcaggtcaggagcgattccgaagcctgaggacaccattttacagaggttctgactgctgcctgcttacttttagtgtcgatgattcacaaagcttccagaacttaagtaactggaagaaagaatccatatattatgccgaa

SEQ ID NO: 10644 - DNA, 778 bp, Homo sapiens
  misc_feature 2, 9, 10, 13, 22, 33, 46, 59, 123, 210, 714, 725, 735, 764: n = A,T,C or G
gntttgaannccnttgtttcgnatcctttttgnaggactctgaagncctttgttcggcncgagaagaaactctgcctcagaaaatgtttacagcttccagtggaatcaaacataccatgaccncaatttatccaagttctaacacattagtagaaatgactcttggtatgaagaaattaaaggaagagatggaaggggtggttaaagacnttgctgaaaataaccacattttagaaaggtttggctctttaaccatggatggtggccttcgcaacgttgactgtctttagctttctaatagaagtttaagaaaagtttccgtttgcacaagaaaataacgcttgggcattaaatgaatgcctttatagatagtcacttgtttctacaattcagtatttgatgtggtcgtgtaaatatgtacaatattgtaaatacataaaaaatatacaaatttttggctgctgtgaagatgtaattttatcttttaacatttataattatatgaggaaatttgacctcagtgatcacgagaagaaagccatgaccgaccaatatgttgacatactgatcctctactctgagtggggctaaataagttattttctctgaccgcctactgggaaatatttttaagtggaaccaaaataggcatcccttaccaaatcaaggaagactgacttggacaccgtttggaaaatgggtaaaaacggtggnttactggtganttggggagcnagaaccggacccactggtatactggggantaacaatttttttc

SEQ ID NO: 10645 - DNA, 712 bp, Homo sapiens
  misc_feature 39, 451, 524, 538, 547, 600, 620, 627, 644, 662, 670, 691,693, 695, 698, 711: n = A,T,C or G
ggcacgagcacaaggagaagaagttaattaacattgaangatgagaagacatcttggaagaacttgaattgggccttggaagaagaacagccattcaaatagatagaattgtggtagcaaaggcatagaggtaggaaagtatagatctccagggacagtagtcatggggttggggcactgttggaatttaaggttggaaggatatattggagccccttgaatacggtaacaaggcacaccttgggcagtggagagttatcagagtgtttgaaaaggagggttattgagtaaataaatagactggtactttaggaattttaaaatgtggatcattgtactactaataactatttattttatatttactatctactaagtaatttacatgtattttcttgtactgactgtaaaccttctgggtgtgggtgttttaagtgccattttactgatnaagaaactgaggcttaaatagttgaaataagtcaccctgttagtgagtggccagaatgacaagtcagatctanggtttgtctaactnccaaagatnatataaaaataatggatctctccttttcccttatgcataaaatatggggagcntttttaaatcattacccatncgattgnccaaaaaaatacctttngggaaaactgattattantattccanaataaatttcaacggcctgcntngnctnctttacaactttnt

SEQ ID NO: 10646 - DNA, 429 bp, Homo sapiens
  misc_feature 2, 9, 12, 41, 73, 76, 78, 227, 231, 234, 236, 241, 242, 260,264, 274, 277, 284, 289, 312, 313, 314, 323, 324, 326, 343,345, 354, 374, 383, 392, 395, 404, 411, 423, 428: n = A,T,C or G
gntgaaccnaangacaagtagacaccacatccatgtgtttntgatgcacagtggaaattggggtaccactggnatncntttggtatggcaactttttcatcacttgttttatgtagttgtctgatcaattgtgaaaacataatgaatgttgggaaatggaacagtaaaataacgaaagccaactttttttttttttttttttgaaacggatttttgttttgtccccnaggntgnantgcannggcccaatctcggttaanttgnaagctccgcntcntgggttnacccnattttttttgcctaaacctcccnnntattttggnntnaacatggcccccgccancncccccgggntaatttttttgattttttanaaaaaaacnggggttttnccngtgtttaanccagggntgggttttcaantttcnt

SEQ ID NO: 10647 - DNA, 617 bp, Homo sapiens
tacttgttctttttgcaggatcccatcgattcgaattcaaggcctccaaatttatatctaacattgtttatgttatgatttttttttaattgcaaagactaggtgtatatttttttctgtttttctaaatgacccgtggtacttaataggtgtactaaaattgtgttgggagcagggatttgaaaatttctgagagatgtgtacttaatttagtaattctgtttcatgagatatgatctgttatgctagaggtttaataggcttgctatgtaagtagaacgtggctcaactagatatctttatatgtatgggcattactcttagtgatatttgtttcctgtcctttgttgctcatgctgtttaagtgcaggctgagacccaacctctttgtaagtacagtaaaataatccaccgttttttacagaccctagtcaaagggttaaaaaaattaagattgctttccatgtttgaaatttaccattgagagtcaatgaagttgctattttgagtttaacattgatattgtgaaaataagtgcaatttggattacatgtttcttaatattcattcttgtttcacaaatgaatgattaaggaattatgcatcataaaggaacc

SEQ ID NO: 10648 - DNA, 551 bp, Homo sapiens
  misc_feature 87: n = A,T,C or G
tacgaatttaatacgactcactatagggaatttggccctcgaggccaagaattcggcacgaggcagaactccagttctccgacccanaaaaagcctggcctcactctccacctccagctcagcactcaggcctggcaggccaccggctgcagaaagatcctcctccccttccccacccaagcagttgtgtttcccagcaaaaaatcggaccctcagctgctaccgcagccacatgatccactcagtgactcacaggcaggccacaccccttcaggcctcccggccaggctctgctcccagccagctaactctgggatgcatcttattaccaaagggaacaactagctaactaatgcccttgacagtccaaataattactttctttcattagaagaacttgcttataaaatatatacgggctgagaggacgcaggctcttctgaactctggctctgccagctctccaagtcctcccccaccatgccaagacctggggaatggcagacatggttagctgggaagctagaaagctaagacattcctgtttaaaa

SEQ ID NO: 10649 - DNA, 537 bp, Homo sapiens
tacgaatttaatacgactcactatagggaatttggccctcgaggccaagaattcggcacgaagggaaaaatttaaatttatattacaacagtggaatataatgtttaataacttgtgttggggggattatgtgttttgtttgtttttttttttacctcttcaaaaaattaaaaataatgaaaattttaaatcatcccaatataggtactttctgcttttttaaatattttggggcctaaatacctacttgaaattatgtcataaacctaaacacgtattctaaaaatggtaaagtacccttctagtaaaatatatatacaagttgttgatcatttgtattacctttttgaaattgctgaaaacaggttaaaaccttaggtattaaacgttgaatttaaagctttaatctggtaaaaacatctgtactctgattataattttctaatttttaagtatattaaaaaatataattgtattgcatgagtaaatacaagggaattataggaagccaaaattaatattttcaaaggggctggg

SEQ ID NO: 10650 - DNA, 503 bp, Homo sapiens
tacgaatttaatacgactcactatagggaatttggccctcgaggccaagaattcggcacgaggcagcagctggagggcagaggaggcggcgcggggtgtcctgtcctcgccatgaggccgcagcaggcgccggtgtccggaaaggtgttcattcagcgagactacagcagtggcacacgctgccagttccagaccaagttccctgcggagctggagaaccggattgataggcagcagtttgaagaaacagttcgaactctaaataacctttatgcagaagcagagaagctcggcggccagtcatatctcgaaggttgtttggcttgtttaacagcatataccatcttcctatgcatggaaactcattatgagaaggttctgaagaaagtctccaaatacattcaagagcagaatgagaagatctatgctccacaaggcctcctcctgacagaccctattgagcgaggactgcgagttattgaaattaccatttatgaagacag

SEQ ID NO: 10651 - DNA, 72 bp, Homo sapiens
gattacgaatttaatacgactcactatagggaatttggccctcgaggccaagaattcggcacgaggaggaat

SEQ ID NO: 10652 - DNA, 190 bp, Homo sapiens
tgggtaccgggccccccctcgagatagtctctcctcgtgccgaattcctgcagcccgggggatccactagttctagagcggccgccaccgcggtggagctccagcttttgttccctttagtgagggttaatttcgagcttggcgtaatcatggtcatagctgtttcctgtgtgaaattgttatccgctca

SEQ ID NO: 10653 - DNA, 280 bp, Homo sapiens
agcttttgcaaaaactatttaggtgacactatagaaggtacgcctgcaggtaccggtccggaattcccgggtcgacccacgcgtccgctttgttctgttatacaaaatcattcattatgagcaggaaagattgatgataccaccatgaaaaataggatgtttaccccaaaacaagtgtgaattaagaatttgaacacaaccacattttttaaaatgaaacttctatcggaagtaaattaatttggtgtaataaagtccagtatttaataaaatgtacaat

SEQ ID NO: 10654 - DNA, 558 bp, Homo sapiens
aagcttgcggccgcctgcggctcatccaggccgtgcaggaagccgacctccacccgcttcagccgcttcacctgcttgcgccgccgcggccggtacttgtagttggggtggtcctgcatgtgctgcacgcgcagccgctctgcctcctccacgaagggcagcttctccgccagcgtcagcgccttccacgacttgcctgcacagtggaaggaagggggagaggggcgcagggcttatcggctgcgctcccgctccaggccccacctggccccacctggacgcacctcccccctcagactttgaattgcgcaaccggggtgaagttaaagagggagatctgggactcctgagtccgagcccttggggaacacccgtcctctaaaggcacccctttcttttggtctcctggaagcggctttccgctcacccatcacccggtcgttcgaaaaacagaaaaggacacctaactagggaaggggtcgagggatggacacaaccggcccagttcaaggccaagggtgctctcgcgccgcccggaggtgccgggaagtcgccttc

SEQ ID NO: 10655 - DNA, 510 bp, Homo sapiens
ctatgacatgattacgaatttaatacgactcactatagggaatttggccctcgaggccaagaattcggcacgaggcagacatggcctgtaataagagctaattaagtgttcactgttataatttctcataactacagagtagtttgatatttcagggagaaataatatatgtttgtttcccactgctttcacaacaaccctatgttgtaattagcactgttccactggcacctaaagacacggaggctctgggagatttctggccctaggccacgaaggcccacttgggactcaagctgaggtcctgtgattccatttgggagcaggaggagggatttgcaggtgatcttcctgggcctcctgagagcagctcaggtgcccaagatggactcaggcaggcagctctgctgtatgtgaagcccagtgaggggcagtgggggggccatgctgcaggtacaagttaatctccctgtatcgcctctgcccacttacccttactcctttttctac

SEQ ID NO: 10656 - DNA, 192 bp, Homo sapiens
ctccaccgcggtggcggccgctctagaactagtggatcccccgggctgcaggaattcggcacgaggccgtaggcagccatggcgcccagccggaatggcatggtcttgaagccccacttccacaaggactggcagcggcgcgtggccacgtggttcaaccagccggcccgtaagatccgcagacgtaaggcc

SEQ ID NO: 10657 - DNA, 296 bp, Homo sapiens
tctaatacgactcactatagggaaagctggtacgcctgcaggtaccggtccggaattcccgggtcgacccacgcgtccggtggtccaaggcaaggagcccgcccacctcatgagcctgtttggtgggaagcccatgatcatctacaagggcggcacctcccgcgagggcgggcagacagcccctgccagcacccgcctcttccaggtccgcgccaacagcgctggagccacccgggctgttgaggtattgcctaaggctggtgcactgaactccaacgatgcctttgttctgaaaa

SEQ ID NO: 10658 - DNA, 432 bp, Homo sapiens
tctaatacgactcacttatagggaaagctggtacgcctgcaggtaccggtccggaattcccgggtcgacccacgcgtccgcaagggttctctgatgttttgttttctcacccatactttaaaaacaaaatgagtaataattaggaaagctatttttcagaggaggaaaataggatctttccattgtgccacaacactcttacagtttactttctgataaaacacagagaaactttgctttcttaccacgtggtccaaggaaggaccataaaccactggagtcagccctctgggtcctccctgctcctatcctgctgctcacaggctggatggccttgagaaagacccattaatctttgtgcctgcagttttgtcaactgtcaaatagggacctgtattttataacctgaagattagtcagtctctgttcttt

SEQ ID NO: 10659 - DNA, 412 bp, Homo sapiens
tatgacgtcgcatgcacgcgtacgtaagcttggatcctctagagcggccgcctactactactaaattcgcggccgcgtcgacgttttattagaaacttaaattctcccaagataggcatgatttgtaaatgagctagctgggaagctgggataaaatatttaagattcattgattttggctggtcaaacatgccccattcaaatagggccgccttcaagttctcaggctgagaccccactatgattttagcttttaaaaacttagttgacatctcaagtatgttctcacttcatgcttccagttatatatattattctattgtcccaaacgtaataggtccagaacaaaaatattataatatcttactccacaatagctcataatcagaactacaaagtttggaattttatc

SEQ ID NO: 10660 - DNA, 641 bp, Homo sapiens
  misc_feature 468, 557, 594, 615, 625, 626: n = A,T,C or G
attaattaaatctcttgaaatctcttttaggtatcttggaccttgttatgctgttgcttacttaaggtttatgactctcttattctcaccggcattatccatatatcattgttaactctaaaacatctccagcacagaagaagacaattttcactcttaatacagtataatatattcatagtgagccataaaattattttgacagtaaagcaatgtcaattttgaatctttgaaaccattatatacttcatagatttaatgtcttgaaatatttaaacaggtttgagaagtattattgcaactgataccttacatggattgtcttacaaaaatcagtacagaattatactgattgataaatgttcacatatataagaaatagtttgttgactggagcattcagtttccattgtttgtattcatcttctagtaatacaatatgcatttctcaaatgccctaatccgttntgaccatggtgcattcagtaacttctaggaagcattccactctgaaaaactgcataagcagatagattcttggaggatgcagctaaagntcgtgtttctatattgccactccatatttttcagtgntctttagtgcccatcaaaatntatttccacnnagtttatctcttgta

SEQ ID NO: 10661 - DNA, 399 bp, Homo sapiens
  misc_feature 300: n = A,T,C or G
cgcggccgcgtcgaccaggaggccccctacttcagaggcaagggccatgtggtcctggccccccaccccatcccttcccacctaggagctccccctccacacagcctccatctccaggggaacttggtgctacacgctggtgctcttatcttcctggggggagggaggagggaagggtggcccctcggggaaccccctacctggggctcctctaaagatggtgcagacacttcctgggcagtcccagctccccctgcccaccaggaccaactggatggcgtcacgcggccgcgaatttantagtagtagtcgacccgggaattccggaccggtacctgcaggcgtaccagctttccctatagtgagtcgtattaaagcttggcgtaatcatggtcatag

SEQ ID NO: 10662 - DNA, 730 bp, Homo sapiens
actcttaacaattattttattttaaaatagacaaactatgaatggtagaaaatagtaacatagcaattttaaatgtacagttttaaccaatacaaaaaagcaataaagcaataatatctgaagcattatttaagaaatctcaatacacgatctctgtagttcctaaaattctggcactaattctaatgtgaacttagtagcaaaagacccagaaatagtaagcccttgacctaaaaactaactgatttgtatgatattcatgcagaaacaatgatgaaatggagtcaagttttctagtgtcattgttatcaaaataactgtcaaaatagtaagtttgaaacttaaatgagcacaaaataaaattttgttttctaacaagaccagatttctttttaaaaataattctgagttagacaaagtgattttcctaaaagctagctgaagctaccttaaatatcccctattttaagttacagcatctctaaataagtgaatcacacaagatagtttaaatacacctttaggtgtaggggaggggagaagcgcctcgttttctgatgcagcgtgtttgatgtgaagcttgtgcacaggatcagatagaaacattaatgcctgacccatgatgacgcttgattacttgtaatgttgcactagaaataatgtggctgtgacatgccagtgttagaccatactgacttacgaaatagaagataaatggacagtggccagt

SEQ ID NO: 10663 - DNA, 601 bp, Homo sapiens
tatgacgtcgcatgcacgcgtacgtaagcttggatcctctagagcggccgcctactactactaaattcgcggccgcgtcgacagcagtggtaaccatgtgatattcggcggagggaccaagctgaccgtcctaagtcagcccaaggctgccccctcggtcactctgttcccaccctcctctgaggagcttcaagccaacaaggccacactggtgtgtctcataagtgacttctacccgggagccgtgacagtggcctggaaggcagatagcagccccgtcaaggcgggagtggagaccaccacaccctccaaacaaagcaacaacaagtacgcggccagcagctacctgagcctgacgcctgagcagtggaagtcccacaaaagctacagctgccaggtcacgcatgaagggagcaccgtggagaagacagtggcccctacagaatgttcataggttctcaaccctcaccccccaccacgggagactagagctgcaggatcccaggggaggggtctctcctcccaccccaaggcatcaagcccttctccctgcactcaaataaaccctcataaatattctcattgtcaatcaaaaaagtcg

SEQ ID NO: 10664 - DNA, 747 bp, Homo sapiens
  misc_feature 2, 12, 13, 17, 25, 28, 39, 41, 57, 60, 67, 72, 89, 667, 683,686: n = A,T,C or G
antacttgggcnnaaancttgcttnttncttttggccgnancggcctaggctgcganagncgacagnagggnattcattagtagtcagnataagcataaatcagtaaaatctctttaaaattttttctttaggaggttacatttcaaaaatttcaattctgattcctaggattgggtaagaaagtgggggaaattgatattcttaaatattgttggagactgtatacactggtgcacttgttttggaagataatgtggcaaaaattatcaaagatcatataaatgtttatgccctttgacttaccaattcccacctttattaatttatctcacgggaataattgtggatatttgtaaatatgtatatacaaggatgttcatcagaacatcatctcagtatggaaaaacttgtaatgtcttaaaggcacatcagtaaggattggttcaatacatgtccagatactctgaagccatttgaaaagttgtgcaagaatattttatgtgggaaaatattcacgatatattgctaagtaaaagattatgaaactataggagtttttatttacaaatatactggctgtgtgtgtgtccatgtatgtatgtatatatgtatatgtgtgtgtgtgtatatatatatataaatacatcaaaaataaacatatactantatattgatgttggtnggnggatttattggtaatgctgctctcctccaccacccccaagtccacccacctttgaactttc

SEQ ID NO: 10665 - DNA, 775 bp, Homo sapiens
  misc_feature 719, 750: n = A,T,C or G
acgacagaggggagctgagcggcggaacccttcgctggcgggagcgcggttcggggccgcagaggggacattgaataaacctgagtattgtgtgcctgtattttgactgcgacctatcagatgagatcaggtcaagagacaactgcctttgaaagagagtgagtgactgtttccaaaacagcaagcatagggagagccgccggaagtattgacggaaagcttgaattacctacatgattgatgatggtctccagctgtcaaagaagattgtggttgccaagagaaaggtaaccatttctcatccccttgagtggaattggatgcctctaggagcccacattggctggcagtagacatggccgaatttacaagctacaaggagacggcctccagccgccacttgcggtttaagctacagagtctaagccgccgccttgatgagttggaggaagccacaaaaaacctccagaaagcagaggatgaactcctggatctccaggacaaggtgattcaggcagaaggtagcaactccagcatgttggcggagattgaagtgctgcgccagcgggtgctgagaattgaaggcaaagacgaggaaattaagagagcagaggatctgtgtcgtctgatgaaggagaacttgaagaggaagaaacctccccgggagctgaatctgaaattgagcgcttcagaacgaatggctgaatagagagctaganaggccttcacaggagtagatgactgtcccanctggtctgagcctgatgagaaaaat

SEQ ID NO: 10666 - DNA, 62 bp, Homo sapiens
tttgcctgctttttttgttttatattacattttggttaaaacagtgcttgaggccgggtgtt

SEQ ID NO: 10667 - DNA, 325 bp, Homo sapiens
tttggagaatgagttcctgcctttagtggaagtggccagggcgttccggcagaaaaggagcagcagtctgagtgcggcaactcacgcctggaatcccagcactttgggaggcgtcaggtggatcacctgaggtcaggagttcgagaccagcctggtcaacatggcgaaacctcatctctactaaaaatacaaaacttagctgggcatggtagtacacgtgtgtaatcccagctactaggaggctaaggcaggaaaattgcttgaatccgggagttggaggttgcagtgagccaagattgtgccactgcactccagcctgggtgac

SEQ ID NO: 10668 - DNA, 672 bp, Homo sapiens
  misc_feature 1, 9, 10, 615: n = A,T,C or G
nagcccagnntaatgtgagctggtaaagggtattggaaaagtgccaagaaatgccaagcttttggttcgtaaccactataaaaagtttatgaacatgtcagaggaatggatgagtgatttgtgaggtcttaactagataacccggtttcttccttgttttggcttcttttcagaatgccgggagagtacatgcagggattccatctaatcaccctcagcactctttctctggtcctgctggatagatttagatttcctttctttttttagggcctcagtctgctatctcctttggtggctaccaccactcactcccttgatatcttctactcccttgccttcaccttgcttaagactgagaagggagttagattttgtcactagctcttctttttcctcactgtgtaccccaccaaacaagattagttcaagttaaaaagaacctactggaggtaaactgggagagcaagtgttggatctgggctggtccctttcccataaaattaggtccctggttgtatgttcccatagcaccccatacttcctctctcagaataatcatttcccttgtaatgctcagcatccgcatcctgcttgactgcaaacttgctgaangtaggggactgtttgtcttggacttcgctgccagtccttaaaacagtgtctgggacc

SEQ ID NO: 10669 - DNA, 625 bp, Homo sapiens
  misc_feature 118: n = A,T,C or G
ggttttgttttgttttttgagacggagtcttgccctgtggctgggctggagtgcaatggcgcgatcttggctcactgcaacctccgcctcccgggttcaggggattctcctgcctcancctcctgagtagctgggactacaagcatgcaccaccacgcccagctaatttttgtagttttagtagagatggggtttcaccatgttggccagatgatctgaatctcttgacctcgtgatccgcccgccttggcctccacaagtgctgggattacaggtgtgagccaccacacccggcctatattgttttgaaagcatactctatatatagttacgggcagaggcacaggcatcctcagcagctgattcaggagatgatggtaaagctatctaactatgaattaaacattcacatatccagtctacctggtccagtaataatacaagcaaatcttgtatttcaggaacaaatcaaggttctcttaattttttggcttatatacaatgaagtaaaaacttgataaacatggtttcaaattgaggaggagagtcttggatgtatgttttaatatgtataccttataattctgcctctagccaaatgctatgtttgcaaaatgtggcatct

SEQ ID NO: 10670 - DNA, 635 bp, Homo sapiens
  misc_feature 606: n = A,T,C or G
gcgccgccgagccgggtcccccgccgccgccggagcgacagcctgatttggcttctgcacagttaggaggagcaccaaaccgatgggaggttttgtcagccacacctacaactataaaagatgaagctggtaatctagtccagattccaagtgctgctacttcaagtgggcagtatgttcttccccttcagaatttgcagaatcaacaaatattttccgttgcaccaggatcagattcatcaaatggtgcagtgtccagtgttcaatatcaagtgataccacagatccagtcagcagatggtcagcaggttcaaattggtttcacaggctcttcagataatgggggtataaatcaagaaagcagtcaaattcagatcattcctggctctaatcaaaccttacttgcctctggaacaccttctgctaacatccagaatctcataccacagactggtcaagtccaggttcagggagttgcaattggtggttcatcttttactggtcagacccaagtagttgctaatgtgcctcttggtctgccaggaaatattacgtttgtgacaatcaatagtgtcgatctagattctttgggactctcgggcagtnctcagacaatgactgcaggcattaatgcg

SEQ ID NO: 10671 - DNA, 92 bp, Homo sapiens
tccaccgcggtggcggccgctctagactagtggatcccccgggctgcaggaattcggcacgagctgggccctgctacgctgcactgatgacc

SEQ ID NO: 10672 - DNA, 587 bp, Homo sapiens
cggcacgagggggcagcagacagtggtcagtcctttctttggctctgctgacactcgagcccacattccgtcacctgctcagaatcatgcaggtctccactgctgcccttgctgtcctcctctgcaccatggctctctgcaaccagttctctgcatcacttgctgctgacacgccgaccgcctgctgcttcagctacacctcccggcagattccacagaatttcatagctgactactttgagacgagcagccagtgctccaagcctggtgtcatcttcctaaccaagcgaagccggcaggtctgtgctgaccccagtgaggagtgggtccagaaatatgtcagcgacctggagctgagtgcctgaggggtccagaagcttcgaggcccacgacctcgggggcccatggggaggacaggacctgaccttggacatgcgtgtgacctccacagctacctcttctatggactggttgttgccaaacagccacactgtgggactcttcttaacttaaattttaatttatttatactatttagtttttgtaatttattttcgatttcacagtgtgtttgtgattgtttgctc

SEQ ID NO: 10673 - DNA, 63 bp, Homo sapiens
tccaccgcggtggcggccgctctagaactagtggatcccccgggctgcaggaattcggcacga

SEQ ID NO: 10674 - DNA, 504 bp, Homo sapiens
caaggatagaagcttctcatttatttgggtactttccaaatgtatacaattcaaagtagaaaaataaaaacaaggtaaatcttataaaacacaaatgtttacaccaaaatggtcaaatcctatcatgctggaagataagactgtccacacacgcgcacaaacatccagagtttattgctcttcaccatggaaaaaaagtctcttcccgatgggtatttacaaagcggggagatggagtgtgaaattaaccagtgttgaaatcgtaccacccattcacatcttcaggacagtggcaggaacagcgccgtatgcttgagggtgctgtggtcacagctcgcggccccggcaaccgaggcccagttcccttccagtagtgggcagctcagtgaggctggatagaaagtctgggcaggcagtgggtaagcaattgaagcaagaagagaaaggagatgttcagagaaccaaaggcgcccttgtgaaggttccatctgtctcacaggaggt

SEQ ID NO: 10675 - DNA, 164 bp, Homo sapiens
  misc_feature 13, 21, 29, 43, 53, 59, 95, 110, 116, 119, 130, 142, 146,156, 161: n = A,T,C or G
gccttgcattagntctcagcnatggactnctgaacccagtccnggaaggaagncacctncacatacacaccatactcagccacagcacagctctnatcaaagcttaagancccagncgnataccaggagnccaacaacaggncgtnaacggcaaangcacngcc

SEQ ID NO: 10676 - DNA, 753 bp, Homo sapiens
  misc_feature 667, 682, 690, 724, 725, 734, 741: n = A,T,C or G
ccaggacactgccacttcctttaatacagcggtgcctccacgccccgcatccgatgcagtgttacacgtgtgtgtcgctcaaacatccatcctactgcacatactcagtttcggccagcaggggaggagccgaggtagctcccgctcccttgagccaggcccctgccagacctgagctccctcccaagcctggcttccccaaccggtggccttcatgggccaaaagccattccttcacggccagtcctccggagtagttgcccacggctccgctgctgcagaccactctgtggcacgggatgaggatggggacaggattgcctctcattgctcctcccactgctcgcgcggctttggggttgcctgccagggctgctaattgctggtaagaaatcacttctccgaatttcacaaccttcagcagcttccataacacctgtctggtgaacgactcttgctggaaaacgggatggtgaagagccggcacggggaactcttcgatagcctcgggctggtggaaataggcattcagccaggctgtgcactgcatcaggggctccggactccgagaaccgcagcgggggctgggaactccacggcatcagctgcagacgtccccttgccaggagctttattttcgtgcagacctgctcacaaacagacagcntcagcttccccaaangggctgtnccagtgtggtgcgtttcattttcacaatctttgnntcatttttncaagtancaaagtcgcaaa

SEQ ID NO: 10677 - DNA, 516 bp, Homo sapiens
  misc_feature 487: n = A,T,C or G
gtttgttttgtttttcctcgccaacgtgctcacagatctgatcctaaaagagtctctttttcccatgctttgtagctcggattgtatttctgctgggtgggctgctcctgtctcggccctcctccctcccacccagcctgcctggcccgctgcacttcccggtgtccccgcggctttggagtccttggcccaggtgggtcctctgagtctctagggggacggggcaggtgggaagcgcccaaggtctaggagcactggatggacatgtaaggccagttgaagctgctcccagacagtaacatatcgcggatgagagtttcgatgggggttttacctaccaaacggacgaagaagagctgctcgatgacggaggaggacacggtgcgcagcgagggcagtcgcagcagcagtttgccaaaacggctgggctggttgggtactggctcctcacgtactcctccagtgcgcactgcgacttctcctgcangctctcgatgtgggccgcattcgacaggc

SEQ ID NO: 10678 - DNA, 694 bp, Homo sapiens
  misc_feature 350, 523, 531, 532, 594, 595, 596: n = A,T,C or G
cagcttggcaacagatttattagttcagagtagaaagagcaagagtccaagtgctttgattgttcagtaaaaactatgcctcctgactggagagctgccagcctgctctcccccactcttaacaacttaccctactattaaggcacttgagaagagggagagcaaggaagtcccagaccaaaccccttctggatcctggagagagccagtgctgttgcactggtttccttcagccatggttgagcaaggaaagagccggcagagacctctgtagggcaggaaggccagcccctcaaacgctggtgttaggcacagggacaatgccagtgccatacaggggctggtatctngggcgttattttgattaagctgtaatgaatccatgatggaagacacttgataaggctttgtgggctcaaaggccttacctccagcctgcttctgtctctaggagagtaccagaagctggaggatgggggatgggaccccagagttccctacagagaaaggagctgaccatcangacagggnngaaaagttggttttcccagctcccccctttccagagaagttatgcttctgcttaagcacctnnncaaagagagagagatacagatcctggcaataaaagaattaaatatggctcccccctccagggagacatcccacaagttgggggcagtggacacacccc

SEQ ID NO: 10679 - DNA, 77 bp, Homo sapiens
ctatttaggtgacactataggaacaagtttgtacaaaaaagcaggctggtaccggtccggaattcccgggatggccg

SEQ ID NO: 10680 - DNA, 598 bp, Homo sapiens
ctatttaggtgacactatagaacaagtttgtacaaaaaagcaggctggtaccggtccggaattcccgggatatcgtcgacccacgcgtccgatggttatataaataacagatatggcagaacaattttgttgtagtatttttttccgtagcatttcttaataatagctcagtttttaaaggaggggaacaataccccatgagttcaaattaattttctctactttgaggtataccttcctaattatattttacataggctgttttttttaagtttaaattctcactgttaagttgcattgagagacaattagaaatgttgtaattgtcatatctttacatgtggattatgaacaaatgaaagtttgctgtgtgattgcagttttaaattataacatttcataaatatgtcaattttagaaactcaaactctttcccatcttttgtatggataaagtttatggtttcatttctgaaaatagagttggtctgctgtgctaacttcatgtttcttattccaaaggcttgattatatttttttctccagtgattaaaaatgcagcgaaaatccaatctacaagttcatatattggtatttct

SEQ ID NO: 10681 - DNA, 163 bp, Homo sapiens
catggtgggttggctggcggtaatagtatatgaggaaccttttaaacgacaacaatactgatttctttcaggatgatttttaaaatatagaatggaatgtgttatcctctttgtgaaacgcttcctataactcgagtgtatatgggaacaaaaagctattggt

SEQ ID NO: 10682 - DNA, 593 bp, Homo sapiens
  misc_feature 555: n = A,T,C or G
ccgtgtccacaaggcactttatgcattcaaaaccaccgaattcacatccaggtttgctcagacagaggcccagaggcgaccccgctctggcgtggctaccacctgagcggctggcggccctggcccagctcggcctccgcgtaggcgtcatacagcaccttcaggtgcaacagcagctgctccaggttctcgccggtcaacgccgacagcacgatgacctcctgtcccaagtgatcccggagctgggacagattggcttgggcttcagggaggtcaatcttgtttgcgacgattgcgtggggcctcgcagacaggcccttttcatacatctccagttcatattttaaatcgtcaacttgagtccacggctcaggctgagaaagatccaccacgaacaagagaaagcggcagcgctcgatgtgcctgaggaaggcggaccccagacccctgttctggtgggcgcctcgtatgatgcccgggatgtcggccactgctatttgtaggtggccttcgtagtggacgatcccgacgtggggcttcaaggtggtgaacggntaggaagccacggcgggtctggcgtttgaaatggcctg

SEQ ID NO: 10683 - DNA, 731 bp, Homo sapiens
caatggtccattctgtttattcagaacggtaacataaatacaccttaaatattaacattttttatatacagaaatgaccccactccccaaaaagtttgaaaaaatattgtctcctcctcctttataaaaccctagatgacctatgaaggcacagccaagcccttgatgcatcttcctcagcacaatttggccaacgctggagggaaggtcaaagaggtggaaggaaaatgttatgctgaaaatccctttccaacaagggtgccaagcgccggtcttgaacgaagtaccctgcctaagcatcatttcctaaagcgcttgaagagcgggtgtacatgtttgctgggcgccttgctccgcgatgagtggtactccatgtacacagtgtcgtcggccccagacatagaactcatggtgccaaagcgccgagatgcctggctggatctggagccaaattccccagccaccacctcctcctcggcatccaggtcagtggctgccaggactttctgtaagagctgctgttgctcttcttttgtcgaaaacgccaagtcttcctcctccatgccagcgagtttcgtgatcaccttgaagctataaccttgatctaccaagaatctcttgcgcttggttgagtaagccattttctgtgtgtcctgggataccagtgagtagaaaaaggatttgtactctttctgcacccatcctttttttagttcaagcaacccccccta

SEQ ID NO: 10684 - DNA, 601 bp, Homo sapiens
cttcatggtaaaattacttcaccagccagcgagacaatatcttccgtaacgtggaagttttgatttacgtgtttgacgtggagagccgcgaactggaaaaggacatgcattattaccagtcgtgtctggaggccatcctccagaactctcctgacgccaaaatcttctgcctggtgcacaaaatggatctggttcaggaggatcagcgtgacctgatttttaaagagcgagaggaagacctgaggcgtctgtctcgcccgctggagtgtgcttgttttcgaacgtccatctgggatgagacgctctacaaagcctggtccagcatcgtctaccagctgattcccaacgttcagcagctggagatgaacctcaggaattttgcccaaatcattgaggccgatgaagttctgctgttcgaaagagctacattcttggttatttcccactaccagtgcaaagagcagcgcgacgtccaccggtttgagaagatcagcaacatcatcaaacagttcaagctgagctgcagtaaattggccgcttccttccagagcatggaagttaggaattccaacttcgctgctttcatcgacatcttcacctc

SEQ ID NO: 10685 - DNA, 669 bp, Homo sapiens
tggtgttcagagcctcaacaaaaccaaaggataaagggaagtataaccaagcgtgtgaaggcaaagaagaatgctgctccattcagaagtgaagtctgctttgggaaagagggcctttggaaacttcttggaggttttcaggaaacttgcagcaaagccattcgggttggagtaattggtttcccaaatgtggggaaaagcagcattatcaatagcttaaaacaagaacagatgtgtaatgttggtgtatccatggggcttacaaggagcatgcaagttgtccccttggacaaacagatcacaatcatagatagtccgagcttcatcgtatctccacttaattcctcctctgcgcttgctctgcgaagtccagcaagtattgaagtagtaaaaccgatggaggctgccagtgccatcctttcccaggctgatgctcgacaggtagtactgaaatatactgtcccaggctacaggaattctctggaattttttactatgcttgctcagagaagaggtatgcaccaaaaaggtggaatcccaaatgttgaaggtgctgccaaactgctgtggtctgagtggacaggtgcctcattagcttactattgccatccccctacatcttggactcctcctccatattttaatgagagtattgtggtagacatgaaa

SEQ ID NO: 10686 - DNA, 357 bp, Homo sapiens
tatgacgtcgcatgcacgcgtacgtaagcttggatcctctaaagcggccgcctactactactaaattcgcggccgcgtcgacccacaactcaacggctacatgggaaaaatccaccccttacgagtgcggcttcgaccctatatcccccgcccgcgtccctttctccataaaattcttcttagtagctattaccttcttattatttgatctagaaattgccctccttttacccctaccatgagccctacaaacaactaacctgccactaatagttatgtcatccctcttattaatcatcatcctagccctaagtctggcctatgagtgactacaaaaaggattagactgagccgaat

SEQ ID NO: 10687 - DNA, 175 bp, Homo sapiens
gtgaccctagggctggttttgaaactttaggtttttttgacctgtgggcctcggggcagaaaaaaaaccctaccagcgaaccttttttttggggttgtgggagaatccctgcaccccacttgaggggggggatttttttggtggaggaatcccctccgccgtgggtttggggttg

SEQ ID NO: 10688 - DNA, 678 bp, Homo sapiens
tccaccgcggtggcggccgctctagaactagtggatcccccgggctgcaggaattcggcacgagctccctcggggccggagagtggccctacaccagccagcgctgagcataatgagtaactaggtaggggcaggtgggtgatctctaagctgcaaaaactgtgctgtccttgtgaggtcactgcctggacctggtgccctggctgccttcctgtgcccaaaaaggaaggggctattgcctcctcccagccacgttccctttccttctctccctcctgtggattctcccatcaggcatctggttctcctcttaatgccagttgaagatggtcccttacagcttcccaagttaggttagtgatgtgaaatgcttctgtccctggccctacctccttccctgtccccacccctgcataaggcagttgctggttttcttccccaattcttttccaagtacgttgtggttaccctactccccaaatccctgagccagaagtggggtgcttatactcccaaaccttgagtgtccagccttcccctgttgtttttagtctcttgtgctgtgcctagtggcacctgggctggggaggacactggacccgtctaggtttttataaatgtcttactcaagttcaaaccttcagcctgtgaatcaactgtgtctcttttttgacttgg

SEQ ID NO: 10689 - DNA, 497 bp, Homo sapiens
tccaccgcggtggcggccgctctagaactagtggatcccccgggctgcaggaattcggcacgagcctgggtctgtctctgccacctggtctgccacagatccatgatgtgcagttctctggagcaggcgctggctgtgctggtcactaccttccacaagtactcctgccaagagggcgacaagttcaagctgagtaagggggaaatgaaggaacttctgcacaaggagctgcccagctttgtgggggagaaagtggatgaggaggggctgaagaagctgatgggcagcctggatgagaacagtgaccagcaggtggacttccaggagtatgctgttttcctggcactcatcactgtcatgtgcaatgacttcttccagggctgcccagaccgaccctgaagcagaactcttgacttcctgccatggatctcttgggcccaggactgttgatgcctttgagttttgtattcaataaactttttttgtctgttgataat

SEQ ID NO: 10690 - DNA, 492 bp, Homo sapiens
tcaataaatatttattataattaaaagaccgtagcaatacccccaccaccaagacccttcacccagaaatagagagattggaattgtaaacaccgtatccagttctgaccaccctgaaagccagggcatcatcgcgcccgttttgtcctaaatgaagggctcccggacaatgtcctgaaagtggcagatgacctcatcttccactgtccaccgggcacagggcagaccggggtgctctatggggtcctggccgatgcctgggtccaggggtgttccccaggtggtcaggcaaggacacgcggtcattctgcctcctgcgtcttgtcctcgggcgcctgggaccctctctggttccacatgtggttgttcagccccagctgtaccatctgtgcgtggtggataatgagggggttgcagccctgggctctgagggggtgccggtgaagccgtagggaaaggcttggggactgccgggaaaggcagtgacttttg

SEQ ID NO: 10691 - DNA, 769 bp, Homo sapiens
  misc_feature 1, 695, 697, 699, 730, 732, 745, 760: n = A,T,C or G
nacgacagaagggaacttgtcatgagtgtaagcattaaggacattatgcttcttcgattctgaagacaggtccctgctcatggatgactctggcttccttaggaaaatatttttcttccaaaatcagtaggaaatctaaacttatcccctctttgcagatgtctagcagcttcagacatttggttaagaacccatgggaaaaaaaatccttgctaatgtggtttcctttgtaaaccaggattcttatttgtgctgttatagaatatcagctctgaacgtgtggtaaagatttttgtgtttgaatataggagaaatcagtttgctgaaaagttagtcttaattatctattggccacgatgaaacagatttcaactgataaagagctggagaactccatgtactttggaatctcctccaagatagccagagtttaatacatcttcattctcaacactctccaaagaacttgacctaccttatgggttccatatttttcttcttaaatgtgcatcaatcatgccttgcccccaacctttaaatatattcttagacctggtaaatgcactcagacttgcgtctttaggaatttttaactttctttcactaattggcacttaaattttttctttataaagcttttgaagtcataaacaagaccataattgatgatagacctaaacattcctctggggggngngnacattccaaactttttttctttccctggtgnangggcacatttaanttttaggacttttanagtcctaaa

SEQ ID NO: 10692 - DNA, 635 bp, Homo sapiens
  misc_feature 170, 171, 172, 174, 381, 451, 458, 526, 528, 549, 572, 576,600, 602, 613, 616, 622, 624, 626, 627, 630, 631, 633, 634: n = A,T,C or G
ggttgaattttaaggaattcattgtatcttttaatattctgaatgctagttatttgtcagatacatgttttgcaaaccatttatctgtatttggtttctttttgttatcttagcagtgtatcctgaagaatagttttaaattttgatgtaatccaaaatatttcggttgnnngngttctttgttatcctatttttgttgttgttgttttatagatatgggggtctcactacgttgcccaggctggtcttgatctcctgaactcaagtgatcctcccacctcagcctcccatccttgtctacctaattaggctttgtgtaactcagtgttgcaaagctttgacatctgtttgagttaatgtttatatatgttgttacttaanggtttcacattaaatttaaacatacttatattttataaccaaacaagtcatgttggggcatactcattangattgantgctttcttacaccaaaatacatgtatacaaagatttaaaacactttcggccggcccgggaatcccancnctttgggaggccgaggcgggnggatcacaaggctgggagatcangacntctggctacacggggaaaccctgncnctcctaaaaangcnaaaatngncnnacnngnng

SEQ ID NO: 10693 - DNA, 762 bp, Homo sapiens
  misc_feature 695, 700, 724, 734, 749, 751, 757: n = A,T,C or G
ttatcgatcatattttagtgtttccatcccaagattccacatgttcttacacatgtcatcaactgtcaacttctcgcatgggttcaatttgtgatgaatgtttatatttgctaggttctactgatccacttctgaattacccacttgcccctcgggagacacataatgattttagggtgaggaaaatgctgctagaaaagggactttgtggctgggcgcggtggctcacgcctgtaatcccagcactttgagaggctgaggcgggcagattatgaggtcaggagatcgagaccatcctggctaacatggtgaaaccccatctctactaaaaatacaaaaattagctgagcgtggtggcttgtgcctgtaatctcagctacttgggaggctgaggcaggagaatcgcttgaacccgggagtcggaggttgcagtgagccgagattgcgccactgcactccagcctgggcgacagagcaagactgtctcacaacagaaaaagaagaaagaaagtgactttgtttgggctgcccggcaacggatcccaagatagtgattccagagcaagttgttacgtggaggtgaagaaaaccctacagggctgaggttgggagaaaaagcagtcctacagaagtgtattaagcaagtcccactggactgttaactttctccatggagaaatcctggagccccaaanaccancttaaagtaccaactgggcgcagnacctgaatanttgcccacttcccancnccttgngctgt

SEQ ID NO: 10694 - DNA, 690 bp, Homo sapiens
  misc_feature 1, 15, 581, 600, 614, 615, 620, 628, 637, 639, 661, 662,673, 678, 682, 685, 689: n = A,T,C or G
ngggttttttcaagnatggagtctcgctctgccacccaggctggagtgcagtggtgcaatctcggctcactgcgacctccgcctcccgggttcacgtgattcccaagtagttggaactataggcgcatgccaccacgcctggctaatttttgtatttttagtagagacggggttttgcagtgttgaccaggctggtcttgaggtcctgacctcaaatgatccaccagcctcggcctcttaaagtgctgggattacaagtgtgatgaccttgggcccctcccctcctttctccatcatggtcgtggtggtggggctattgaccttttaagcaatatttttgaaacaaaaaattatgtctaggatggagttatttggtttctaagcctcagtgagcccttcaccaaaatggcttgtagtgttttggaggatgtagacattatattcctatcatggcccaggcgaggtggctcatgcctataatcccagcactttggcaggctgaggtgggaggattgcttgagaccaggagtttgagaccagcctgggcaacatagtgataccccttctctacaaaaaataanaaagttggctggacatggngcacctgcctgcanncccanatactcangaggctgangngggaggattgcttgaccccggnnggggaggctgnctganctgnatntacnt

SEQ ID NO: 10695 - DNA, 374 bp, Homo sapiens
attcatataaaaggaaacagacaaacataacgctgtgcatgtattctctcttagaccagaacaggcataggatgcacttttaatttgtccatttcgtagagtagaaattgtttttgctgaaatgaacaccttaggatgctgaagaatatgacccgtcccatggaaaacattcaaaaatgtgtgtagcgctttcttcccaagggtgtgtgtgcgcatattttaacactaattcactttctacttccgttgctatcctttctgtgagtctttctcagaatctcagaaaagaaactaaattgttcactctagttatcaatgctgtactctatacctggaatttgctaaaagggcagattttaagtattctcaccaca

SEQ ID NO: 10696 - DNA, 670 bp, Homo sapiens
  misc_feature 537, 571, 577, 594, 605, 609, 618, 628, 640, 654, 655, 658,659, 662, 664, 665, 667: n = A,T,C or G
tgagctatctaggaatggagaagatattagtactgtttacccaaagtactggagtgtgaacataaaggtttgaataagaccaagttggtaatagctattaatgtggaagtatgtttgttctctgtgcaaattggcaaaatttaatttggctttgagaaaaagagaaatgctagtagcaggttacttttgttgccagttgagagaaaaattcaagtagcatttcatgccaggagagtattttactggtgttagagtggaagtggggagtgctcatggatctgcaggtcacaccaccaaaccaggatttactgattaataatggagacaggataatttttggcctcattaggaagaatgaagatgagaaatgtagactatgccttcaggtatgtctgtcctacctcaattttaagtgtacaaggaatcttttagattaaggtttcttcatgcctgcctgcctgcctgccaacataataagctgtaaaaccttgtttagttttccttaaatccagaaatgattctataccaaatccttcnaatcgaatcactcttaagggagtaagtgaaaacntgtgtntctgccttgctggcttntctatttgcanatgnctcattctntttgctaacnaatttcttaacntccttgatgacctnntcnnttngnngnaat

SEQ ID NO: 10697 - DNA, 850 bp, Homo sapiens
  misc_feature 2, 11, 13, 16, 20, 21, 32, 43, 45, 52, 62, 65, 72, 77, 101,627, 642, 644, 688, 690, 718, 779, 780, 788, 804, 809, 838,839: n = A,T,C or G
anatcttgggntncgntaanncttgcttgttncttttggccgnancggcctncggctgcganagncgacagnagggnattaaaagttgtagccatctgagnataggaaagtttaagtgactgaaaatgtagaatacttcaacgtgcatgttactacttaaaactagtctttctgctggaatctaaggagtatatatatatatgcccccttgtggttaattattgctcctttaataatttttacttgaaatgatccacaattatttcataactttagcagtgtgttttggaactactgtacttaaaggtttgtttgtttgtttttgccatactgtataatttgggtgaggtctacaaaattgggtgtgactttcctttgcaaatggatttctcctggggaattttcttggctgttctggaaatgctttcccacagctgggtaactgttctaaatggctttgataatgctcacacatcttggagtttcagaaggaaattattctgcatcacaaatactaaattttatatttctagattactataggtcatttgatattggtttatggtgcttttatttccttaacttgaaaacatctttctgagatttcagagtcctcaaatttcttanattaagagacaagangncagtgcagtggttcacacctgtatcccacactttgggaggccangngggtggatcatttgaggtaggagttganacaacctggccacatggcgaatcctctctctactaaatacaaaattacctggcatgggggnngggcctgnatctcacctctgggangctgngcaaaatgcttgaccagagggggggtgcnngacccaatccc

SEQ ID NO: 10698 - DNA, 187 bp, Homo sapiens
  misc_feature 17, 21, 43, 50, 62, 65, 71, 78, 82, 90, 91, 100, 101, 119,161, 171, 172, 175, 177: n = A,T,C or G
gggttcggctgctatangacnaccgaaggtacggctgctatangacgacngagggagtgcanatncttgancccctcncccngctgctgnnatcttatcnngaagctgttgatctcctnttccacgtgctttctatctattgggaaacggcctttccctgngttgattgcnncantntttttttaga

SEQ ID NO: 10699 - DNA, 280 bp, Homo sapiens
tgacttttatttatatgtgcacattctttgggagggtgttaggactctttcggttgcaagtgtcagaaactcaactcaaaggagcttaaacaagcaccagaagttaccgggtcacacatctgagatgcccaagggagctcccaatcaagctggatcagcgagtcaaaccgtgtgctcaggaccctttcttgctaggtcatctccctgtggggagaccaactgtcccagtttgcccaggtctgaggggcagtcctgggcatgggaccttgatgggtacaac

SEQ ID NO: 10700 - DNA, 745 bp, Homo sapiens
  misc_feature 5, 21, 582, 618, 650, 733: n = A,T,C or G
acagnaaggaggaaacccagnagatgtggtagtaggggttgtgagggggcgctgtggggccatgcctggtggagatccaccacgttaagccttctgctaactgtttgtctctgactccatgatctcttctgcctcttcccattctggattctgctcatctcaggttgctggtcaaagcttcctgtttatatttagagagtgtaagaagagtaagaacccttttattgccactgacccatattcatatttaatgttgcttgtgttagtcggctcctcattggttctctttttggaagcaagcagggacttagagagtccagaggaagctcagagggctggagctttagttcaggttggctgaggtgcttgttcttaattcttctgtgacaccatgtctgtctcagtcactgcatttttaacattgttttgaaaacatttctcggccaggcgcggtggctcacacctgtaatcccagcactttgggaggccgaggcaggcagatcacctgaggtcaggagtttgagaccagcctggctaacatggtgaaaccccgtttctactaaaaatacaaaaaattagctnggtgtggtggcgcacgcctgtagtcccagctactcnggaggctgaggcaggagaatcgcttgacccanaggcggaagttgcagtgagccgaatcgcgccattgcactccagcctagtgacagactgaactgtctcaaaaacaaaaaaacanaaaaaaaaaaac

SEQ ID NO: 10701 - DNA, 786 bp, Homo sapiens
  misc_feature 13, 14, 15, 24, 30, 36, 45, 48, 50, 66, 69, 76, 630, 642,712, 714, 748, 764, 767, 768, 781, 784, 786: n = A,T,C or G
acaaacttggggnnnaaaaacaancttttnttgttncttttggcncgnancggcctaggctgcganagnagacagnagggcagggctctcgccactcacactttcattcattcactcattcattcgttcgcccattcgttcattcattcaccggcccgcccattcattcattcgttcactcacccattcgttcattcactcgttcattcattcactcactcgttcattcgttcacccactcgttcattccttcactcatttgtttattcgctcaccctttcatgcattaattcactcacccattcgttcattcacttattcattcattcgcttgttcattcgttcattcactcgttcattccttcacccatttgtttattcgctcaccctttcattcattcactcattcatttgttcacccattcacgggctcacccattcattcattcattcattcgttcatttactcgttcattcgttcacccatttatttgctcactctttcattcattcattggtctcacccatttgttcattcattcattcttatgtgacccattcacttattcattcccacaccattccttcctgcattcactcattcctgcattcattaactcactcatttgntcatccatttgntggctcacccattcatccattcattagctcactcacccaccacattaacacataaaaccctcattacacnanaaaacccctctggtcataacctatcccccatttnctctatccttaacccnacnnattaccgggtttnctntn

SEQ ID NO: 10702 - DNA, 590 bp, Homo sapiens
  misc_feature 516, 525: n = A,T,C or G
aagactggcgtccaagactggaacaactcagtctcgctctttccgaatccttgcccagatcactgggactgaacatttgaaagaatctgaagccgataatacaaagaaggcaaataactctcaggagccttctccgcagttggcttcctcggtagcctccacacggagcatgcccgagagcctggacagcccaacctctggcagaccaggggttaccagcctcacaactgcagctgccttcaagcctgtaggatccactggcgtcatcaagtcaccaagctggcaacggccaaaccaaggagtaccttccactggaagaatctcaaacagcgctacttactcaggatcagtggcaccagccaactcagctttgggacaaacccagccaagtgaccaggacactttagtgcaaagagctgagcacattccagcagggaaacgaactccgatgtgcgcccattgtaaccaggtcatcagaggaccattcttagtggcaggagaattgcttgaacccanaaggtgaangttgcagtgagccaagatcgtgccactgcactccagcctgggcaagagagtcagactcccatctc

SEQ ID NO: 10703 - DNA, 115 bp, Homo sapiens
agtggatcccccgggctgcaggtggtcctgtgcggtcacttatccaacatgcctgaggaaacccagacccaataccaaccgatggaggatgaggaggttgagacgttcgcctttc

SEQ ID NO: 10704 - DNA, 253 bp, Homo sapiens
acccaccatggagctgtctcctgccgacaagaccaacgtgaaggccgcctggggaaaggtcggtgcgcacgctggcgagtatggtgcggaggccctggataggatgttcctgtccttccccaccaccaagacctacttcccgcacttcgacctgagccacggctctgcccaggttaagggccacggcaagaaggtggccgacgcgctgaccaacgccgtggcgcacgtggacgacatgcccaacgcgctgtcc

SEQ ID NO: 10705 - DNA, 579 bp, Homo sapiens
aagcttgcggccgcgccctggtcgtgcgcaaggtgccccccggctactccatcaaggtgttcgacttcgagcgctcgggcctgcagcacgcgcccgagcccgacgccgccgacggcccctacgaccccaacagcgtccgcatcagcttcgccaagggctgggggccctgctactcccggcagttcatcacctcctgcccctgctggctggagatcctcctcaacaaccccagatagtggcggccccggcgggaggggcgggtgggaggccgcggccaccgccacctgccggcctcgagaggggccgatgcccagagacacagcccccacggacaaaaccccccagatatcatctacctagatttaatataaagttttatatattatatggaaatatatattatacttgtaattatggagtcatttttacaatgtaattatttatgtatggtgcaatgtgtgtatatggacaaaacaagaaagacgcactttggcttataattctttcaatacagatatattttctttctcttcctccttcctcttccttactttttatatatatatataaagaaaatga

SEQ ID NO: 10706 - DNA, 375 bp, Homo sapiens
gcgaattgggtaccgggccccccctcgaggtcgacggtatcgataagcttgatatcgaattcggcacgagcagaaattgtgtatgttagtaaattgcgtatgttagtaaatacgttagtaaataagggagaaacttgatatctatagttccatgatgatactgacaacctcaaagttcttgtctgtggtggttatttggattctggaaaactactgtgtgtttctgttgtcttgatctgaatgcctctcaagaatgacactttcttttaagagctttatctctacaagctatgtgttttaagaactctggggatgaataatcacacagtgtgctgacttaggatatcgttgtgcataaggctgtttttttttttt

SEQ ID NO: 10707 - DNA, 87 bp, Homo sapiens
gtaactgaaaatatcttgtttaagctctctgaaacttacttgatggaaacctgtgagtcttgggttgagtacccaaatgctaccact

SEQ ID NO: 10708 - DNA, 459 bp, Homo sapiens
ctgaaaacagattttagcctgataggttgttcctctatttgaaagcctttacaatttcggagggaagtttccaaatcaatcagtaagtaccccccactccaggtttatccttatgtaaagtgccccctttgcacatgcaagattgaataaaccttgaaaatattatgctaagtgaaagaagccggtcacaaaggaccacatggtatgtaattccatttaaataaaatgtccaaaatagaccaacacatacaaacagaaagtacatttgtggtggcccaggattaggggagttggggggaaatggagggatatggtgtttacttcagggtaatgaaaatgatctaaaatttattgtggtgatgtttgcataacagtgcaaatatactgaaaaccactgaattttacactttaaatcagtggcttctgtggtatgttatcaatatttctcaataaaacttc

SEQ ID NO: 10709 - DNA, 518 bp, Homo sapiens
tcagctttgggtggtggccgctgccgggcatcggcttccagtccgcggagggcgaggcggcgtggacagcggccccggcacccagcgccccgccgcccgcaagccgcgcgcccgtccgccgcgccccgagcccgccgcttcctatctcagcgccctgccgccgccgccgcgatcatgctgagcgtcctgatgcaggccatcaagtgtgtggtggtgggagacggagctgtaggtaaaacttgcctactgatcagttacacaaccaatgcatttcctggagaatatatccctactgtctttgacaattattctgccaatgttatggtagatggaaaaccggtgaatctgggcttatgggatacagctggacaagaagattatgacagattacgccccctatcctatccgcaaacagatgtgttcttaatttgcttttcccttgtgagtcctgcatcatttgaaaatgtccgtgcaaagtggtatcctgaggtgcggcaccactgtcccaaaactcccat

SEQ ID NO: 10710 - DNA, 150 bp, Homo sapiens
ttcggcacgaggttggtgtgcacctgcaatcccagctactcaggaggctgagacaggagaatcacttgagcccaagaggcacaggttgcagtgagtcaagatcatgccactgcactccagcctgggtgacagagcaaggctctgtctcaa

SEQ ID NO: 10711 - DNA, 603 bp, Homo sapiens
  misc_feature 547: n = A,T,C or G
ttcggcacgagggggaccaccacctgcacgaccagaatatgacctggtttgcataggcctcacaggttctggcaaaaccagtctgttgtccaaactctgcagtgaaagccccgataacgtcgtgtcgaccacaggttttagtattaaagcagtgccattccagaatgccatcttgaatgtaaaagaacttggaggggctgataacatccggaaatactggagccgctactaccaaggatctcaaggggtaatatttgtattagacagtgcctcttcagaggatgatttagaagctgctagaaatgagctgcactcagctcttcagcatccacagttatgcactttaccctttttaatattggccaatcatcaagacaagccagcagctcgctcagtacaagaggtatgtctcattagcatgacaactctttgtcttccttgcttgtacttttgctgccacgttggaacctggaaaaatgcatgtaattaggaatgtgctggttatgctgctttcaacatgaaaccttagttttcataggaagcaganagcctatatcaatctgttagcacttgtttacatacctaaccctacttggagagcac

SEQ ID NO: 10712 - DNA, 628 bp, Homo sapiens
gcggccgctctcctacccggacaccgacgtcattctcatgtgcttctcggtggacagcccggactcgctggagaacatccccgagaagtgggtccccgaggtgaagcacttctgtcccaatgtgcccatcatcctggtggccaacaaaaaagacctgcgcagcgacgagcatgtccgcacagagctggcccgcatgaagcaggaacccgtgcgcacggatgacggccgcgccatggccgtgcgcatccaagcctacgactacctcgagtgctctgccaagaccaaggaaggcgtgcgcgaggtcttcgagacggccacgcgcgccgcgctgcagaagcgctacggctcccagaacggctgcatcaactgctgcaaggtgctatgagggccgcgcccgtcgcgcctgcccctgccggcacggctccccctcctggaccagtcccccgcgagcccggagaaggggagacccgtgtcccacaaggaccccaccggcctgcctggcatctgtctgctgacgcctctggcttgcgccaggacttggcgtgggcaccgggcgcccccatcccagtgtctgtgtgcgtccagctgtgttgcacaggcctgtgctccccactgagtgccaagggtc

SEQ ID NO: 10713 - DNA, 731 bp, Homo sapiens
  misc_feature 5, 363, 368, 385, 425, 457, 487, 531, 540, 584, 608, 629,636, 638, 645, 655, 678, 689, 690, 698, 702, 704, 708, 713,715, 718, 729: n = A,T,C or G
aaagnaatttctttcctctgctcactttaagaacttttaccgactccaaaaatctcaggaattaaacttttaacagttacagcaataaagaatagttagtactccaaaaatattatatttaagatgctcaacaagaaaaaaatgcaaatgtaatatttttttcaaatgacttctttattgacttgtccaaatttcaaaagtgcctacccttcaataaaacttttttattctgatctccataaattacttagtcttctatgtatagctatcaaggaaataaaaccaattttgccacagccacaactgtaaatgtttttgtacccatgctgaaactcataacaacacagacataaaaatagctgngaggntttgctttttttgttgncagctatcttaagaatcattaaatacacctgctttgggtnaaactctttgcaagcagtaattaacactagtnacagtgaaagcacaagatttccaaatcagncggtttctcaaaaaaatatcgtataagtgactcattctgtctgntaactccanacctcccagcttggagccaaatcttttcatgtgagaatgatatngatttcctaaaaaactgggaaggnggcatatcttggcccattttnattctgntntaaaaanaatggcttcncttttaaggggaattggaattanaaccctgggtnnatttcttnaagngntaanaaaangnggncccaagaacantg

SEQ ID NO: 10714 - DNA, 622 bp, Homo sapiens
caagctacttgttctttttgcaggatcccatcgattcgaattcggcacgagacgtggcgacccgctgaatttaagcatattagtcagcggaggaaaagaaactaaccctctagttttaattggacacttctttgctgttgcaatctatgccgtgtatttttgctttaagtcagaaccttggattacaaaacctcgagcccttctcagtagtggtgctgtattgtacaaagcgtgttctgtaatatttcctctaatttactcagaaatgaagtatatggttcattaagcttaaaggggaaccatttgtgaatgaatatttggaacttaccaagtcctaagagacttttggaagaggatatatatagcatagtaccataccacttataaagtggaaactcttggaccaagatttggattaatttgtttttgaagttttttgtatataaatatgtaaatacatgctttaatttgcaatttaaaatgaaggggttaaataagttagacatttaaaagaaatgattgttaccataaattagtgctaatgctgaggagaactacagtttttcttttgaatttagtatttgagatgagttgttgggacatgcaaataaaatgaagaatg

SEQ ID NO: 10715 - DNA, 275 bp, Homo sapiens
  misc_feature 13, 21, 31, 32, 53, 60, 65, 80, 90, 94, 102, 111, 115, 119,123, 140, 157, 166, 175, 183, 184, 197, 205, 216, 221, 223,226, 230, 232, 235, 245, 256, 272: n = A,T,C or G
taagggtacatgntgctatangacgaccgannggtcctgctgcttagaagacnacagaanggtantgctgcttataagangacagatggntacngctgcganaagaccacngtangggnacgnctgactgaagactactntaagggtgcgtgctgcncagaagacnaccttgggntcagcttnnattaagacgactnaatggtcnggcttcgatgnagacncntgnacgntncgnctgccaatangtctacatatnggtcctgttttgtgantac

SEQ ID NO: 10716 - DNA, 787 bp, Homo sapiens
  misc_feature 3, 4, 5, 6, 9, 638, 653, 662, 690, 693, 700, 745: n = A,T,C or G
ccnnnncantcggccgagtgcacccttttgtattaaacactgcaagggtgatgcaggggagcaggaaagccatcctaaactcactactgagtacgattcagtatgttcctgtggatgtctgctgtgactaatataaatttcttgcagaatcagctacacttaattatgttgctgatagacaagcatccacgcttcagctggcactaagtgttttcattgtaggatcagcagcaggttaaagactgaacggttagtgaagacaaatgtcttaagaggctgcgatgtctaggttgggcttgtgacttcttagtggcctagccttcttgatggcaccttgaaagtgaacttctagaaatctacatttaaaaggcaaagctttaaaagcagagctagtctattctagttactgatgcaactaaaattctgtatttcttaagatggagccactgacgagatgtcacagtatagagcctgcagtctcaactcattgtgatcctaatggtctgggtgattggatggttttgagttgttagggattttgagtttttcattttattgcatatctgggttggatggttagactaaaaggaaacccacggaatatttaccctgggggttacattttaatattttaatgnaactgggtctaaccnacctttaangggggattttttgaaaccccaacttccngangcttgtngggccttgcacaattttgcccctggtttttaataataccttgggnattcaatatccctctttatcaaccctcaaaactccaaaaccc

SEQ ID NO: 10717 - DNA, 268 bp, Homo sapiens
  misc_feature 1, 20, 23, 29, 54, 72, 74, 79, 86, 102, 108, 114, 140, 164,172, 173, 178, 197, 213, 219, 221, 222, 234, 237, 238, 249,257, 260, 262, 265: n = A,T,C or G
ngggtactggctgcgataanacnacatangggtacggcttgcgggattacgacntaatggtacggctgctancntgacnacataanggtacgggtgctatantacganacaatnggtcggctgcgtgatgaccactgacnggttcggctgccatgatgaccacncagtggtnnggctncgatcacaccacaaagtgntgctgctgcgattatnacatananngttacggctgcnagnncaccattgaanggtgcggntgngnganacg

SEQ ID NO: 10718 - DNA, 334 bp, Homo sapiens
cagaatggcagatgttattcgagctgaactcttagaaattatcaagcgaatcgagcttccctatgcagaacctgcttttggctccaaggaaaacactctaaacataaagaaagctcttctgtccggttactttatgcagattgctcgggatgttgatggatcaggtaactacttaatgctgacacataagcaggttgctcagctgcatcccctgtctggttactcaatcaccaagaagatgccagagtgggtcctcttccataaattcagcatttctgagaacaactacatcaggattacctcagaaatctctcctgaactatttatgcagctg

SEQ ID NO: 10719 - DNA, 495 bp, Homo sapiens
ctccggaactaaacggggtgaggtcacattcggttatctctaacgttggaaaacgatggagctaacacccattatggagattaaccacttttcaccaggtttttaacttaagtcgtgaggaatacaacggtgaacacaagattcattttattttcatcaccatgggacgtatcctgttgttgagttctctgggtcagacctctgaagacttctcagatggatcctagtctctgggcttgccctgaaattactcgctgctcagggagagagttgaaatggttggcatcctcccactctgttgctccggctgtgtcccctcgctctgttgttccagctatgtcccctctgttgctccaactgcagctcattctgttagagttcctcattcagctggtcactgtggccagagggtgttggcctgctcccttcctcaagtattcttaaagccatggatttttgtggagcatttttcttcctggctctcccttgagttat

SEQ ID NO: 10720 - DNA, 616 bp, Homo sapiens
  misc_feature 482: n = A,T,C or G
aagtttgtacaaaaaacaggctggtaccggtccggaattcccgggatatcgtcgacccacgcgtccgatttgtttcagtggtttggtgttagaactgctagaagggaatctcactatcttttcttcctttttgagatagtcttgctctgtcatcaggctggagttcagtggcgcaatctcgactcactgcaacgtccgcctcctgggttcaagcaattctcctacctcagcctcccaagtagctgggactacgggcatgtgccactatgccaagctgatttttgtagttttagtgcagatggggtttcaccatgttggccaggctagtcttgaactctgacctcaagtgatccacccgcctcagcctcccaaagtgctgggattaccggcgtgagccaccgcgcctggcgacttgtgctaacgttaaaccaaaattatggggggtcattttttgtggacggagtttctgcactaggtcctancagaccaaagtagttacatatattaagtgccacacagttacatggaaactttacagaccagtttttcctgaaaacagaaaatcccagtctgtctgaatcagaatataaaggaagtcccttcttctttaaccctt

SEQ ID NO: 10721 - DNA, 437 bp, Homo sapiens
tttgtacaaaaaagcagctggtaccggtccggaattcccgggatatcgtcgacccacgcgtccggtgagccgagatcgcgccactgcactcccgcctgggcgacagaacgagactccgtctcaaaaaaaaaaaaaaaaaaaaaaaaattttttttttttctaatttagcaaaagtgaattttggaattcccagaatttccagaaaaaagaaaaaaaccaaccttaaaaacttaaaactttacggggaaaaaaaaaaaccccaaattttataaattgaaaaagggacctttttgttcccaaagggaatttttcctaaaaaaaaacttttgaatgaaaattttgggaggaaaaaaaacttcccgggttattcccaaaaaaaaaaagcctccttaattaccaaaaaaattaaattttggggaaaaagttttaattgggac

SEQ ID NO: 10722 - DNA, 536 bp, Homo sapiens
  misc_feature 209, 442: n = A,T,C or G
aagtttgtacaaaaaagcagctggtaccggtccggaattcccgggatatcgtcgacccacgcgtccgacactactctctggaaagactgagccaattacggggtcatctgtaaagtctaagtgctgcagtttccctacgaccattggattttgtttgtagtttgatattgtcttactgtcccttgaagttgtaatttgtaattctttanttttcaagaaggactctacatgtttccttgtgatgatggccttgagttactcatgtgtacactgcctatttatccccattgagcccccactgcccgaacatgttgatggcattttatatagtaagctgtcagttacttaatgtacaaatattcttccattccatgtttttctcttaaaattttactttattggccaggcgcagtggctcacatctgtaatcccagcactttangaggccaaggcgggcggatcacctgaggtcaagagattgagaccagcctggccaacatggtgaaaccccgtctctactaaaaaatacaaaaatt

SEQ ID NO: 10723 - DNA, 432 bp, Homo sapiens
ctggtaccggtccggaattcccgggatatcgtcgacccacgcgtccgccctactaaggcccagacctcctggtatctgccccgggctccctcatcccacctccatccggagttgcccaagatgcatgtccagcataggcaggattgctcggtggtgagaaggttaggtccggctcaaactgaataagaagagataaaatttgccttaaaacttacctggcagtggctttgctgcacggtctgaaaccacctgttcccaccctcttgaccgaaatttccttgtgacacagagaagggcaaaggtctgagcccagagttgacggagggagtatttcagggttcacttcaggggctcccaaagcgacaagatcgttagggagagaggcccagggtggggactgggaatttaaggagagctgggaacggatccctt

SEQ ID NO: 10724 - DNA, 519 bp, Homo sapiens
  misc_feature 486, 487: n = A,T,C or G
gaaatacatgattatgttaatggtgaaggtgtcacaacatgcaagatgggagagttgagaagggtcacagaagaaattaggaatttccacatccttgaagcaggtcacttgtaaggcaatcaagttgtgcagctgggagtctaaaagactgagaaaaaaaaagacaacaaaactagaaaggcacagaaacacgggttcatgatggtgaatgatatagcgggtgacagatggctacaaaccagtcataggccatcacactcaggagcatgtctctcttccatgcctccaaaaatggcaaagagagacatctgagtcaggcagcctgcataggagatgactctgctgtgagactggatgtccacaatcatcttggggaccgtggtggaggtgaaaccgatgtcaggcaaggacaggttggagaggaagaagtacattggggtgtttggggtgagtataggctgatggccaggatgatgagcaggttcnncagcaccgtgaccaggcacatggacaggaaca

SEQ ID NO: 10725 - DNA, 640 bp, Homo sapiens
acaagtttgtacaaaaaacaggctggtaccggtccggaattcccgggatatcgtcgacccacgcgtccgggtgggatggatttggcccgtgggccatagtttgcctgcccctgatctcaacgttttcacaaatgtcaatctgaccatctgctttgtacagcacagagaggccaagcaacttgtctacagtaacacagctgcaaacctggccacactcaaaccagaagccaggcatctatattcccagtttgtttcgggaacaaaggagaaaagtttgaatcctccagttttttcactgaaagtggttccatgctgggtgacgtctttaaaagttactgttgttactggtaaaggcacagaggtttctccaggcttcccatcctggagaagggattggcaacgcataagacactctgctttagaagaaagatcaagtatgcactcgtcctctgactgttgttcaagtcaaacaaaccaggccagacagcgaacagtcagctttattcactcaagccctccttcactggagcacacattacttttctatacgatgacttgccaaatgcttaaaaggcacattttaaagaataacaaatgctactctgtttctttctggtggccaggacatcttgtgtttaca

SEQ ID NO: 10726 - DNA, 534 bp, Homo sapiens
tttgtacaaaaaagcaggctggtaccggtccggaattcccgggatatcgtcgacccacgcgtccgcccacgcgtccgcccacgcgtccgcccacgcgtccgcccacgcgtccggacaaacagagagccaaatcatgagtgaactcccattcacaattgcttcaaagagaataaaatacctaggaatccaacttacaagggatgtgaaggacctcttcaaggagaactacaaccactgctcagtgaaataaaagaggacacaaagaaatggaagaacattccatgctcctgggtaggaagaatcaatatcatgaaaatggccatgttgcccaaggtaatttatagattcaatgccatccccatcaagctaccaatgactttcttcacagaattggaaaaaactactttaaagttcatatggaaccaaaaaagagcccgcattgccaagtcaatcctaagccaaaagaacaaagccagaggcatcacgctacctgacttcaaactatcctacaaggctacagtaaccaaaacagca

SEQ ID NO: 10727 - DNA, 667 bp, Homo sapiens
tgacactatagaacaagtttgtacaaaaaagcagctggtaccggtccggaattcccgggatatcgtcgacccacgcgtccgcccacgcgtccgcactatgtgaaattttagctccatcttcaatggtgaaattcattaaagaaacttacctggatactgttacagaagaaatggcaaaatttcttgaaaatttttgtgagctgcagttcagagaaaatgctgttcgtgtggttaaaacaagcaagagctccagcaagcatagaggagcagtgcatgctttgggttagtgacatttaaaatttttgtttggtttaacttaagtcttttaatatgtttaattttctaagatgttttctatttggttaaatctcactgcaaacatgaaaattagaaaatgaatgtaatgaaattttgcagtatacatttctcatgcatttttttctataattgtagttataaaagtattttctttcttattaaattgttaaagatattggaaatataagccaaaaatactttaaataagagtttaatttctcttgattgcatatgacaaacagtatttgtgaaactgtgtgtatacacacatatatataactgagtatatatgcttatacacatataagctcctttatctgtttattaaatatacgcatatatataagca

SEQ ID NO: 10728 - DNA, 604 bp, Homo sapiens
acgccaagctctaatacgactcactatagggaaagctggtacgcctgcaggtaccggtccggaattcccgggtcgactactactactaaattcgcggacgtgtcgaccagacggaaccatggaagccccagcgcagcttctcttcctcctgctactctggctcccagataccactggagaaatagtgatgacgcagtctccagtcaccctgtctgtgtctccaggggaaagagccaccctctcttgcagggccagtcagagtgttgacagcaacttagcctggtaccagcagaaacctggccaggctcccaggctcctcatctatggtgcatccaccagggccactggtgtcccagccaggttcagtggcagtgggtctgggacagagttcactctcaccatgagcagcttgcagactgaagattttgcagtttattcctgtcagcagtatagtttctggcctcgcccgtcgtggacgttcggccaagggaccaaggtggaaatcaaacgaactgtggctgcaccatctgtcttcatcctcccgccatctgatgagcagttgaaatctggaactgcctctgttgtgtgcctgctgaataacttc

SEQ ID NO: 10729 - DNA, 429 bp, Homo sapiens
  misc_feature 278, 406: n = A,T,C or G
atctaattagttttaaaatttattctctactcacaagaagcataaataaaggtttcactcttatataaagacctgacaatacatacaatggtcctctgctgatttggaagcaaagacagttttctacgacagtctgttctttataatgtataactgttgtgggaaaaaagaaaatccatttcttattgtaattatttttcttatttgaggtttcttttccacgatgacccaaccacaagtttgggaacattgcttctgaggcccattctctgatgagnaaagttcagtcccaactggggaaagtacctgagtcccagccttttcagcctaggaaatcagggctgagcgtgggtgggtgcgcgcctgtaatcctaggctactcgggagggctgaggcagggagaatngcttggaacccgggtggggagag

SEQ ID NO: 10730 - DNA, 91 bp, Homo sapiens
tatcacaaactcacatgaataaggctaggtggcaaacattcattcattactatctttgctaaaatgctgactataattgatctaccacact

SEQ ID NO: 10731 - DNA, 638 bp, Homo sapiens; identical to SEQ ID NO: 285
  misc_feature 545: n = A,T,C or G

SEQ ID NO: 10732 - DNA, 619 bp, Homo sapiens
tcggcacgaggaataaagaaagatttgggatttgcagaatcttctggcccaattaaaaacaaaagaagctgtaaatatccagaacttaatagatgtataaattataaacaaaacatgtccctgccccaaggtattgaaattacattactatagatacatcccatttatgaggtagtccgattcctcagatgtaatgggacgagcttttttcagtttctgtttcaccagtcgtagtcggcatgcaaccatgagaagcagcagagcagtgatagccaaacccagcgccaggggtagcactgcacctgtttctggggctgggtgttcccctcctcctccatcaccctttgactcaaatatataactttcctcttttctgttcttccctgaggaactactatctggcatcacaggaatgatttgactctctggtccccaaaaggcggaatgattcctcttctctgtgtttgataatgcaggtggcttgtttggggcagtggctttctgagacttttccaccaaggagtcaccccctgattgaggcaccttcatgtccactgacgggtccccctgcagcagtgcccactcatactggacgatggcgtggtcatctgtgctctcg

SEQ ID NO: 10733 - DNA, 559 bp, Homo sapiens
atctaagttccatcatagttccagatgtagttggtacaattgggatatcttcagcttctaagggtattgaccatggaatatgaaattgtggagcaagttctcgcattacaatatttccaagtatttttgcacagtcatcataatacttcatggaatttttcacaaaactgaagccattgacatcacagacataggactgtccattggcccgtaacaaatcaaagccacaaactgtttgcttaaaagcaaggcagactttccaagcaattaatttctctcgtgcattgagaataacagggtatcttacttcttttccttcactgtctcgttccaccttgccatcaagtgctggagattttcgagcttcagcatgggcataatctggacccactgtataaaccttaacatcagtaccatctgtgggcataaactcttcatatatatatgagcctgtttttcgtacattgctttctggagaataaacactacttctactgccaatctttctaaagagtctttgacttccaccaccagcagaagttgggtaataaatgtaaac

SEQ ID NO: 10734 - DNA, 699 bp, Homo sapiens
  misc_feature 583, 589, 595, 611, 613, 619, 643, 655, 658, 659, 660, 672,676, 678, 686, 695, 698: n = A,T,C or G
ctgtatatctccaactcgtcttaagtgtatttgcctgtgtgcaacgtattgctagactatgaactcctcagcatggctgctggataacttaattgtcctgagttaatagccttcaaaggacaaatcggtttctttgcagatagcttcgtaaaacttcacatggagtttattttatcatatttcccttttttatttctgctcctcctttaattgcccatcttgcttcagagactgacatttcagggtggatattaattaaagcattaattttgttttttggtatatttctatccctagtatttctatcttactgctaaaatacaggaaaagtgccgtatttttaatgcatttagtggttttctttggtgttatctgttccatttttctttttcatacattgaagtgtgtctccttttcaaccaaaataatgaaatagtggagaccatgaaattgttgtgcctggctaattggcaaattaatttaccaatataataagtgtagcgccttgtttgaataccctttttgagaagtatgatgagaatgggcaagggtgtcagcatctcttcttcttaataataattgnttcagntttggntcacgaagatgctaantnatctgnatggtgccaagctggattatctgntttattatctanggnnnaagctgctatcntacngnaaaccacnctggagagntanc

SEQ ID NO: 10735 - DNA, 390 bp, Homo sapiens
aacgtcacaaggctgatgactagaagagttacaggcacttggacgtggatctgatgagttcatttaccttttactgagcgcattttatgtgctaagtattcagaaatagatgttatactgctgtggagtcagacatataaatagatgtttatactacagcatgataaacagtataatagagatggactcgaaatattctgtttaaaaaacgcttagcaggagtatagattccagttgccctgaatatacactccctttttaaaaaaaaattattttttgaaatattctaggatgagtagagagatgagagtggaaagactcccggcttacatgtcagacagaactggctggctttgctatattcatattaaatatttttgttttggacat

SEQ ID NO: 10736 - DNA, 614 bp, Homo sapiens
  misc_feature 559, 580: n = A,T,C or G
ggggtggaagacatcccattggggtgttattaaatgctatcacagagctccagaagaatggaatgaatatgagtttttcgtttttgaattatgcccagtcgagccagtgtagaaactggcaagacagttcagtgagttatgcagctggagcactcacggtccactgaagctctgaatcctcagggatgccacctgcacattctcatactctgtccggggtcccagcctagcctttaccacgatactggtcctggtttggggggattctgaaacctcaaactaatagaactttcttctctttttttctagtaggtgtagtccttccttaatttcaactcattaaaaaatgctttatagtttagggcagtggaaggaaggctggcatcaaaatattttgatcaaaaaagatgacaatgtaaaggctcagttgtggcagacagttttttgaaagtaacttgtaaagcatttaccatatcctaaatttgcactctttgcagacttgtgcacatatattccgctttcagaatagttttgcaaatggtcccaacaaacaaaaggngaagcttttaataagaattgnttataatgatctgtttagaatttataatctcagt

SEQ ID NO: 10737 - DNA, 639 bp, Homo sapiens
  misc_feature 473, 555, 577, 603, 608, 609, 623, 634: n = A,T,C or G
attgggaggcttaggtatttttgttgttgtttgtttgttttgagatagagacttactctgttgcccaggctggagtgcagtggtgcaatctcagctcactgtaccgtccacctcccgggttcaagcgattctcctgcttcagcctccagagtagctgggattacaggtgcctgccaccatgctgggctgatttttttataattttaataggggtggggtttcacagtgttggccaggctggtcgcaaactcctgacctcaagtgatccacgtgcctcggcctcccaaagtgctgggattacaggtgtgagccaacatgcctggccagaaggttctggtttgttaaccaggtaaggtctgcacatttaaaactgagaaatgctagcttcctagcaagcagaatggaatatatagaattgactgcatggtctcctttacttcctatcggaaaagtctttttactctgctgactanagtgtatgtgtgtgtgtgtgtgtgtgtgtgtgtgtgtgtgtatttcttttgcttcaattcattaaaaaaaaaataaaatganctgggtttggaggctgaggcangaggattgcttgacccctatgatttnaatcnncctgtgcaatacancaagatctatntttgg

SEQ ID NO: 10738 - DNA, 756 bp, Homo sapiens
  misc_feature 1, 8, 630, 715, 716, 730, 754: n = A,T,C or G
nagacagnagggatttacttcacccatgagcattgaagactattccttaaatctgtaagctgctgatctatttatagaagctctttccactggcctctacttccttcctcccagtctttcctgcgtacaaagctcaccactgcacacaataactcttcctaaagggacaagcagtatcgttgggcctgcagttgccttagagccagatgagccaacagctgagagctttagacactgatgtctgagggacaactagtcactggccatatttggtgctgtttccctgcctcagtggccttaggctgtggggtttccatatggtattgacctctgcagtgaagtactcagctatgtctggtcccatagatgtgactatgtgaacactatgcctcagtagatggaggctgttctttgactcgttctgcaactgcattgccagacccagagggccatggtagggggagtattgtttggggactaggaaattcttgctgtcaacatttgaaagttctaaagtcactttgaagctgtaaaccaaaaataaaattctaagccctccaaccaattgaatggacccccttgttggccaagggcattccaaagtaaacctgaaaaacgagttcaagccangataggaagtggaggttggcagtccccctttatgtcctcttccttttggaatcaggcatactgaccacattaacattaaacaganncttggcagggcagngctacacctatatcctagcacttnag

SEQ ID NO: 10739 - DNA, 96 bp, Homo sapiens
aaactaacccctctttttctccaaaggagtgcttgtggagatcggatcttttctccagcaattgggggaaagaaggctttttctctgaattcgctt

SEQ ID NO: 10740 - DNA, 742 bp, Homo sapiens
  misc_feature 1, 8, 632, 671, 709: n = A,T,C or G
nagacagnagggggtcttcattcaatgtgtgatcaatgctgtgtttgccaagatctggtggatcgtacccggagctggctctatgctgcctgttctatctcctatctgggtaccatggtctccagcaattcagcactacagtttgtcaactacccaactcaggtccttggtaaatcctgcaagccaatcccagtcatgctccttggggtgaccctcttgaagaagaagtacccgttggccaagtacctgtgtgtgctgttaattgtggctggagtggcccttttcatgtacaaacccaagaaagttgttgggatagaagaacacacagtcggctatggagagctactcttgctattatcgctgaccctggatggactgactggtgtttcccaggaccacatgcgggctcattaccaaacaggctccaaccacatgatgctgaacatcaacctttggtcgacattgctgctgggaatgggaatcctgttcactggggagctctgggagttcttgagctttgctgaaaggtaccctgccatcatctataacatcctgctctttgggctgaccagtgccctgggtcagagcttcatctttatgacgggtgtgtattttggtcccctgacctgctncatcatcactacaactcgaaagttcttcacgattttggnctctgtgatcctcttcgccatccctcaccccatgcagngggtgggcactgggcttgggtcctgggccttgg

SEQ ID NO: 10741 - DNA, 545 bp, Homo sapiens
cctatcattctttgaccacttccttccttccttagtacaaaatattccaagctcatcttgtactttgccttctcagtcctagaataagtcatttctccaatgaggctggttatttttagtggggaatggtatttaaaaatcaagatcttggcactagttttgctcgttgctacaggagggctcttgcttcttggctctttggatggaactagggaacacactatgttcttcatactggtatcaccaattaacaccctcatcacaaggttttcctggtctcctttcatatattctctctctctctatgtatatatatgtgtgtgtgtgtgtgtgtatgtatgtgtttgtgtattatgcacatatatatacacatatatacacacatgtgtatatacacacgcatatacatgtatatcttccagtgagaacctctgttcccaagaacatcaaattatttattcatttgctgtgtcctgtaatgtacacaaacaaattttaagattaatatacccagtgctattatcaacaataagacaacagtcttt

SEQ ID NO: 10742 - DNA, 313 bp, Homo sapiens
ggggatgtgccacccgccttttgcctgacttcttcacgcgggtagccctctacgtggactggatccgttccacgctgcgccgtgtggaggccaagggccgcccctgaaccgcccctcccacagcgctggccgggaccccgagcctggctccaaaccctcgaggcggatctttggacagaagcagctcttccccgaacactgtggcgtccgggacggccccacccgtccccccacactccctcccacggggctccgggagacaggccggccctgcacctcaccccaccgtgacctcaataaacgttgaaactcc

SEQ ID NO: 10743 - DNA, 534 bp, Homo sapiens
cggcacgagggctcccaaccgtcaccaacgtttaccgctgtcatggaggtgaggtggaggaggctgcagggccacccagcatcctgggatgcaggctctccaaggtcccagcagaaccccacactggtggtcctactgcccacccagagccgaactcgacaggggaccgatttgaaagtaaaccaacattcttaatgtcaacacaatgtttgtttaaaaaaaaaatcaaaatgtgcaaagtggcagtgactgtccagttttgaaaagcgtctaacaagtccgagcgtgttcaattttctttaacaactgctgctgtcttgcctgcaatttttccttttccagcaaaagctggtgctcctcggcctggagggagtggacatactcagtggcctttttcaaaatgaccaccttggcggccttctcattctttaccaactccggcacgtggtccctgagcgtgaaaaacctggaccgaaggtcgttgcggcgctggcgctccaggatgttgtggtttctgcgacgctcactgtcctc

SEQ ID NO: 10744 - DNA, 322 bp, Homo sapiens
tccaccgcggtggcggccgctctagaactagtggatcccccgggctgcaggaattcggcacgaggttatcctagcgctttgggaggccgaggtgggcagatcacttgagatcaggagttcgagatcagcctggccaacatgatgaaatccactctgtactaaaaatacaaaaattagccgagcacagaggcaggcgcctgtaatccgagctacttggaggctgaggcaggagaattacttgaacctggaaggaagaggttgcagtgagccgagatcatgccactgcattccagcctgggacacaagaatgagactctgactc

SEQ ID NO: 10745 - DNA, 551 bp, Homo sapiens
aacaatttactttttataaaaagacaaatgtacatatttacacacgtcctatgtgttcacacatgacttaatggttagatgacatttccaattttaagtcataccaaggcgctcacacttccctccctgggcctgttgagggctgctggggcttgagggggtggtgggcgccgagcaaggcactgtataaataaatgcaaaggccaagagctcgggggaaatgttagtgtacacctctgatcagaaatgtggcaagatccacacgaaaaagtgccaagtttttttcccaagcccctcagccaaagcagggagcagggtagagctcctctgaggctgagggagcatcgccccgaaggaccccactttccttcacatttcactggctttggaacagtccccagggctcagctgaaaagggggtagttctttgggaacgagattcatttagtgcaattttctcttagtgcagagccagccctgggattggtgttatgcttttctggggtcactggtctgttcccctaggagccagccagtgacagcgagaccct

SEQ ID NO: 10746 - DNA, 485 bp, Homo sapiens
agcttgcggccgcgggcttggtcgctgtggcagcggctgccgagtactctggcacggtagcgtcgggaggtaacctccctggtgttcactgcggcccaagctccggggcaggccctggttttggcccgggctcgtggagccgctctctcgatcgagccctggaggaggcggcggtcactggggtgctgagcctgagcggccggaaactgagggagtttccccggggagcggccaaccacgacctgacggacaccacccgggcggacctgtcgcgaaatcgcctttcagaaattcctatagaagcatgtcactttgtttctctggaaaatctcaacttgtaccaaaattgtattcgttatattccagaggcaattttaaacctacaagctctaacattcttaaatattagtcggaaccaactgtcaacattgccggtacacttgtgtaatttgccattgaaagtcttaattgctagtaataacaaa

SEQ ID NO: 10747 - DNA, 692 bp, Homo sapiens
  misc_feature 535, 647: n = A,T,C or G
atttttaaaactttattttaaaaatatgagcatctattttaaaagttttgataattattgccattattttcttgtgattggtacaatttaaaaataagtctatgttttcacattgattttaaaaaatatagcatgtttgaattacaaatgattaagcaaactctattacttcatagctgaccatcttccagaaaattcccacttaattgaatacttagaaaaaaatggccagtggccgattgaaaggtatattaaaattaagggcagttttaattctgaagacaaatatcttcatggaaatctatttgtaagcttctgagattgctgctgaaagtctacagtctgtgaatataccaattcccctttacaactgatgcagatcattatgaaatactggaaggcataccctacaatttaggaattggtgtggctgccactgctatgctctcaattgcacactcatcagttcctctgcggatccggaagtagccattctcaccccagccggtgccccagctggttttaacaatccagntatccatcccagaagctgagtcagtgccatagcccacaagcagaacagcatgattagtcagctccaaagggttgaaggggtctcttagaccagtgtggtcgagatcccctcnttgagtggaggagtcatcatatacttcaaaagcaactgccatggg

SEQ ID NO: 10748 - DNA, 549 bp, Homo sapiens
ctatttaggtgacactataggaacagtttgtacaaaaaacaggctggtaccggtccggaattcccgggatatcgtcgacccacgcgtccgcccacgcgtccgcagaactcaaagctgctcttcctctgtggccagttggggaccagcatcatgaagtggatggtggtggtcttggtctgcctccagctcttggaggcagcagtggtcaaagtgcccctgaagaaatttaagtctatccgtgagaccatgaaggagaagggcttgctgggggagttcctgaggacccacaagtatgatcctgcttggaagtaccgctttggtgacctcagcgtgacctacgagcccatggcctacatggatgctgcctactttggtgagatcagcatcgggactccaccccagaacttcctggtcctttttgacaccggctcctccaacttgtgggtgccctctgtctactgccagagccaggcctgcaccagtcactcccgcttcaaccccagcgagtcgtccacctactccaccaatgggcagaccttctccctgcag

SEQ ID NO: 10749 - DNA, 464 bp, Homo sapiens
ccagtagttccaaggcccgggaagcctggagggccacttatgcctggaaaacccttaggccctggttcacccttggatcctttcttccctttggggaatcccatgaattccagctctccagtagatggtggaggtcctgctgggccagggaggccaacatcccccttgactcctttctctccttgaaaacctagccccatattcccatcaggaccaagaggaccaggaggccctggaggaccttgtaatcctggtggtcctgcaggtcctacagctccaggaaatccgggtgctccttgtgggccagtgattccatccagtccaggcagcccaggatcccccttcattcctttgaaactacctggagcaaggacagggtcaccttttgatcctttctgaccaggaagcccgggtggtccgagaagcccaggatagccatcagggcctggaaatccaacagctcc

SEQ ID NO: 10750 - DNA, 785 bp, Homo sapiens
  misc_feature 617, 634, 669, 726, 736, 758, 764: n = A,T,C or G
tgagatgaaatttgcaagcatgtctgcccaaagcatgtcctccatgcaagagtcctttgtagaaatgagttccagcagctttatgggaatatctaatatgacacaactggaaagctcaactagtaaaatgcttaaagcaggcataagaggaattccgcctaaaattgaagctcttccatctgatatcagcattgatgaaggcaaagttctaacagtagcctgtgctttcacgggtgagcctaccccagaagtaacatggtcctgtggtggaagaaaaatccacagtcaagaacaggggaggttccacattgaaaacacagatgacctgacaaccctgatcatcatggacgtacagaaacaagatggtggactttataccctgagtttagggaatgaatttggatctgactctgccactgtgaatatacatattcgatccatttaagagggcctgtgccttatactctacactcattcttaacttttcgcaaacgtttcacacggactaatctttctgaactgtaatatttaaagaaaaaaaaagtagttttgtatcaacctaaatgagtccaagttcaaaaatattcatttcaatcttttcataattgttgacctangatataatacatttgcnagtggcatgtacatactgttataggccgattaacngttataaagtttgtacctttattttatggcattttaccatgtaagttttgaactaangttggtaggngaagtttcttatggaccgatancccgcncacatttaaccatcttgggcc

SEQ ID NO: 10751 - DNA, 411 bp, Homo sapiens
ttcggcacgaggcagaaaccagagtgtgtttaacttctgtgctattccacaggtgatggccattgccactttggctgcctgttataataaccagcaggtgttcaaaggggcagtgaagattcggaaagggcaagcagtgaccctgatgatggatgccaccaatatgccagctgtcaaagccatcatatatcagtatatggaagagatttatcatagaatccccgactcagacccatcttctagcaaaacaaggcagatcatctccaccatccggacgcagaatcttcccaactgtcagctgatttcccgaagccactactcccccatctacctgtcgtttgtcatgcttttggctgccctgagctggcagtacctgaccactctctcccaggactggcacgacaggcccac

SEQ ID NO: 10752 - DNA, 425 bp, Homo sapiens
  misc_feature 267: n = A,T,C or G
ggcggctcggactgagcaggactttccttatcccagttgattgtgcagaatacactgcctgtcgcttgtcttctattcaccatggcttcttctgatatccaggtgaaagaactggagaagcgtgcctcaggcaggcttttgagctgattctcagccctcggtcaaaagaatctgttccagaattccccctttcccctccaaagaagaaggatctttccctggaggaaattcagaagaaattagaagctgcagaagaaagacgcaagncccatgaagctgaggtcttgaagcagctggctgagaaacgagagcaccgagaaagaagtgcttcagaaggcaatagaagagaacaacaacttcagtaaaatggcagaagagaaactgacccacaaaatggaagctaataaagagaaccgagaggcaca

SEQ ID NO: 10753 - DNA, 414 bp, Homo sapiens
tatgacgtcgcatgcacgcgtacgtaagcttggatcctctagagcggccgcctactactactaaattcgcggccgcgtcgaccgcacctcaagccccacaccttctacaactttgtgctgaccaatcgcggcagcagcctgggcggcctccagcagacggtcaccgcctggactgccttcaacctgctcaacggcaagcccagcgtcgcccccaagcctgatgctgacggcttcatcatggtgtatcttcctgacggccagagccccgtgcctgtccagagctatttcattgtgatggtgccactgcgcaagtctcgtggaggccaattcctgaccccgctgggtagcccagaggacatggatctggaagagctcatccaggacatctcgtcgacgcggccgcgaatttagtag

SEQ ID NO: 10754 - DNA, 459 bp, Homo sapiens
  misc_feature 304, 388, 456: n = A,T,C or G
ccgaaaccactcgccctccactgactgcccctgtaccacatcaaacagtctcctctcctccacgcctccggggtctgggaagtctcacctcactgatttcacgtagaaaagaaggcggaggccagcagccgccgccgccagctccccaacgtgcaaatccatttcagtttgaccgtgaacccccttccagttcgtgtcctcctccgcccccgcccctagctcccgctgctgcgcttccaacggggttctcgggtcatttcctagcgccggtcacactggctggcctcctcccctcaacatctcntcctccggctgcagagggggcaaggggaaaagagggaggaaaaaaaagccccaaacgggaattcgccttgcgttggagtctctnagtcccggcgttcccccaaaacatctgccatcggccaaattcgtcaacccggaagccttcttgtcttnaat

SEQ ID NO: 10755 - DNA, 845 bp, Homo sapiens
  misc_feature 12, 15, 17, 20, 31, 42, 44, 60, 63, 70, 72, 76, 608, 702,769, 782, 791, 804, 816, 818, 835: n = A,T,C or G
tcttttgacctncgnanaancttgcttgttncttttggccgnancggcctaggctgcganagnagacagnangggnaagatgaatgttctgctcttcgcccctgggttactgtttcttctcctcacacagtttggcttccgtggggccctccccaagctgggaatctgtgctggccttcaggtggtgctggggctgcccttcctgctggagaaccccagcggctacctgtcccgctcctttgaccttggccgccagtttctgttccactggacagtgaactggcgcttcctcccagaggcgctcttcctgcatcgagccttccacctggccctttgactgcccacctcaccctgctcctgctgtttgccctctgcaggtggcacaggacaggggaaagtatcttgtcgctgctgagggatccctccaaaaggaaggttccaccccagccccttacacccaaccagatcgtttctaccctcttcacctccaacttcattggcatctgcttcagccgctccctccactaccagttctacgtctggtatttccacacactgccctacctcctgtgggccatgcctgcacgctggctcacacacctgctcangttgttggtgctggggctcatcgagctctcctggaacacatacccttccacatcctgcagctctgctgccctgcacatatgccatgccgtcatnctgctgcagctctggctgggccgcacctttccccagagcacccacacagcaagaaagccactgaagncacccctttcctnagacctgantctacctcagacnggggtgggtggntntgccttcaaaaaacttntaatacaaaa

SEQ ID NO: 10756 - DNA, 849 bp, Homo sapiens
  misc_feature 9, 10, 14, 17, 18, 20, 30, 62, 505, 626, 789, 843: n = A,T,C or G
atcttcccnncgcnaanncntgcttgttcntttggccgagcggcctaggctgcgagtaagangacagaagggtctcatgccaggtctctgataccttattcacagaagttctttgaagtatttattgttattttctttgacttatgggaaaactgggacacaggaagacaggtaaattacccaacctcacacgttaagtcagaactgggagccataattttgtatccctggtataaatagacaatctcttgaagaaatgaagagatgaccatagaaaaacatcgagatatctccagctctaaaatcctttgtttcaatgttgtttggcatatgttatctttggaatttagtgtctgagcctctgtctgttactgtagtatttaaaatgcatgtattataatcatataatcataactgctgttaattcttgattatatacctagggacaatgtgtaatgtaagattactaattggttctgcccaatctcctttcagattttattangaaaaaaaaataaacctcctgatcggagacaatgtattaatcagaagtgtaaactgccagttctatatagcatgaaatgaaaagacagctaatttggtccaacaaacatgactgggtctanggcacccaggctgattcagctgatttcctaccagcctttgcctcttcttcaatgggggttcatgggaatttgcttcaaaaagccagtttggctgtcaaagggccacctgcttttcttactctttaaagggctaaaaacttgtacggccagaaaattgtgcaanctctggaagatcaaataggggctttttgcaccctggggtatgggggacttcttnaattcc

SEQ ID NO: 10757 - DNA, 207 bp, Homo sapiens
agtgtatacagaaacgaatagatgtgtaactgtatgcagactggttgcattgaaacaaatctgataactatgcaggtttaaattttcttatctgattatggtaagtattccttagataggttcttctttgaaaacctgatgattgacaggttgatgaatggaaattatttcacttcattatatgcaagttttcaataattacgtcta

SEQ ID NO: 10758 - DNA, 782 bp, Homo sapiens
  misc_feature 5, 7, 593, 656, 765, 773: n = A,T,C or G
acagnanggggaggtgctgtctcaccggtgaggcctggaagcgggcgagtctcgtgctgtgtcggacctgcagcccctggccttccgccaccatggagtacctcatcggtatccaaggccccgactatgttcttgtcgcctccgaccgggtggccgccagcaatattgtccagatgaaggacgatcatgacaagatgtttaagatgagtgaaaagatattactcctgtgtgttggagaggctggagacactgtacagtttgcagaatatattcagaaaaacgtgcaactttataagatgcgaaatggatatgaattgtctcccacggcagcagctaacttcacacgccgaaacctggctgactgtcttcggagtcgggccccatatcatgtgaacctcctcctggctggctatgatgagcatgaagggccagcgctgtattacatggactacctggcagccttggccaaggccccttttgcagcccacggctatggtgccttcctgactctcagtatcctcgaccgatactacacaccgactatctcacgtgagagggcagtggaactccttaggaaatgtctggaggagctncagaaacgcttcatcctgaatctgccaaccttcagtgttcgaatcattgacaaaaatggcatncatgacctggataacatttcctttcccaacagggctcctaacatcatgtcctccttccacttgcaggaactttttttgatggctccttattttttctactctttcagcncctctganaatggtaat

SEQ ID NO: 10759 - DNA, 737 bp, Homo sapiens
  misc_feature 482, 623, 644, 651, 674, 693, 696, 698, 710, 723: n = A,T,C or G
cagggagcttatggtattttttttaaaaaggttttcttagtaaaaacataaatttaaaagcccctgagttctaggagagggcttattgaattgctataagaaagctggagttactttgataagtaataaattataaatagcactgatctataatgctttatttctatcggaaggtactttttcttctttcatcatcagttttagccagttagtaaatgggaatactcagttttagggatttgatttttgtttggtttaattttctttcaaaaattaaaagtatatttctaaaagttttccccagaggccagatacagtggctcatgcctataatcccagcactttgggagcctgagataggagtattgcttgaggctaggagtttgagaccaacctggcaacatggcaagaccctatctctacaaaaattttaaaacttagccaggtgtggtagtgcacctgtagtcccagctagtcagtangctgaggtgggagtattgcttgaggctgcagtgaggtgtgatcacgccactgcactccggcctgacagaatgagatcctgtctcaaaaagaaaattccccagaagaagattctaattttttcaagctgaattaagtttganagtcttttttaaatcttatgngtcaaanagcatatgttgctgggtgattangaaaagggccctccatttntgncncctggaaggccnatgggcttacatncccccccccccccc

SEQ ID NO: 10760 - DNA, 74 bp, Homo sapiens
tccaccgcggtggcggccgctctagaactagtggatcccccgggctgcaggaattcggcacgagggatcacttg

SEQ ID NO: 10761 - DNA, 63 bp, Homo sapiens; identical to SEQ ID NO: 10673

SEQ ID NO: 10762 - DNA, 637 bp, Homo sapiens
attcggcacgagggcgagggtagcccggggccgcttggagttgcccggacctgagaggctgctgcactgggcctcagccagccctccggatgctggtgctgccatccccctgccctcagcctctggcattttcctccgttgagaccatggagggccctccccgtcggacttgccgctccccagaacctggaccttcctcctccatcggatctccccaggcttcatctcctccaaggcccaaccactacctgcttattgacactcagggtgtcccctacacagtgctggtggacgaggagtcacagagggagccaggggccagtggggctccaggccagaaaaagtgctacagctgccccgtgtgctcaagggtcttcgagtacatgtcctaccttcagcgacacagcatcacccactcggaggtaaagcccttcgagtgtgacatctgtgggaaggcattcaagcgcgccagccacttggcacggcaccattccattcacctggcgggtggtgggcggccccacggctgcccgctctgccctcgccgcttccgggatgcgggtgagatggcccagcacagccgggtgcactctggggaacgcccgtttcagtgtccacactgccctcgccgctttat

SEQ ID NO: 10763 - DNA, 601 bp, Homo sapiens
tgatgccaggacctattgctacctgctgcccacgtttgcctttgcgcacaaggaccgggacgttcaggatgagacctaccgcctgagcgccgagacgctgcagcaggtcaacaggctcctggcctgctacaagggcacgcacaacttccacaatttcacctcgcagaaggggccgcaggatcccagtgcctgccgctacatcctggagatgtactgcgaggaaccctttgtgcgggagggcctggagtttgcggtgatcagggtgaagggccagagcttcatgatgcatcagatccggaagatggtcggcctggtggtggccattgtgaagggttatgcccctgagagcgtgctggagcgcagctggggcacagagaaggtggacgtgcccaaggcgcccggactcggcctggtcctggagagggtgcacttcgagaagtacaaccagcgctttggcaacgatgggctgcatgagccgctggactgggcgcaggaggaaggaaaggtcgcagccttcaaggaggagcacatctaccccaccatcatcggcaccgagcgggacgaacgctccatggcccagtggctgagcaccttgcccatc

SEQ ID NO: 10764 - DNA, 624 bp, Homo sapiens
tcggcacgagggctgccgctgggaccccgtgtcatcgcccaggccgagcacgatgccccctaaaagggaggtgatggaattaaaccacccccaatcattggaagatttggaacctcactgaaaattggtattgttggattgccaaatgttgggaaatctactttcttcaatgtgttaaccaatagtcaggcttcagcagaaaacttcccgttctgcactattgatcctaatgagagcagagtacctgtgccagatgaaaggtttgactttctttgtcaataccacaaaccagcaagcaaaattcctgcctttctaaatgtggtggatattgctggccttgtgaaaggagctcacaatgggcagggcctggggaatgcttttttatctcatattagtgcctgtgatggcatctttcatctaacacgtgcttttgaagatgatgatatcacgcacgttgaaggaagtgtagatcctattcgagatatagaaataatacatgaagagcttcagcttaaagatgaggaaatgattgggcccattatagataaactagaaaaggtggctgtgagaggaggagataaaaaactaaaacctgaatatgatataatgtgcaaagtaaaatcc

SEQ ID NO: 10765 - DNA, 422 bp, Homo sapiens
  misc_feature 78: n = A,T,C or G
ctgttcccattatgctggtaggaaacaaggctgacattcgtgacactgctgctacagagggacaaaaatgtgtcccanggcactttggagagaaactggccatgacgtatggggcattattctgtgaaacaagtgccaaagatggttctaacatagtggaggctgttctgcaccttgctcgagaagtgaaaaagagaactgacaaggatgacagcagatccattaccaatctaaccgggaccaattccaaaaagtcaccacagatgaagaattgttgcaatggctaaatcccaaacatccttggcctgtgaagtcttcatttccagaatactgaatttgtgtgacttatttggctcttaacagagtggcacatcctactgacactgtcctatggagagttacagtgcaggaaacctgaaccc

SEQ ID NO: 10766 - DNA, 597 bp, Homo sapiens
tcggcacgagccatcgtgtccccttgtcacccccactccgcagggagttgaagcagcgctccatgaaggctcccagcgagccgcgcttccggctgcatgattacgttaagagggagggtcgaggggcctcctgctgccgcccttgaacctggctgagctcagtcctctggaggaagccgcccagtccctagaaggctggacagagggtctccaggcccttctgactttgttgcccagtggccaacgcccgagtgtctgttttcaggagccccaggtcaagccttgtcccttcctcctcccagcaacagtcccaacaagcaggcttctgagagcccgtggccgcacactggccgccacggaaaagcagtcttctgcacgggacggggagcggcaagtggacagactttgccacggtgctctgctgccccctcctgggcacgtccaggtgagggagggctggggctggcaccacgcacagtgcctaaccctagaaaagccatgtcttcagccgcacatgctcaggcagctaagggaggacgcctgcccacgcctgggacagaaggcttcactgctaatcacatcgtgcatctgtgtgtc

SEQ ID NO: 10767 - DNA, 496 bp, Homo sapiens
  misc_feature 179: n = A,T,C or G
ttgcggccgctctcctacccggacaccgacgtcattctcatgtgcttctcggtggacagcccggactcgctggagaacatccccgagaagtgggtccccgaggtgaagcacttctgtcccaatgtgcccatcatcctggtggccaacaaaaaagacctgcgctgcgaaccctccaccanctaccggagggaggagggaggatgcgctgtggggttgtttttgccataagcgaactttgtgcctgtcctaaaagtgaaaattgttcagtccaagaaactgatgttatttgatttatttaaaggctaaaatttgtttttttattctttgcacaattgtttcattgtttgacacttaatgcactcgtcatttgcatacgacagtagcattctgaccacacttgtacgctgtaacctcatctacttctgatgtttttaaaaaatgacttttaacaaggagagggaaaagaaacccactaaattttgctttgtttccttga

SEQ ID NO: 10768 - DNA, 632 bp, Homo sapiens
  misc_feature 43: n = A,T,C or G
cggcacgagggtactgggtatgtgtcacattgccaaatcccgngacacaagtctccatgaactgctggtgagctaggataataaaacccctgacatcaccattccagaagcttcacaagactgcatatataaggggctggctgtagctgcagctgaaggagctgaccagccagctgacccctcacactcacctagccaccatggacatcgccatccaccacccctggatccgccgccccttctttcctttccactcccccagccgcctctttgaccagttcttcggagagcacctgttggagtctgatcttttcccgacgtctacttccctgagtcccttctaccttcggccaccctccttcctgcgggcacccagctggtttgacactggactctcagagatgcgcctggagaaggacaggttctctgtcaacctggatgtgaagcacttctccccagaggaactcaaagttaaggtgttgggagatgtgattgaggtgcatggaaaacatgaagagcgccaggatgaacatggtttcatctccagggagttccacaggaaataccggatcccagctgatgtagaccctctcaccattacttcatccctgtcatctgatggggtcctcact

SEQ ID NO: 10769 - DNA, 580 bp, Homo sapiens
ttcggcacgaggcgcagtccaagtcccggaagatcgcgatcctgggctaccggtctgtggggaaatcctcattgacgattcaatttgttgaaggccaatttgtggactcctacgatccaaccatagaaaacacttttacaaagttgatcacagtaaatggacaagaatatcatcttcaacttgtagacacagccgggcaagatgaatattctatctttcctcagacatactccatagatattaatggctatattcttgtgtattctgttacatcaatcaaaagttttgaagtgattaaagttatccatggcaaattgttggatatggtggggaaagtacaaatacctattatgttggttgggaataagaaagacctgcatatggaaagggtgatcagttatgaagaagggaaagctttggcagaatcttggaatgcagcttttttggaatcttctgctaaagaaaatcagactgctgtggatgtttttcgaaggataattttggaggcagaaaaaatggacggggcagcttcacaaggcaagtcttcatgctcggtgatgtgattctgctgcaaagcctg

SEQ ID NO: 10770 - DNA, 564 bp, Homo sapiens
tcggcacgagggcagtctccgattccccatcaccaattcggctggggcgccctgcaaggccgcaggcaggatgaacattctggcacccgtgcggagggatcgcgtcctggcggagctgccccagtgcctgaggaaggaggccgctttgcacgggcacaaagacttccacccccgcgtcacctgcgcctgccaggagcaccggacaggcaccgtgggcagatttaagatctccaaggtcattgtggtgggggacctgtcggtggggaagacttgcctcattaataggttctgcaaagacacctttgataagaattacaaggccaccattggagtggacttcgagatggaacgatttgaggtgctgggcattcccttcagtttgcagctttgggataccgctgggcaggagaggttcaaatgcattgcatcaacctactatagaggagctcaagccatcatcattgtcttcaacctgaatgatgtggcatctctggaacataccaagcagtggctggccgatgccctgaaggagaatgacccttccagtgtgcttctcttccttgt

SEQ ID NO: 10771 - DNA, 581 bp, Homo sapiens
caagctacttgttctttttgcaggatcccatcgattcgaattcggcacgaggcgcgagcgtcggctccgcctgggcccttgcggtgcgctgcgggcaggcggtgaggctcacgcatgtgcttacgggcaagaacctgcacacgcaccacttcccgtcgccgctgtccaacaaccaggaggtgagtgcctttggggaagacggcgagggcgacgacctggacctatggacagtgcgctgctctggacagcactgggagcgtgaggctgctgtgcgcttccagcatgtgggcacctctgtgttcctgtcagtcacgggtgagcagtatggaagccccatccgtgggcagcatgaggtccacggcatgcccagtgccaacacgcacaatacgtggaaggccatggaaggcatcttcatcaagcctagtgtggagccctctgcaggtcacgatgaactctgagtgtgtggatggatgggtggatggagggtggcaggtggggcgtctgcagggccactcttggcagagactttgggtttgtaggggtcctcaagtgcctttgtgattaaagaatgttggtctatg

SEQ ID NO: 10772 - DNA, 439 bp, Homo sapiens
gggggacatctgtatttatttgaggcaccaaagcagcaggagggctccaatgtgggggtgggctggggcaggactggctggatttggggcagggctagacccggaagtggcagaaaccccaacccccaaaggctgcccttgaagtgcatgcagctgtgccagggcagggggctacagggactgaggctctccaggctgctggcacacctccctccccaaacatggcccccagaagccgccacgtgctctcacgtgcactgcacacccacgtacacagccaggcacacatccctactgacacggtctccctggggaccctgtcagcatgtccatgggacttggtcctgatgttggaccgtaagactccagggaaccctcgtcccttccgcagtcccccaaggaaggtcacatcatccaccccagaagtgagggcagctgg

SEQ ID NO: 10773 - DNA, 495 bp, Homo sapiens
gctgggctcgggcatggcggtcgactgctccacgctgacctccaagtgtctgctgctcaaggcgcgcatgagcgcccccaagaacgcccgcacgctggtgcggccgagtgagcacgcgctcgtggacaacgatggcctctacgaccccgactgcgaccccgagggccgcttcaaggcgcgccagtgcaaccagacgtcggtgtgctggtgcgtgaactcggtgggcgtgcgccgcacggacaagggcgacctgagcctacgctgcgatgagctggtgcgcacccaccacatcctcattgacctgcgccaccgccccaccgccggcgccttcaaccactcagacctggacgccgagctgaggcggctcttccgcgagcgctatcggctgcaccccaagttcgtggcggccgtgcactacgagcagcccaccatccagatcgagctgcggcagaacacgtctcagaaggccggcggtgacgtggatatcggcgatgc

SEQ ID NO: 10774 - DNA, 231 bp, Homo sapiens
taccggtccggaattcccgggtcgacccacgcgtccgctttgttctgttatacaaaatcattcattatgatcagaaagattgatgataccaccatgaaaaataggatgtttaccccaaaacaagtgtgaattaagaatttgaacacaaccacattttttaaaatgaaacttctatgcggaagtaaattaatttggagcaataaagtaccagtatttaataaaatgtacaat

SEQ ID NO: 10775 - DNA, 250 bp, Homo sapiens
ctggagggatgtatcttgagggatggatagcatttgatttttctaagtcttggagaagagcattctgggggccttatttcacctctctgtgcctcagttttctcatctgggcgtggtggcgcgcgcctgtagtcccagctactcgaggtgctggggcaggataatcgcttgaacccgggaggcggaggttgcagtgaggagagatcgcgccattgcattccagcctggcgatatagccagactccgtctc

SEQ ID NO: 10776 - DNA, 420 bp, Homo sapiens
gctccaccgcggtggcggccgctctagaactagtggatcccccgggctgcaggaattcggcacgagtcgaaattagccacactttaaaagtaaaaagaaataggtgaaaataattttaatatgctttaacacaatatatctcaaatataatttcaacatgcaatcaatattttaaacatttagtgagatattttacattttttcacactaagccttggaatctagtgtgtattttgcacttacagcatttctcaattcagccactaaattttcatcaaaaatgctcaataagtatttagatttcaaaaagtttacagttgaaaaggtagagtcacatacccaagttgctccaattatacctacaaatttttaaataactaagtttagtatcaatttttaaatttacattaattaaatggc

SEQ ID NO: 10777 - DNA, 487 bp, Homo sapiens
  misc_feature 145: n = A,T,C or G
tctaatacgactcactataggggaaagctggtacgcctgcaggtaccggtccggaattcccgggtcgacccacgcgtccgggccggacggcgcgggcgccggcgaggagagcccgcggctgcagggctgtgactccctgacgcanatccagtgcggccagctgcagagccgcagggcccagattcaccagcagattgacaaggagctgcagatgcggacgggcgctgagaacctctacagagccaccagcaacaaccgggtgagagagacggtcgccctggagctgagctacgtcaactccaacctgcagctgctgaaggaggagctggaggagctcagcggtggcgtggaccctggccggcatgggagcgaagctgtcactgtccccatgatccccctgggcctgaaggagaccaaggagctggactggtctacaccgctgaaggagctgatctcagtgcactttggagaggacggcgcctcctac

SEQ ID NO: 10778 - DNA, 426 bp, Homo sapiens
ttggagaacaggtgtgtgtcattcacgatgggcttcatcacagcgtctaccacagcgtattttgctacactgacagcattaccatcacttatgtgtactgatttatatgccaaagaaagtatcactggggtgtggtgtgtaccttgccttatatcaccaacatgtaactttgatatttcttcttcataacaaaaaagaaaaattatttaatttctctaatttttgttacaaagcaaagtaacatcctacaaagcaggttttgatcatttctggcagcaatcagttttcttctctactttaattcaagagtaaattttgttttcgaatgaatgaataagtgaattgtagctggtactatgatccacccacctgtacttctttttgactctgatagtgaatagaagtttacaaaagtttaccctccta

SEQ ID NO: 10779 - DNA, 462 bp, Homo sapiens
  misc_feature 334, 344, 377, 395, 431: n = A,T,C or G
aatataaaaagatcaatgaaaaatttatttataaatttttcacgctgggctacaggtcaatatcgtacactcaggaatgtgctgcacaaactttatccagttagcagtgatcaccccgtgacccacacacagcttcgctataagcctagaaagtcttaacattaattaacataattaaaaaggtatttgcatctaggaaaaaatatacagaagaactccttgtggagtaatctgtgcctccatttcaatgtctgcttgtttcactgacattatcaatatattcttctcacacaaagttttataaaaaggcgacgggggggctgcccgaatacgnccagccacgnacaaggggcctccacccacctgtgtcctcaagnggttcccctttttggcangaggggttagcaggcatttcctggagggggggaacncctttgaatttggatatttaggctccctttt

SEQ ID NO: 10780 - DNA, 628 bp, Homo sapiens
  misc_feature 625: n = A,T,C or G
tttctgcctctgctttcatttctatggttattcgtggaatgactctttgaccacgcggagaaggcaaaacttcagccatttgtgtttttttccccttggccttcccccctttcccaggaagtccgacttgttcatcttgtttttccttggcttcaacagcctccaattcttcaataaatgtagccaagtcttctttccacaaatctgatggactctttctttttaatgtgtccagctcttgttctttttcatttcttagcctgcagagttcatctttcttttccttggttaaataccaaaggggcatatcaagaagatagttgaaggttggtccagaatctgttacggagtcactcttttcagtttccttttcgttgtcactctcttcattttcttcttcatctggaaccttttgctgggcttctttccaggccttcacaggatccgaatcatatcccctctgaatcagaactttaattaattctttcttaggcttattttcaatgattattttgccatctattttctctaagataaagcgagcctgattattagtttagcagattcagcaccaagcattcctaagagccattcttttcttaatccataatatttaagtctgagnttc

SEQ ID NO: 10781 - DNA, 465 bp, Homo sapiens
  misc_feature 357: n = A,T,C or G
gcagcagctgcatgatgagggtgctgtctttgtaggagtcctcgctgagggtgtgcagatcagccatggcctcgtcgaaagtggtcttggccagagagatggcctcctcggggctgttggcgatctcgtagtggaagacggaaaagttcagggccaggcccaggcggatggggttggtgggcggcatctccttcttgctgatgtccatggcctcctggtaggctgaccgggctgagtcaatgatgcgcttcttgtcgtcaccggtggccacctcggccaggtagcggtagtagtcacccttcatcttcaggtagaagacccggctctcggcgtccccggcctccttgatgaggtggnctgtccagcaggcccagcacggagtcgcacacgccctggagctcagtctccaccttctccccgtactcacgcacctcgggccccttctccttcgagcccttctcgttg

SEQ ID NO: 10782 - DNA, 299 bp, Homo sapiens
aaccgcatgagacacacacgaaagacggccctgccttccagggctcgctagatccttggttcctgtcgtggaagagaggggcagagtcttgctctgtcacccaggatggagtgcagcggcgtgatctcagctcattgcaacctccacctcctgggtgcaagcgattctcctgcctcagcttcccaagtagctgggattacaggcgtgcaccactacatccagagactgggactacaggcatggattttcaggtttataacatggcagagtgaattctggcaacacactgagtgatgctt

SEQ ID NO: 10783 - DNA, 629 bp, Homo sapiens
acagaaggggaaagttcatctgaagtgttttcagtttggcaagatcatccagacgataataattcagttcaagatggtgagaaaaaatgtttggctcctatagccaatactacaaatggtcagggttgtacagattatgtatctgaagttgttaaaaaaggagcagagggcattgaagaacgcacaagaccacggagtatttctgttgaagaattttgtgaaattgaagtaaaaaagcctaagagaaaacgatctgaaaaaccaatggctgaagatcctgtgaggccttcatcttctgtcagaaatgagggccagtctgatactaataagagagagcttgtgggaaatgattttaaaagtattgatagaaggacttcaactcccaattcacgtattcagagagccactacggtttcacaaaaaaagtcttcaaagctttgtacttgtacagaacccatcaggaaagtcccagtttctaagacccctaagaaaactcattcagatgccaaaaaaagacagaatagaagttcaaattacctaagttgtagaacaactccagctatagtgccgccaaagaaatttcgtcagtgtcctgagccaacttcaacagctgagaaacttggcctgaa

SEQ ID NO: 10784 - DNA, 641 bp, Homo sapiens
caataaatgttagctttccccttataatgacatttgtccttttcttctttgccatgggttttgattttttcccctattattgtctctttgggggttttatttttaagagattgcatgccaccagaatctgaacaacaataacaaaaacctagtaccttctggaagtagaatttactcttttgccgttggcaggcaaatacgccatgcgagacctggtcaaccggctccccggcggcaatggccccagtgtcttgtctgatgagaccatggcagccatctgctgtgctctgcacgaggtcaccagcaaaaacatggagaacgcaaaagccctggccgactcaggaggcatagagaagctggtgaacataaccaaaggcaggggcgacagatcatctctgaaagtggtgaaggcagcagcccaggtcttgaatacattatggcaatatcgggacctccggagcatttataaaaaggatgggtggaatcagaaccattttattacacctgtgtcgacattggggcgagaccgattcaaatcacatccttccttgtctaccaccaaccaacagatgtcacccatcattcagtcaggctccagcaaaccttcaccaatttacatcagttcctattcctcaccagca

SEQ ID NO: 10785 - DNA, 666 bp, Homo sapiens
catctgtttttagcctgtttatgtctagaacatctatcaatgggttgctaggaagaggctcaatgtttgtgttttcaccagatcagtttcagagactgcttaaaattaatccagactggaaaacccacagacttcttgatttaggtgctggagatggagaagtcacaaaaatcatgagccctcattttgaagaaatctatgccactgagctttctgaaactatgatatggcagcttcagaaaaagaaatacagagtccttggtataaatgaatggcagaatacggggttccagtatgatgtcatcagctgcctgaacttgctggaccgctgtgatcagcccctgactttgttaaaagatatcagaagtgtcttggagccaactagaggcagggtcatccttgcccttgtcctcccctttcatccctatgtggaaaacggtggcaagtgggagaaaccatcagaaattttggaaatcaaaggacagaactgggaagaacaagtgaatagtctgcctgaagttttcagaaaagctggttttgttatcgaagctttcaccagactaccatacctgtgtgaaggcgacatgtataatgactactacgttctggatgacgctgtctttgttctcaaaccagtataaacacgtggaggtcgaagtcttcaga

SEQ ID NO: 10786 - DNA, 57 bp, Homo sapiens
agctacttgttctttttgcaggatcccatcgataagcttgcttgttcttttggccga

SEQ ID NO: 10787 - DNA, 551 bp, Homo sapiens
  misc_feature 97: n = A,T,C or G
acagaagggattttccttttcaaataggtctaactcagcaactcgctttaggtcagcagcctccctgaagaccaaaattagaatatccatgacctanttttccatgcgtgtttctgactctgagctacagagtctggtgaagctcacttctgggcttcatctggcaacatctttatccgcagtgggtatggttgacactagcccaatgaaatgaattaaagtggaccaatagggctgagctctctgtgggctggcagtcccggaagccagctttccctgcctctcatcaactgaatgaggtcagcatgtctattcagcttcgtttattttcaagaataatcacgctttcctgaatccaaactaatccatcaccggggtggtttagtggctcaacattgtgttcccatttcagctgatcagtgggcctccaaggaggggctgtaaaatggaggccattgtgtgagcctatcagagttgctgcaaacctgacccctgctcagtaaagcacttgcaaccatctgttatgctgtgacacatggcccctccccctg

SEQ ID NO: 10788 - DNA, 513 bp, Homo sapiens
  misc_feature 345, 346, 347, 348, 349, 350, 351, 352, 353, 354, 355: n = A,T,C or G
tgttacctgccgacagcataaagcgaggcaaggtccagccgttccgcccggcatacaagcttatggagcagccccctttgaagatctccaggtggacttcacagagatgtcaaagtgtagagttcaccctttctccccaggtgatcgagtgtggatcaagaactggaacgtagcctccttgtgtccactgtggaaaggaccccagactgtcgttctgagcactcccaccgctgtgaaggtagaaggaatcccagcctggatccaccacagccatgtaaaacctgcagcgcctgaaacctgggaggcaagaccaagcccagacaacccctgcagagtgaccctgannnnnnnnnnnagccctgctccagtcacacccggaagctgactggtccacgcacggccgaagcctgaggaagctcatcatgagattcatttttcttaaattttggacttatacagtaagggcttcaactgatcttactcaaactggggactgttcccagtgtactcatc

SEQ ID NO: 10789 - DNA, 173 bp, Homo sapiens
  misc_feature 24, 41: n = A,T,C or G
agtggctcacccttgtaatcctancactttatgaggctgangcgggtggatcacctgaggttgggagttcgagaccagcctgaccgacatggagaaaccccatctctactaaaaatactaaaaattagccaggtgtggtggctacatgccaaggattacatgcctgtaatccc

SEQ ID NO: 10790 - DNA, 458 bp, Homo sapiens
ttcgaatgaattaaaagtttaattctgaaccattttttataaccgcattttctcttgaagcatcgtatcacagcaggttacaacaactttgggataaaaggcaactggtaaactgtccaaaacaaggttccaaataacacctcttactgatttaccctacccatacatatcccaaatagtttttgatcaaaaacatgaaatagatccacctgcttattttaagcatattaaaaaggaaactaattggaccattttctatttgtctattttatacaaaaaggctacacaattgttacactttattcagattacaattaattagagtgattatgaattaattagtgttctacaccattactcaattcttaaaaattagaaattgctgtagcagtattcactataacttaacactacgagagacttaaaaaacagttactgcaaaaaaaaaagagctactt

SEQ ID NO: 10791 - DNA, 863 bp, Homo sapiens
  misc_feature 503, 580, 749: n = A,T,C or G
aacaatgactctttataaacttgtatggggtctaaattatcccttgtaatatatatgtgtgtattcattccacagagaattagatgatccgcctccaggtaacctgctgggaatttcttgagattttggctccccttgaatggccgcatccaacttgttttgttagaactcccagcatcacagcgatggcagctctcttagattccccatacatccacgacctatatcatgtccaataaatcgtccacatcaccaccttcttcaaatacagctgctgtgtctccacttggtttgtctttgggggccagaaactttttggcttcctcagctgtgacagaacttccagaggcttcctctttggtgatcagagtaattccatcctggacaacaatttcccagaaatgatttaattgtttaatttccactttctcttgaagggctttcaggaagttgttaaagcgctgctcttctgaaaacttaatggcttcttccccgaaggctcngatgcagtctatgctcttcataaaatacggtgtttcattagtatccaaaaactgttcgatgtgatttatgagctggntactcgcttcctcaaagctggcctttcttctgtttactagaacacggaaagtttcagcaggattcacactttccacagaggtgacactgccttcagccagactggagaacctgaagtgggcccccccttgtcagtctttaatttttagcttggagtccatcttcatggntggcttggaaaaattccctgacagccacttgatcctttttttggcttcaatcaaagaaaaaggtctttattttaaagagaggatttgacttttcgttgcacctaacgggaggat

SEQ ID NO: 10792 - DNA, 377 bp, Homo sapiens
ccccgggctgcaggaattcggcacgaggataccgctgaccttcatttgtggaatcctcagtcatcgacacacaagacaggtgactaggcagggacacagatcaaacactatttccgggtcctcgtggtgggattggtctctctctctctctctctctctctctctctctctcgcacgcgcacgcgcgcacacacacacacaatttatatatctagttcacagagcacactcacttccccttttcacagtacgcaggctgagaaaaacccgccccaccctccacccggtggctgacgaaaccccttctctacaattgatgaaaaagatgatgtgggccgggcacgctatctcacgcctgtcactccggcactttggga

SEQ ID NO: 10793 - DNA, 541 bp, Homo sapiens
tccaccgcggtggcggccgctctagactagtggatcccccgggctgcaggaattcggcacgagcatgataaggacgctgctgctgtccactttggtggctggagccctcacttgtggggaccccacttacccaccttatgtgactagggtggttggcggtgaagaagcgaggcccaacatctggccctggcaggtctccctgcactacagctccaatggcaagtggtaccacacctgctgatggtccctgatagccaacagctgggtcctgacggctgcccactgaatcagctcctccaggacctaccgcgtggggctgggccggcacaacctctacgttgcggagtccggctcgctggcagtcagtgtctctaaaattgtggtgcacaaggactggaactccaaccaaatctccaaagggaacgacattgccctgctcaaactggctaaccccgtctccctcaccgacaagatccagctggcctgcctccctcctgccggcaccattctacccaacaactacccctgctacgtcacgggc

SEQ ID NO: 10794 - DNA, 501 bp, Homo sapiens
cggcacgaggctgatgttggagcggcttcactttgtctattgcgaataagtttcttaaattcttcaaagagaagactggaatcttttaatacaggtacatgttattgtagctgtggtaatgctggctgcatctcaaacagggttaacttcagctcctgtggcaaattagcaacaaattctgacatcatatttatggtttctgtatctttgttgatgaaggatggcacaatttggaaagggcaccaaggaactctcgggtgaagcagcttcctgttctcagtgctttccctccgtccggtgagattcccagtgagactgtttgaataaaatcacctgccactggtctaggtgtctgaggagcatcttcctggctcaaagaccttttgctccaggtgctcatgccgcaaatggcaatctgcgcgcgaactaattcgcggccgcaagcttattccctttagtgagggttaattttagcttggcactggccgtcgtttacaacgt

SEQ ID NO: 10795 - DNA, 643 bp, Homo sapiens
attcggcacgatgacgacctccagtctgtagacacgtgccaggagcaagccaattcactgaagagctcggcttctcataatggagacctgcatcttcacctggatgaacatgtgcctgtcgttattggacttatgcctcaggactacattcagtatactgtgcctttagatgaggggatgtatcctttggaaggatcacggagctattgtctggacagctcttctcccatggaagtctctgcggttcctcctcaagtgggagggcgcgctttccccgaggatgagagtcaggtagaccaggacctagttgtcgccccagagatcttcgtggatcagtccgtgaatggcttgttgattggcaccacgggagtcatgttgcagagcccgagagcgggtcacgatgatgtccctccactctcaccattgctacctccaatgcagaataatcaaatccaaaggaacttcagtggactcactggcacagaagcccacgtggctgaaagtatgcgctgtcatttgaattttgatccgaactctgctcctggggttgcaagagtttatgactcagtgcaaagtagtggtcccatggttgtgacaagccttacagaggagctgaaaaaacttgcaaagcaaggatggtact

SEQ ID NO: 10796 - DNA, 625 bp, Homo sapiens
attcggcacgaggttttttttgggaaaaacaataataactttagtataagcctctcagctgacaatgacccaaggactgttcagcggcccaggcacctgaggagcaatgacagtctacgaggacatcttctgcagcaacagccatcaggagaccagcagcagcacagcactcagggctcggtgtccacctccctgcagatcactttctccctcactggaatcaaccgcagcacttggagtctactcatggagtagaaacttctttatggggtctggcagaggcagcgaaggaatcatatgaagccggtgtttgccaagagctcttctcacagccacacggcacagacacagcaaggttctgggaacacttctggcctctttaaagacctgcaaggcctcagggtccacttttcttcttcctctcgactctgggcccagcgattcccacttcactagattcaggttggctccaaattctaccagcaggctcacgaaggctgcctcacagccgtggcgcagaacagcatccatgacgcacccaggggagcccctgtagaatccctgtgtgttgacaggaccattgcagttgaagtcagggttcgcgccagccaggaggagcagccgg

SEQ ID NO: 10797 - DNA, 739 bp, Homo sapiens
  misc_feature 586, 587, 693: n = A,T,C or G
gagaagcaccaggtttaatattaaaatctttcccttaaaaaaaagtacacagatagaaaaacttaacagcatacaaaatagcatttctgctgtataaatgtgagttaacgtgagtcctaaaaatatttgtaaacctaggtgattatatctttggtaccgtattgagaacccactctccctccttggaccaactctggggatcccagggaagtaaggtgccaacctgcaatgcagggttggtgcccagaggggttgagcttcctgcacccccttcccaaccctccccgtgcgggggcgtcttggctacaaccctgactcccctggcacctccaatgcccactgggctggggacaatgagatgtcactgctaggtctgggcagtgacaaaaccatacccccatggagcgctgcctcagggatggggcagctggtgggtgaggggcaaacctccaaagcgcccacctctcacatccttcttgggtacccatctgaagcttcttgtcttttacaagacataactgtcctcactgtccattctgtcttcgacgcagacctcggcacagggtgctggagtgtggggctgcanngaggatctcatttgccctctttgtcccttttgcccaggatacccccccgaggtcatccgtgggtagtgaaagaggtccccgtgtcttccatgtcccttgggcagcntgctggggcttccaggacacccgctggcactctaagcaaaggcctg

SEQ ID NO: 10798 - DNA, 75 bp, Homo sapiens
ctatttaggtgacactatagaacaagtttgtacaaaaaagcggctggtaccggtccggaattcccgggatggccg

SEQ ID NO: 10799 - DNA, 327 bp, Homo sapiens
tcactcgagtgaacgcaaaggctgctttgcaaatcactgccctatggagggtgattaactgctagccaattacgcaacacttttaatcaattgtgcttaaggctctacatcaaatctggtgggtgcccttcttagagcagcgtcgactgacgaacgagcattcgctgaatgatgtcactgcagctcgtcaccacaccgtccatatactcagtcgccacagcgcacgcgaaatgagcggagcagaagcgactctcatctcctatgcctgcgctgattactacaaactcatctcgaatgacgtacttggactgactcacgcatcggtcc

SEQ ID NO: 10800 - DNA, 573 bp, Homo sapiens
  misc_feature 451: n = A,T,C or G
ggcctatttaggtgacactataggaacaagtttgtacaaaaaagcagctggtaccggtccggaattcccgggatatcgtcgacccacgcgtccgggtttgctgtgtgggggaagggaggaggtatgtaaaaataaaatggccatcctaagcaaagaagaatatacaaaatgatcttagggagataaccacaaatacgggggggggaaggaatcttaggatactttgctcatctctatcagataaatttggaaacttggagaaaatgggtaattctcaatgaaagtataacttactaaaacatactccagaggaaatagaaaatgtaaaccaatagaggaagttgttaagggagaaaaataatgttacagcatacttctatttttgtgtgtccacgtgtttttaaaggagggcaggggggaaaaagcatagagccagccaactatggcctancaaaacagtcacatttcaacctctgttgataaaagttataatattctgaatcttacactgcttattgccattgtcacaccccaccactatggggtatttgagtttcatttatctactataaa

SEQ ID NO: 10801 - DNA, 313 bp, Homo sapiens
gaagtacagttggcttcacaactaactattgctgccattgaaaaaaataggtggtgttgccactacagccttctatgatccaataattctggacattgtatgcaaacctgttccattctttcttcgtggacaacccattccaaaaagaatgcttccaccagaagaactggtaccatattacactgatgcaaagaaccgtgggtacctggcggatcctgccaaatttcctgaagcacgacttgaactcgccaggaagtatggttatatcttacctgatatcactaaagatgaactcttcaaaatgctctgtact

SEQ ID NO: 10802 - DNA, 108 bp, Homo sapiens
tcaaaaagctccagcccagaaagcacctgctccaaaggcatctggcaagaaagcataagtggcaatcataaaaagtaataaaggttctttttgacctgttgaataaag

SEQ ID NO: 10803 - DNA, 639 bp, Homo sapiens
tgaagctgtgggaggtgtcagtggcggaccggcgctccctcctggagccctttgtctacttggccagcaagatgacgcaaccccagagcaagtctgccttccccctcagccggaagaacaagggcagcggctccttggatggctgaagagctgccgttcctctttcacgatcccagccccatttcagtgtctggggctctggtagatgtgttgagggcaaagtagaggacaagctgtctttcccagtcagccagggagctccccgccaggccacgccccagccactttgctccctctcacctctgggaagtgcaaatactcttggttgacatccccttcctcagccctcccagcctactccccatcccagcttttagaggatctgctccactgtctcctggggcagttgtgggtcactgtcccttccagctgccccagacaggaagcagagtcaccacgcagcagtgtcccttcttgggtctgagttcctattataggtaggggccccaccctctgggcttcccatcagcgacacacacacacttatggcaccagcctggactccagaaaaagggtgtccaggtattgtgtgtatgcatttagttgtgcacacacaaatatgctcctatactggcatta

SEQ ID NO: 10804 - DNA, 641 bp, Homo sapiens
taaaacaaaccatctttaataccaatatagttctctcttaaataccgtgtttcccaggacaaatgcaggggcaggctcttggcagaaagagtagaaaggaaatgtggaacaaaatggaatggatggcccaggcccagggtccctgccttgggcactagggactgggctgcctcggggatgggggagtgacagcagctccccctggtccagttattgcagaggcgtcgggggctcccctccctccccaggccttgaaacatttctcaggattacttctgaccttcagccccagcagggccagggcctgggctcctctggtctaggatgggcccctttgcccaaaagggcctgcagctaaggcgtggggtggggcggggagcccctggacaggcccgctgctcttagtaggtgctctggtggcccgtgaggatgtagaggttgctgtgcgcctctgggttgtcagtgggaatgctctccaggatgatgtctctgtgggccccaagcactcggaagatccttgtttcatctgtgatctcctgggtcacctcattggtatccaggctttcgccttgcatcccatggcttcagaaagccagcacactgtcctgcaggcacaccacagtctcgatggggaaatcaaa

SEQ ID NO: 10805 - DNA, 600 bp, Homo sapiens
gatttcgtgccttagcaccaatgtactatcgagggtcggctgcagctataatcgtttatgatatcacaaaagaagagacattttcaacattaaagaattgggtgaaagagcttcgacagcatggcccacctaatattgtagttgccattgcaggaaataaatgtgatcttatcgatgtaagagaagtcatggagagagatgcaaaggactacgccgactctattcatgcaatttttgtagagaccagcgcaaaaaacgcgataaacataaatgaactctttatagaaattagtcgaagaattccatccactgacgccaacctgccatctggcggtaagggcttcaaactccgaagacagccttcagagccaaagcggagctgctgctgaccgaacctcagcctctcagacttgatgatgaagtaggtggtcctgaaagttaacaggagggctggggtccctgccaccagttttcacctagccagtcttgagtcttctccgtgcaaaaaggattcacagaaatggaccagttctgttctccaaagactgcagcaatgatatttcagtctgtgaacttctattatgtaaagaatctctagtg

SEQ ID NO: 10806 - DNA, 123 bp, Homo sapiens
  misc_feature 40, 53, 106, 121: n = A,T,C or G
acggagacgggtatcccttcgacgggaaggacgggctccnggcacacgccttncctcctggccccggcattcagggagacgcccatttcgacgatgacgagttatngtccctgggcaaggncg

SEQ ID NO: 10807 - DNA, 150 bp, Homo sapiens
gggtcgacgtgtcctggggcatcgggtgcagcaggggctatggcttctacaccaaagtgctcaactacgtggactggatcaagaaagagatggaggaggaggactgagcccagaattcactaggttcgaatccagagagcagtgtggaaa

SEQ ID NO: 10808 - DNA, 516 bp, Homo sapiens
tccaccgcggtggcggccgctctagaactagtggatcccccgggctgcaggaattcggcacgaggtctcctccatcacagcttctctgcgctttgacggggccctcaatgtggacctgacagagttccagaccaacctggtgccctaccctcgcatccacttccccctggccacctatgcaccagtcatctctgcagaaaaggcataccacgagcagctgtcggtggcagagatcaccaatgcctgctttgagcctgccaaccagatggtaaagtgtgatccccggcacggcaagtacatggcctgctgcctgctgtaccgtggagatgtggtgcccaaggatgtcaacgctgccattgccgccatcaagaccaagcgcagcattcagtttgtggactggtgccccacaggcttcaaggttggtatcaactaccagcctcccactgtggtgcctgggggtgacctggccaaggtgcagcgtgccgtgtgcatgctgagcaacacgaccgccatcgc

SEQ ID NO: 10809 - DNA, 445 bp, Homo sapiens
tggtacgcctgcagtaccggtccggaattcccgggtcgactactactactaaattcgcggccgcgtcgaccttctggaggaatactgttggcgttcaaaagcattgctgtttcaacaatggccaataacaaattaagagggccgaagtccaggaatgtatttcacatatccagccaaaaaaaactttaaggctaaaaacaaagcaaaaccagttaccactaatcttaagaagataaacattatgaatgaggaaaaagttaacagagtaaataaagcttttgtaaatgtacaaaaggaacttgcacatttcgcaaaaagcatttcacttgaacctctgcagaaagaactgattcctcagcagcgatatgaaagcaaaccagttaatgttgatgaagctacaagattaatggctctgttgtaatatactggtgatgcatctaattct

SEQ ID NO: 10810 - DNA, 477 bp, Homo sapiens
tccaccgcggtggcggccgctctagaactagtggatcccccgggctgcaggaattcggcacgagtttttttttttaaaaaaggacaaaaatgcatttatttaatatacaagggctcaaccgaggcttattttaaaagacaaaaacaaaacaaaaataccacagctcaaaataaagagtcctatacagaaatcacaaaaaggacagaccatctaaggaaaaattaaaaagacgacacaaggacaggctgggcagcctgggtcagggctcctggctggtgacctgctttgagtaggtttcttgcaggtacttcttaaaagctgtggggtttttccaaaactcggcagcatgtgtgttcaagggactatcaatgttgggttctcctaaaaggctctggatggagagcaaaatggtcctgacatcatacagggcagaccacttttccttcaggatgtccaggcatatgttaccctgggtgt

SEQ ID NO: 10811 - DNA, 621 bp, Homo sapiens
tccaccgcggtggcggccgctctagaactagtggatcccccgggctgcaggaattcggcacgagctttgtttgccatttcctacaggtgaaacgccatcattaggattcactgtaacgttagtgctattaaactcactagcatttttattaatggccgttatctacactaagctatactgcaacttggaaaaagaggacctctcaaaaaactcacaatctagcatgattaagcatgtcgcttggctaatcttcaccaattgcatctttttctgccctgtggcgatattttcatttgcaccattgatcactgcaatctctatcagccccgaaataatgaagtctgttactctgatattttttccattgcctgcttgcctgaatccagtcctgtatgttttcttcaacccacagtttaaagaagactggaagttactgaagcgacgtgttaccaagaaaagtggatcagtttcagttaccatcagtagccaacgtggttgtctggaacaggatttctactacgactgtggcatgtactcacatttgcagggcaacctgactgtttgcgactgctgcgaatcgtttcttttaacaaagccagtatcatgcaaacacttgataaa

SEQ ID NO: 10812 - DNA, 64 bp, Homo sapiens
tccaccgcggtggcggccgctctataactagtggatcccccgggctgcaggaattcggcacgag

SEQ ID NO: 10813 - DNA, 502 bp, Homo sapiens
  misc_feature 478: n = A,T,C or G
gaacatactaggcgatctcgacagtcgctccgtgacagcccaccaacccccaaccctctacctcgcagccaccctaaaggcgacttcaagaagatggaaggatctcacggatctcattcctaatggtccgccgaagtctcacacagtagacagacggagttgagatgctggaggatgcagtcacctcctaaacttacgacccaccaccagacttcatcccagccgggacgtcctcccccacccgagtcctccccatttcttctcctactttgccgcagttccaggtgtcctgcttccaccagtcccacaaagctcaataaataccaagagacctggcatttacagcagagggaacatctcacacccttggcataagttaaaataaatattacgtacacatctccatcaccctaggagggacgtacataaatacatataaatattaattagggaggcaattaggaaataaattaacgangctctcctttcccacggggctagg

SEQ ID NO: 10814 - DNA, 522 bp, Homo sapiens
tccaccgcggtggcggccgctctagaactagtggatcccccgggctgcaggaattcggcacgagcaagaaccagtttaacagaggtggtggccatagaggacgtggaggattcaatatgcgtggtggaaatttcagaggaggagcccctgggaatcgtggcggatataataggaggggcaacatgccacagagaggtggtggcggtggaggaagtggtggaatcggctatccataccctcgtgcccctgtttttcctggccgtggtagttactcaaacagagggaactacaacagaggtggaatgcccaacagagggaactacaaccagaacttcagaggacgaggaaacaatcgtggctacaaaaatcaatctcagggctacaaccagtggcagcagggtcaattctggggtcagaagccatggagtcagcattatcaccaaggatattattgaatacccaaataaaacgaactgatacatatttctccaaaaccttcacaagaagtcgactgttttcttt

SEQ ID NO: 10815 - DNA, 147 bp, Homo sapiens
tccaccgcggtggcggccgctctagaactagtggatcccccgggctgcaggaattcggcacgaggcagctggaggaggagcagcaggccctccagaagaagctgaaggggacagaggatgaggtggaaaagtattctgaatccgtga

SEQ ID NO: 10816 - DNA, 494 bp, Homo sapiens
  misc_feature 219, 251, 305, 379, 483: n = A,T,C or G
ctcgtggtgaccaaggtccagttggccgaactggagaagtaggtgcagttggtccccctggcttcgctggtgagaagggtccctctggagaggctggtactgctggacctcctggcactccaggtcctcagggtcttcttggtgctcctggtattctgggtctccctggctcgagaggtgaacgtggtctaccaggtgttgctggtgctgtgggtgaanctggtcctcttggcattgcggccctcctgggnccggtggtcctcctggtgctgtgggtagtcctggaatcaacggtgctcctggtnaaaactggtcgtgatggcaaacctgggaacgatggtcccccaggtcgcgatggtcaacccggacacaagggaanagcgcgggttaacctggcaatattggtcccgttggtgctgcaagtgcacctggtcctcatggccccgtgggtcctgctggcaaacatggaaaccgtggtgaaantggtcctttgg

SEQ ID NO: 10817 - DNA, 647 bp, Homo sapiens
tccaccgcggtggcggccgctctagactagtggatcccccgggctgcaggaattcggcacgagcaaaggtgtgggcatcatctcagaaggcaatgagaccgtggaagacattgctgcccgcctcaacatcccagtcagccaggtgaaccccagggatgccaaggcctgcgtagtacacggcagtgatctaaaggacatgacctccgagcagctggatgacattttgaagtaccacactgagatagtgtttgccaggacctcccctcagcagaagctcatcattgtggaaggctgccaaagacagggtgctatcgtggctgtcactggtgacggtgtgaatgactctccagctttgaagaaagcagacattggggttgctatggggattgctggctcagatgtgtccaagcaagctgctgacatgattcttctggatgacaactttgcctcaattgtgactggagtagaggaaggtcgtctgatctttgataacttgaagaaatccattgcttataccttaaccagtaacattcccgagatcaccccgttcctgatatttattattgcaaacattccactaccactggggactgtcaccatcctctgcattgacttgggcactgacatggttcctgccatctccctgc

SEQ ID NO: 10818 - DNA, 720 bp, Homo sapiens
  misc_feature 3, 624, 661, 663, 668, 669, 673, 674, 676, 680, 681, 690,691, 692, 698, 705, 709, 716: n = A,T,C or G
agnatcaaaagcgactatgcacaacttcttgaagacatgcagaatgcattccgtagccttgaagattagaagccttgaagattacaactgtgatttccttttcctcagcaagctcctatgtgtatattttcctgaatttctcatctcaaaccctttgcttctttattgtgcagctttgagactagtgcctatgtgtgttatttgtttccctgtttttttggtaggtcttatataaaacaaacattcctttgttctagtgttgtgaagggcctccctcttcctttatctgaagtggtgaatatagtaaatatacattctggttacactactgtaaacttgtatgtagggtgatgaccctctttgtcctaggtgtaccctttcctcatctctattaaattgtaaacaggactactgcatgtactctctttgcagtgaatttggaatggaaggccaggtttctataacttttgaacaggtactttgggaaatgactcaatttctattgtggtaagctcattggcagcttagcattttgcaaaggaattgctttgcaggaaatatttaattttcaaaacataatgattaatgttccaattatgcatcacttcccccagtataaatcanggaatgtttgtgagaaaccattgggaactatactctntnaattnnaatnntnaatnntttaataannntttttnggggacngagngtccctnttgt

SEQ ID NO: 10819 - DNA, 845 bp, Homo sapiens
  misc_feature 7, 8, 23, 24, 27, 30, 61, 85, 88, 105, 116, 121, 129, 218,300, 316, 326, 327, 331, 332, 437, 439, 440, 441, 443, 701,712, 739, 746, 750, 753, 758, 759, 763, 767, 770, 804, 815,816, 839, 840: n = A,T,C or G
gggtggnngggttttgttggggnnaantcnattgttcaaaaaccccccctttttttctttnggccgaaacccctccggctgcganaanagacagtaggggcaagnaatggctttgnggggncttggggngagtcataaaagttctaaagcaagttgctgaacagtttctcaacatgaggggtgggcttggtttatctggtgcaaaggccaactaccgnggaggtgaaatccgagaacagaatggagacagtcttgtccatgctgcttttgtagcagagggggctgtcgcgggaagtgcanaggcaaatgcatttantgttcttcannatgnnctcggtgctgggccacatgtcaagaggggcagcaacaccaccagccatctgcaccaggctgttgccaaggcaactcagcagccatttgatgtttctgcatttaangnnngntactcagattctggactctttgggatttatactatctcccaggccacagctgctggagatgttatcaaggctgcctataatcaagtaaaaacaatagctcaaggaaacctttccaacacagatgtccaagctgccaagaacaagctgaaagctggatacctaatgtcagtggagtcttctgagtgtttcctggaagaagtcgggtcccaggctctagttgctggttcttacatgccaccatccacagtccttcagcanattgattcagnggctaatgctgatatcataaatgcggnaaaaaanttgnttntggcnnagtnatanccncaaggggaattgggactaccctttggtgaagagngaaactgagcnncttacaggaaaagctgacgtctnnaaccc

SEQ ID NO: 10820 - DNA, 216 bp, Homo sapiens
  misc_feature 94, 142, 145, 159, 160, 166, 190, 192, 193, 196, 200, 201,203, 204, 206, 207, 209: n = A,T,C or G
gggctgtggtccccattactcaggaggctgaggtgggaggatcacctgagcctggcaggtcgaggctacagtaagccatgatcatgccactgcnctccagcctgggcaacagactgagaccctgtctcaagaaaaaaaaaanatnaaaaaaaaaaaaannggggcngtttttttctttttccccccctgntnnaanatcnntnntnntntttggac

SEQ ID NO: 10821 - DNA, 545 bp, Homo sapiens
  misc_feature 8, 437, 472, 498, 502, 512, 541, 542, 543: n = A,T,C or G
gggatggnccccaactctggcttaaagatcttgctgtggctctgttatgttctgaggccttgggattagcctcttcctcattacggagctgattttctagtctgtggatcagctatgcctttggacacttctcttttccattgtgccttttgaatgttgtcttctcactcagcatcagcacttcgatctaaatgcagactagggagttgggaggaggaaccaaagtgaaccatccttcatttattcagtcattcgttcatctgtcaaacacgtatttggacatcaaggttgcagagatgaacaatgcatggatttcatctttgaggagttcaaaacctagtggagagaacacatggtacaatcgtaacacatgaaggacaagtaagtgctgcagtaaaggtactaatacatgttccttggacagaggaagaaaaccncgaaaccctggaattagggagcctttcagaggggngacaaactcaatttgcctttcagctntgtncatgatgtgncctgcagatgctcataagtatttctgccnnnaa

SEQ ID NO: 10822 - DNA, 126 bp, Homo sapiens
  misc_feature 2, 18, 28, 31, 40, 53, 57, 67, 70, 73, 74, 79, 94, 96, 98,103, 118: n = A,T,C or G
cnggtactggcttgccanaagaccacanaanggtacctgnttgccagatgacnacancacaggtacngtntgnnataanactacagaaaggttntntntgtanaagacaacaacctgntacggctg

SEQ ID NO: 10823 - DNA, 788 bp, Homo sapiens
  misc_feature 1, 9, 26, 623, 641, 647, 649, 669, 671, 672, 691, 694, 740,750, 752, 759, 761, 765, 776, 785: n = A,T,C or G
nacgacagnagggtatttaatgagtntcttgttataacctagaatatgtatacgttagtaaaataaccagatatactacagaactctctattggctcaaacaggttgacctcaatccaagtttactcttgatatcactctgttggctgaaggaggtaactcaaacctcagggtttgtttttcccgggacagatagtagtgatagtgcattatatttgaataagaaaaacaaaccagtataccttgagaaattttaaaaagcatagttgaggcatattttttcataattatatacttatctgtttattgcccatggaaaatatatgtgtagaagtatttcttctgttatttgttactatcttcttaatttgttccaaagaaaatgctgccatactgcattccctctggaaggaaacaaaacaaaacaaaactcactcaaaaccagcagtgctgctatcagataagtagatgtcaatgtatacttacaaggaaaaactaaaaaatgtaatgtgttaattcagcctttttctatgtaatatttccaagtcagactttcttacattcctggaatttactttgatataccaagaataataatgataaaatggttgctttgattactgnggggggaagatgaaatgntcattntnttaaacaacaagcttttcanannactggtttctgcccttganggntaaagaattaatcatgccttaatcccgactttggaggcggggcagnggatacctgnanaagagtnanacanctggccaatgnaaaaccttnttc

SEQ ID NO: 10824 - DNA, 723 bp, Homo sapiens
  misc_feature 1, 8, 571, 583, 606, 690, 691, 700, 708, 714, 719: n = A,T,C or G
nagacagnaggggattgatcttttgcgggtgattcatgtagctggaaaagaaaccacaaacatcttcagtaattgtggttgcgtgagagcagaaggtgacatctccaatgtggccaatgggtttaagtctcatctcattcgtctgattggaaatctgtgttacaagaataaagataaccaagacaaggtaaatgagctggatggtatcccgttgatcctggacaactgcaacatcagtgacagtaacccctttctgacccagtgggtgatatatgccatccgaaaccttaccgaagacaacagccaaaaccaagatttgattgcaaagatggaggaacaggggctggcagatgcatccctacttaaaaaagtgggttttgaagttgaaaagacgcgaaaagctgatcctgaaatctactagagacacccctaagccatgaatgaactacatccaaatacctgaatttttggaatctgtttcatggatttttcatcttctaccgtatgtgaaattgcaagtgtttgaagatttataagtacaatttgggaactacaaatcttttagtagtanagttaacgtgtntagctaaagtgaaagtactgagngtctcttgttctttgcattaaggactggggggttgccttggcccctggtaaaacggctttaaaaaattttgactactggaagcnnaaataaccntctttggnggccanccttnttgg

SEQ ID NO: 10825 - DNA, 776 bp, Homo sapiens
  misc_feature 1, 618, 666, 671, 676, 683, 690, 695, 703, 710, 711, 728,746, 752, 760, 774: n = A,T,C or G
nggataaaatgggctgggcacggtggcctgtagtcccatcactttgggaggctgaggcaggcgaatcacttgaggtcagaagtatgagaccagcctggccaaaatggtgaaaccccatttctactaaaaatgcaaaataattagccaggcatagaggtgcatgcctgtagtcccagctacttgggaggctgaggcaggataattgcttgaacccaggagacagaggttgcagtgaaccgagattgtgccattgcactccagcctgggcaacgagtgaaacttcatctccagaaaaaaagaaatgatataaaatgttttattcttatgaagcagtttgcttgagtaattttaatggataacggtgaaaattaaatcactctgggtgtttttattctcacagatgccttttaaaaagtgatgtaagcattttattttaaaataccagtatttagattatagttgaaattacctaatcctttgcaactattttgttactttatcaaattaaccagtttataatcaaaattccaggtgacagtctaattggcaaagggtgcatacatttttcaaagtattttatgagataagtgaataaaattggggagcattgctcgaggnctcggaattacctaggattggactgtgagtcatgggatcagtatttanctgcnccagngaggcancctgctntcagngggggccnctggctnnatggaggtgctccttangggggcctgggctggatntacagnggctaggncattactgttaagngg

SEQ ID NO: 10826 - DNA, 454 bp, Homo sapiens
  misc_feature 289, 378: n = A,T,C or G
gcgtgcgcgcaacggggacgactgtccgctcgggcccgggcgttgctgccgtctgcacacggtccgcgcgtcgctggaagacctgggctgggccgattgggtgctgtcgccacgggaggtgcaagtgaccatgtgcatcggcgcgtgcccgagccagttccgggcggcaaacatgcacgcgcagatcaagacgagcctgcaccgcctgaagcccgacacggtgccagcgccctgctgcgtgcccgccagctacaatcccatggtgctcattcaaaagaccgacaccggngtgtcgctccagacctatgatgacttgttagccaaagactgccactgcatatgagcagtcctggtccttccactgtgcacctgcgcggnggaggcgacctcagttgtcctgccctgtggaatgggctcaaggttcctgagacacccgattcctgcccaaacagct

SEQ ID NO: 10827 - DNA, 337 bp, Homo sapiens
tccaccgcggtggcggccgctctagaactagtggatcccccgggctgcaggaattcggcacgagaggaggccaaggcgggcagatcacgaggtcaggagatcgagaccatcctggctaacacggtgagaccccatctctactaaaaatacaaaaaattagccgggcgtgttggcaggtgcctatagtcccagctacttgggaggctgaggcgggagaatggcgtgaacacaggaggcggagcttgcagtgagctgagatcgcgccactgtactccagcctgggcgacagagtgagattgcatctcacaaaaaaaaaacccaaaaaaaccctcccccc

SEQ ID NO: 10828 - DNA, 394 bp, Homo sapiens
cttgattcatctcttgccagcttagtaggcaatcttggaatttctggtaccacaacaaaaaagggagatcttcagtggaatgctggagagaaaaagttgactggtggagccaactggcagcctaaagtagctccagcaacctggtcagcaggcgttccaccaagtgcacctttgcaaggagctgtacctccaaccagttcagttcctcctgttgccggggccccatcggttggacaacctggagcaggatttggaatgcctcctgctgggacaggcatgcccatgatgcctcagcagccggtcatgtttgcacagcccatgatgaggcccccctttggagctgccgctgtacctggcacgcagctgcaatatttgtgactgaataggaaaataa

SEQ ID NO: 10829 - DNA, 270 bp, Homo sapiens
  misc_feature 146: n = A,T,C or G
agctgttgttgaaagaaaagcaagaacaagaaaaacaagagaaagccatgattgaaaagcagaaagaagcagcagaaacaaaggcccgggaggtagctgaacagatgcgtctcgagagagaacagattatgctgcagattgagcangagagactggagagaaagaagagaatagatgaaatcatgaagagaacaaggaaaagtgatgtgtctccacaagtgaagaaagaagaccccaaagtgggggtccagcctgctgtgtgtgtggaaa

SEQ ID NO: 10830 - DNA, 403 bp, Homo sapiens
ggcttttgcctttttgtcacattgagccacatgcctttgatacacagttgtagcaaagaagggaggtgatgaacttgctcactttcttttctgatttccctccctactcatcctgcactccccacagaaacccagatatcttatagtctaaggcttgtagaggattaaggaaaggaattggagatgggttttacttaattcacagaaaagctttctttgggatttttcctcccccttatggcttttaagtctaggtgaagtgaaagttcacacatgtgtttgtttggttgctctgtaattagctactaatttttatccctagaccttctctgctccagtgtcttgttcatgtgtcctgaccccgagtccttgaattcccactttgctttgagatttaagttat

SEQ ID NO: 10831 - DNA, 622 bp, Homo sapiens
cggcacgagttttttaactactgtgataatcaactttgatcctaacaatttaagaaatttgtataggaggataagaagaaccctaatctatagggaatgctcatgtccctgaaggaggacaggtcagtaagggcccaaattctctcctggtctttaggtggaaaggcaaaacatcacactttaaaaagaggctgctctcagccaaagcaagaaagacctctttcattaagcctattgatctgaagctattccaggaaggacaaaaaaagttcaagccagatgttcagcagcagccagagttggaccctatgtcacgagagttccgctgggaggcactgggtcccactgatgttgaaattgactgttggggcccaatcttgatgccatttgcctcattgtggacatcaaataaaccctgctggatcttcctatatatttctttggctgtgttaatgaaggcctcttcaacattgcaggctgttttggctgaagtttccatgaatataagtccatgctccctagcaaaggcctctccttcttctctcttcacatccctgcgggactctaggtcactgtaatcccagctactcgggaggttgaggcaggagaactgcttgaacct

SEQ ID NO: 10832 - DNA, 606 bp, Homo sapiens
  misc_feature 489: n = A,T,C or G
cggcacgaggggtcggactcccgcggccggactgtgggggagtcacgcaacaggaaaccttacgagagaggattaggggcctgaaaaagctgacaagacggcaaatatgggaagtggagccagtgctgaggacaaagaactggccaagaggtccaaggagctagaaaagaagctgcaggaggatgctgataaggaagccaagactgtcaagctgctactgctgggtgctggggagtcaggaaagagcaccatcgtcaaacagatgaagatcattcaccaggatggctattcaccagaagaatgcctggagttcaaggctatcatctatggaaatgtgctgcagtccatcctggctatcatccgggccatgaccacactgggcatcgattatgctgaaccaagctgtgcggatgacgggcgacagctcaacaacctggctgactccattgaggagggaaccatgcctcctgagctcgtggaggtcattangaggttgtggaaggatggtggggtgcaagcctgcttcgagagagctgcagaataccagcttaatgactccgcatcttactacctgaaccaattagaacgaattacagaccctgagta

SEQ ID NO: 10833 - DNA, 592 bp, Homo sapiens
ttcggcacgaggtgtggtgtaagaatgaattaaaatatagtttcactggcttttctctacatatccactatcacaatggctaggtttcctgttgctcactgttggattctggagaaaaatttaatgaaagatgatatcagaggaagaataagtggaggtatagaagaaaggagtgatagaggaggggaaaaaaacaaaacatatttttgtgttatccaaaggagctttttccttattctgtcaagcattgagatcttcttcagctttcaatgtagttgctaaatacaaataatgctactaggtagtgactaaatatagcaaacacttcctcagatattagaattaggtcacactattgaggttataatctgaaggttgtgttacatacaaaccactttagattattatcaacttggactaggctttattttataatagcataggaagtaatatctattgtgtcatttcttcaaccattttattctaagatccatgaagcttcttgaggccaaataaaataataagtttacacaagaagtagattgtgactgtttttcccttagagatactatttactatctcctatcctgat

SEQ ID NO: 10834 - DNA, 630 bp, Homo sapiens
ttcggcacgaggcgggctgtttggcggacgaagcttcacaaaagatgtctaagcaacagccaactcagtttataaatccagaaacacctggctatgttggatttgcaaacctccccaatcaagttcaccgaaaatcagtgaaaaaaggttttgagttcacactgatggtggtcggtgaatcaggtctaggaaaatcgactctcataaacagcctattcctaactgatctgtacccagaaagagtcatacctggagcagcagaaaaaattgaaagaactgtccagattgaggcttcaactgttgaaattgaagagcgaggggtcaagctacgcctgacagtggtagatacccctggctatggtgacgctatcaactgcagagattgttttaagacaattatctcctatattgatgagcaatttgagaggtacctgcatgacgagagcggcttgaacaggcggcacatcattgataatagggtgcattgttgcttttactttatttcaccttttggacatggacttaagcccttagatgtggcgtttatgaaggcaatacacaacaaggtgaatattgtgcctgtcattgcaaaagctgacactctcaccctgaaggaacgggagcggctga

SEQ ID NO: 10835 - DNA, 781 bp, Homo sapiens
  misc_feature 1, 8, 17, 31, 484, 555, 657, 670, 732, 749, 752, 766, 768,773: n = A,T,C or G
nagacagnagggtcggnagcgggcgagcggnattagcagggctttactgcagagcgcgccgggcactccagcgaccgtggggatcagcgtaggtgagctgtggccttttgcgaggtgctgcagccatagctacgtgcgttcgctacgaggattgagcgtctccacccatcttctgtgcttcaccatctacataatgaatcccagtatgaagcagaaacaagaagaaatcaaagagaatataaagaatagttctgtcccaagaagaactctgaagatgattcagccttctgcatctggatctcttgttggaagagaaaatgagctgtccgcaggcttgtccaaaaggaaacatcggaatgaccacttaacatctacaacttccagccctggggttattgtcccagaatctagtgaaaataaaaatcttggaggagtcacccaggagtcatttgatcttatgattaaagaaaatccatcctctcantattggaaggaagcggcagaaaaacggagaaaggcgctgtatgaagcacttaaggaaaatgagaaacttcntaaagaaattgaacaaaaggacaatgaaattgcccgcctgaaaaggagaataaagaactggcagaagtagcagacatgtacagtatatggcagagctaatanagagactgatggngacctctggtatttgaatcctggatatcaggaatttgattctgaaaaaaactgtgagatttntatgaaactcaaattgnacnggctgaaggactgntnttctntcgatgca

SEQ ID NO: 10836 - DNA, 726 bp, Homo sapiens
  misc_feature 439, 578, 613, 620, 628, 632, 633, 643, 650, 667, 681, 685,696, 698, 699, 709, 717, 718, 724: n = A,T,C or G
tagggtatcacagggcgatcaaggggttttggctttgtgctatttaaagaatcggagagtgtagataaggtcatggatcaaaaagaacataaattgaatgggaaggtgattgatcctaaaagggccaaagccatgaaaacaaaagagccggttaaaaaaatttttgttggtggcctttctccagatacacctgaagagaaaataagggagtactttggtggttttggtgaggtggaatccatagagctccccatggacaacaagaccaataagaggcgtgggttctgctttattacctttaaggaagaagaaccagtgaagaagataatggaaaagaaataccacaatgttggtcttagtaaatgtgaaataaaagtagccatgtcgaaggaacaatatcagcaacagcaacagtggggatctagaggaggatttgcangaagagctcgtggaagaagtggtggccccagtcaaaactggaaccagggatatagtaactattggaatcaaggctatggcaactatggatataacagccaaggtaccgtggttatggaggatatgactacactggtacnacacctactatggtttggggattatacaccaccanagtggtntgggaagnatcnngcaaggggcntcaaatnctccaaccttctaattntcctttgcactttncccncaggggggaananntttccatttnaaatcttnnaggggntc

SEQ ID NO: 10837 - DNA, 355 bp, Homo sapiens
tacttgttctttttgcaggatcccatcgattcgaattcggcacgagccccaaccctccccagtgggcagggcggagggagcctcagcctccttagactgacccctcaggcccctaggctggggggttgtaaataacagcagtcaggttgtttaccagccctttgcacctccccaggcaaagggagcctctgttctggtgggggccacctccctcaaaggctctgctaaccacactccgtggcccaccctttgttaccagttcttcctgcttcctcttttcccctgcctttctcattccttgcttcagatacctttttgttcctttgcctcttgcctgtgccctaaaacttgactg

SEQ ID NO: 10838 - DNA, 716 bp, Homo sapiens
  misc_feature 26, 85, 281, 430, 687, 700: n = A,T,C or G
ggcacgaggcaaggttgtgacattgncacttttttgttctagactcttttaaattttctgcatttgcctgaaaagcacccctgtnagaatagatttctcatggctctaaaaattattcccaagaataccttacttggttcaaaagcagactgtttctcttcatttcatctcaaatcagacttctgggcaagatgttctttagagtaagcaaacctacaacctaaaaatctcttcaagaggcatctctggtcttgtgacaagacctcttcaaaaacccacantaaaactcccctccctccagttggccaccagtctgccaccaaacatgaacaaattctgctgctaatcggtttcccttgtgatctggttcctgaggtcttcggatctgtgcaatgaattatttattgttttattaaaccgacagtggtgncccagagaggaaccataaataaaatggaaatctggtgctgtgataaagtaataactagcattaatgagacctggttttcctttcagaaagtccagtatacctgtaacaaaggttaaagcaatttatatttaatttgcattctgatgttaacatttaaacagcaattctaacaaaaatgcatcgagtctaattcttacctctatcaaaaaacaactgtataaatttatgaccaacattaaaacaaaaacaaaatgtanattttctctttanaaatgataactgggaa

SEQ ID NO: 10839 - DNA, 572 bp, Homo sapiens
tactcttgtggcaaaactgctggcaagtgtaccctttctgcagaaagtaaaaatggccttgctgaggaaattaaatttatgttcaagtgctatcctttacagcaccagggaacaagcatttctaacaatagcttatatttactacttaatgtttgatttacttttattgcaaataaggtcaaatcaaacatttacaaactggtacaataatacttttttgtaattagatatacaccaattcatactgacaatataacaaataattgtaatattcagttctagtattctactcaccacaaatccaacatttatttttccttctctattcttcctgctgaaaatgttaatctcttcagacaattatttgctatgaattcaaataactgctccaatctaataattgttcatataattcatcttaaatgatacaggtgaaataattttctcttatggctgacataagacagtctttaattacaaaaacaattaccataaaaaattgtggccattatttccataactatctttctttctcctcccttccacttctgggacttcagttgcaggtttgt

SEQ ID NO: 10840 - DNA, 353 bp, Homo sapiens
caagctacttgttctttttgcaggatcccatcgattcgaattcggcacgagccaaatggggtggggcgcagtggctcacgcctgtaatcccagcactttgggaggccgaggtgggcggatcacgaggtagggagatcaagaccatcctggctaacacggtgaaaccccgtctctactaaaaatacaaaaaaaaaacaaaaaaaactagccaggcatggtggcaggcacctgtagtcccagctactcgggaggcaaaggcaggaaaatggcgtgaacctgggaggtggagcttgcagtgagccaaaatcgtgccactgcactccagcctgggtgacaaagtgagactccgtctc

SEQ ID NO: 10841 - DNA, 623 bp, Homo sapiens
tgacactatagaacagtttgtacaaaaaagcagctggtaccggtccggaattcccgggatatcgtcgacccacgcgtccgctctacttgattctacatcagtagcatgtctttgttttaaagctataagattatccagagttatttttgaactagtaaaataatttaattatggtcaaaataaacctaagtattccaatttcaataccacatataatttaatgtgttttactataacttgtgctgtctgcatataatattcaaataaacacattgtgatgttatattggtacacagaaaaaaaatctgcactgaatcaatcctttgacaccaaatagatgtgtttatgtataataataggaatgacagacatgcctgactcacacactacaatatacagtaaagtcgtacatgatgcagcagtgaaagtgaaagtgagtgtagtcccaccaaaacaataaagtcaaagaggagggccaaagagttctgtttaggccacatcaagtttgagaagcttatgaaacattaaaatggctgtgccatgaagcagtaggcactaccgtgaccaccctatctaaaactgccaatccggccgggtatgatggttcatgcctgtatggcatg

SEQ ID NO: 10842 - DNA, 521 bp, Homo sapiens
ccaccccaaagatattttatttactttaagagtttagcatacataattcaaaaaatacgcaaactatatattttatataaaaggaaatatatgtaaattttacaagttcctttttcacttcatatatactatagctatcttttcatctgaatttatatggatttacctcattctttttaaaagctacatagtattccacggcacaggtgacacaatgctgagggctgtcagttgagcctgattctcttctctgtacaattcagcgacctgagtctgagtaaggcgaggggagtatggcacttgagttgacggcgcgactcactcaagcaaagactgattaaaggtgcaggaaggctaattgcccatcacctcctgctcaccatctcgggctgtcagtaggatttctttttactcaataatcatatagactagattttcctcattccaggtttcaaaattccctgaaatctaagaattttgaaaaaaatcataataatacatgagcatattctatctgactg

SEQ ID NO: 10843 - DNA, 405 bp, Homo sapiens
agaacaactcagcaaaataaaattcctgtttattgttggacaacattgtttcacacatacatcaaacaggccaaaaaaaataaacagcaacttcatagacaaaaaaggaaaaaaaaagaaaccttttatctttggcctttttaaccatctcatacaaaccaactacttatagtacagctaagtacatacacaaaaaagttactggaatgctcggaataagattgtttttctgttgtcatttttgctttttttacaaggttttttttctcctttgagattataatgaacatggtcacaccacaagtaaagtcagaagtaggacagagaacgctccgaaggctggtttggtcatccgagatcattaaaaatggctgaccctaacaatatgtacaaaaatataaaatg

SEQ ID NO: 10844 - DNA, 393 bp, Homo sapiens
ctgacccgaaacataaaaacttttaatgaaggaggacccagttcaaagcccttccacatgcggcccaaccctgccccacggaaaccggccatggcaaccgctcaatcaaaaggggtttttgatgcggccggccaccaccctaaggatgtccccgatctttttttgccagttggggatgtccttggacacggggcaccacagttccccatgccgaggctttgcactttcacagggcttccttacctcctcctgctgctcctaagggccatgctgcagctcaaacttgtagaagaaggcccaggcatcccccaggtccgagtcaatttcacaggtgcgggggaaccactccctgcctttggtgatcttccgctgactccaaaacagcttgggcac

SEQ ID NO: 10845 - DNA, 688 bp, Homo sapiens
  misc_feature 631: n = A,T,C or G
tcggcacgaggtcgctgaccgtgagaggaagaagctggtgctggagaacctggaggactcctgcgtgctgactgggccagatgattccctgtgggacaagcacgcgtgcccagcctacgtgggacctgagatactcagctcacgggcctcatactcgggcaaggcagccgatgtctggagcctgggcgtggcgctcttcaccatgctggccggccactaccccttccaggactcggagcctgtcctgctcttcggcaagatccgccgcggggcctacgccttgcctgcaggcctctcggcccctgcccgctgtctggttcgctgcctccttcgtcgggagccagctgaacggctcacagccacaggcatcctcctgcacccctggctgcgacaggacccgatgcccttagctccaacccgatcccatctctgggaactgtgttcccagcatctctgtcctcttgattaagagattctccttccaggcctaagcctgggatttgggccagagataagaatccaaactatgaggctagttcttgtctaactcaagactgttctggaatgagggtccaggcctgtcaaccatggggcttctgacctgagcaccaaggttgagggacaggattangcagggtctgtcctgtggccacctggaaagtcccaggtgggactcttctggggacac

SEQ ID NO: 10846 - DNA, 621 bp, Homo sapiens
  misc_feature 612: n = A,T,C or G
gcggccgccctgggccgggccccaccggacggcatgtcgggccccaggcctgtggtgctgagcgggccttcgggagctgggaagagcaccctgctgaagaggctgctccaggagcacagcggcatctttggcttcagcgtgtcccataccacgaggaacccgaggcccggcgaggagaacggcaaagattactactttgtaaccagggaggtgatgcagcgtgacatagcagccggcgacttcatcgagcatgccgagttctcggggaacctgtatggcacgagcaaggtggcggtgcaggctgtgcaggccatgaaccgcatctgtgtgctggacgtggacctgcagggtgtgcggaacatcaaggccaccgatctgcggcccatctacatctctgtgcagccgccttcactgcacgtgctggagcagcggctgcggcagcgcaacactgaaaccgaggagagcctggtgaagcggctggctgctgcccaggccgacatggagagcagcaaggagcccggcctgtttgatgtggtcatcattaacgacagcctggaccaggcctacgcagagctgaaggaggcgctctctgaggaaatcaagaaagctcanaggaccggg

SEQ ID NO: 10847 - DNA, 789 bp, Homo sapiens
  misc_feature 481, 561, 627, 730: n = A,T,C or G
ctggggagaacagtgatttaataaattatgggatagaaggaaaaatacatgtggatggtggggtgcagagagaccttgggcacagggactccctccgaccccagattatagaagactgatttggtttctgaagtaaaatcaaggcaggatccttcctgcctttggtcctcaagtagccagaactccagacccaaattccttcctgcctcaaaatccaggccccagcctgtttctttctgcatcctggaaagacctagggaatccaagctatcatccctctcctccttcagggaaccaggaatccagatccccagctcccataggactcatctgaagcccaccagaccactctctcctggggaaaccagagtttgggataccagccccctcctcccacagcacccaggagtctgggagcccagccctctgctcttccaggaatctgggctcaagtgggtgtccagagcttgaggatgcctgngctgccgacccagccccctcgtcacttagacctccaacttgtgggcctggatggcggccacgttctcgtagatgaggttntcgacatcctcatacgggacttccttctccgctgggggcctgggcttgactgtggaggaaccgcangatgcactgatgcagggattcgtactgagccctaatctgcaccatcaacgggcgactctctctcatcctccttacaaagctgaagggcccaaggagaccctcngactgcagctgcccgaagcagacctcccagggcaaatagggtgctgtgcgaccaagccc

SEQ ID NO: 10848 - DNA, 661 bp, Homo sapiens
ctggttataaatatattttaatatcaaataaaatgtacatgatcaaaaggctttgattgccatgtaaagcatagtttccaggttacatcaagtgattttatcttctcccatttcaaatgaaatgttgaaagcacaaacaatctgccatgaatgataagaagcaaaggcagcacatatcatctgcaagtttcttcccaagctataaaatatcatgttcatatttttcctggttggggaatcccaaaacaggcaatattttcatttcatccactctattcttatgtatttgaaaagcaggtgttatccacctaccacaagagcactgttcaccataccagttgaaggaacccaacttggcactgcattttgggcaaagaagctgtccatccatcactcccaacaaagcagattccatccactgtacaggttcaatgaaataagatgtacattgagcttgcctccctgtggtaagcatggaagatggtgtcattctcttgtgggcaaaggctataggtccacttccttcacggtgatccagaatactagaacttcgaaataatgatcgcctgcactttctacacttgtagagaacctcatctttcaatccttgtgaaacggtagttgggtcaacagcaaagagttcttgaagtaaattctgcaa

SEQ ID NO: 10849 - DNA, 826 bp, Homo sapiens
  misc_feature 2, 8, 12, 21, 22, 30, 45, 52, 63, 74, 740, 764: n = A,T,C or G
cntttggnccanaaaaacccnncttttctngttcttttggcccancggcctncggctgcgagnagtacgacagnagggggtagttctggacaacgccatcagctcgctgcttaaaattaaaccacaggttccattatgggtcgacttgatgggaaagtcatcatcctgacggccgctgctcaggggattggccaagcagctgccttagcttttgcaagagaaggtgccaaagtcatagccacagacattaatgagtccaaacttcaggaactggaaaagtacccgggtattcaaactcgtgtccttgatgtcacaaagaagaaacaaattgatcagtttgccagtgaagttgagagacttgatgttctctttaatgttgctggttttgtccatcatggaactgtcctggattgtgaggagaaagactgggacttctcgatgaatctcaatgtgcgcagcatgtacctgatgatcaaggcattccttcctaaaatgcttgctcagaaatctggcaatattatcaacatgtcttctgtggcttccagcgtcaaaggagttgtgaacagatgtgtgtacagcacaaccaaggcagccgtgattggcctcacaaaatctgtggctgcagatttcatccagcggggcatcaggtgcaactgtgtgtgcccaggaacagttgatacgccatctctacaagaaagaatacaagccagaggaaatcctgaagagcccggaatgatttnctgaaagacaaagacggaagatcncactgcgaagaatagcctgctctgcgtgattggcttctgagatctgctatgtactggaacct

SEQ ID NO: 10850 - DNA, 626 bp, Homo sapiens
gaatgtaaaatacagtaaaatgttaagattgtcatctactttttaaaaaaaaatatcaacttggaattgttttttaaaggctcaatcaaggaagtgaggtgtgcaataaggtagcaagtaaaacgcagttgcgtttttatgtcatgttagagatccatacaattttccactcacgggatttttgttgatggctgaattcttgtggattcataagaggatcatgcccttagcaagtacttttgttttgttttaaattaagagattcccaaatgcctttttccccctcatcttgaaatgagatgagtttttatgtgtaagcaatatttatttaactattctataaaattattgagtgcctactgaggcctttaagcaccgctaacattcctttccatcattcttttaaatgacataaaataattgtgcaatgttcctgatgatgtaccccacaagctgcattcaaactcaaatctgtgggaatgagtgactcgacaaaatgtaattcggatcagatcctcatcccctgactgtgtgaaaaaagtactctccttctagtgaaggattgtcacagagtttcactggatgaaactatgacccagtattcttactgtattttacatatgcct

SEQ ID NO: 10851 - DNA, 891 bp, Homo sapiens
  misc_feature 647, 661, 680, 693, 694, 695, 735, 737, 739, 740, 759, 791,797, 848, 883, 884, 885, 886, 890: n = A,T,C or G
tgtgccgctttcgcaagaaggtttcctggcctgttgcagccatggtgcattgcagttgcgtgttgttcagaaagtatggaaatttcatcgataagctaagactcttcaccaggggaggatccggtggaatgggttatcctcgtttaggtggagaaggtggaaaaggtggtgatgtctgggttgtagcccataacaaaatgactttaaaacaacttaaagacaggtatcctcggaaacggtttgtggctggagtaggagcaaacagcaaaattagtgcactgaaaggctccaaaggaaaagactgggaaatccctgtgcctgtgggtatttcagtaactgatgaaaatggtaaaattataggagaactcagtaaagaaaatgacagaattttggtagctcaaggaggtcttggtggtaaattacttacaaatttcttaccattgaaaggccagaaacgaataattcaccttgatctaaaacttatagctgatgtaggcctagtaggattcccaaatgctggaaaatcctctttgctaagttgtgtttctcatgcaaagcctgcaattgcagattacgcattacaacattaaagcctgaacttggaagatatgtcagtgatttcaacagatatcagtagctgatcttcnggttatagaagacncattgaacaaggatggccncaattctcagctnnnaagactaacactcttttgtgtgatattctggattagcttntntnnctcatcagacactttgacntatctgttcaaaattgattgccaaagactcanaaactnctttgcgtataatgctgcaagccaaagtctgatgtaccctcaattaatttnttttaaaaaaaaaacctgccttctacctaatgtgnnnncccnc

SEQ ID NO: 10852 - DNA, 729 bp, Homo sapiens
  misc_feature 678, 698, 701, 708, 728: n = A,T,C or G
aggggacaacaaagggcatgtcttgacatgcagagatgcgtagactacctgcaaataggcgcatatttttttaaagacagtagttagttccaaatatattattttatggatgaacaatttaatctaaaggggactatatcaggatattggaatcacttattgggccgtaagaattgaaacctagatcaaataaatttgagtagaaggaaaaggtaagagaatgacacaaaaagcacccagaggagagtatttctgtgtaaacaggtaaattaataggtggatatttaatacacaaattcacatttgtttcaagattggccttgtgtgtatggatactaaaaaggaaataacactaatgcttcattcatttttttattccaaataattttgctaagccccattacatagccaactcactgttagacactttgttttaaaggtgaaagagttaatacatttgcttccaaagaacttactagtaaagttacacacacacacacacacacactcacacacacacacatacacacacagagaatgagagagagaattacgtattctataggaaataaaggtaatatagaaaatctaactaccattcactgtaaattttttaaaaggaggattttacttatcaattttgaggataaaaaggacatcttcaatatgagtctaaanatatgcagggtgtccggggnggnggctacncctggatcccacacttggang

SEQ ID NO: 10853 - DNA, 773 bp, Homo sapiens
  misc_feature 676, 734, 741, 765, 769: n = A,T,C or G
ggggtaaaatgcttttcaagtgtgggttttgccctgattgttgcaaatacaatttccaccttctggaaaggtaggtttgctgtggaggaaataatgtactagatcattgtcacagaaaaaccaactatgatttatggttgtgttttcagaattcaacattaaagattaatgtttatttaaacgaacacattcctgcattcaggatgtgaggccatttaataaaaagggcacaaagcctgtcagagttttcaacggtgcttatagctgccagctggattccaaacaggtaccacattgtctctgagctaatgtttatatttttccattcaggcaccgaaatagttaatatttgaaataagtcttcaaaagaaaacataagagattattgagttcttgggactggatcctttatttcataagttcagatcatcttaaatgaaaatgccatgattatctgcagttaagtagatgacagctattctacatcagacttgatttttgtcagctaattacataattggtaagctataattgaaaccttatggcttaaaattccttaactcctttttgattcatgtttgtagtcatgttgtcacagaggcaaagtaagcttgatgatggttaaaatcggttgatagcacatgggacattttctacaaaataatgcatgaagagnatagcctttagtttgctattgtgaatggaatgcttcaggagtaatcaatactttagtngcttaanaaattttccccagaaattaataanattnttgt

SEQ ID NO: 10854 - DNA, 276 bp, Homo sapiens
tatgacgtcgcatgcacgcgtacgtaagcttggatcctctagagcggccgcctactactactaaattcgcggccgcgtcgaccacaaaagcacactctaatgcctcatgtgaagaggtgggctctccacaagttcccggggcagagtctgaagacctgctgctggataggggcttcctcctggtccccaagggggcggcctctcaggcccaccttgaggccaccctggtgggccacttcccggattttggacaggattgattggagccgtccgttc

SEQ ID NO: 10855 - DNA, 585 bp, Homo sapiens
  misc_feature 565: n = A,T,C or G
ctttctttgctatttaatgttcatcacttaacgttttgtgtgtaagtttcaggagggcccaagaaatgattacacaggaggcaaggaggggaggtgataggagggttgctgggggtctggagctcatggcccccagctcgggggccaaaagggttccatctcagctcaaggggagtaaaaaggggccccagaaccaaacacatgctaaaacatacttgcaagcccccaaaccccctccccacctgctggggaggaaaataaatacacccagactctgtcccactccccaggtgcccaggtgaggggccagcaggtgagtttcctcccctcatcacaggttgaggtcaaagaattgccatttactacagtgctcctagtcccttccacagggctgggggaaccctgggcttgggagcggtggttgtcagcgcacagcctgcctggggcttgtcatgctaaatagaggggagccacactcacttccacttcaggcaaaacagaacaggcccaggaaagggtggaagttcactgaggcctcatggccccctttctggcaggtcagganaaaacagtcctttgcagggt

SEQ ID NO: 10856 - DNA, 295 bp, Homo sapiens
  misc_feature 73, 127, 128: n = A,T,C or G
ctcacacgctgtctgtgactaaagagggcacagcagggccagtgtgagcttacagcgacgtaagcccagggcnaatggtttgggtgactcactttcccctctaggtggtgccagggctgggaggctnnagaaaaagatcagtaagccccagtgtccccccagcccccatgcttatgtgaacatgcgctgtgtgctgcttgctttggaaactgggcctgggtccaggctttagggtgagctcactgtcccgtacaaacacaagatcagggctgagggtaaggaaaagaagagacta

SEQ ID NO: 10857 - DNA, 527 bp, Homo sapiens
  misc_feature 413: n = A,T,C or G
agatgaccagggatgctgggctgggccctctttccctgcgagacgcacacagctgagcacttagcaggcaccgccacgtcccagcatccctggagcaggagccccgccacagccttcggacagacatataggatattcccaagccgaccttccctccgccttctcccacatgaggccatctcaggagatggagggcttggcccagcgccaagtaaacagggtacctcaagccccatttcctcatccctgactggccaaacccttgctttcctgggcctttgcaagatgcttggttgtgttgaggtttttaaatatatattttgtactttgtggaaaaaatgtgtgtgtgtggcagggggccccgccagggctggggacagagggtgtcaaacattcgtgagctggggactcanggaccggtgctgcaggagtgtcctgcccatgccccagtcggccccatctctcatccttttggataagtttctattctgtcagtgttaaagattttgttttgttggacatttttt

SEQ ID NO: 10858 - DNA, 98 bp, Homo sapiens
tgacactatagaacaagtttgtacaaaaaacaggctggtaccggtccggaattcccgggatatcgtcgacccacgcgtccgcccacgcgtgcggtctg

SEQ ID NO: 10859 - DNA, 459 bp, Homo sapiens
cacagtttaattgctctatgcatttattattagctattattaatgcagaatgagggaacaaaaagctcacaaacactctacacaatttcacaagacgcattgcaggggaaaaagtgactgagatggatcaacagtatgctaaggtcttggtggacgcattcctgggggaggtggacctctaatgcctggtggagggggtctcattcccggaggcggcatgcctattggcgtccctcgagcagggggaagcccaattggtgggcccatgggtggtctcataccaggtggaggagccataatgcctggaggtggggttgctctgccgacgggtgggggcggagtgcaccgtcctggtgggtactgtgttgggggctcagcaatactggcacgtccagcaacagcagcagctgctacagtgcctcttccccgtggagtacatacctggcgggatggtccccc

SEQ ID NO: 10860 - DNA, 88 bp, Homo sapiens
tttgcaaaagactatttagtgacactatagaaggtacgcctgcaggtaccggtccggaattcccgggtcgacccacgcgtccgggcag

SEQ ID NO: 10861 - DNA, 213 bp, Homo sapiens
  misc_feature 18, 21, 28, 32, 134, 148, 162, 206: n = A,T,C or G
caaggcagccgatgtctngancctaggncgtnggcgctcttcaccatgctggccggccactaccccttccaggactcggagcctgtcctgctcttcggcaagatccgccgcggggcctacgccttgcctgcagnctctcggccctgcncgctgtctggttcnctgcctccttcgtcgggagccagctgaacggctcacagccacangcatcct

SEQ ID NO: 10862 - DNA, 645 bp, Homo sapiens
  misc_feature 630: n = A,T,C or G
tgtcaccaatcctttgcagataatgtatagtgtgtcacaaggacatcgacctgttattaatgaagaaagtttgccatatgatatacctcaccgagcacgtatgatctctctaatagaaagtggatgggcacaaaatccagatgaaagaccatctttcttaaaatgtttaatagaacttgaaccagttttgagaacatttgaagagataacttttcttgaagctgttattcagctaaagaaaacaaagttacagagtgtttcaagtgccattcacctatgtgacaagaagaaaatggaattatctctgaacatacctgtaaatcatggtccacaagaggaatcatgtggatcctctcagctccatgaaaatagtggttctcctgaaacttcaaggtccctgccagctcctcaagacaatgattttttatctagaaaagctcaagactgttattttatgaagctgcatcactgtcctggaaatcacagttgggatagcaccatttctggatctcaaagggctgcattctgtgattcacagaccactccatgctcttcagcataataaatccactctcactgcaggaactccgaacgttgcagcctgtatgcccgcagtggatccgagcaaanggagacatttgaacc

SEQ ID NO: 10863 - DNA, 498 bp, Homo sapiens
tataataaatgtatttaggtaaaaacataggtgcaattgaaagggaaccactctcgcatggacgctgtgggtgctgcttggggctcgaggccagaggtccctgttggcggggtgggagggtggcccagggcaggcacggggccacacagagccctgatcggggcccactcacctcgagaaatcaccttaatggccacctggacccggtctttccagagcccctcgaagacctccccaaagtagccggaccccagcttcctgcagagcgtgaactcctccctcggcctctcccagtcatccaatggggcaggggctcaggctcgtgcttccggcagggcgcggccagccgacgcgtggggacaggctctgggccctgtggtaattcaccagcttgggcaagcttaagaatgagcaccggctcgttctagttgaagcggcccccgaccgccgccagaatcttgtagtgccgacaagctggttgttccgcactggaacgag

SEQ ID NO: 10864 - DNA, 771 bp, Homo sapiens
  misc_feature 592, 641: n = A,T,C or G
acagcatgtccccctgagtttattattggaaagcaaggactgaacaaagactcagacaataaatatctgaagagaggaagccgagcttaggaggctcagagggtccgggggaggtaaagctgtcgagggcagtgaagggggctgtgcccaccccgctcacccgctccccagatgcctaggggagcgccgggcccggcgggaggtgccggtggggagcccgcagacggtgtcctggcactggcagctctcgatgtgggtgtaggtgtgtgtcaacgagccgccattggggcagctcaggaccacctcacgctggctggttttctcctctttgcagcaggagcagctgtggtccagggcctgggccttggccgagtacatgacaaatgtcccgcaggacccggagcaatgattcatgaggacggtcttggtgcagccggcgtacgaaacctccgtggtgacggggacggtggagcagggcaccctggtctcattgcgaggggtgcaggtcttgcagcatccattgggcatgaatgtgatggagcccgggatgcaaatgctggcatcaaagttggggcaggtgatgttggagacngacgagatgagctggttgttgatcttcacgcagctgaagaatgtgcagntggtcttcggtccctcttgaggtcccgggcttcaggatgacctgctggtggtccggccgtttgagatacgatgcctctgtatcacactgcttcaagacttccccggggccctcattaattcgaccccggg

SEQ ID NO: 10865 - DNA, 465 bp, Homo sapiens
gggcacacatctccagtgaagccaaaaacctcatctccaagctcctggtgcgagatgcaaagcagagacttagcgccgcccaagttctgcagcacccatgggtgcagggggaacagcagcacaatggacctgacgctcttcgcagctgaggccatcgcccttaaccgccagctatctcagcacgaagagaacgaactagcagaggagccagaggcactagctgatggcctctgctccatgaagctttcccctccctgcaagtcacgcctggcccggagacgggccctggcccaggcaggccgtggtgaagacaggagcccgcccacagcactctgaaatgctccagtcacaccttataggccctaggcctggccaggcattgtcccctggaaacctgtgtggctaaagtctgctgagcaggcagcagcctctgctctgtggctccattcaggctttttcatctac

SEQ ID NO: 10866 - DNA, 451 bp, Homo sapiens
tgaaccagagagttgtgagtttattaagggagatctagtgcttatcctagaatcagcccttgctgcctatgatcttcttgatccagtccaggtagcggcagatgttggtatagacgccaggtttgtcggacctcccacaggggtctgagccccaggatgtgatgccctggagtgcaccatcacacaccagggggcctccagaatcgccctggcacgtgtcagcccctttgctgctgcctgcacagaccatgccatctgtgatctgccccgggtaagcatcctcacacttcttctggggaaagatttttacttctgcacagttgagagtgtcaggaaaattctctcggggactggtgacagtgccccagcctgagacggtgcacttctggccaggctgggtgcaatgatctgccaggctgatgggcttcactttggaccccagggatgcctg

SEQ ID NO: 10867 - DNA, 523 bp, Homo sapiens
  misc_feature 400, 404, 406, 408, 419, 427, 428, 457, 485: n = A,T,C or G
tgagacatttaatcatgccaatggcctcacgttggtgtctagagctcaccagctagtgatggagggatataactggtgccatgaccggaatgtagtaacgattttcagtgctccaaactattgttatcgttgtggtaaccaagctgcaatcatggaacttgacgatactctaaaatactctttcttgcagtttgacccagcacctcgtagagccgagccacatgttactcgtcgtaccccagactacttcctgtaatgaaattttaaacttgtacagtattgccatgaaccatatatccgacctaatggaaatgggaaagagcaacagtaactccaaagtgtcagagaatagttaacattcaaaaaacttgttttcacatggaccaaaagatgtgccatntgcnantnccaaagcctcntgtcatcnncaggccgtgaccactttagaatgtaaccngttcattggcatgctgaagcgacattgntgggtcaagaaaccagtttctggcatagcgccaatttg

SEQ ID NO: 10868 - DNA, 463 bp, Homo sapiens
ggacctttgtccaaaagggattctatcttgcctttcaggatgtaggggcttgcatagctttggtttctgtcaaagtgtactacaagaagtgctggtccattattgagaacttagctatctttccagatacagtgactggttcagaattttcctctttagtcgaggttcgagggacatgtgtcagcagtgcagaggaagaagcggaaaacgcccccaggatgcactgcagtgcagaaggagaatggttagtgcccattggaaaatgtatctgcaaagcaggctaccagcaaaaaggagacacttgtgaaccctgtggccgtgggttctacaagtcttcctctcaagatcttcagtgctctcgttgtccaactcacagtttttctgataaagaaggctcctccagatgtgaatgtgaagatgggtattacagggctccatctgacccaccatacgttgcatgcac

SEQ ID NO: 10869 - DNA, 453 bp, Homo sapiens
  misc_feature 207, 208, 209, 285, 340, 341: n = A,T,C or G
atttcaagcataacttgagtctgcactggggagacactcgtggtgggggtggctgtgatgagggcacttgcgagtcccgacaacagacactggctcctgcacccacatcaccaccatgtcccaggggcagcctggaggggagtttgtggtcagagccccagccaggaaaggagagagttccagaatgttccaagagtctagccgcannnccaagacaccatgagctggagggtcgggatggggcagcctccctggtgcaatcggcacctgggcccccgggcatgntcaagtgctgtcgtgaggtctgtctgccctgggtcagagcagcaggcagaaccgnngcttcttctgccgttgcgccttcttcagagcgctgagagccaccttggcggcctcccggaagacgtcctccacattctcccgaaacttggcggaacattccaggtagagagc

SEQ ID NO: 10870 - DNA, 220 bp, Homo sapiens
tgtagtcccagctactcggtaggctgaggcaggagaatcacttgaacccagtaggcggaggttgcagtgagctgagatcacaccactgcactccactccagcctagaaacagagcaagactccatctcacaaaaaaaaaaaaaaagaaagaaaacctaaaaccttttttaaaaaaaaaatttaaggttggggccctcttccaacgggcaaaaaaaaccct

SEQ ID NO: 10871 - DNA, 302 bp, Homo sapiens
  misc_feature 1, 19, 20, 35, 45, 61, 64, 66, 67, 69, 70, 71, 73, 88, 89,96, 105, 121, 130, 137, 138, 141, 153, 170, 174, 185, 188,212, 223, 227, 228, 255, 257, 259, 264, 286, 298: n = A,T,C or G
ntcctgtgcaaggtgccgnngctggatccggctgncagacaactntacaaggcagggaacnctntnncnnngnaccctgatgatgcgnncagtatnctgacacanatgaactgtgtggcanctgctttcnatgcacnnccntggcacaaaccncattttgcgtggacccntagnacaaaaacttntcnaggttggttttaaaaccctttttnggacaaccttnaacnnttaattcccctttttttggcccaaaananangtacnagggttttttttaaccccccancccccggggggntttt

SEQ ID NO: 10872 - DNA, 402 bp, Homo sapiens
  misc_feature 5, 14, 15, 16, 22, 28, 29, 35, 38, 51, 70, 97, 101, 107,108, 114, 132, 134, 159, 160, 166, 177, 191, 193, 204, 205,209, 212, 220, 238, 239, 248, 251, 257, 263, 270, 276, 281,290, 297, 301, 303, 321, 338, 339, 364, 377, 380, 381: n = A,T,C or G
  misc_feature 390, 399: n = A,T,C or G
tgctncgacaacannncagaanggttanngctgcnatnagactacagtatnggttactggctgcgaaaanacgacatagttggtactgctgcgatantacnacaganngggtcntcgtgcgacatgacctananatgggtacggctgctagactacganngatggnttcggctgccnataataccacatangngttctgctggnnctanacnacgaatgnttctgctgctataatacnncttagtggnacngctgcnagaacnctcatantgttcnggttntatatatanccgaagntgcngntgtgatatacacataagntccggtgcaagaaaaannaaattgttcccctcgagttaccacnccctgtttaatgntgnntaatggacnttctcctgnaaa

SEQ ID NO: 10873 - DNA, 740 bp, Homo sapiens
  misc_feature 487, 534, 549, 573, 590, 631, 638, 642, 651, 658, 684, 708,711, 724, 726, 736, 738: n = A,T,C or G
cccttgtggtacaccgagccaattgctgaatattttgttcctctgagcagaaaaagtaaactagagaccacataccgaaacagacaggatacaagtgatctgacatcagaggcagtggaagaattgtctgaatcagtgcatggtctttgtatcagcaacaataatcttcataaaacatacctcgcagcaggtactttcattgatggtcattttgtagaaatgcctgcagttataaatgaggatattgacctcactgggacctcattatgttctctaccagaggacaataaatacctggatgatattcatctatcagaattaacgcacttctatgaagtggatattgatcaatccatgttggatcctggtgcctcagaaacaatgcaaggagaaagtcggattttgaatatgattcgacagaaaagcaaagagaacacagattttgaggcagaatgttgcatagtgttagatggtatggagttgcaangggaacgtgcaatatggacagattctaccagctccgtaggtgctganggcttattcctgcangaccttggcatctggctcagtttnggagtgctggtcttcanctccgggatgctgatggggaaagtttggaggaactctccantaaactncctncctcttaanagccagngctcaattccacctgcttgctgcatnaaactctttaaaattatgaagatnggntaaccctgttttnangttgaagcangnaa

SEQ ID NO: 10874 - DNA, 767 bp, Homo sapiens
  misc_feature 2, 12, 15, 22, 38, 620, 647, 657, 669, 688, 689, 704, 731,756, 767: n = A,T,C or G
tncggctgcganagncgacagnagggtctaacaacagnactttaatgtaattgtggaagcattgagcaaatccaaggcagaactcatggaaatcagtgaagataaaactaaaatcagaaggtctccaagcaaacccctacctgaagtgactgatgagtataaaaatgatgtaaaaaacagatctgtttatattaaaggcttcccaactgatgcaactcttgatgacataaaagaatggttagaagataaaggtcaagtactaaatattcagatgagaagaacattgcataaagcatttaagggatcaatttttgttgtgtttgatagcattgaatccgctaagaaatttgtagagacccctggccagaagtacaaagaaacagacctgctaatacttttcaaggacgattactttgccaaaaaaaaatgaagaaagaaaacaaaataaagtggaagctaaattaagagctaaacaggagcaagaagcaaaacaaaagttagaagaagatgctgaaatgaaatctctagaagaaaagattggatgcttgctgaaattttcgggtgatttagatgatcagacctgtagagaagatttacacatacttttctcaattcatggngaaataaatggatagacttcgtcagangagcaaagangggatatttctntttaagaaaagccaggaannttgggtaagccaagngcaatatggtacctcattaagaccaanaatgcttgggagtctaaaggggagnggaaagaaccn

SEQ ID NO: 10875 - DNA, 778 bp, Homo sapiens
  misc_feature 5, 20, 533, 569, 630, 659, 686, 704, 743, 746: n = A,T,C or G
agggnattgcagactgcggnagtcagacggcgctatgtacgccctcttcctcctggccagcctcctgggcgcggctctagccggcccggtccttggactgaaagaatgcaccaggggctcggcagtgtggtgccagaatgtgaagacggcgtccgactgcggggcagtgaagcactgcctgcagaccgtttggaacaagccaacagtgaaatcccttccctgcgacatatgcaaagacgttgtcaccgcagctggtgatatgctgaaggacaatgccacggaggaggagatccttgtttacttggagaagacctgtgactggcttccgaaaccgaacatgtctgcttcatgcaaggagatagtggactcctacctccctgtcatcctggacatcattaaaggagaaatgagccgtcctggggaggtgtgctctgctctcaacctctgcgagtctctccagaagcacctagcagagctgaatcaccagaagcagcttggagtccaataagatcccagagctggacatgactgangtggtggcccccttcatgggcaacatccctctcctnctctaccctcaggacgggccccgcagcaagccccagccaaaggatatggggacgtttgcangactgcattcaaatggtgactgacttcanactgctgtacggaccactcacctttgncagccttggtgaactgtnaggaggatggacgctggcctgctgccactttcaaacttntancattttgaatgttccaaaatgtccttcaccag

SEQ ID NO: 10876 - DNA, 769 bp, Homo sapiens
  misc_feature 1, 8, 14, 29, 36, 547, 719, 733: n = A,T,C or G
ncgacagnaggggnacttttgtaaacagnatcaggnaagcatcatcagatcgttgctcagctttacttcaggtcattttcagtcctctagaagaagaagtgaaggcgggaatttattcgaaaccagggggctatcgtctctttgttcagaagctacaagacctgaagaaaaagtactatgaggaaccgaggaaggggatacaggctgaagagattctgcagacatacttgaaatccaaggagtctatgactgatgcaattctccagacagaccagactctcacagaaaaagaaaaggagattgaagtggaacgtgtgaaagctgagtctgcacaggcttcagcaaaaatgttgcaggaaatgcaaagaaagaatgagcagatgatggaacagaaggagaggagttatcaggaacacttgaaacaactgactgagaagatggagaacgacagggtccagttgctgaaagagcaagagaggaccctcgctcttaaacttcaggaacaggagcaactactaaaagagggatttcaaaaagaaagcagaanatgaaaaatgagatacaggatctccagacgaaaatgagacgacgaaaggcatgtaccataagctaaagaccagagccttcctgtcaccccttaccaaggcataattgaaccattttagaatttggaacaagcgtcactacttttgataataattagatcttgcttcataacnccaaagttattaangcatgtggtccatgatcaaaatctgttttttttaaa

SEQ ID NO: 10877 - DNA, 751 bp, Homo sapiens
  misc_feature 18, 641, 647, 671, 687, 700, 704, 727, 749: n = A,T,C or G
ctcccctacattccaggnaggcgaaagctatgcactgcgcagaggctgggaaggctttaattaaattcaaccactgtgagaaatacatctacagcttcagtgtgccccagtgctgccctctctgccagcaggacctgggctcgaggaagctggaggacgcacctgttagcatcgctaatccatttactaatggacatcaagaaaaatgttcattcctcctcagaccaactcaggggacatttcttagagagtatgatggaaggtctgatcttcatgttggaataactaacacaaatggggttgtgtataattacagtgcacatggtgtccagcgagacggagaagggtgggaagagagcataagcatcccattactgcagcccaacatgtatggaatgatggagcaatgggacaagtacctggaagacttctccacctcgggggcctggctgcctcacaggtatgaagacaaccaccataactgctactcttacgcactcacgttcattaactgcgttctgatggcagaaggtagacagcaactggacaagggtgaatttacggagaagtacgtggtcccgcggacaaggctggcattcaagttcatcacactctaccgggcgatacgggagcatggcttntacgtnactgactggccccagcagcaggcncaacccctgaggcggnggtttggctgaancttntaacccaccctggccctgaaggnaggggggtgctacctttaaaanac

SEQ ID NO: 10878 - DNA, 759 bp, Homo sapiens
  misc_feature 557, 716, 728, 741, 748: n = A,T,C or G
cggctgggcaccgccattttggccggtggccgtgagaacacgctgtgtggctgaaaagtgaaggcaagagctgatttggcctctgtgctcccctccgcaaggggatcgttttctccagaagagctggatattctttcgcccagttatggcagacaagttaacgagaattgctattgtcaaccatgacaaatgtaaacctaagaaatgtcgacaggaatgcaaaaagagttgtcctgtagttcgaatgggaaaattatgcatagaggttacaccccagagcaaaatagcatggatttccgaaactctttgtattggttgtggtatctgtattaagaaatgcccctttggcgccttatcaattgtcaatctaccaagcaacttggaaaaagaaaccacacatcgatattgtgccaatgccttcaaacttcacaggttgcctatccctcgtccaggtgaagttttgggattagttggaactaatggtattggaaagtcaactgctttaaaaattttagcaggaaaacaaaagccaaaccttggaaagtacgatgatcctnctgactggcaggagattttgacttatttccgtggatctgaatacaaaatactttacaaagattctagagatgacctaaagccatcatcaacctcatatgtagaccagattctaagctgcaaagggacagtgggatctatttgaccgaaagataaacaanaccagcaatggntgtcagcgcttgnttacccnctaaaaacaaa

SEQ ID NO: 10879 - DNA, 783 bp, Homo sapiens
  misc_feature 9, 30, 549, 572, 577, 606, 618, 620, 661, 672, 681, 688,726, 732, 747, 757, 779: n = A,T,C or G
tacgacagnaggggccttcccaggcggggnatgctgcggctccgcagcgggctgaggcaccttcgcgcaacacccaatactcggggctccgctcggcttcttcgcgccgagatgcctaagaaggctggtgcgacgaccaagggtaaaagccagagcaaggaaccagagagaccacttcctcccttaggtcctgtggcagttgatcctaaaggatgcgtcaccatagccatccatgcaaaacctggctccgaacaaaatgctgtaacagatttgacagcagaggctgtaaattagctattgcagcacctccatcagagggagaggctaatgctgagctctgtcggtatctttccaaggtcctagaactcaggaagagtgatgtggttttggataagggtggtaaatctcgtgaaaaggtggtggagcttttggcttctacaactccagaagagatcttggagaaattaaaaaaggaagccaaaaaaacataaaagcaagaaatgaggccgggcgcagtggctcatgcctgtaatcccagcactttgggangccgtggtggcggatcacctgangtcangagttcgagaccagcctgaccaacatggngaaacccatctntngaaaatacaaattagccagatgtgatggcgctgcctgtatnccagtactcangaggctgangcagganatacttgacctggggcggaggtgcagtaaccgaatccnccgtgncttcacctggcacanatgaactctntccccgaaaaaaataaaaactncttg

SEQ ID NO: 10880 - DNA, 424 bp, Homo sapiens
ttttgttttaaataataaaactcaggatattttaattggacattagcacaaagttttgataattaatgtaaatgaaccttgtctacaaagcgaacgatgcctgctggtgagccacacagatactgctccttcagattgaggttgtacatgcccccaaaggctcgcttcattgctacgattctctacttaaatccacattcacagctattgcctcagaccctctggaggaggggccaggggttagctggctttgaatagcatgtagagcacaggcagtgtggccacaaatgtcacacaggtgaccagggtgctatagatggtgttcctgttgacttgggcttctagtctctgctccgtgtctgacagtgccaagatcatgctcccctgctccagcaagaagctgggcatagccccgtctgctggt

SEQ ID NO: 10881 - DNA, 610 bp, Homo sapiens
tccaccgcggtggcggccgctctagaactagtggatcccccgggctgcaggaattcggcacgagactgcctctgccctatgcagctggcggtccctttctgtgtgaacttccggctgaaagggaaggacatggtggtggacatccagcggcggcacctccgggtggggctcaaggggcagccagcgatcattgatggggagctctacaatgaagtgaaggtggaggagagctcgtggctcattgaggacggcaaggtggtgactgtgcatctggagaagatcaataagatggagtggtggagccgcttggtgtccagtgaccctgagatcaacaccaagaagattaaccctgagaattccaagctgtcagacctggacagtgagactcgcagcatggtggaaaagatgatgtatgaccagcgacagaagtccatggggctgccaacttcagacgaacagaagaaacaggagattctgaagaagttcatggatcaacatccggagatggatttttccaaggctaaattcaactagcccctgttttttcctccctgaactcttggggctgagctgcaaccacccaactttctttcccactcttctctgggac

SEQ ID NO: 10882 - DNA, 698 bp, Homo sapiens
tcggcacgagtgctggaatgacctttacaacttttgatcttggtgggcacgagcaagcacgtcgcgtttggaaaaattatctcccagcaattaatgggattgtctttctggtggactgtgcagatcattctcgcctcgtggaatccaaagttgagcttaatgctttaatgactgatgaaacaatatccaatgtgccaatccttatcttgggtaacaaaattgacagaacagatgcaatcagtgaagaaaaactccgtgagatatttgggctttatggacagaccacaggaaaggggaatgtgaccctgaaggagctgaatgctcgccccatggaagtgttcatgtgcagtgtgctcaagaggcaaggttacggcgagggtttccgctggctctcccagtatattgactgatgtttggacggtgaaaataaaagagttttacttctctggactgatcctattcacagcttcctcatgaacttttctaatagaacaaggaaagctctccaaccatgtctggcgttgagaagccaagagtctctgtcaactctctcattgcccagtggtgacatgtgctcttctccacactgttgggaggtaatgctgccccacgtgctggtgcaggtcagtatcctgggacttggaagctggcaggatttgccgggtaaagctgtatgccatcatggggcacctgaaaag

SEQ ID NO: 10883 - DNA, 440 bp, Homo sapiens
  misc_feature 2, 71, 137, 181, 272, 404, 411, 420, 428: n = A,T,C or G
anttatttggtttctaatactttgaaattctacttttagttaaagtcttcactggttttggggagcctccnaaaacttgtttggagctcactgggattaaaaaagaaaaacaaacttttaagtaaaagttaatggtnttaaggtaactagctcagcatttttcaagttagatacatatgangcgcctggcttagtgtgaggtacatatcagctgttcagttattgctgggtcagcaactctactaagacttataaatagaggagcagtggtnttgggcagcatcagggcatggccagggcaggagcagcggccacagcgttcatccatctatgggaggaagaggctgccttggcggggtcaactgtgttgctccaagtgacataatgtcatgattttgatagcncgaagtnttttgcccngtgtacanactagagtttcc

SEQ ID NO: 10884 - DNA, 571 bp, Homo sapiens
acacaaagattctatttatttctcttacttttcagttcaagtaggagagcatgttttggaaataaaagaactgactagcacaaacatctcctctctgatttgacaacctcttctgaagagtgaaccacatttggtacaaatccactcttcaccccttcccagccctcctggattgtaatctccccccttttaaccagctcatatatgtctcttgtcaggtctgtgaaggctttctccacattaatggcatctcgggctgacgtttcaatgtacttcatgccgtatgcagcagccagtttctcggcctcgtggcgagtcacttgcctctgtgtatccaggtcacacttgtgacacaccagaacaaatacaatttggtagggctgaacgtgtactttggtctcttctaaccactcatggacattctggaaggacctgcggttggtaatgtcaaataagagaagaccactactgagttcctgtagtaggcgcgagtgatggatctgaactctcttgacacgggtatccagatctggagcttgatgcgtgttcatggctcgatctcacaaagcgg

SEQ ID NO: 10885 - DNA, 203 bp, Homo sapiens
caccggcgcaggctaggagggggcggcctgagtgccgtacccgagccggggctggagcgcgcggcctgacctactaaaacatggcaaccaacgccgtcccgggggacaacctaacccacctacaatctgccggtggtgggggatgggggtggaaaaaaattttggggccttttcgggaaaaactttaaaaaaattttggaaaa

SEQ ID NO: 10886 - DNA, 605 bp, Homo sapiens
tcggcacgagggagaatgggtagatatgattgaggatgcagcccatgagactgttcccattatgctggtaggaaacaaggctgacattcgtgacactgctgctacagagggacaaaaatgtgtcccagggcactttggagagaaactggccatgacgtatggggcattattctgtgaaacaagtgccaaagatggttctaacatagtggaggctgttctgcaccttgctcgagaagtgaaaaagagaactgacaaggatgacagcagatccattaccaatctaaccgggaccaattccaaaaagtcaccacagatgaagaattgttgcaatggctaaatcccaaacatccttggcctgtgaagtcttcatttccagaatactgaatttgtgtgacttatttggctcttaacagagtggcacatcctactgacactgtcctatggagagttacagtgcaggaaacctgaacccagctctcaggtccctctggaactttggctcttctttgttttgtctcagtgagtgatttgggccctctggctaaatagactagtcatgtccttacaggtcttaaaagataacatgtaaatgtttttaaaatggt

SEQ ID NO: 10887 - DNA, 389 bp, Homo sapiens
  misc_feature 279: n = A,T,C or G
aatggaaaagataagacatctggtgaaaatgatggacagaagaaagttcaagaagaatttgacattgacatggatgcaccagagacagaacgtgcagcggtggccattcagtctcagttcagaaaattccagaagaagaaggctgggtctcagtcctagtgggagaaccccctcctagtccacctgaaaacaccaaattcaaccatcatctgtcaagaaattaaaagaacaacaccctagagagaagtcatccacacacaatccacacacgcatagcanacctccaatgcatgtacagaaacctgtgatatttatacccttgtaggaaggtatagacaatggaattgtgagtagcttaatctctatgtttctctccattttcattcctc

SEQ ID NO: 10888 - DNA, 475 bp, Homo sapiens
  misc_feature 251: n = A,T,C or G
aagcttgcggccgccgcccgactcccggcggctttgactcggactgcagcgaggacggcgaggcgctcaacggcgagccagagctggacctcaccagcaagctggttctagtgagccctacatcagagcagtatgacagcctacttcggcagatgtgggagaggatggacgagggatgcggagagaccatatatgtcattgggcagggatcagatgggactgagtatgggctgagtgaagctgacatggangcctcctacgccacagtgaagagcatggcggaacagatagaggccgatgtcatccttctgcgggaacggcaagaagctgggggccgcgtgcgtgattacctggtccggaaacgagtaggagacaatgacttcctggaggtcagggtagcagtggtgggcaacgtggatgctggcaaaagcacgcttctgggggtcctgacacatggggagctggacaatggccg

SEQ ID NO: 10889 - DNA, 797 bp, Homo sapiens
  misc_feature 524, 570, 787: n = A,T,C or G
atgcagaggaaataatataattcctttatttgaaaaatgatactgaacctcagagatcagttaaatctactgctggaatggggattctttctaaaccgtgttgttccctctcttcaaacagctggagctgtacacagatggaaaaacatttggtcagaaagcagcaaattagtgtttttcaggaccgaattcggctcccgcagctcctgcatctccattcgtctagattttatttcttctttgcattgacatttttgcagacccagttcatgccatcctgaacgccctctcctgtgagagctgagcaagactggatctgccagactcggtcgcggatggtatgcaggttcagtccttctgcaatttcagaggcaggggctgctgtgagcaaatcctgcttattagcaaagatgagcactggcacacaacttagtttttcttcctccagtaattccgctagttcctgacccgtctcttcaaatctttttctgtctgcactgtcgattacatatataagaatatcngtattttcaaaataattcttccagtatggtctgatttttctctgtncaccaatgtcccatacattcagtttaaaaccttgtgattgtacacttttgatgttgaaaacctgtgtaagtgtgatgtggctgatgtcttcagatgcaagctgcttccagagaagtggtcttgccagcattaattcaaccccaagagaagtattcttcacctcctggtctggtgcaccttttcactttggcaaaaatggaaagaaggccattccttngccgagatcc

SEQ ID NO: 10890 - DNA, 752 bp, Homo sapiens
  misc_feature 4, 18, 21, 25, 28, 29, 90, 102, 199, 364, 568, 570, 607,627, 638, 682, 746: n = A,T,C or G
cctnactaaacctttgcnaangccnttnntgctgatcccatcgattcgcaggcctggacttcgcccccaggcctaggaccgcggtgggtnttaaccctgctnctgccccaacagggactccaatcaatcggagttctccccttgccggagctgcccttcacctttggggcccgagacagtcataagggatggacttacntttcttgcagggaaaaaggtggacagccgtgtttcttaaggatgctgagggcatggggccaggaccaggggagaggcacagctccttcctgagcagcctctcaccactgccacaaggctccctaatgctggtctctgctccactccccggcttcccgtgaggcangaggcagagccacagccaaggccctgaccacttctgtgccagttgtctaagcagagcgcctcagggacgctggaaatgccttaaggatagaggctgggcatcacatcaaatgggactgtggtgtttggtgaaaaccttcctgaggatctggattcaggaccctccatgactggcctatttactggttacagctggccagtgcananctgctgctcttttacctttttaggcccctgtaacttnccacctttaaactgcccaanaagcatgcctnttccacaggaagaagggagcagacagggaaatctgcctaccaanaagggtgttgtgtgtctttgtgcccacacgtggtggctggggaatgcctggatggtgccgtggntgatct

SEQ ID NO: 10891 - DNA, 662 bp, Homo sapiens
caagctacttgttctttttgcaggatcccatcgattcgaagaatgcctctatgtaggtgaagtgttctctctgcatgcaacagtaaaaattaatataatattttccccacaaaagaaacacttaacagaggcaagtgcaatttataaatttatatctaaaggggaatcatgattataagtccttcagcccttggactctaaattgaggggattaaaaagaatttaaaataattttgaacgaatttattttcccctcagtttttgagggcattaaaaaggcattaaatcaagacaaatcatgtgcttgagaaaaataaaattaatgaaaacacagcacttatgttggtttagctgcagcctccttggaggtagaatttatttatttaaaattactggttgcatcaagaacccatagggtgtacaaaaggttctataaaatctgcattatagagacaaagaggcaggcaaatccatgtcacaagggtaaagcttacagtttacaaactgggaacgccagggtgtaggatataaaaacgcactcttgagaaaacaaatgtaatcagggtgctgaaaacttgcatggtgctttcagacattagccttgttcaacaaatttcttgtattgacagatccatagtgtgcatgggcagacacattttgcc

SEQ ID NO: 10892 - DNA, 253 bp, Homo sapiens
tatgacgtcgcatgcacgcgtacgtaagcttggatcctctagagcggccctactactactaaattcgcggccgcgtcgacccccactgcactctgcctgggcaatagagcgagaaaaaaattttttttaaattaggttttcataattatctttttcatcattatgaaagcaatccttccacaccaagggaaacattgagaaaataccaagttttagaaaggcgaaatgaaaataaatctcctaacttcccatc

SEQ ID NO: 10893 - DNA, 80 bp, Homo sapiens
gctatgacatgattacgaatttaatacgactcactatagggaatttggccctcgaggccaagaattcggcacgaggggga

SEQ ID NO: 10894 - DNA, 62 bp, Homo sapiens
tacgaatttaatacgactcactatagggaatttggccctcgaggccaagaattcggcacgag

SEQ ID NO: 10895 - DNA, 77 bp, Homo sapiens
tgattacgaatttaatacgactcactatagggaatttggccctcgaggccaagaattcggcacgaggggggactgct

SEQ ID NO: 10896 - DNA, 66 bp, Homo sapiens
gaacaaaagctggagctccaccgcggtggcggccgctctagaactagtggatcccccgggctgcag

SEQ ID NO: 10897 - DNA, 525 bp, Homo sapiens
tagggaaagctggtacgcctgcaggtaccggtccggaattcccgggtcgacccacgcgtccggatttcccaagcaatataagtttacaaaataaatgttcttacagaatacaatagttattctgtttgtttgtttcgtttttttgagacagttgagacaggatcttgctctgtcagccacgctagagtgcagtggcaccatgttggctcactgcagcctcaacctcccaggctcaggcgatcctttcacttcagcaacccctactgtcattcccaagtagctgacactacaggtgcataccaccatgcccggctaatttttgtattttttgtagagacggggtttccccatgctgctcagactggtctcaagagatctgactgcctcagcctcccaaagtgctgggattacaggcatgagccaccgcacctggccagaatagttatttgagagtaattcatcagttcaacaaatacttatcaaggagatatagcagttaacgaaatagacacaaatattttccct

SEQ ID NO: 10898 - DNA, 468 bp, Homo sapiens
ccaggggtcccacaggcgagtggagccccagcaaccccctcagccttgcgtgcctgtgtactggtgttctccctggccctccactccgtgttcgaggggctggcggtagggctgcagcgagaccgggctcgggccatggagctgtgcctggctttgctgctccacaagggcatcctggctgtcagcctgtccctgcggctgttgcagagccaccttagggcacaggtggtggctggctgtgggatcctcttctcatgcatgacacctctaggcatcgggctgggtgcagctctggcagagtcggcaggacctctgcaccagctggcccagtctgtgctagagggcatggcagctggcacctttctctatatcacctttctggaaatcctgctcttcatccaaatctagggggcttcaagagaggggcaggggagattgatgatcaggtgcccctgttctcccttccct

SEQ ID NO: 10899 - DNA, 483 bp, Homo sapiens
  misc_feature 441: n = A,T,C or G
tatgacgtcgcatgcacgcgtacgtaagcttggatcctctagagcggccgcctactactactaaattcgcggccgcgtcgacaccaccagtggtcttaaggttgaagtgtggttcagggccagtgcatattagtggacagcacttagtagctgtggaggaagatgcagagtcagaagatgaagaggaggaggatgtgaaactctcaagtatatctggaaagcggtctgcccctggaggtggtagcaaggttccacagaaaaaagtaaaacttgctgctgatgaagatgatgacgatgatgatgaagaggatgatgatgaagatgatgatgatgatgattttgatgatgaggaagctgaagaaaaagcgccagtgaagaaatctatacgagatactccagccaaaaatgcacaaaagtcaaatcagaatggaaaagactcanaaccatcatcaacaccaagatcaaaaggacaagaatccttca

SEQ ID NO: 10900 - DNA, 575 bp, Homo sapiens
acttttgaaatacagaattttatttagggggtgtttaaagtagaaaaaaaccctgtcaagaaagaccaggtggaaaatgggttcccaataaaatggaattttagggcaacaaaagtctaaaaggccacaaaagagaaatagcaccactgtcatttgaacaatggctagttacttgcattttttggcattgttaatcactgaatctgggttttcctctgaattccacacagagcatgcactacacaacatttttatcataaaatacttgctttctacacacatttcaggacaagctaccaccagaaacaaatcaatacaaatacatcaggggctgaacaatctcagtagtgggtgagacacattttgcagaatcctgccaaacaaaggaactgaataggctgtgggcaaagcaaatgagggagagttaaggaatgaagtattttaaatattaataattaattcagacacggtactgtattttccgcaaaagaaaattaacatttagtaacacactaatgaattttatctccaaagagattagtgcactggcaaagtattcggattacagtggagag

SEQ ID NO: 10901 - DNA, 499 bp, Homo sapiens
tatgacgtcgcatgcacgcgtacgtaagcttggatcctctagagcggccgcctactactactactaaattcgcggccgcgtcgacctagccagtgtgtctcaccctgtatctctctgccaggctctgtctctcggtctctgtctcacctgtgccttctccctactgagcacacgcatgggatgggcctggggggaccctgagaaaaggaagggctttggctgggcgcggtggctcacacctgtaatcccagcactttgggaggccaaggcaggtagatcacctgaggtcaggagttcgagaccagcctggccaactggtgaaaccccatctctactaaaaatacaaaaaattagccaggcgtggtggcgcatgcctgtagtcccagctactcaggaggctgagggaggagaattgcttgaacctgggaggtggaggttgcagtgagccgagaccgtgccactgcactccagcctgggtgacagagtgagactccgcctc

SEQ ID NO: 10902 - DNA, 614 bp, Homo sapiens
cgactcactataggaaactggtacgcctgcaggtaccggtccggaattcccgggtcgactactactactaaattcgcggccgcgtcgaccaacctcctactcctcattgtacccattctaatcgcaatggcattcctaatgcttaccgaatgaaaaattctaggctatatacaactacgcaaaggccccaacgttgtaggcccctgcgggctactacaacccttcgctgacgccataaaactcttcaccaaagagcccctaaaacccgccacatctaccatcaccctctacatcaccgccccgaccttagctctcaccatcgctcttctactatgaacccccctccccatacccaaccccctagttaacctcaacctaggcctcctatttattctagccacctctagcctagccgtttactcaatcctctgatcagggtgagcatcaaactcaaactacgccctaatcggcgcactgcgagcagtagcccaaacaatctcatatgaagtcaccctagccatcattctactatcaacattactaataagtggctcctttaacctctccacccttatcacaacacaagagcacctctgattactcctgccatcatg

SEQ ID NO: 10903 - DNA, 459 bp, Homo sapiens
ttcactagtaatgcaacgcgagtgggagcaccaggatctcgggctcggaacgagactgcacggattgttttaagaaaatggcagacaaaccagacatgggggaaatcgccagcttcgataaggccaagctgaagaaaacggagacgcaggagaagaacaccctgccgaccaaagagaccattgagcaggagaagcggagtgaaatttcctaagatcctggaggatttcctacccccgtcctcttcgagaccccagtcgtgatgtggaggaagagccacctgcaagatggacacgagccacaagctgcactgtgaacctgggcactccgcgccgatgccaccggcctgtgggtctctgaagggacccccccccaatcggactgccaaattctccggtttgccccgggatattatagaaaattatttgtatgaataatgaaaataaaacacacctcgtggc

SEQ ID NO: 10904 - DNA, 495 bp, Homo sapiens
tggtacgcctgcaggtaccggtccggaattcccgggtcgactactactactaaattcgcggccgcgtcgaccctaatgacctccggcctagccatgtgatttcacttccactccataacgctcctcatactaggcctactaaccaacacactaaccatataccaatgatggcgcgatgtaacacgagaaagcacataccaaggccaccacacaccacctgtccaaaaaggccttcgatacgggataatcctatttattacctcagaagtttttttcttcgcaggatttttctgagccttttaccactccagcctagcccctaccccccaattaggagggcactggcccccaacaggcatcaccccgctaaatcccctagaagtcccactcctaaacacatccgtattactcgcatcaggagtatcaatcacctgagctcaccatagtctaatagaaaacaaccgaaaccaaataattcaagcactgcttattaca

SEQ ID NO: 10905 - DNA, 278 bp, Homo sapiens
gctcgacctgctgtctaagagtgctcagtgtccgctgagagtacactatctatcatcacaatatggtgatgagaggtgttttatgtttgtgttaatttcccccactaaatcagtaattattacaatcctgtccctgctgtttaccctgcagctgtttttccatttgtcgagagagcgggtgttctctgaggaccgcacacgtttctatggtgcagaaattgtctctgccttggactatctacattccggaaagattgtgtaccgtgatctcaaggtaa

SEQ ID NO: 10906 - DNA, 678 bp, Homo sapiens
  misc_feature 1, 356: n = A,T,C or G
naacatggtgacaccgtgtctctactaaaaatacaaaaataagctgggcatggtggtgcgtgcctgtagtcccatctactcgggaggctgaagcaggagaatcacttgaacctgggaggcaaaggttgcagtgagctgagatcgcgccactgcactccagcctggcaacagagcgagacaagactccatctcaaaaaaaaaagtgagtgcccgatgatgccagattcttcatcacctgaagtgaacccacacaacagggctgggccatgggcatcataaaccccattttgcaagctcaggaggagctttagggaaatcagaagactggcccagtctctaccaagtggtggatttanagccggcatggcttcgttccaaatctcacccttgtcccaccattccatgggacctcccattcctgagggagcctggatacgggcaagtgcacaacccgggaggttgaggttacagtgagccatgatcgcaccactgcagtccagcccgagcaatagggtgagaccctccctctgaaaaaaataaaaatactcattttggaaggaagtcattctaaaatgttacacttgtcttcagcatatctgcaatataataattttctgcataactgaggatcattcacagaaaccaatggcttttctccagcagtgtcttctgaagttg

SEQ ID NO: 10907 - DNA, 358 bp, Homo sapiens
  misc_feature 112, 245: n = A,T,C or G
atctcaatacctattgataaaaactagaatttaactgaggacgtgtaaatcagcatatccttttaaaaagttatgcctggccaggcacagtgtctcatgcctgtaatcccancagtttgggaggccagggtgggcggatcatgaggtcaggagattgagaccatcctggccagcatggtgaaaccccgtctctactacatgtacaaaaattagctgggtgtggtggcacgtgtctgtagtcccanctacttgggaggctgaggcaggaaaatcgcttgaacctgaaaggtggaggttgcagtgagccaggatcgccctactgcactccagcctgggcgatagagcgagactccatctc

SEQ ID NO: 10908 - DNA, 827 bp, Homo sapiens
  misc_feature 2, 3, 4, 13, 22, 33, 43, 46, 54, 64, 73, 229, 700, 739, 777,793: n = A,T,C or G
cnnntttttttgntcttttggncgagcggcctncggctgcganagnacgacagnagtacaaagnaaacagganctgctaatacttttcaaggacgattactttgccaaaaaaaatgaagaaagaaaacaaaataaagtggaagctaaattaagagctaaacaggagcaagaagcaaaacaaaagttagaagaagatgctgaaatgaaatctctagaagaaaggattggntgcttgctgaaattttcgggtgatttagatgatcagacctgtagagaagatttacacatacttttctcaaatcatggtgaaataaaatggatagacttcgtcagaggagcaaaagaggggataattctatttaaagaaaaagccaaggaagcattgggtaaagccaaagatgcaaataatggtaacctacaattaaggaacaaagaagtgacttgggaagtactagaaggagaggtggaaaaagaagcactgaagaaaataatagaagaccaacaagaatccctaaacaaatggaagtcaaaaggtcgtagatttaaaggaaaaggaaagggtaataaagctgcccagcctgggtctggtaagggaaaagtacagtttcagggcaagaaaacgaaatttgctagtgatgatgaacatgatgaacatgatgaaaatggtgcactggacctgtgaaagagccagagaagaacngccaagaagacctgcttccaacacagaaacagaaaatgngctgagaccagtagtttagtaaccatttttattctttnaataggtttaacgacntttgttgcgggctttaaagaaaccaataggtcct

SEQ ID NO: 10909 - DNA, 711 bp, Homo sapiens
  misc_feature 1, 22, 682: n = A,T,C or G
nacgacagtagggtagcaaggnaaaataatcatgttaattattaatgtcaaccagcgaatgagaaaaaggtgatatggcaggtccatcacatagataccctcatgatattgtgcaattatttagtagaaaaataaaaatgaaagtgaatggccctaagtagctagcacaaaagaggtagatatttggatgaatgacactttgaaatacgtatattgaaacacaaatcatacacacacacacacacacacacacacgtaatacgtgatcattaatctatgacattgtagtattagggtagtaactctattaagatttaattaaaaaattagtaattcttccaaatctgatattataagtgggctaaaaatgtaatcataatgtattttgaatgtttcacttctaagcacaaatagaaataatctaatgaatttccatgtaaatataatattagttatattgaaataattaagaatgcagaaagaatataaatttagtgaaacattttcccttcccaggaaaatctagctgcataattacattgtagtaaaattttgcttgtcaaaatttatattttacagccaggcgcagtggctcacgcctgtaatcccagcactttgggaggccgaggtgggtggatcacaaggtcaagagattgagacaatcttggccacttggtgaaancccttctctactaaaaatacaaaattagt

SEQ ID NO: 10910 - DNA, 731 bp, Homo sapiens
  misc_feature 3, 4, 14, 15, 27, 32, 43, 61, 62, 63, 66, 73, 75, 79, 88, 89: n = A,T,C or G
ttnnaactggggtnntaaaccttgttntgttncttttggccgnagcggcctacggctgcgnnnagncgacagnangggnaatgccagnntaaaggatttgaatttattttatatgcagcaggaagacattttgattactgacctcagtttcatattttaggtaagtaattctgagtgcacagtagagcgtgtattggaaagaggaaaagagattggaaacaagaagaatatgtaagaaactctggctcttgatgtatgataaggctctttagttgagaatctttcagcatgtaaccttttactatcatgtaatcttttaagccttatcacaaaaagccttcagggcttccttggtaacttcattttgactttgttaaaagaaaaactttagacgaaatcaatttatcagaatttgtttttgtgttaaaggattaatgaatttggcagcacccaaaattagaagtagttcagggagctcttgttttaacagagtaagcggcagacctttgcaggctgaatgtggaagcgaagtaaagaaattacttgattggactgggcatagtggctcatacctgtaatcccatcattttgggaggctgaggtaggtggatcacttgagctcaggagttcaagaccagcctgggcaacatggtgaagctccatctctacaaaaaatgcaaaaattagccaggcatggtggcacatgccagtagtcccagctacttgggagg

SEQ ID NO: 10911 - DNA, 692 bp, Homo sapiens
  misc_feature 1, 14, 24, 689: n = A,T,C or G
nacgacagtagggnaggtctaagnagtgaatggcagaacaattacacacagtgcgctccttgtgcaagcttatcttcctgtccagtctgctatcgaaactatagagaagaagatcttattctgcaatgtagacaatgtgatagatggatgcatgcagtttgtcagaacttaaatactgaggaagaagtggaaaatgtagcagacattggttttgattgtagcatgtgcagaccctatatgcctgcgtctaatgtgccttcctcagactgctgtgaatcttcacttgtagcacaaattgtcacaaaagtaaaagagctagacccacccaagacttatacccaggatggtgtgtgtttgactgaatcagggatgactcagttacagagcctcacagttacagttccaagaagaaaacggtcaaaaccaaaattgaaattgaagattataaatcagaatagcgtggccgtccttcagacccctccagacatccaatcagagcattcaagggatggtgaaatggatgatagtcgagaaggagaacttatggattgtgatggaaaatcagaatctagtcctgagcgggaagctgtggatgatgaaactaagggagtggaaggaacagatggtgtcaaaaagagaaaaaggaaaccatacagaccaggtattggtggatttatggtgcggcaaanaag

SEQ ID NO: 10912 - DNA, 737 bp, Homo sapiens
  misc_feature 651, 711, 718: n = A,T,C or G
acgacagaaagggctctcacccaggatcacttccgaaaccacttggccttcagcccctgcctcggccagaggtttcatttttaactgaatatttaccaaagctgaaagcgtgcgaggggggtggggtggaaatagcggctgcttcttttccaaggatttatttaatggggatgtgttcaaggcaagaccgaattcagaaggatatcgacgtcgtgatccagaagtccagagctgaggactgtctgtttgcaggtgctgtcattcagagtccacaggatggatgaatggatatgaaaatgaacaaacgtgtgacacaacactgcatgatttaccggcaatgactttctgatcaagcctgaacatcccaagacaaccatgctgtgaagaagtcggtgtaccccactggagaaggaaaggctgttcagggaagtgaagatgccccagctgacagtcaccacctgccagacataaaagatggaaattcatttctgctaaagagaaagaaaaaattggaagacagggtgaaggtgaacaggcccattataagaaagaaacaaaatctatattctgtctccaggaaacgagagagagaaagagagagaagaagaagttcaggattctaatgtaccaaagggatctcctttttcttgntttgtctgaaatttcaccaaaaacacagagaacatcttggctattcattgcgatgagtanaaactgnagaatgaagaatgaaaatt

SEQ ID NO: 10913 - DNA, 745 bp, Homo sapiens
  misc_feature 561, 647, 659, 671, 702, 721: n = A,T,C or G
attttcagaaaacaaatttgccatttatatcagataaagttactagagtactgtatatacattttcctttctaattttacacacgctattatttatagagcacaaaacactcaaaactaaatcaggaagtatagtcggttagttgagataggatgtggtcttaagtagtaaacagtgttctaaagtttcaggttgcatgtagtcacatctgtagagggaaacataatttgaaagatgctcttgcaggaaatttttctttgtttagtcaaaatatgctctctttgtttttaagttaatttattatgacctaaaggcatctaaaaaataaataagaaaatgaaattccatatttgtggaaattcatattgaagtctaactgtggctgttttggtaaaagtatttgctgctttgaatcaaatttagcattaaagggctgccacagtataatcatgttaaggagaaaagaatgttgtgcacacttgcattataagccaataagaaatagataacaaggccaggctcagtggctcacgcctgtaatcccataccttgggaggccangtgggcgggctgcttgagcccaggagttcaagaccagcctgggcatatagtgagacctcgtctactaaaataaaattaaacaccancagctggggggngtctttagctgnggggaggacctggagcccggaataaggggcnggagcctgctttgctctgncccagctgggacaacagatctgct

SEQ ID NO: 10914 - DNA, 844 bp, Homo sapiens
  misc_feature 2, 4, 11, 33, 46, 53, 63, 68, 73, 248, 249, 250, 624, 690,711, 725, 752, 761, 800, 822, 824, 825, 827, 829, 831: n = A,T,C or G
antncttgggntacaaaacccctttttttgttncttttggaccgancggcctncggctgcganagtcnacagnagggaattttcagcggggaaatgaaggaaaccaaacttcaggttctgaaactccttttgaatttggctgaaaatccagccatgactagggaactgctcagggcccaagtaccatcttcactgggctccctctttaataagaaggagaacaaagaagttattcttaaacttctggnnntatttgagaacatagatgataatttcaaatgggaagaaaatgaacctactcagaatcaattcggtgaaggttcactttttttctttttaaaagaatttcaagtgtgtgctgataaggttctgggaatagaaagtcaccatgattttttggtgaaagtaaaagttggaaaattcatggccaaacttgctgaacatatgttcccaaagagccaggaataacaccttgattttgtaatttagaagcaacacacattgtaaactattcattttctccaccttgtttatatggtaaaggaatcctttcagctgccagttttgaataatgaataccatattgtatcatcaatgctgatatttaactgagttggtctttangtttaagatggataaatgaatatcactacttggtctgaaacatggttggtgcttttatctcgctgnctaaatggaaatattttgctnttcttctgcttagngcagggaaccattcatcatgagtagcnccctctggnttttcattgattaattgggggcatcataaatggatggtnatgctggaggaaaagagagganannanananaaaaaaccccggc

SEQ ID NO: 10915 - DNA, 778 bp, Homo sapiens
  misc_feature 580, 585, 597, 661, 679, 734, 736, 737, 741, 744, 752, 757: n = A,T,C or G
gggggaaaaaaaagtctgcttttgacatcaaattccactaatttggggcagcgttgggtgaggaaagtattgtgaagacaggcttcttggagtaggggcagccacaattcagtagacactctaggctcggaggctgccactgtagttgccaagctcaggttgggtggttctgtgctgtatggatggaataggacctgggctggtcatcttcatgtcgtttcctctctgtatcaatggaagttcaacccgcccctacctcttcagatagttgtaggccacttttctcttgtaactttggaaaacaaaagaggagaaataagtatcataccatatgcgtgtctccaaagtggatgtggttgcctcaaggcaggtggcaggcaggggtgacctgctggccctcagatcaatggtcgtggcaggtctgagagctgtcccactggccagacttctctccagcagcaaagccagcctggggcttgcatgttgatcctgagcaagcttaacggggtgaagctgggctttctcccccctgtgactggagtgcatgttgacaccagcactttttctgcacatgtatctncaatncaacaaggccgnttttttaatgctgagtaacaggcaccaagcggtactgcgttatatctttcacactggccgcagnctcttctgacatttctcncaacctgcttggacccaggagctctttcctgcctgccatgactttcacccccccncnnaatncancaccttgngatgncaacagactgggcctggcctg

SEQ ID NO: 10916 - DNA, 273 bp, Homo sapiens
cttggccttgtcgctgagcgtgctcatatgctcggaggccttggcgtggtactgggccagtctggagccgccgttctccttgagagcctcaaggcgcgcggacaagcgctggcgcaaatagacgctgtacggggccagatgcgtgcgcaccacgtccacatgggcgcgcgcgcggtcgcgcatctcctcgcccagtgggctcatcttctcttgcaactcgtgcagcttctggcgcgcgccctcttggagctctgcgcgcaaaggctccacctt

SEQ ID NO: 10917 - DNA, 605 bp, Homo sapiens
catagaaagtcactttaatagatagggacagtaataaataaatgtacaatctctatatacaagctgagacctttccttttgtctactccaagccttccccctgcgtatgtgggattgagggtcacatcattggcactagtgagagggtagtcagtagccacttctgggaaaggtgggtagtgtggcccaagtgggggactgatgctcccaattgttcatgcttggtgcagattcaccattcggtcaatcagagctcggcgagtcgcatctacttccctggtcaggcgctcgatttcctgcttgagccgttcattctcttcagctagctgtgccactttcctttcattctcctgttctttctccttcatgcgctgctttccagcccgggctggggaatgaccactctgtttccgtttcctggttctcccttggtcttcctcctcttcctcctgagccagggagctctgactggaatctggagagtgagggctctgggaggtgcttgtgacctctgctggttctggctcctcctcagtcagccaagccagagaagcagggtcaagagtggtgaagatttttgattcttcctcttcatttccaggagg

SEQ ID NO: 10918 - DNA, 614 bp, Homo sapiens
  misc_feature 475, 528, 612: n = A,T,C or G
aaaaagaaataaaatgttttactcatttacacaaatacacacactgaagtccaccctgggagctggtaaaacaatttcagtctcagacccgtctgttttccagggtcctccgagcctgggcttcctcaagagcgtggcccaagggcccacagcccagatccggcagccccaccaccttcactgaggaggctccgaagctccgttcccgctgctccttacagacaggggaggcagatatacacaaacgcgcctcggcccagcttggggctggcgggggaggctgtgtcttcaaacctttgcccccagttgggtcagtagaaccaccagtgtcctccccttctacctcccagctccactttggaggctgaggaagcgagaggttttctaggcagatttggagccctggagattgagttcacagtgtatgttctgggggcgctggtgcagtcagcggtccagtctccagcctgcaggntggcacactggggtggacgatgggtggccccgcagtgtacacatttgggtggncccggccctataacccagtgttctcttgattcagtccgaaaagaggagcctgtgtacagctggttgttccctgagcgccgtctncc

SEQ ID NO: 10919 - DNA, 604 bp, Homo sapiens
tcggcacgagggggcacctcatcacacgactactggacacgagactggtccaccacaatgtgacacggtgggaaacttttgatgtgagccctgcggtccttcgctggacccgggagaagcagccaaactatgggctagccattgaggtgactcacctccatcagactcggacccaccagggccagcatgtcaggattagccgatcgttacctcaagggagtgggaattgggcccagctccggcccctcctggtcacctttggccatgatggccggggccatgccttgacccgacgccggagggccaagcgtagccctaagcatcactcacagcgggccaggaagaagaataagaactgccggcgccactcgctctatgtggacttcagcgatgtgggctggaatgactggattgtggccccaccaggctaccaggccttctactgccatggggactgcccctttccactggctgaccacctcaactcaaccaaccatgccattgtgcagaccctggtcaattctgtcaattccagtatccccaaagcctgttgtgtgcccactgaactgagtgccatctccatgctgtacctggatgagtatga

SEQ ID NO: 10920 - DNA, 596 bp, Homo sapiens
tgtttcctcatttattataaacacaagttcgcaggtaaatagagggtctaaaaaatacattaaaataaataattgggattctcaaagttcttagggcaaataagttatatacagacaggaaaagcagagcaggcccttctcactgggagggtcccgagggaatgagggtgcaagaactctggggagggaaagctggagaggacacagccagccaggatgccagcctcaggggagccatccagcctccagggctggctgaggcatgcgtgttcgtggctgcacggttgctcctggtttgtagcccagcagacaggacactcctcaggacgcagcctccagatgaatgtactccccatgcagttcttccagcagagctgtgggccagcaagcagcactggaggctgctccgcaggtctggaaggccgagggcttccctgggcagtgcgaggacacagaactgccttggacgaagctccttaaccagggactttgtgccaatcctggcaatggggtccactgtctgggaccaagcccggtcccagaagcagcagagagtcacaagcctggcactttttcctctttttccccggggcttc

SEQ ID NO: 10921 - DNA, 410 bp, Homo sapiens
  misc_feature 1, 167, 332, 340, 350, 385: n = A,T,C or G
nttttttttctgagagatctttattctttattcaggatgtgggatcgatcagcactgccagctgggccttggttctagtggcttgctatggtctcctcaatccagtcgatgaaggcggagactcgagtgaacaccgtgggcttcctcgcgggtgttgcagccaaagnaggaaacaaagctggtcacgccatggacctgccagccaccatcctctgtggggcagttgaggggtcctccagagtcaccgttgcagccggagcggaatgtcccctccagcacacaccatggtcttcttcacggaggaaccccaccagttccacctgggagcagtnttcatagnccaccacggngcagcagggcctcctggagcttgtctgggagttgnccgttgggtatagagacggccccag

SEQ ID NO: 10922 - DNA, 574 bp, Homo sapiens
ctatttaggtgacactataggaacagtttgtacaaaaaacaggctggtaccggtccggaattcccgggatatcgtcgacccacgcgtccgtggaaacagatgaaaagcctctgttttgatatgggtagtattttttacattttacacactgtacacataagccaaaactgagcataagtcctctagtgaatgtaggctggctttcagagtaggctattcctgagagctgcatgtgtccgcccccgatggaggactccaggcagcagacacatgccagggccatgtcagacacagattggccagaaaccttcctgctgagcctcacagcagtgagactggggccactacatttgctccatcctcctgggattggctgtgaactgatcatgtttatgagaaactggcaaagcagaatgtgatatcctaggaggtaatgaccatgaaagacttctctacccatcttaaaaacaacgaaagaaggcatggacttctggatgcccatccactgggtgtaaacacatctagtagttgttctgaaatgtcagttctgatatggaagcacccattatgcgct

SEQ ID NO: 10923 - DNA, 463 bp, Homo sapiens
  misc_feature 321: n = A,T,C or G
taggtgacactataggaacagtttgtacaaaaaacaggctggtaccggtccggaattcccgggatatcgtcgacccacgcgtccgagcatttagccaatcttcaaccctaactagacataagaggttgcacaccggagagaaaccctacaaatgtggagaatgtggcaaagcctttaaagagtcctcagctcttactaaacataagataattcacactggagagaaaccctacaaatgtgaaaaatgtggcaaagcctttaaccagtcttcaatccttactaaccataagaaaattcatactatcacacctgtaatcccancactttgggaggccgaggcgggcggatcacgaggtcaggagatggagaccatcctggctaacacagtgaaaccccttctctactaaaaaatacaaaaaattagccgggcgtggtggcgggcgcctgtagtcccagctatgcg

SEQ ID NO: 10924 - DNA, 566 bp, Homo sapiens
tgacactatagaacaagtttgtacaaaaaacaggctggtaccggtccggaattcccgggatatcgtcgacccacgcgtccggtgagctgttgatgtgagtaaagacctttagaactgttcctggcccacaacaacacacaattgacccatgtaacaaacctgcacatgtgggctgggcgcggtggctcatgcctgtaatcccagcactttgggaggctgaggcaggcggatcacctgaggtcgggagtttgagaccagcctgaccaacatggagaaaccccgtctctactaaaaatacagaattagctgagtgtggtggcgcatgcctgtaatcccagctactcgggaggctgaggcaggagaattgcttgaacctgggaggtggaggttgcggtgagccgagatcgcgccattgcactccagcctgggcaacgaaaagtgaaactctgtctcaaaaaaaacaaaaacaacgacaaaaaaacccctgcacatgtactccctgaatctaaaataaaagttgaaaaaaaatatatagaatgtgcctggcacatggcaagtactacata

SEQ ID NO: 10925 - DNA, 605 bp, Homo sapiens
  misc_feature 550: n = A,T,C or G
taaacatgctagttggaaataaaatcgataaggaaaatcgtgaagtcgatagaaatgaaggcctgaaatttgcacgaaagcattccatgttatttatagaggcaagtgcaaaaacctgtgatggtgtacaatgtgcctttgaagaacttgttgaaaagatcattcagacccctggactgtgggaaagtgagaaccagaataaaggagtcaaactgtcacacagggaagaaggccaaggaggaggagcctgtggtggttattgctctgtgttataaactctgggaaattccatctcttgcatatttgatcagatagtgacatctttctgtatataaactctttaactgctattttagggaccttgcagtttgcacataattgttttatatcatagcagtaaatatttgcaagaaatcccactcatcgaccccgggtaaaatgttatggtaagcatgcacagtttgcagtctacagtttttttatgtagcacaaaataggtgtacctttataagtacattcaattttatgatttacatttatcatgtaattnttaaaaaaatccatctatctaggatatgttgatacaaagtctgcttttgctattc

SEQ ID NO: 10926 - DNA, 137 bp, Homo sapiens
cggcacgaggtgttaccaatctgaagtgggagcggccgcaagcttattccctttagtgagggttaattttagcttggcactggccgtcgttttacaacgtcgtgactgggaaaaccctggcgttacccaacttaatc

SEQ ID NO: 10927 - DNA, 506 bp, Homo sapiens
  misc_feature 186, 200: n = A,T,C or G
tatgacgtcgcatgcacgcgtacgtaagcttggatcctctagagcggccgcctactactactaaattcgcggccgcgtcgacataccgcataacgtcgcaagaccaaagagggggaccttcgggcctcttgccatcagatgtgcccagatgggattagctagtaggtggggtaacggctcacctangcgacgatccctanctggtctgagaggatgaccagccacactggaactgagacacggtccagactcctacgggaggcagcagtggggaatattgcacaatgggcgcaagcctgatgcagccatgccgcgtgtatgaagaaggccttcgggttgtaaagtactttcagcggggaggaaggtcgacgcggccgcgaattgagtagtagtcgacccgggaattccggaccggtacctgcaggcgtaccagctttccctatagtgagtcgtattaaagcttggcgtaatcatggtcatagctgtttcctgtgtgaaattgttat

SEQ ID NO: 10928 - DNA, 594 bp, Homo sapiens
tcggcacgagggcagcagcttgggctgggaagaggtggtggcagagtctcaaagctgagatgctgagagagatagctccctgagctgggccatctgacttctacctcccatgtttgctctcccaactcattagctcctgggcagcatcctcctgagccacatgtgcaggtactggaaaacctccatcttggctcccagagctctaggaactcttcatcacaactagatttgcctcttctaagtgtctatgagcttgcaccatatttaataaattgggaatgggtttggggtattaatgcaatgtgtggtggttgtattggagcagggggaattgataaaggagagtggttgctgttaatattatcttatctattgggtggtatgtgaaatattgtacatagacctgatgagttgtgggaccagatgtcatctctggtcagagtttacttgctatatagactgtacttatgtgtgaagtttgcaagcttgctttagggctgagccctggactcccagcagcagcacagttcagcattgtgtggctggttgtttcctggctgtccccagcaagtgtaggagtggtgggcctgaact

SEQ ID NO: 10929 - DNA, 657 bp, Homo sapiens
ggggggtggccggtaaatacatgtaccccagtaataaaactgatgtggagtatgagagtggacgagaaagccaggggcacgaggctggacggcctggacctcgttgacacctggaagagcttcaaaccgagatacaagcactcccacttcatctggaaccgcacggaactcctgacccttgacccccacaatgtggactacctattgggtctcttcgagccaggggacatgcagtacgagctgaacaggaacaacgtgacggacccgtcactctccgagatggtggtggtggccatccagatcctgcggaagaaccccaaaggcttcttcttgctggtggaaggaggcagaattgaccacgggcaccatgaaggaaaagccaagcaggccctgcatgaggcggtggagatggaccgggccatcgggcaggcaggcagcttgacctcctcggaagacactctgaccgtggtcactgcggaccattcccacgtcttcacatttggtggatacaccccccgtggcaactctatctttggtctggcccccatgctgagtgacacagacaagaagcccttcactgccatcctgtatggcaatgggcctggctacaaggtggtgggcggtgaacgagagaatgtctccatggtggactatgct

SEQ ID NO: 10930 - DNA, 587 bp, Homo sapiens
tccaccgcggtggcggccgctctagaactagtggatcccccgggctgcaggaattcggcacgagctggagctcctcgtggatcatgggagcacagatgctgggcactgggccgtggagcaggtgtggtacaacgggaagttctatgggagcccagaggaactggctcggaagtatgcagatggagaggtggacgtggtggtcctggaggacccgctgcctgggggcaaggggcatgacagcacagaggagccgcccctcttctcctcccacaagccccgcggggacttccccagccccatccatgtgagcggcccccgcttggtccagccccacggccctcgcttcaggctggagggcaacgctgtgctctacggcggctggagctttgccttccggctgcgctcctcctccgggctgcaggtcctgaacgtgcacttcggcggagagcgcattgcctatgaggtcagcgtgcaagaggcagtggcgctgtatggaggacacacacctgcaggcatgcagaccaagtacctcgatgtcggctggggcctgggcagcgtcactcatgagttagcccccggcatcgact

SEQ ID NO: 10931 - DNA, 527 bp, Homo sapiens
tccaccgcggtggcggccgctctagaactagtggatcccccgggctgcaggaattcggcacgagggctgagcaaggcctacgtaggccagaagagcagcttcacagtagactgcagcaaagcaggcaacaacatgctgctggtgggggttcatggcccaaggaccccctgcgaggagatcctggtgaagcacgtgggcagccggctctacagcgtgtcctacctgctcaaggacaagggggagtacacactggtggtcaaatggggggacgagcacatcccatgcagcccctaccgcgttgtggtgccctgagtctggggcccgtgccatccggcaacccccaagcctgccccgctacccaagcagccccgccctcttcccctcaaccccggcccaagccgtcctggccgcccgcctgtcactgcagccgcccctgccctgtgccgtgctgcgctcacctgcctccccaaccagccgatgacctctaagctttcacttgggcagagggagccatttggtggcgctgc

SEQ ID NO: 10932 - DNA, 611 bp, Homo sapiens
  misc_feature 518, 536, 547, 552, 611: n = A,T,C or G
caggggtactgccaggtagcaggctttattgggaagggacaaagcctcaggagctgggtgccccagaggctgctgggtcttgagccacagctgcagccaatgcagcagctcgcgcctccttcttccgtttctgtttttcctccttgaggcgcttgctccttcttctctaggtcctggagcagctcctggaagcgggcactccttgggtccacctggtagcccaggagctcctgggcctcagcctgcagtcgggccctcctctccttgtcagcctgggccttctcccagttctcccgctgctgctgctgccagttcacaatcatctgtggcatcttggccatgcactctgcgatgtgctgctccctctcccgacgcttctgctcttcggccagctgcttcacccgcagcgaactcctgcatggtcgcaggctcgggtaccattcgcgttcttcggcctccagctcccgcagctgctccggcgacggcataacgaaccggggacaacccgaaggcggcgncgtaaacgcgcgaactgntagccgcgtanggttncccagctgcaacgcgggtcagagtctcgggtctggcaacgggtccggctgcggcggggn

SEQ ID NO: 10933 - DNA, 626 bp, Homo sapiens
accatcgtcagtccccgaggctctctgcagtccgcgtgagtcctggccaaggtctggcctcggaagctacgagctacaatcttccttcatcctacccacccacgaagagcgccaccccagctgcagaccaagtgaccagcccagttagaaggggctcggccggatcaaacctcggttctgcctcaaagcatctgctgaagctcttcctcgaccaactgaacttcctcactgagtggttcttactagaaaattataagcccagtctgacagtctctgaaagaatgtcagtgttttactgtaaagccaaagatgggggaagaagcagttttgggggtttcctgatcagcttttattcaagcccttaaatctgtgaatatgcgatgttaatgccaccttacatttgtattagattagcagtatgcaactggctttccaaaccgtggtcctactgatagtaatgtagttgtaaaacgtacataggataatttgcctcctacacagtgtgtaaatagcaaacaacatctctttacttggattttttaaaattccaataaattcaatttattttaatgtaaacaaaagtgataacacgcaaacttcctgcctttgacacaattctatttgta

SEQ ID NO: 10934 - DNA, 739 bp, Homo sapiens
  misc_feature 10, 11, 15, 22, 31, 32, 33, 159, 172, 333, 334, 357, 358,361, 362, 448, 511, 514, 541, 556, 582, 600, 606, 612, 614,624, 633, 643, 647, 655, 659, 672, 694, 698, 715, 719, 722,733: n = A,T,C or G
catatagtgnnggtnttatgcnataaatttnnngttttaacttaaaactatttcttattgtacttgcagaatggatagcttgcttttagtagaagcattaggtcgtatactcagataatctaatagaaggtcagatttgattcctgcataagaaagtanagccaagtgctgnagaaatggagaagaaagcaggggcaaggagcagatggcattaaggaagaatgaagtttttgaaggttgggatggacgaaaaggtgtttctcatggagagggatgctttagcaaaggctcaaacattggggcatatttaggcaagagccaagaacagtttgnngggaacatcagaggaaataggcnnttnntagtaaataatggtaagtaagacttgggagaaagaaggtagatttggggctgaggaactagcctaacactggaactttagtagtanccaagtaagatttgtttcaatgttcagaacttgagggtgataagacctgagccgggtcttaanaangaaaatgtggatggtctaaatctggangtattgaggtggaangaccgaaccaaaaaacaggagctganacaccagtgacagtgcancaccanaactananaaaatatctnagaaagtanggggaataantgangtgtagancctncaggaaaagagcnctaaggggatcaaaactggtcnttangattgggatggtagccnttanccnccaagttgganaccaat

SEQ ID NO: 10935 - DNA, 716 bp, Homo sapiens
  misc_feature 4, 17, 39, 175, 177, 525, 570, 600, 636, 647, 655, 662, 672,675, 677, 679, 681, 685, 699, 703, 710, 714: n = A,T,C or G
aggnagtgtgatggtgncttccaaccatccctgaaaaanaagccaaaaaacttttcccgaaaggagtcttcaccaaagagctcccatctggcaagaaatacctccgctacacaccccagccttaagtctcttggagaagctggtgctgtgagccagaggatgtcagctgccaatngngttttcctgcagcaattccataaacacatcctggtgtcatcacagccaaggtttttaggttgctataccaatggcttattaaatgaaaatggcactaaaagtttcttgagattctttatactctctgccttcagcaatcaattccattcatacatcagcactctgctggttctgtttgaaatatgttctgtatttaaaactcaaatcttgttggatctctgcagggcttgtgaccaatgaagtcatatttgttgatggttgacaaagcttgcttcactccatcagagaatgactatcaatttttttttaactgtcctatcacgtcctctcctgtcacccattttgaanagtggcagaacttgaagttcaacttcctctgtaaatatccaagtntaaagcccaggaacttctaaaataacccanatgcgctttaatttttttaatatggtttgatcacanaactttaaaanaacccaangctcttntattctttanacntntngnccanctggggaaaaaacntttnattcttncctnct

SEQ ID NO: 10936 - DNA, 669 bp, Homo sapiens
  misc_feature 5, 34, 653: n = A,T,C or G
acagnaggggttttgttttgttttttgagacggnagtcttgccctgtggctgggctggagtgcaatggcgcgatcttggctcactgcaacctccgcctcccgggttcaggggattctcctgcctcagcctcctgagtagctgggactacaagcatgcaccaccacgcccagctaatttttgtagttttagtagagatggggtttcaccatgctggccagatgatctgaatctcttgacctcgtgatccgcccgccttggcctccacaagtgctgggattacaggtgtgagccaccacacccggcctatattgttttgaaagcatactctatatatagttatgggcagaggcacaggcatcctcagcagctgattcaggagatgatggtaaagctagctaactatgaattaaacattcacatatccagtctacctggtccagtaataatacaagcaaatcttgtatttcaggaacaaatcaaggttctcttaattttttggcttatatacaatgaagtaaaaacttgataaacatggtttcaaattgaggaggagagtcttggatgtatgttttaatatgtataccttataattctgcctctagccaaatgctatgtttgcaaaatgtggcatctgttagtttttattggctgngtcttctttggttact

SEQ ID NO: 10937 - DNA, 362 bp, Homo sapiens
  misc_feature 1, 8, 351, 352, 354, 355, 356, 357, 358, 360: n = A,T,C or G
ncgacagnagggggacagctgggaattgctgaattagaactgcagaggttcctctacagcaaggtatctggggtatatggtcacacaaaggcagctgtattgagagacattgacctagcttaggagtctaactcataaaagagaaataaaagggggttaattattgtatgattattaatgatagtatcattaatattaacgagctcattaatcatattaatgagcagagcttccttagatatatctgtttataatgaatgatacacatatagctctgatgccatagggggagagtaagaatgaacaaagaaataaaataatttttaaaaaatgatacaggcccacgtgtanngnnnnntncc

SEQ ID NO: 10938 - DNA, 620 bp, Homo sapiens
acatttaaattctaaacaatacagtggatgacccttttgaatatacctaatgatttccttaaaaaagaaattttaaacagacttgtttaatcgtgttctcaaagcatacagtcaagaggtgggactgactgatgctttataggtgtgtgtagggtggtagaggccaaggtgctgccagcaatcctttccatactaggtactggtgaaaattgtttttgtttatgctgtcggcacatttgtgtgggtctctcattgtcccttaacagtgccgcatctcagcctggaagtcagctttaagtcattcaagagaacctcaggctgtttttctgacagtgatgatatgatatacagatacatccacagggtatctattaccagcataatgcattgtaagatggcaaggtggcattttgaaagagcgctgggtaagcagttagcacatctgggcctaccttcagcttcttcatttacaaacttctgaccttttgacactaaagctgctcctttatctttctgagtctcagattcttcatctgtaatctggagttgttaattccagtccttactaccttttagagttggaatgagatggaaagtagatgaaactactttgaaaatta

SEQ ID NO: 10939 - DNA, 596 bp, Homo sapiens
aattacaaattaggatgtaaaatgtgaaataaaggaacaggataaagagcagcaagataacccagaaacttagatactgtaccacagaattcagtgtagggcctccttctcttctgtatccacaaactcatccttagtaaatttcatgtagctttaaatactatgtgtcagacacttccaaacccatttctccagtattgaccttttcctgtaactccagattcaatatccaactagttgttacctccattcggatatttttaagaggcatctcagacttagccaaaataggactcatattttctcataaccctacccttctcctaactcagtatcatgcagttgcgcaaaccacaaatatataagatttttcttgttctctctttccatcccttttttcatccagtgtattagcaagccatgtcaactttatttccaaaacatatatatatattttttttcagacagattcttgcccaggttggagtgcagtggcatgatctcagctcactgcagcctccacctcctgttcaagcaattctcctgcctcagccactaagtaactgggattacaggcacctgccaccacgcctggc

SEQ ID NO: 10940 - DNA, 538 bp, Homo sapiens
aaacttccgccgccgcgtccgccgcctccggaactaaacggggtgaggtcacattcggttatctctaacgttggaaaacgatggagctaacacccattatggagattaaccacttttcatcaggtttttaacttaagtcgtgaggaatacaactgtgaacacaagattcattttattttcatcaccatgggacgtatcctgttgttgagttctctgggtcagacctctgaagacttctcagatggatcctagtctctgggcttgccctgaaattactcgctgctcagggagagagttgaaatggttggcatcctcccactctgttgctccggctgtgtcccctcgctctgttgttccagctatgtcccctctgttgctccaactgcagctcattctgttagagttcctcattcagctggtcactgtggccagagggtgttggcctgctcccttcctcaagtattcttaaagccatggatttttgtggagcatttttcttcctggctctcccttgagttattttcctttcttcgctatc

SEQ ID NO: 10941 - DNA, 791 bp, Homo sapiens
  misc_feature 2, 10, 11, 13, 16, 20, 21, 25, 32, 43, 45, 52, 72, 74, 77,120, 628, 646, 747, 751, 757: n = A,T,C or G
anatcttggnntncgntaanncttncttgttncttttggccgnancggcctncggctgcgagtgacgacagnanggnagggtaacaatgtaccaggcaaattgtaagttgaaattctagnataagcatgcagatgacttacaatataaatgaagaataggaaacattttatcttcttaccaagtaccttactataagtaaacctaagataagaaaacccagatttacctataagattgttgggagttaatggtgtcaataaaaggattgatggtccctctaatgaaacccagtagatgtttgttgaattgaactgaaaatttatgtggccagacacagtggctcatgcctgtaatctcagcatttggggaggcaaaggtggaagtatccctcgaggccaggagttcatgaccagcctggtcttttgtggagaccctgtctctacaaaaatataaaaatcagccaggcgtcgtgcacacctgtggtatcagctacttgtaaggctgtggcagaggtgctttggcccgggaggttgaggctgcagtgagccatgtccacgccattgcctggcagcctgagtgacaaaatgagaccctatctcaggaacaaaaaggaaaagaaaatatacntgatgggattcctattgngaagtcatttaaaataatgacttgaatttctcagaaatttcaggagctataaactatttaaatcaaaatattcttacctatagaaaccagtagataatganaatntttagnggcatctggcctattttgactttgagtatctagc

SEQ ID NO: 10942 - DNA, 841 bp, Homo sapiens
  misc_feature 2, 3, 5, 14, 15, 16, 21, 23, 27, 34, 45, 47, 54, 65, 68,75, 80, 606, 694, 701, 720, 724, 750, 751, 763, 770, 793,806, 807, 810, 821, 831, 834, 839: n = A,T,C or G
tnnanacttgggtnnnaaaanancttntttgttncttttggccgnancggcctnacggctgcganaancgacagnaaggnattttgacactgagctctggggacaggacaccttgggtttgtggactgcagcccactatgatgttattacttctctggccaggcctccagtggaagtgcacaggcactcccaatgttgttaatgctctgtcttccatttgttccggaatcctacgtgttggtctgtggttccatgcattagctgtttgtaaataatgcattgcatactgaaaaaggaatgccacctgccacagttgatggtgaggaagctcctttgacgtggtgcaattttgatgagatgtctctggggacacgaggatgccctaatgatgctgacttgtcatggttgcagcatttgaacttttggtgttaaaaaaaaaacctgtaagtctgtaacctggcaacattttacaaccctgtatttttaaagatggctttctaataaaaaatccggaaccacacagccctatggtcaaacaatcctacgtttgtgcctctgcttttaaaggtgctgtgctggacagttggcatgccagggttcgagaanagtgaatggcttgacgtacttgcagttaactgtgcaaaattggctggctgcctctgttcctactggactgaactttgatcatgtctgntcctgtncattctcccaggagctttntgcnactgacacccctccccaccccggtannggaatgctgggnctgggancatggatttctgctgactttganggataacatccanntanttagaaagctnctgcggatgnccnttccngg

SEQ ID NO: 10943 - DNA, 171 bp, Homo sapiens
tcggcacgagggctctgcgagctggatgtccaggctgcgggcgctgctgggcctcgggctgctggttgcgggctcgcgcctgccgcggatcaaaagccagaccatcgcctgtcgctcgggacccacctggtggggaccgcagcggctgaactcgggtggccgctgggactc

SEQ ID NO: 10944 - DNA, 501 bp, Homo sapiens
  misc_feature 189, 324, 331: n = A,T,C or G
tcggcacgaggagcatcgtgtgtcgatttgtccaggatcactttgaccacaacatcagccctactattggggcatcttttatgaccaaaactgtgccttgtggaaatgaacttcacaagttcctcatctgggacactgctggtcaggaacggtttcattcattggctcccatgtactatcgaggctcanctgcagctgttatcgtgtatgatattaccaagcaggattcattttataccttgaagaaatgggtcaaggagctgaaagaacatggtccagaaaacattgtaatggccatcgctggaaacaagtgcgacctctcanatattanggaggttcccctgaaggatgctaaggaatacgctgaatccataggtgccatcgtggttgagacaagtgcaaaaaatgctattaatatcgaagagctctttcaaggaatcagccgccagatcccacccttggacccccatgaaaatggaaacaatggaacaatcaaagttg

SEQ ID NO: 10945 - DNA, 533 bp, Homo sapiens
tcggcacgaggccgccctttcgctcctcggccgcgcaatgggcacccgcgacgacgagtacgactacctctttaaagttgtccttattggagattctggtgttggaaagagtaatctcctgtctcgatttactcgaaatgagtttaatctggaaagcaagagcaccattggagtagagtttgcaacaagaagcatccaggttgatggaaaaacaataaaggcacagatatgggacacagcagggcaagagcgatatcgagctataacatcagcatattatcgtggagctgtaggtgccttattggtttatgacattgctaaacatctcacatatgaaaatgtagagcgatggctgaaagaactgagagatcatgctgatagtaacattgttatcatgcttgtgggcaataagagtgatctacgtcatctcagggcagttcctacagatgaagcaagagcttttgcagaaaagaatggtttgtcattcattgaaacttcggccctagactctacaaatgtagaagctgcttttc

SEQ ID NO: 10946 - DNA, 488 bp, Homo sapiens
tcggcacgagggggcaagatggcgcttgccgagtgattctcctcgaatacctcctgccggcgcggagacaccggggcgggggtcctgccgcaactacctcccttcctcctctcccccgcccccggagccttcatccttcccttccccccccacctcgaggggcgggcctggttcccgggacaccatgtcggactctgaggaggagagccaggaccggcaactgaaaatcgtcgtgctgggggacggcgcctccgggaagacctccttaactacgtgttttgctcaagaaacttttgggaaacagtacaaacaaactataggactggatttctttttgagaaggataacattgccaggaaacttgaatgttacccttcaaatttgggatataggagggcagacaataggaggcaaaatgttggataaatatatctatggagcacagggagtcctcttggtatatgatattacaaattatcaaagctttg

SEQ ID NO: 10947 - DNA, 325 bp, Homo sapiens
tcggcacgaggtgtggtgtaagaatgaattaaaatatagtttcactggcttttctctacatatccactatcacaatggctaggtttcctgttgctcactgttggattctggagaaaaatttaatgaaagatgatatcagaggaagaataagtggaggtagagaagaaaggagtgatagaggaggggaaaaaaacaaaacatatttttgtgttatccaaaggagctttttccttattctgtcaagcattgagatcttcttcagctttcaatgtagttgctaaatacaaataatgctactaggtagtgactaaatatagcaaacact

SEQ ID NO: 10948 - DNA, 596 bp, Homo sapiens
tcggcacgaggcatgactgaccggagcaaatattaaagagcagtcagatttctgcccttggtacactggattaccatttattccgtatttggataacttgccaaacttcaacagatcaattgatggaccaataagactgccaattgtggataagtacaaagatatgggcactgtggtcctgggaaagctggaatccgggtccatttttaaaggccagcagctcgtgatgatgccaaacaagcacaatgtagaagttcttggaatactttctgatgatactgaaactgattttgtagccccaggtgaaaacctcaaaatcagactgaagggaattgaagaagaagagattcttccaggattcatactttgtgatcctagtaacctctgccattctggacgcacgtttgatgttcagatagtgattattgagcacaaatccatcatgtgcccaggttataatgcggtgctgcacattcatacttgtattgaggaagttgagataacagcgttaatctccttggtagacaaaaaatcaggagaaaaaagtaagacacgaccccgcttcgtgaaacaagatcaagtatgcattgctcgtt

SEQ ID NO: 10949 - DNA, 614 bp, Homo sapiens
  misc_feature 489: n = A,T,C or G
cggcacgaggcgtgatctgaaaacatgtagagaagatgagttgaggacagcttttctaaggcaatgtgatgtctttgctttcttatttctctttctctgcgttgttagttttgaagagtggaggagctaggggctccagaaagaatcttacacatgtgttgaagacattgatgtcatagggagcggggagctgcattcccttctgggctgttactgctaaatctcagtatgaacagaccaggcggaaagcttggtggccaagcagtctgtgtgcttccccgctgatggagaacgttgcgttgttcacaatagggcctcatgggtgtagccgcatggcagacccatggctggcgcagctgcctgttgccgtctgtcttcagtaactgctgctctgttaactgttctattctgatactacgcgtgttgttttttacaacaggtatgtttttgtttcagaaatatgtattgcttttctcatattttttgcanattgtattgtcaacatgggtcatttaaagtcctgtatgaaccataacctgctgtggtacctttgtacatgtttgattctgtattctttattccagtgtggcatatgtgcccctctgtatcttttg

SEQ ID NO: 10950 - DNA, 636 bp, Homo sapiens
  misc_feature 345, 379, 381, 405, 444, 488, 518, 521, 542, 547, 553, 561,583, 592, 627, 636: n = A,T,C or G
gggggaggaggcaagacaggtgcacagagcatagctttgtcccatctcaggagccctgggttccatcccagctcctgatcccaagagatacgtttcccgggactccaagggagagctgaaacactggtcaagctcagagacctgaagctctttcccactgctttagggacagcatcaaagcagggaagtaggggtggtgagtgtgtaaaatttaaggccaattgcagaggtgggggaaggatattctttctctctctctctctctttctctctctctctcacacacacacacacacacacatacacacatcctgcctcccatttttaaaacaagtcgtttattanggtcaggtgaggtgactcacgcctgtaatcccancncttttgggaggccaaggcaggcanatcaccctgaggtcagggagttcgagaccagagttgccnacacgttgaaaccccgtctctactaaaagtacaaaaattaggcnggcgtggtggtgggcgccctgtattcccanctnctcgggaggctgaggcacaanaatcncttgancctgggangcggaggttgcagtgagctganatcacaccnctgcactacagcctgggcacagagcgagactcctnttaaaaaan

SEQ ID NO: 10951 - DNA, 765 bp, Homo sapiens
  misc_feature 74, 551, 566, 603, 639, 645, 646, 659, 687, 688, 695, 732,735, 736, 737, 740, 744, 751, 753, 756, 759, 761: n = A,T,C or G
cacttttcagcagcaggcgagggggctgaggaaaggaggtgggtctaggcaggggaaattggggtgccaccagnacggagacagcttggactaccaggtactaatttcaagtatgccaggacgttccagttcaaattcaggttcaactggtttcatctccttcagtggtgtagagtctgctctctcctccttgaaaaacttccaagcctgtatcaactctggtatggacacagcttctagtgttgctttggatcttgtggaaagtcagactgaagtgagtagtgaatatagtatggacaaggcaatggttgaatttgctacattggatcggcaactaaaccattatgtaaaggctgttcaatctacaataaatcatgtgaaagaagaacgtccagaaaaaataccagatttaaaattattggtagagaagaaatttttggctttacagagcaagaattctgatgcagactttcaaaataatgaaaaatttgtacagtttaaacaacagctgaaagaactaaagaagcaatgtggtcttcaagctgacaganaagctgacggaacanaaggatggatgaagatttaattgtgacccaaagtcanaccaccttcccctgcccattacaaggaggaatgaanaaccanngaaaataagtggnggcccacctatgaaaagaccccttgtcnntgattgntccagcaaacggaaaagaagccattggcctaattggntgnnnccncggnttaaaancnatnttncngaag

SEQ ID NO: 10952 - DNA, 768 bp, Homo sapiens
  misc_feature 12, 19, 28, 29, 37, 87, 92, 118, 234, 517, 518, 570, 586,595, 619, 624, 662, 670, 676, 692, 710, 711, 712, 716, 727,728, 742, 749, 767: n = A,T,C or G
ggatcttttatncctttgnaatcccctnnctttggcnaatcgcccgaattcggcacgagagttggagaacattatgctggagagagnttttnaagaaagggagatgttggaaacttcncaagctgctgctctgtttctgcccaaccgcatggtgcctggacctgactacaattcctacaaaagtgcctacagccccagcccagtggaaccaccaagcaaggacttctgtaattntttgcccacctgccttgatttaaccatgcagtattcagggtctgggaatatggaactaatttcttctaatgtcagcgtggccacaacttatagacagtatcccttgtcctcaagatttttaagtttggcccaagtgtggccccattagcgacaccctcctctaccagcaatgcctgctaaatgccaccacctcagttcaagccctgaagcctggggccagctgggacttgaagggagcacgagtccaggatggactcagtgcatagcaggacatgatgccatnnaaattggaaggttccctggtgctgcctcacacttcctgagatccagaccacnagaaagtgaccttcanggtcatcangctgtcccagagaggtccgcgttnttccnaccccgaccgggaatttctcttcccattgttgacaccngacttccntggcancttcaaaggggcattntcttaaccgaagattcannnaaanctaaacaccanngcacccctttggcnacttaanccattaaatccaattccnc

SEQ ID NO: 10953 - DNA, 265 bp, Homo sapiens
catgcctgtaatcccaacactttgggagaccgagggagctggatcacctgaggtcaggagttcgagaccagcctggccaacatggaaaaactccatctccactaaaaatacaaaagtagcctggtgtggtggcacatgcctgtaatcccagctacttgggaagctgaggcaggagaatcacttgaacctgggaggtggaggttgcagtgagccaagatcacgccattgcactccagcctgggcaacaagagtgaaactccgtctc

SEQ ID NO: 10954 - DNA, 85 bp, Homo sapiens
taggtgacactataggaacaagtttgtacaaaaaacaggctggtaccggtccggaattcccgggatatcgtcgacccacgcgtcc

SEQ ID NO: 10955 - DNA, 416 bp, Homo sapiens
tttgtagaaatgaggtctatgttgcccaggctgcttgtgaactcctggcctcaagcgatcctcctgcctcaaactcccaaagtgctggaattacaggtatgagccatcatatttggctaattttacctcctttttaaataaagctgactactactacaaaaataagtattttaataaatcagaagtctacgaaatatttgagaacacacattccatcagctgggagcaaaatatgaattattagtagaatcccacctagagtaggaatcctatgctaggtatgttaataaccccatttactaccaccaaaggaaaactgagccaggccagaaagctaaaaatcccatgtgacaatacctcagagacacaagagctcatcatacggaggcataacttagtacaaagtcataattacc

SEQ ID NO: 10956 - DNA, 74 bp, Homo sapiens
tggtacgcctgcaggtaccggtccggtattcccgggtcgacatcatcatcatgatcgctcgacatcgatacgac

SEQ ID NO: 10957 - DNA, 571 bp, Homo sapiens
tttgtacaaaaaacaggctggtaccggtccggaattcccgggatatcgtcgacccacgcgtccgcggacgcgtgggcttggccaggtgtggaccatggtccatgtgtccacatgtccagggagtgcatgcggatgggccagcacacatacagtcatggttcatgtgtatcttgcttgaagacagctgtatagcacaagttctgttttttgccttctgcctttgtttgcagaacaataaaattttctatcagagtagccttgcatcagttacctgggttcctcccaagagcttgagaagttaagcaactttgtgagttgttggcctaaatgggtctatatcccaggccccacttctctttctactgtgtgtttgttgatcaccacagcctgaggcaaaactgagaagatttttaaacttttaactgaaactcgctagacagctttttggaaatatttcctttttagatgaggcctatccctaagtagttgttattagaatatatgaaaacaggattctggagtcttttctttgcctcatattaagcaaattaaaaggaaaacctcacatagc

SEQ ID NO: 10958 - DNA, 490 bp, Homo sapiens
  misc_feature 317, 414: n = A,T,C or G
ctatgggggcccggtgggcgccggcatccgcgaggtcaccattaaccagagcctgctggccccgctgcggctggacgccgacccctccctccagcgggtgcgccaggaggagagcgagcagatcaagaccctcaacaacaagtttgcctccttcatcgacaaggtgcggtttctggagcagcagaacaagctgctggagaccaagtggacgctgctgcaggagcagaagtcggccaagagcagccgcctcccagacatctttgaggcccagattgctggccttcggggtcagcttgaggcactgcaggtggatgggnggccgcctggaggcggagctgcggagcatgcaagaagtggtggaaggacttcaagaataagtaccaaagatgaaaataaccgccgcacagctgctgnaattgagtttggtgttgctgaaaaaggaagggggatgctggcctacatgaacaagggtggagctggaggcccaagg

SEQ ID NO: 10959 - DNA, 494 bp, Homo sapiens
cggcacgaggggattatagtcttccttcataaatgcatttaaacctgaaattgaacaccagtgtttttctttttctacttatgggaagttgtctgcttccccctttagagaaaacagtatttttatattttgttaaaatattaactactttatgcctacacactatgctgtagatactgatcataattcttgggtgttcacaaacactcctagtgcctcttttttggcccgttgaaagtgttggtattactactttcactacagagcctttggccctctaataatgctgaggtgggctgatccttcccatttctgtcttcgggtcattctggtaggtcttctcctccactgtcaagtaagcaatcaggtccgtgacagggattggacatatgaacaaattaagtggatacacacagtgagaaagatacatgcattctatggtaacaactactgtcaataacatctgatgttacatgcacatttatatatatata

SEQ ID NO: 10960 - DNA, 536 bp, Homo sapiens
ttaaacatcttctgcatgtttaaatgatgcaaaaaataatttcactccataggcttgaaaacatttcacagacagttcattcctatatctttagacaccatggttgtagcagtgcctccttctgcaaggtaaacagcagtgctggatttggaatgaactgccctgttactgccattattgttgacttcacagtccagcgattcagtggagatgacccaggtggaggggcgccaccgcttaagagaatagggagttttcacacgtttcttgatcttttcacctgatcctgatttgccatcttgtgttgactcacctatctgtatactgctgccatccaggacatttgtggctgaaagatccagagaattaggcctctgtgctcttctgggctttgatggcccaggatctgctgctgtgcttggaacaccctgtgcaagaacatcttgttctgaacatggattgctgttgttgttattggaattagttcggccaccttctagtggccgttccctcctgtccacaagacgatccagaac

SEQ ID NO: 10961 - DNA, 477 bp, Homo sapiens
tcttgatattcccattggcatccaagaggatgttctccagcttgagatctcggtggacaactctgttctgatggcaatagtgcacggcagagacgatctgccggaagaaatgcctagcttcgcgctcactgagctgctgccgctcgctgatgtagtcataaaggtcgccccggctggcatactccatgacgatcacgatcttgctgctgttctcaaacacttcatggatggcaatgatgtgagggtggttgagtgatgacatgatctcaatctccctccgtatgtgcatcagatcttgctcatctttgattttgtccttccggattgacttgatggccaccaggcgccccgagctctcccgcgccttcttcaccttcccgtaggtgcctttgcccagggtctccaggaactcgtagcggtgccgcaggttgtgcttgtggtggtgccgcttcaccgcctgcttcttcattaggggct

SEQ ID NO: 10962 - DNA, 445 bp, Homo sapiens
ccagtcagaatactcctgacagctgtcactgggttggtcccatggcaattctccagcgagcattgcagtaagtactattccacaggaccaaacatcaactggttctgcatgaaattctcttctcttcagaagttctggagcaacatatggtaaagtaccacacatcttgttcaacaaacgctcacgattattataccgaaatactgttgccaagccaaagtctgagattttgaggttatccctttcatccaacagaagattttctggtttaatatccctgtgagttattccaataccatgcagataaaccacccctgccatgagttgatggaagaatctctgagcatctggttcaggcatgcctatgtctggcttctccataggcaccttctccccaggtttgcaccaagtcccagtcttccacaaagggcactgccatgactcc

SEQ ID NO: 10963 - DNA, 583 bp, Homo sapiens
aaacctgaaaattcaacttgttcaagagaaggtcttgtacgtgcctaagttctagagcctcctgacgtgagcatggctgagagtgaggaccgctccctgaggatcgttctggtagggaaaactggaagtgggaaaagtgcaacagcgaacaccatccttggagaggaaatctttgattctagaattgctgcccaagctgttaccaagaactgtcaaaaagcatcccgggaatggcaggggagagaccttcttgttgtggacactccagggctctttgacaccaaggagagcctggacaccacctgcaaggaaatcagctgctgcatcatctcctcctgcccagggccccatgctattgtcctagttctgctgctgggccgctacacagaggaggagcagaaaaccgttgcattgatcaaggctgtctttgggaagtcagccatgaagcacatggtcatcttgttcactcgcaaagaagagttggagggccagagcttccatgacttcatagcagatgcggatgtgggcctaaaaagcatcgtcaaggagtgcgggaaccgctgctgtgcctttagcaacagca

SEQ ID NO: 10964 - DNA, 413 bp, Homo sapiens
ccatttaaacgtcaccattacttaaaagatgattgattattgctataccaaatcagatgaactctgttcatcacttttcttctctgtccccaaacagtttggttcattacactactgaaatgttcgtgtcttcaacttattagaatggaagataatgcagatatttctgtgggaaataaaataactaattttgaggtaccaaatagtgcaattgggtaaaacagggtttattcagttgcatctgtctccagtgttgcattgacagctctgggtctttttttgggccaccccttttttgacattgcttccagcagtggaaaatgggcatttgatggcaatatgccaaaattattgtgtccagagagtacactttttcaaaatgctcacctactggaagtgtgaattacttgaca

SEQ ID NO: 10965 - DNA, 624 bp, Homo sapiens
cacactacaatagttaattttatttgttcaagagctcagattgcaagcattaaaccaagcataggctttgattctgtgagcccaaattcacatattgaagaagatcaaagcaaactgtgatccatgtacatggatgaaaactaaaggctcgagttaatcacattgtagtttttaaatttctacagcctagagctcactagtcacaggtcttttaggtccttctggatgtcccacagggtatctgcacttttcttgagctgagcaacctcatcatcctttagcttctggttgataacgctggttaatccccgggcattgaggatacatggaaggctcaggaagacttcattctcaatgccatacatcccctttaccattgttgacacgggatgaatcctggatagatttttcaacatggattcaataagatcagccacacttaatccaatagcccagttggtatatccttttagcttgatgacttcataggcactttcaaccaccatcttatgcacttccttccaattttcactatcatttgcagttcccatttctggattcattcctggagagaacacctgcccattacaccatccacacagccacactgagtcgcatgtcccc

SEQ ID NO: 10966 - DNA, 764 bp, Homo sapiens
tttcatttacaagaatgtattcttgtattcatattacaagaaaatagaaatttaaaaattcctaagaaaggatgtggcagttataaattttatatctcacaggcaccttattgtaaccttgtgaatatgccttttcccattcttcctccgttttccttgtagcccatgccaaggatgacctcgggtgctctgtagtagcgagtcactacataaggcgtcatcataaaactcgttcctgcagtcctggccagaccgaagtcaagaatcttcaaagtgcaatcagattttactactatattactgggctttaagtcccgatgaataattccagcagaatgaaggtgcttgattccacacagcatctgatagagaaggtaggacattctttcatgatctagctccatctgaatcacttggcaaagatttgcatccatgagctccatgactatgtaaacatcttgaaattcttctagggatttctgtggtgtgaaaacattcaaaaggccaattatatttttgtgattaacacatttcataagaactagctctctgtaggcccgcttggcatgagtctgattctgaaatggtcggcttagcttcttgattgcaacatttctttcaagaatggatcataagctgcgcatactatcccttgagctcctgagccctataggtttaaaatctgatatcgtttcaggactggtgaatgagaaatctcaatctctacactataaaaaaatggtgtcacgcttgcttctgctcat

SEQ ID NO: 10967 - DNA, 573 bp, Homo sapiens
  misc_feature 518, 570: n = A,T,C or G
gacctacgacttcctcttcaaattcctggtgattggcagtgcaggaactggcaaatcatgtctccttcatcagttcattgagaataagttcaaacaggactccaaccacacaatcggcgtggagtttggatcccgggtggtcaacgtgggtgggaagactgtgaagctacagatttgggacacggctggccaggagcggtttcggtcagtgacgcggagttattaccgaggggcggctggagccctgctggtgtacgacatcaccagccgggagacatacaactcactggctgcctggctgacggatgcccgcaccctggccagccccaacatcgtggtcatcctctgtggcaacaagaaggacctggaccctgagcgggaggtcactttcctggaggcctcccgctttgcccaggagaatgagctgatgttcctggagaccagcgctctcacaggcgagaacgtggaggaggcgttcctcaagtgtgcccgcactatcctcaacaagattgactcangcgagctagacccggagaggatgggctctggcattcagtacggggatgcgtncct

SEQ ID NO: 10968 - DNA, 373 bp, Homo sapiens
  misc_feature 207, 216, 230, 254, 257, 267, 281, 282, 293, 307, 310, 327,332, 343, 353, 354: n = A,T,C or G
gggattccaggttatcaatactctggctgaccatcatcatcgtgggactgactttggtggaagtccttggttacatgtcattattgcgtttccgacaagttataaagttgtcattaccctctggatagtttacctttgggtgtctctcctgaagactatcttctggtctcgaaatggacatgatggatccacggatgtacagcaganagcctggangtccaccgccgtanacaggaaggctgaggtcatttgtntcncacaagaaanagttcttcctttcnngaataaattgnctgaaaacgtcttnctntccgagacctgggaacnaagtnaagctaatccntaaaggaggnncacgaaatcaccttttgcc

SEQ ID NO: 10969 - DNA, 105 bp, Homo sapiens
aatttaggtggaattgatgtctgggcaattaaaataaatggcataagagcttaaaaaccaaattgtgccagtggctttcaactagaggcagtaacctgtcattcc

SEQ ID NO: 10970 - DNA, 884 bp, Homo sapiens
  misc_feature 632, 656, 665, 667, 683, 697, 717, 726, 738, 748, 784, 791,800, 803, 804, 808, 819, 823, 841, 853, 857, 858, 860, 868,870, 879: n = A,T,C or G
ccagcctggggcggccggccaggaaccacccgttaaggtgtcttctctttagggatggtgaggttggaaaaaggctcctgtaaccctcctccaggatgaaccacctgccagaagacatggagaacgctctcaccgggagccagagctcccatgcttctctgcgcaatatccattccatcaaccccacacaactcatggccaggattgagtcctatgaaggaagggaaaagaaaggcatatctgatgtcaggaggactttctgtttgtttgtcacctttgacctcttattcgtaacattactgtggataatagagttaaatgtgaatggaggcattgagaacacattagagaaggaggtgatgcagtatgactactattcttcatattttgatatattttttctggcagtttttcgatttaaagtgttaatacttgcatatgctgtgtgcagactgcgccattggtgggcaatagcgttgacaacggcagtgaccagtgcctttttactagcaaaagtgatcctttcgaagcttttctctcaaggggcttttggctatgtgttgcccatcatttcattcatccttgcctggattgagacgtggttcctggattcaaagtgtacctcagaacanaaaagaaacagactctgtagttangatgcttananaggcagactatactgnggtcttctgatggncagttattcctctgatccancagactganaactgaaaaacngacggaaacnctttaaacttgatctcttttgtaattgaaacctcanaagctcngcaaaagcngcnngatncctgcaagaantaanggcccctgtgcttttacntaaaatttttgntctnnantgcctccncntatctcggngagag

SEQ ID NO: 10971 - DNA, 414 bp, Homo sapiens
  misc_feature 335: n = A,T,C or G
atattttatcagttgatgaatctcaaagtcttgccgtcttaagaaagggctttttcatcgagtgcttgaaatgtaggtttgtgagttgatcagaagcctcaaagcttcaggtgggttgaagttgcaatagataattctttgtattctgactttgaaagcgtttattttcacttcagtgtccaaaattttcacacacagaaaagttgaaaaagtgatagatacatatgcatatatactctttctagattctatgacgttttgctgtatttgttatatttgcctacaaaaatgattatttatttatgtggagacggagtttcgctcttgttgcccangctggagtgcaatgccgcgatctcggcttaccgaaatctccgcctcccgggttcaagcgattctcctgcctcaacctcc

SEQ ID NO: 10972 - DNA, 726 bp, Homo sapiens
  misc_feature 1, 2, 10: n = A,T,C or G
nnacgacagnagggattttctactttagcatgcattcaacctgcttcaattcagaatgcacatcatgactcacttctgcggtctgtgagtttgaatgtcagttttgtttcaaattcagcgttatcttggtctgctctgcctgtgtgctacccagagaccagtggatacccagaaacccgagtggtattccacagcatagctcagttcttaaagcttttgctgtgttaattctgatgagtttcacacataggccacttggggatgtgcacaaattgaaagacgctttttccgcagctccctcctctctgttattctgcccacactctctgtgagggggtaggtgctgcctctgttactgcaggacaggtggtagtcaacagggctctaccctagagtgtccatagcatcccatgggaagaaggaggagggagggggtgtcacctcttatcccattagtgcaggatggggctcattaatagagctccacttgtctccagaatcactggtgaggaaggggagtgttgcccccacattcgtgcacagcagggatggttcaccgaactccacaccagtctctgcagagcctgttggggagaggagggctgtgggttctttgatggtgttcacctggagtagagcaagtattgtcaaaagggtcatcctcggaggttgcagtgagccgagatcgcccattgactgcagcctggagaagagcagactcctctc

SEQ ID NO: 10973 - DNA, 847 bp, Homo sapiens
  misc_feature 1, 718, 724, 764, 786, 787, 789, 791, 795, 797, 798, 802,806, 809, 813, 824, 826, 831, 840: n = A,T,C or G
nacgacagaaggggtgattcccctaagaaagacatatattttaaaaacttaaaaaggagttgattgcttgtatcatatgattgtatatgtatgttagcttataaatgcctacatatacgcacaaccatatatctatattcagctattaaaaatatgaccaaattctagccaggtttacttgcctttgatttcagtcaaatgttttggtcataatgaccataaatgaaatgtagctgactttttatcacactgacaacaccgaaagtttacacaaatatttatgaacagtatttgcaaaaagaaagatgtagttagctgataagtttggtaattatccttcagcaaatatacatattagcttatcaacctaaattctattatgtacagcttcaaaatattaattgctatatatataaaagtttaaaattaagtagaaagaaattaattgatatcttaaaattgagcatatgtttaatgaattcattttattttataaggctgagtacatatacagatgatcccattttagtttctcagctattttactatatgttaaatattttgatgctgtatttacatattagcatcagcaaccataatttttctgataacttttcaagatcagccaaatcatatccttgccagtccacttttctctgagttttcataaaaccaaataaagtatctgcactggtagcatttacaatctcctcattanattatnatgctttagtgagttttcttttaacgcagggtaaggcagnttggttagttgtatttttcccnngnanggcnanngggngacngangganagatgattctncngctgnggacttgtntagaaaa

SEQ ID NO: 10974 - DNA, 129 bp, Homo sapiens
  misc_feature 11, 22, 23, 24, 39, 41, 45, 51, 55, 64, 75, 79, 89, 90, 119,122: n = A,T,C or G
aggggtctctntcgggggggtnnnggccaggcgaccaantnagantgctanccgngcatgatanagattctgctncccntctattcctnntagcataatgaaggtacctcacatctggntcngctgtgg

SEQ ID NO: 10975 - DNA, 63 bp, Homo sapiens; identical to SEQ ID NO: 10673

SEQ ID NO: 10976 - DNA, 314 bp, Homo sapiens
tatgacgtcgcatgcacgcgtacgtaagcttggatcctctagagcggccgcctactactactaaattcgcggccgcgtcgacataaaattcattgattttgatatttttccacgaagtaattcttttcaatttcatcatgatcattggtcacacagcatttcttaaaagacttcaccggcctggcgcggtggctcacgcctgtaatccttgcactgtgggaggccgaggctggtggatcacgaggtcaggagatcaagaccatcctggttaacactgtgaaaccccgtctctactaataatacaaataattagc

SEQ ID NO: 10977 - DNA, 763 bp, Homo sapiens
gaaggaaaggaactttaatgagaaatcaaaacacagggaaccaaagtgcaaatcatccaccccccatgggggggccatcctgaaccccacatcaacccctcagcccccttcaggcccccagcgcaggcccagggcctggagcttctgcctcaggtagctcttgagctggggcaggcctctctgggactccagttcctcgaagggtagcggcaggagctggtagcccatcaggcctaggtgccgctccctcagggccctcgagcccagcagcacccggccgtcccggcagaaatgccagcgttcccgcaacaccagcaccaccctctgggcagggtctcgagtagtggcgctagaggcagcctggccctgtgggcaggaccttggtgggtatgcaggaaggggtcctgggtcctcacgggaagcacagcaccagagctgctggcgcacagcaggaagtctgtgcagtagcctggaggcacagtcaggtcctggcggtatttctcctcccccagcagctggcgcaacccctcagctactatgtccttgtgactgtacttgcagcgggcacggtcggtgatgagaggctggggaaagatgggcacttgctgccttcggggaaggcggggacccccggtatcctgggagctccagctccacggccgtgtccagcagggagaggtacgacgcacaatcagagcattgagggtgcccactgatgagtgatgaagccagggggaaaaacaaagtggcaggctctgaaggg

SEQ ID NO: 10978 - DNA, 91 bp, Homo sapiens
aaccctcactaaaggaacaaaactggagctccaccgcggtggcggccgctctagaactagtggatcccccgggctgcaggaattcggcacg

SEQ ID NO: 10979 - DNA, 176 bp, Homo sapiens
aaaactaggcacatttttttaatgagctacaaactaaattacaaataacgttaatagcaagagcactcaaggacaagggtgacagagacaaatcataaaaaaaaaatgctttttttttagcactgtcattacaaaaccccaaggggcacatggcaacaaatccacccactatgacc

SEQ ID NO: 10980 - DNA, 532 bp, Homo sapiens
  misc_feature 335: n = A,T,C or G
ctatttaggtgacactatagaacaagtttgtacaaaaaagcggctggtaccggtccggaattcccgggatatcgtcgacccacgcgtccggaagacattgacactgctatgaaattaggagccggttaccccatgggcccatttgagcttctagattatgtcggactggatactacgaagttcatcgtggatgggtggcatgaaatggatgcagagaacccattacatcagcccagcccatccttaaataagctggtagcagagaacaagttcggcaagaagactggagaaggattttacaaatacaagtgatgtgcagcttctccggctctganaagaacacctgagagcgctttccagccagtgccccgagtgcctgtgggaatgctctttggtcagacattccctcacacagtacagtttaataaatgtgcattttgattgtaatctatcgaagtgattattacaccagttacagcagtaatagattctccattaagaaataattcccttttttagtctgttcatttct

SEQ ID NO: 10981 - DNA, 594 bp, Homo sapiens
gagagcagggccactttattggtatagagactgcagagggaccgggggctttagctgttggcagcgatggggtccttaatccagtccacatagttgtagaccttggtgtagactccaggcctgttcttccaggcacagccatggccccaggagacaactccttggagctgtccgttgcagaccacagggccaccagagtcacgctggcaggaatccttgcctccctcaaggaagcccacacagaacatgctgttggtaatctttccagggtaggaggctttacactcagcctgggtcagcaccggagcatccaggcacttcagctcgtctgggtagtcagcaccaaagctcaaagtgttgccccagccggagatgaggcactcagtgccagcagctggaggggcggtgggcaaagagatggtggacacgcgggcattgatgacggcaggtgaggagagttgatcagcatgatgtcattgtccagagtgtccctggtgtatttagggtgggcggtgatcttggccgcattgatgaactgctcattcccctccaggactttgatgttggctcctcccatctcaactggatgcgggt

SEQ ID NO: 10982 - DNA, 506 bp, Homo sapiens
  misc_feature 350: n = A,T,C or G
ttacctgtttcagtgggttatgtttttattctacgttattggtaggacagggaacagggccaagacctccacactcccctgggaagaacagtcaggagaattagatacatctaaagtgggcacaggacagaggccagatcttcctgggaggtggctgaagagacttaggcttaagccacgggggccaggccgacctggttgtttgccctgtcgaagacggtaaagtactggcggatgaagacatcacccaggatccaaagctctccagattcggtggggaggttcatgccctggaagccactgatgcagctcccctcgctctgcaggatgtaggcactgggtggcacggngtactggactccattgatggtgaagacgatgtcgggcaggctgctgatggctgagcagctgaccaccatgtcggcatctgagttctcgctggctccgatgtcgcttctgatgttggcaatggggctggttgggccggtcagcaaagaggttgcggt

SEQ ID NO: 10983 - DNA, 438 bp, Homo sapiens
  misc_feature 57, 108, 113, 159, 172, 430: n = A,T,C or G
agctttaaaaacttaaaaccactttctaaactgctttttagaaaacttttaaaacanaaaaaaaattcaatttttttttaatttattattttttttctgagacggagntcatntctgtcacccaggctggaggttgtagtgagctgagatcgtgccacntgcatgccagccntgggcgacagagcaagaccctgtcaaaaataataataataataaaggcaattgttctagtgatgttaagtgagcttaatgtatcactgcagatgctgaacttatatgataggtgaaatagaaagggtgaatttaaaacagaactttttatctcattctttctttctgttctttttaataaaaggaaggattacggccaggagatacaaccagcactttctgtggtactcctaattacattgctcctgaaattttaagnggagaagg

SEQ ID NO: 10984 - DNA, 191 bp, Homo sapiens
aaaagggtttttttgaaaaaaaaacattttttttaaaattgaaagggcatttaaaattttgggggtgaaaaaaaaagggccttcttacgggggggttaaggccccaaaaaaaatgggccaatggggggaaaaccccttggattttttgtttaaaaaaaatttccccccactaaaaaagccctgggtttttt

SEQ ID NO: 10985 - DNA, 520 bp, Homo sapiens
tcggcacgaggcgggctcctggttcagtgaattcaagcgtgggaaactgctctcctatgtggacgccgagggcaaccctgtgggtgtggtacagatgaccttcctgcggctgctgagcgcctctgctcaccagaacgtcacctaccactgctaccagtcagtggcctggcaggacgcagccacgggcagctacgacaaggccctccgcttcctgggctccaacgacgaggagatgtcctatgacaacaacccctacatccgcgccctggtggacggctgtgctaccaagaaaggctaccagaagacggttctggagatcgacacccccaaagtggagcaggtgcccatcgtggacatcatgttcaatgacttcggtgaagcgtcacagaaatttggatttgaagtggggccggcttgcttcatgggctaggagccgccgagcccgggctcccgagagcaacctcgtgacctcagcatgccattcgttcgtgagtgtcccgtgcacgtcctgatcctggac

SEQ ID NO: 10986 - DNA, 152 bp, Homo sapiens
gggtaccgggccccccctcgaggtcgacggtatcgataagcttgatatcgaattcctgcagcccgggggatccactagttctagagcggccgccaccgcggtggagctccagcttttgttccctttagtgagggttaatttcagctttggcg

SEQ ID NO: 10987 - DNA, 334 bp, Homo sapiens
aaggctctgcaggagatggacgacaatcagtatgtggtacaactgaaggctgtgttcccacacgggggaggctttgcgctggcctttgagttcatgctgtctgatctggccgaggtggtgcgccatgcccagaggccactagcccaggcacaggtcaagagctacctgcagatgctgctcaagggtgtcgccttctgccatgccaacaacattgtacatcgggacctgaaacctgccaacctgctcatcagcgcctcatgccagctcaagatagcggactttggcctggctcgagtcttttccccagacggcagccggctatacacacaccagg

SEQ ID NO: 10988 - DNA, 157 bp, Homo sapiens
tactaactacaggaagctaactaatcccacgctgtaatgaaccaccttctctggagcctagtccatatttacactgggagaggtgcccgctactgggttactacctcttagctgagtggaagaagaaagcaaagactggaacatctgaaaggaaagc

SEQ ID NO: 10989 - DNA, 568 bp, Homo sapiens
  misc_feature 504, 507: n = A,T,C or G
ggatgcacatttgattttactgggggtaggggacagggctgggcgttcaggagttctccgctatggtgtcctcgatccacttcacataagacagcactctgacggcgacagaaggcttattgggggtgccacaagggacgtagccccatgatgtgacaccttggagcacaccatcacacatcagcgggccccctgaatcacccacacaggtgtctttgccaccttccaggtgtccgacacacagcatgaagtctgtcaccttctggacgtgggcttttttgcactcatcattaggcaggattttgaggtccacacactggagatcatctggaaatgagaaattctctggttcgatgctgccccagccggaagccaaacaggtgctccccacttcgggttcctgggtgggcaactccacgaccttcacagcgtctgtgatggtatcagcaggctctgtcaggcggagcagcatgaggtcgtggctgtagtcctcgtctgcttgcnggntgtgggttctccagagggctcatgtgagcccaggtgtgggaagctctcactgcatgaacaa

SEQ ID NO: 10990 - DNA, 452 bp, Homo sapiens
gtgactgtgaaaaagcaattattcccataattaaaatacaaactataaaaaaacagactcaaagaaaagaaagatgacagagtgaaagaaggtacatttctttcgtgttcaaaccacggagttcacaacacagcagcacacacagctgggcgctttgtggtctcggcaccctcggcttccccttcacggggccgctttcgactagtagaaggctgggctagaacctggggtagagctgtggattcattttcctcagacagaagatcttgaaactttctcttcatgtcttcatcctgaagccacgggtgtcttaaggcttcttctgtcgtaaaacgtgcctttggatccactaccaacaacttcttgacaaggtccagagctttctctgagacttctgcccagacttcaggaatgaagttgtattttccactggtgatctgatccttcagtga

SEQ ID NO: 10991 - DNA, 520 bp, Homo sapiens
  misc_feature 65: n = A,T,C or G
attcaacattaatgaaagatttcagaagaaatacgtataccaactgcagccttatcaagtatatnggaaaaacataaagttaaaccagatagtaaagcattccacttgcttcagaagctgcttaccatggacccaataaagcgaattacctcagaacaggctatgcaggacccctatttcttagaagacccacttcctacatcagacgtttttgccggttgtcaaatcccttacccaaaacgagaatttttaacggaagaagaacctgatgacaaaggagacaaaaaccagcagcagcagcagggcaataaccacactaatggaactggccacccagggaatcaagacagcagtcacacacagggacccccgttgaagaaagtgagagttgttcctcctaccactacctcaggtggacttatcatgacctcagactatcagcgttccaatccacatgctgcctatcccaaccctggaccaagcacatcacagccgcagagcagcatgggatactcagcta

SEQ ID NO: 10992 - DNA, 477 bp, Homo sapiens
agtggatcccccgggctgcaggaattcggcacgaggcagcttctgagaccagggttgctccgtccgtgctccgcctcgccatgacttcctacagctatcgccagtcgtcggccacgtcgtccttcggaggcctgggcggcggctccgtgcgttttgggccgggggtcgcttttcgcgcgcccagcattcacgggggctccggcggccgcggcgtatccgtgtcctccgcccgctttgtgtcctcgtcctcctcggggggctacggcggcggctacggcggcgtcctgaccgcgtccgacgggctgctggcgggcaacgagaagctaaccatgcagaacctcaacgaccgcctggcctcctacctggacaaggtgcgcgccctggaggcggccaacggcgagctagaggtgaagatccgcgactggtaccagaagcaggggcctgggccctcccgcgactacagccactactacacga

SEQ ID NO: 10993 - DNA, 474 bp, Homo sapiens
  misc_feature 273: n = A,T,C or G
ggcccatctgtagaaattgaggctaacctcatctccacactcatcttgtatcccctttgaggagaactgggacattcacctggattcctctagccaacaaaagttctggaacataacacttaccatggggtccaggggggggaacccctggtgggactgccccaggctggggggctccagctggttgctgctgctgtggccctgcagttgaccctgcctgcccaatctgttcagaaaggcccaaacttcctggaggggccccactgccagcangagcagggactacagaagctggagccacagccaagccatggactgcgggtggcccaccagcccctgttggggggataggctgggagcctgggggcagggctggtggtggctgctgctgctgttggtgcatctgttggaagtgctgctgccgagccctcatctccgcatacttcagctgctccatgtggaaagcttgtctgt

SEQ ID NO: 10994 - DNA, 601 bp, Homo sapiens
  misc_feature 427, 448, 503, 509, 559, 570, 580, 597: n = A,T,C or G
aacaagataaaacaacttcttaaagataagcctgagcatgtaggtgtaaaagttggtgtccgaaccaggggctgtaatggcctttcttatactctagaatatacaaagacaaaaggagattctgatgaagaagttattcaagatggagtcagagtattcatcgaaaagaaagcacagctaacacttttaggaacagaaatggactatgttgaagacaaattatccagtgagtttgtgttcaataacccaaacatcaaagggacttgtggctgtggagaaagctttaatatttgaaatctcaggactcttctggccgtagttccaggaaactcgtggaactttggggctcactgcagaaatcatgtgactgtcacgtgctggaaaataaagtgatacatcttgaaaatgaatccgtgtgttggattcngaagaaatgatattatattcnctataggggacagaaatgagaagcctcacccttttggatcattaggtccctgtanccttgntttagaaccagtttcataaagttgcctccctgggcaccggttatcattcngaacgggtgcnccttgatgcntggtggcttgttatccnaggt

SEQ ID NO: 10995 - DNA, 463 bp, Homo sapiens
tccaccgcggtggcggccgctctaaaactagtggatcccccgggctgcaggaattcggcacgagattaccctcactgtcaacccaacacaggcatgctcataaggaaaggttaaaaaaagtaaaaggaactcggcaaatcttaccccgcctgtttaccaaaaacatcacctctagcatcaccagtattagaggcaccgcctgcccagtgacacatgtttaacggccgcggtaccctaaccgtgcaaaggtagcataatcacttgttccttaattagggacctgtatgaatggctccacgagggttcagctgtctcttacttttaaccagtgaaattgacctgcccgtgaagaggcgggcatgacacagcaagacgagaagaccctatggagctttaatttattaatgcaaacagtacctaacaaacccacaggtcctaaactaccaaacctgcattaaaaatt

SEQ ID NO: 10996 - DNA, 50 bp, Homo sapiens
tccaccgcggtggcggccgctctagaactagtggatcccccgggctgcag

SEQ ID NO: 10997 - DNA, 805 bp, Homo sapiens
  misc_feature 317, 438, 527, 553, 613, 624, 626, 667, 674, 676, 683, 704,716, 722, 732, 735, 746, 775, 797, 798, 800: n = A,T,C or G
tatgtgtaaggttggacacattttccaggcaaaaacctgagaaggtctctaagctctcacctcacatttagtctctgtccgagcacgaatggaaggtgtgttaggccagtctcgcattgctaaaaagaaatacctacgactaggtaatttataaagaaaagcagtttaattggttcatcgttcttcaggctgtacaggaaacatgatactggcatttgtcaagtttctagggaggccttaggaaacttacaatcatggtggaaggcgaagggggagctggcatgtcacatgtccagagcaagagcaagagagatcanggaggtgccacacacttttaaacaaccagatctcataagaactcactatcacgaggacagcaccaagaaggatggtgctaaactattcatgagaaatccacccccatgatccactcacttnccaccaggccacacctccaacactgggggttacatttcaacatgagatttgggtgggggtacagatccaaactatatcagaaggctaangcagtgttgcagactgcctgcctganggtagaagacatgccccacatgcacacacagcccgtaggcaaacacttaataaacttaangcattatagtntntccagtactagctgaccactagataccagacagacctttgnggccacncncaagganctaggaaagacttgaccactnttggcaaaattnctaacngatgaatggnccncttttaaaaanaaattttcaaactagtcagaaaataaatntgaagtctgacaggatgaactnngntttaa

SEQ ID NO: 10998 - DNA, 854 bp, Homo sapiens
  misc_feature 2, 3, 9, 10, 30, 49, 56, 70, 78, 90, 100, 103, 112, 657,753, 808, 813, 827, 852: n = A,T,C or G
anntcttgnncgtacaaaaccccccttgtnttgtgtgcttttggccgancggcctncggctgcgagtagnacgacagnaggggtctgtgnatttattggnagnatttggagnattctaaataatatttttaaaaaacttccatgcaacttctggtttaatgtttggcaactccacatgataaaaaaataaaaacagcccaaccgagtttcggaattaagtattcttctagtaagtgattcaaacttgtaatatttgccacaggactgacttatttatttactagctagaagctcttaagttcacttgtttatcagggcatatacagaagggtttgttaaaactcgatgttaactttacaactttctgacctggtgcatgaattctcaagtactgtatttcactgtgttggtgtgtctgatggaaatttcgaggtggtcccacaaaaatattttatgtagtgtgccttcaaagagaaccatttatttctcttcacttatcgtcccacaaagtcacatttggtggtggtcagccaagtcgcatctggtctagttttactcctgtcccaattttaaagagaaatgggaatgagtttgccctggtgagacccataccattgcaatgattatcttgagcacttaaagtccagtgttggctgntagtgtatttgatattctgcctgtctcctcatgggtgaaatatgtctgaagaatagcagcataatctcttggctgttatactttttaacttcctgngtggaatattgatactttggggattcagcttgtacctcttgctctgtagggattnttggnttacacatggccangattttttagtttccatggaaggtntg

SEQ ID NO: 10999 - DNA, 159 bp, Homo sapiens
  misc_feature 6, 12, 26, 30, 43, 44, 45, 61, 62, 70, 72, 85, 100, 113,117, 118, 123, 147, 153: n = A,T,C or G
actacngaaagntctgggtgcaagantacnacagaaaggtacnnntgcttgactactactnnacggttcngntgtgatgacaacnactgaatgatgcggntttccacaatacnactnnaagtnacggatgcgatatgactaccctanggctgntgttcc

SEQ ID NO: 11000 - DNA, 814 bp, Homo sapiens
  misc_feature 2, 8, 14, 17, 20, 21, 32, 43, 45, 52, 62, 65, 72, 508, 569,592, 594, 642, 655, 659, 680, 700, 710, 723, 728, 739, 747,750, 752, 762, 765, 789, 793, 797, 798, 801, 808, 813: n = A,T,C or G
tnttttgncctacnatnccnncttgcttgttncttttggccgnancggcctncggctgcganagncgacagnaggggatttgataatattttgaaggcaggaaaaacccaaattgtttcttctttgagagtcatgactaccttctggtgtggagaaattgccattggaaaatttgacaattttgattctcactggtatgtttaaaaactgaataaaaggaatagaatttttttttgataaaggatcacaaaacaattctaaaacctaactgtttttaccattgaaatttaaattgtgataataggttttaaatgtctagaatgcaactgataggcttttcttgaactgttagtttttttgaagtagttttttcatgtttaatttgtatttgtaaaaaaacaaaaagcaaaaaaattcccaaaacccagataacaaccagagcaaaactgttgtgccttctatttatctttgatttcagtcttggcaattgtttaaaaaaaaaatctanatttgttttattaggttcagagtatgtggggaattatataatccctctttcatcactttgngtatgtcttttgttaacatattngntatgccttattctaaaattgagtctcaactggaatgcctttgaagacngatgcttctatanaggntctttgacctaaatagttcancatttgtatttttatctggnatctaatcanatcctaatcatancccgnagaaggaatgnactttaangtngncttgctctgngcncgggccccattttttttcttaaancaancctnnggnaattttnatttng

SEQ ID NO: 11001 - DNA, 628 bp, Homo sapiens
  misc_feature 2, 5, 13, 25, 33, 43, 47, 53, 59, 70, 78, 100, 101, 103,108, 109, 122, 143, 155, 159, 163, 170, 173, 197, 199, 239,292, 323, 431, 448, 461, 483, 532, 534, 538, 545, 552, 566,575, 582, 593, 600, 609, 613, 616, 617, 620, 622, 623: n = A,T,C or G
cntgntgactgcncggtctttggtnccacactncgacttatgngctntgactnctcacnacacaacgtcngggtcttnagtgcctgaagccaacgaaacnncncgccnnccaggaaaaaacnaacaagctccagacacgccancttaacagctgngacnctcnccacganggnccgcggcttcattcttgaagtcantnagaccgagaacccaccaattccggacacactgggattacngggccttggaagaaattttgtacctgtttgcctctgctggatgaagcactctnaacacagctacctaaaagtggaaggaaggangccgggcaaggtggctcacgcccataatcccaacaccttgggagactgagtcatgtggatcactagagctcaggagtttgagaccagcctaagcaacatggcgaaatnctgtctctacaaaaaanatttaaaacttangcatggtggcacgtgcctgtantcccagctactcaggagtctgaggtgggaggattgcttgagcctaggangnggangctgcantgagccnaatcacatcactgnctccacctnagcaccnacagacccatntaaaaanaaaaaaaanaaanccnnggngnnttttt

SEQ ID NO: 11002 - DNA, 244 bp, Homo sapiens
aatctattttcacttgctattaacagcaaacgtacaactttatctcttatttgacttcattatttggctttcaaattaacaacatgaaaactatacagaaattagtctgtgccctataagacagagatttagataatttgttcaaaacatgagatgatattcagatattctctcaaaggcaggactccaacaccgcaggtggaaaaccaacaaaaggaagaaaacagaaaggaggaaagggaag

SEQ ID NO: 11003 - DNA, 444 bp, Homo sapiens
ttaaacccccaagttgccattttagttcaaggggaggtccacaagcactctcccaaaccagtgtttcaaaccttttatgaggagctaaatctgccagcaccagaacttctgaaaaagataaaaaatttgtttctccaattagcagaaaatgtagctcattcccttaatgttacttcttgttatatatgcgggggaaccactatcagagaccgatggccttgggaagcctgagagttggtgcccactgatccagctcctgatataatgggggcttgtccaggatctcatcaggactggatggctctcgctggactatactggatatgtgggcagagagcctacattcagctacctaatgaatgggcagacagttgtgttattggcactattaagccatcctttttcttattaccgataaaaactactggtactatctgtaaattc

SEQ ID NO: 11004 - DNA, 199 bp, Homo sapiens
tcagagaccgatggccttgggaagcctgagagttggtgcccactgatccagctcctgatataatgggggcttgtccaggatctcatcaggactggatggctctcgctggactatactggatatgtgggcagagagcctacattcagctacctaatgaatgggcagacagttgtgttattggcactattaagccatcctt

SEQ ID NO: 11005 - DNA, 633 bp, Homo sapiens
  misc_feature 1, 8, 21, 41, 626, 629: n = A,T,C or G
nagacagnagggggggcaggnacgccggcccccagcccggnagttatgagatccgacactatggaccagccaagtgggtcagcacgtccgtggagtctatggactgggattcagccatccagacgggctttacgaaactgaacagctacattcaaggcaaaaacgagaaagagatgaaaataaagatgacagctccagtgacaagctacgtggagcctggttcaggtccttttagtgagtctaccattaccatttccctgtatattccctctgaacagcaatttgatccacccaggcctttagagtcagatgtcttcattgaagatagagccgaaatgactgtgtttgtacggtctttcgatggattttctagtgcccaaaagaatcaagaacaacttttgacattagcaagcattttaagggaagatggaaaagttttcgatgagaaggtttactacactgcaggctacaacagtcctgtcaaattgcttaatagaaataatgaagtgtggttgattcaaaaaaatgaacccaccaaagaaaacgaatgagaaaaatgaaaggaagttctgctgtcagatgcaaaacatctgtttatcatagacatcaacatgacctataggttnaanaaaa

SEQ ID NO: 11006 - DNA, 762 bp, Homo sapiens
  misc_feature 1, 2, 9, 14, 566, 669, 710, 740, 760: n = A,T,C or G
nncgacagnagggncttaaattttctgggtcctcttttttttcaactggtagagttaggggactgagctggatgaaagacagtcagatctagttaaaaccctttcaccgcctcttgccaactcaatggacttgagcgagtcactgaacttttccaagcctggtctcttcctctgttaaataacagttccaagagtacccacctcataagattgctaagacactgaaataataccacgcttataaaatgctaggcacaattgcttgaaaatataatattataaaaactttgtgattggtttaaatgtatagagctgaaaatgttctttcatttctaaaatgtcataagtattattttttaaatggataatagggtttatagtaggattatgtatagttctactttttaaaactttccaaacttttattactgtaacttagacctataatataatcaattcataagtaacataatgtataatagtaactttttaaattaatgcaggcaattaaaaataaaatacaatcaccatccttttcagatggttaatatcttgtttgctggaangttttgctggagattatgaattctttctagtacctgtatttctgtgtccaaaaaatttacacttgtatgatttagtaatatgatgtgatagcaaaatcttatnaagctgagggtttttaattgattactattgaaacttatggncgggtgcgggggctcgtacctgtatcccanactttgggagctgagggggngg

SEQ ID NO: 11007 - DNA, 663 bp, Homo sapiens
tgcacatcaatcgcctcattggaaagaagacagtattgaactgtttgtgtctcccataaaccgaaaaacaggaatttctgatgctctgccctctgaggaagttcttcgttcacttaatatcaatgttttgcatcaaagtttatcccagtttggaattacagaagtctctcctgagaaaaatgttttacaagggcagcatgaagcggacaaaatctggagcaaagaaggattttatgctgttgtcatttttctcagcatctttgttattatagtaacgtgtttgatgattctttacagattaaaagaaagatttcagctttccttaagacaagacaaagagaaaaaccaggagatccacctatcgcccatcacattacagccagcactgtccgaggcaaagacagtccacagcatggtccaacctgagcaggccccaaaggtactgaatgttgtcgtggaccctcaaggccgaggtgctcctgagatcagagctaccaccgctacctctgtttgcccttctcctttcaaaatgaagcccataggacttcaagagagaagagggtccaacgtatctcttacattggacatgagtagcttggggaacattgaaccctttgtgtctataccaacaccacgggagaaggtagcaatggagtatctgca

SEQ ID NO: 11008 - DNA, 538 bp, Homo sapiens
attcggcacgagggtactgacgatacacctgtggttcttgtgggaaacaagtcagacctcaaacagctaagacaggtcaccaaggaagaaggattggccttggcccgagaattcagctgtcccttttttgagacatctgctgcataccgctactatattgatgatgttttccatgcccttgtacgggagatacgtaggaaagaaaaggaggcagtactggccatggagaaaaaatctaagcccaaaaacagtgtatggaagaggctaaaatcaccattccggaagaagaaagattcagtaacttgaagagaagatgtgaagtgtttatctgtgaactgcagtgctgtatcaaagcagtccagtaacctgcagtactgagtatggtgcttgctctttcacttaactgataagagggacatgcctactaggagtttttaatgatgtggtatttaaagtattgtctcttagttaagtatgatttattaacccagtggagcactgtctgcttttaaattgtcacattagaatttgttctacc

SEQ ID NO: 11009 - DNA, 538 bp, Homo sapiens
  misc_feature 455: n = A,T,C or G
ctggttcttccttgatcctattacaagtagtggaattaaatttgcaaatgatgaaaacgtgaagcacatctcctgtcccctgctcatcctgcacgctgaggacgacccggtggtgcccttccagcttggcagaaagctctatagcatcgccgcaccagctcgaagcttccgagatttcaaagttcagtttgtgccctttcattcagaccttggctacaggcacaaatacatttacaagagccctgagctgccacggatactgagggaattcctggggaagtcggagcctgagcaccagcactgagcctggccgtgggaaggaagcatgaagacctctgccctcctcccgttttcctccagtcagcagcccggtatcctgaagccccggggggccggcacctgcaatgctcaggagcccagctcgcacctggagagcacctcagatcccaggcggngaggcccctgcaggcctgcagtgcccggaggcctgagcatggctgtgtggaaagcgtgggtggcaggcatgtggctctccttg

SEQ ID NO: 11010 - DNA, 530 bp, Homo sapiens
cggcacgagcgaggacgtgttgcaccctgaagagcctcatcatcgcctgctcttgaggttcacagatgatacctttgatccagaacttgcagcaacaatagatccatcttcggttgtgaatccggcccggaatgcagccaccccttatagcaaccccccttgctgctcgtgccctgctgtgctactgcctcagtcacttcctgcttggtcaagaccacagctgctgatgtcacagctgaggcacatcaaaaaggctgcctgattcaaagaaagctgccggataaatcatagagcacagacacttctacctcatgctcttatgggactttaggaaccaaacataagcacctatggaaaatgcacggcggtcttgaaaggctgtggtctttatcagaaaatatctgaatgactgtttgttatgtcagtcctactctgcaggcttgctaagatgatgattgaaagggctcttggtttctgctttggaatctggcatttatgttttgaagcgttgagagcaagcgatgtggcag

SEQ ID NO: 11011 - DNA, 396 bp, Homo sapiens
ggacgtcttcctcatctgcttctcccttgtcagcccagcctcttatgagaacgtccgcgccaagtggttcccagaagtgcggcaccactgccccagcacacccatcatcctggtgggcaccaagctggacctgcgggacgacaaggacaccatcgagaaactgaaggagaagaagctggctcccatcacctacccgcagggcctggcactggccaaggagattgactcggtgaaatacctggagtgctcagccctcacccagagaggcctgaaaaccgtgttcgacgaggccatccgggccgtgctgtgccctcagcccacgcggcagcagaagcgcgcctgcagcctcctctaggggttgcaccccagcgctcccacctagatgggtctgatcct

SEQ ID NO: 11012 - DNA, 664 bp, Homo sapiens
caagctacttgttctttttgcaggatcccatcgattcgacagttagtgtaaaggatctgaatggcatagacttaactcctgtgcaagatactcctgtggcttcaagaaaagaagatacatatgttcattttaatgtggacattgagctccagaagcatgttgaaaaattaaccaaaggtgcagctatcttctttgaattcaaacactacaagcctaaaaaaaggtttaccagcaccaagtgttttgctttcatggagatggatgaaattaaacctgggccaattgtaatagaactatacaagaaacccactgactttaaaagaaagaaattgcaattattgaccaagaaaccactttatcttcatctacatcaaactttgcacaaggaatgatcctgacatgatgaacctggaacttctgtgaattttaccactcagtagaaaccatcatagctctgtgtagcatattcacccttcaacaggcaggaagcaagccgtacccagaccagtaggccggacggagtccaatgcaaagctgtaccacagaattcagagtccagcacatcacactgacgtataggactccttgggatacaggtttattgtagattttgaaacatgtttttacttttctattaattgtgcaattaatagtctattttcta

SEQ ID NO: 11013 - DNA, 518 bp, Homo sapiens
ctatgacatgattacgaatttaatacgactcactatagggaatttggccctcgaggccaagaattcggcacgaggctgtccttcctagagggactggaacctaattctcctgaggctgagggagggtggagggtctcaaggcaacgctggccccacgacggagtgccaggagcactaacagtacccttagcttgctttcctcctccctcctttttattttcaagttcctttttatttctccttgcgtaacaaccttcttcccttctgcaccactgcccgtacccttacccgccccgccacctccttgctaccccactcttgaaaccacagctgttggcagggtccccagctcatgccagcctcatctcctttcttgctagcccccaaagggcctccaggcaacatggggggcccagtcagagagccggcactctcagttgccctctggttgagttggggggcagctctgggggccgtggcttgtgccatggctctgctgacccaacaaacagagctgc

SEQ ID NO: 11014 - DNA, 608 bp, Homo sapiens
tacgaatttaatacgactcactatagggaatttggccctcgaggccaagaattcggcacgaggtttctccatctataaaataaggtgataattacagctactaaggtagttgtgagattagttaatccaggcatagtactggcatatcatttttgtcctatggcaggtcctcatagcacacgattgctctcagataatgtcatttgtaaaaaggaagcatgtacagtagaaacggtccaatcctggtgctggatgctttcataggagtatgtatgaacacactctgggtgggtggccatactcccactttaccaatgaagaaatgggcctagatgttagatatggccccacatccagtaaggggcagtgctgggatttatagcctgtactcagctctctcccagctgtttacatttgggggcctctggagttataatgaggcctgaaagttagcaaaacctccaaagatcaaaccagagtgccgctcatgctgatgtgatgtgctttctcttacagagaggcggatttggtcgtggacgtggtcagccacctcagtaaaattggagaggattcttttgcattgaataaacttacagccaaaaaacctt

SEQ ID NO: 11015 - DNA, 657 bp, Homo sapiens
tcgaattaaccctcactaaagggaacaaaagctggagctccaccgcggtggcggccgctctagaactagtggatcccccgggctgcaggaattcggcacgagcaaaggtcaattcgaaacttacctgcgggactgccctgacccttgtataggttggtgagcacacgtctggcctacagaatgcggcctctgagacatgaagacaccatctccatgtgaccgaacactgcagctgtctgaccttccaaagactaagactcgcggcaggttctctttgagtcaatagcttgtcttcgtccatctgttgacaaatgacagatcttttttttttccccctatcagttgatttttcttatttacagataacttctttaggggaagtaaaacagtcatctaaaattcactgagttttgtttcactttgacatttggggatctggtgggcagtcgaaccatggtgaactccacctccgtggaataaatggagattcagcgtgggtgttgaatccagcacgtctgtgtgagtaacgggacagtaaacactccacattcttcagtttttcacttctacctacatatttggtatggtttttctgtataacagccttttccttctggttctaactgctgttaaaattaatatatcattatctttgct

SEQ ID NO: 11016 - DNA, 126 bp, Homo sapiens
gattacgaatttaatacgactcactatagggaatttggccctcgaggccaagaattcggcacgaggcccgatacttgcgttgacattgtgattcgacatgtggcacccattcccaaccactatgat

SEQ ID NO: 11017 - DNA, 369 bp, Homo sapiens
ccagagtccatgaggcattttatttgtaaatatatgtattacatccctagaaaaagaatcccaggattttccctcctgggggttttcgtcttgcttcttcatggcccatgatgccagctgaggttgtcagtccaatgaaactatggaggggaaaaagaaagggctggtaagtttaatagttcaacatagggccttctagggcaaaaaaacatcaacactcatcaggggttaagggcgctttcctgtggggcacataggaactgacagtgcctacatgagctggtgcctcatgtagcgtatgagccatgactcctgcaacccaaagagccaaatccagagagcccagccacacaatcacacagccctgac

SEQ ID NO: 11018 - DNA, 391 bp, Homo sapiens
tttatttttttgcagaggaatgaaattaagagatttaaagacaaaaacacaggctggtagtcaaagtaaaggtttatccttgcatcagaatggtttaaatcttgcaatttgcatatacaaagagttcagcaacattcactggcattataatcagagcaagatcaaattataaatgtaatcaaagaaaatatgatagttgaaactgtaataacatacatacattataaagactgcacataaattaaacacaacttagttaaacaaacaaacaaaaaagtatcagtaattatacacttaaaagaataacatggggatgtctccaaatgctgaaacacaggtgtcaggctcatttaaaaaagtgtttaaaaacacataaaaataccttttaaaa

SEQ ID NO: 11019 - DNA, 566 bp, Homo sapiens
  misc_feature 470: n = A,T,C or G
gcccagccaagtgggatccctcgataatgtgggccacctacctgcaggaggtgctgtgaagactgagggcggtggcagcgaggctcctctgtgtccgggtccccctgctggggaggagccggccatctctgaggcagcgcctgaagctggcgcccccacttcagccagtggcctcaatggccaccccaccctgtcagggggtggtgaccaaagggaggcccagaccttggacagccagatccaggagacaaattgagacctacaggctgacgttccgggcaaatgccagggcccgcaccgaccacggggccgacattgtctcccgccccccacacttccctggcggccccaactcgggctcccgggtccttggccccctttcccgggctgtccactagaccagtgagcgcttgggcgccgtgctgggcagcccgctaggctcgccttccctcctgctttgcgtgcccggngcagcagcagccctgccccacacctcctctcactccccagcctgggcccatctccctgctttggtcttgccccatcactgcgccactgctccgtgg

SEQ ID NO: 11020 - DNA, 401 bp, Homo sapiens
  misc_feature 362, 368, 385, 399: n = A,T,C or G
ccatcatcatcacctcccacagcatggaggagtgtgaggccctgtgcacccggctggccatcatggtgcaggggcagttcaagtgcctgggcagcccccagcacctcaagagcaagttcggcagcggctactccctgcgggccaaggtgcagagtgaagggcaacaggaggcgctggaggagttcaaggccttcgtggacctgacctttccaggcagcgtcctggaagatgagcaccaaggcatggtccattaccacctgccgggccgtgacctcagctgggcgaaggttttcggtattctggagaaagccaaggaaaagtacggcgtggacgactacttccgtgagccagatcttcgcttngaacangtctttctgagctttgnccaactgcagccgncc

SEQ ID NO: 11021 - DNA, 455 bp, Homo sapiens
tatgacgtcgcatgcacgcgtacgtaagcttggatcctctagagcggccgcctactactactaaattcgcggccgcgtcgactgagaatgagtatgttcatggaaatgtgacagctgaaaatatctttgtggatccagaggaccagagtcaggtgactttggcaggctatggcttcgccttccgctattgcccaagtggcaaacacgtggcctacgtggaaggcagcaggagccctcacgagggggaccttgagttcattagcatggacctgcacaagggatgcgggccctcccgccgcagcgacctccagagcctgggctactgcatgctgaagtggctctacgggtttctgccatggacaaattgccttcccaacactgaggacatcatgaagcaaaaacagaagtttgttgataagccggggcccttcgtgggaccctgcggtcactggatc

SEQ ID NO: 11022 - DNA, 534 bp, Homo sapiens
caggttgtaaaaaaggcttatttattgagagcagcgagtgtaaaaacaaaaacaaaaacaaaaaaacaaaacaaacaaaaaacgacaacaataaaagtgtggggtaaggatggcccaccctcctcatctccagggcccacccatacctcccatgcccacccaccccacgctgcaattacatataaaagccgcccgtggtgcatacaaaaagggcggtttatatagtgtcaaaagctcctgaaaacctccttcatctgccaggcacttaggatgaggaaaggagagaagggtggggaagacgtgggtctgggtcagtgtgcacaagcccagagtggggaggactcacttgctgtgtcctctataatcctggtctagacccccaagtgggaccagtgggccaagagactcattaaccctgtgtgcccagaacttgagaatattaaggaactccccacaaacccagctcatcccaagcctagccctccccaggcaaagttggcagatgagtggcagagttggacccggtcaagggga

SEQ ID NO: 11023 - DNA, 276 bp, Homo sapiens
gctcgacctgctgtctaagagtgctcagtgtccactgagagtacactatctatcatcacaatatggtgatgagaggtgttttatgtttgtgttaatttcccccactaaatcagtaattattacaatcctgtccctgctgtttaccctgcagctgtttttccatttgtcgagagagcgggtgttctctgaggaccgcacacgtttctatggtgcagaaattgtctctgccttggactatctacattccggaaagattgtgtaccgtgatctcaaggt

SEQ ID NO: 11024 - DNA, 591 bp, Homo sapiens
cctgggccagaaccacagcaggcccggtgaccacagggatacttgtcttggtgtgctcccctagccagcagctggagaaccccctggcctgtgggaacgtagtcagggaacccatgtcacagacagaagggcattgggaggaaatggaaaagcgattagagtccagttatactgcgattgttttcatgggaaccactaggtgtgccagcaccaggcccagagtgagctccccatctactgctggaccagcagggcacgttctctccaggcttcacccactggggagcctttgtacattgcaaagtggaaccaagtcatgggatgaacagggtggcccagagttagcattcccagaggcctggccacagagagctgtcctgtgagagagcaagggggcagcgagtatgtgacatgttggcctgctgcttcctctgcagagagaggtcctgccatccacccgcctgggtaccctatcacctgccttcagcactcgggtgctgccagctcaagccacggagtatgccttcgccttcatccaggtgccccaagatgatgatgcccgcacggacgccgtggacagcgtagttcggg

SEQ ID NO: 11025 - DNA, 706 bp, Homo sapiens
  misc_feature 632: n = A,T,C or G
aaatttttgggaatttattgatttgcatttaaaagggaactgctgacaaagattcactggtaataatttgaacaagttggaaaatacagtcaacattactgaaacactactaaaataattccaggacagaacaaaacttcttagatgctgtctttgatgtgaaaattgactgcttcttacttttctaacacacgggggtataattaacaatattcaatcacttctattctttcctgcatatataaaaattaaaataccaattaaaaaactaatatatcttctctttatttcttacagatatgagttcaatgtttcactcaatagtgctgtggtttaagagaattttttcatttacaagttaaacaacaatccgcccaaagggaactgatagtctataggctcatagtgcaaataaacagtttaggaatgcagcaactgacatttctaaagtacaaaacagataaaattcttagaagatacatgcaaaaagctctactaagcagatggccacagaactagaacattgataattttactggcgatgtcaataggactccagatgtttccaaactcaacttgaactctcatcttaggctttgtattttgcttgtgcagtttcactaatgacacanacatgattcacatgcctggagtattcattatagtcaagggcatatcctacaacacacttgtctggaattcaaat

SEQ ID NO: 11026 - DNA, 749 bp, Homo sapiens
  misc_feature 416, 455, 531, 578, 593, 680, 740, 743, 744: n = A,T,C or G
gcggccgccgtggcacctgcgcgagctagcccactgtaggagtcgggaggccgagacaggtcagggagggtgcctggctggctggggagggccgcgtggttgtgcatgaggctggtgctgcctgcgaggccgtcctcggggtggctgcctccaaccaggcctgcgtgccgcccgcccagcgacatggggccggtgaaacctgaggccagcgccccgtggccaggcagcagcgtgtgcatgtcgccggctgtgcccacggcgtggctgcggagcacgtggatggcctcgtccaggtggtcttctatcttactctgcaggccgtggagacccccgtcgtagctgggcgataaggcaccgggggctcctgctcgaggccactgtgacgttcctgccaggccctggggggagcccacggnggtagaagggctggacgagaagttattgcttgagtgatnccgggagtagatcgaggccagtgctttgccgagggcatccccggagctgccagctgtggtccctcgggagcccagngagctgtcggccccgctgaccaggcgggtgtggctggagacgccgcncgacgtggctccggnggctgaggagaaggaggatgcagatgggagcccaccgttcacctcttgctccatgcagctgtagcccataacgctcgtgctgtgcangccacccaacgtgctgctgcttccactgctgcccaccggccactaccccgggcgagggcnagnngggat

SEQ ID NO: 11027 - DNA, 494 bp, Homo sapiens
  misc_feature 472: n = A,T,C or G
gggccgcgcgctctgcgacgtgggcaccgccatcagctgttcgcgcgtcttctcctccaggtggggcaggggtttcgggctggtggagcatgtgctgggacaggacagcatcctcaatcaatccaacagcatattcggttgcatcttctacacactacagctattgttaggttgcctgcggacacgctgggcctctgtcctgatgctgctgagctccctggtgtctctcgctggttctgtctacctggcctggatcctgttcttcgtgctctatgatttctgcattgtttgtatcaccacctatgctatcaacgtgagcctgatgtggctcagtttccggaaggtccaagaactccagggcaaggctaagaggcactgagccctcaacccaagccaggctgacctcatctgctttgctttggcatgtgagccttgcctaagggggcatatctgggtccctagaagtccctanatgtggggcttctagattaccc

SEQ ID NO: 11028 - DNA, 682 bp, Homo sapiens
  misc_feature 2, 5, 11, 13, 14, 15, 22, 24, 28, 77, 81, 82, 88, 90, 102,103, 112, 143, 155, 171, 175, 177, 191, 204, 225, 233, 235,269, 277, 279, 280, 292, 297, 298, 299, 305, 312, 313, 316,328, 341, 342, 347, 364, 370, 377, 380, 385, 388, 400: n = A,T,C or G
  misc_feature 402, 407, 408, 409, 417, 428, 444, 445, 448, 451, 453, 455,458, 474, 482, 494, 499, 513, 529, 546, 568, 574, 596, 601,605, 608, 609, 614, 619, 631, 637, 639, 641, 665, 667, 670,672: n = A,T,C or G
gntgntattantnnnacagatngnttcngctgtcgagtaagactacaagaagggtacaggctgcgacaagacacacngatnngtcccntntgcgtcctgacnntttaagggnaccggctgcgacaagacgtcgagtcggtacngtgtgcacacanagctcaccaacatgtncagntnccatctctcctcanaatgtgtacagtntgccagacgtgctggaacgcncctgttgncncaactcctcagaaggctcaggctggaaaatcacnttgaaccngnncggctgaggttncactnnnctgagnttgcgcnnctncactacaacctngtgacacgagctnngactntgtctcagaaaggtacngctgcnacccccncgncgganggnttctgctgcganangaccnnngaagggtnctgttgcgatntgaccacacccgttcnnggnttncnanaanaccacagaagggtccngctgcganaagacacagaangggtntttattttttcttntgaaatatctgacccntaataagtcttaagtanattagttaaggccaggcccggngtctanacctgtattctgccctttcggngccgnggcngcnnatctnagtcngaaattgagacnttctcncncntgtgaaccccgctctctaaatttnantancngctgctgccc

SEQ ID NO: 11029 - DNA, 763 bp, Homo sapiens
  misc_feature 2, 3, 12, 15, 27, 28, 43, 59, 61, 64, 79, 120, 746: n = A,T,C or G
annaactggggncgntaaaacttgctnngttgttttggccgancggcctacggctgcgngnagnacgacagtaaggagnggctcactaaacattctactactcactctcactgcccaagnaactatcaaactcctgagccaacaacttaatatgactagcttacacaatagcttttatagtaaagatacctctttacggactccacttatgactccctaaagcccatgtcgaagcccccatcgctgggtcaatagtacttgccgcagtactcttaaaactaggcggctatggtataatacgcctcacactcattctcaaccccctgacaaaacacatagcctaccccttccttgtactatccctatgaggcataattataacaagctccatctgcctacgacaagcagacctaaaatcgctcattgcatactcttcaatcagccacatagccctcgtagtaacagccattcccatccaaaccccctgaagcttcaccggcgcagtcattctcataatcgcccacgggcttacatcctcattactattctgcctagcaaactcaaactacgaacgcactcacagtcgcatcataatcctctctcaaggacttcaaactctactcccactaatagctttttgatgacttctagcaagcctcgctaacctcgccttaccccccactattaacctactgggagaactctctgtgctagtaaccacgttctcctgatcaaatatcactctnctacttacaggactcaa

SEQ ID NO: 11030 - DNA, 650 bp, Homo sapiens
  misc_feature 5, 23, 644: n = A,T,C or G
aaagnaatagtttgggacaaagnaatcccttcctaatttccctgcagtcccatcataggcatgaccatcgcatctctttatggctgaagcttagcctgactgctggacccagacttttgcccagtgacctctggggtaggttactatcctctttgtcctgccagtacccctagaaatttgacttaattgctgcatctagggacttagggatttttcccaaatgctgtgtagaaagtcgctggagttaaatctactccaaccatttttctgctgtttcttgaaaagacaggatgattcatttacatctcttttccttcacagaatcatgagggaagtattgtgattaccagtgttaagcatttgtgaatattttattccaaaaagaaaaaaaatcactttaccagccttttctgcagagataaagactggaggtcaggtgcggtggctcatgcctgtaatcccagcactttggaaggctgaggcgggcagatcacctgaggtcaggagttcgagaccagcctggctaacatggtgaaaccccatttctactaaaaatacaaatattagctgggcatggtggtgcacgcctgtaatcccagctactcaggaggctgaggcaggagaatcacttaaacctgggaggnggaggc

SEQ ID NO: 11031 - DNA, 750 bp, Homo sapiens
  misc_feature 2, 556, 696, 738: n = A,T,C or G
angacagaaggggaggtcattatcaggagttgccatatcatctctccagtacctaacatttctcatccacttcaaaagctgttctgactgccagctggctgatctaagctcctgaggaatgtctcctctcaaaggaatttttccctccaaaggccccctgaagtcctagttggcattggcctggcacatgctttatgttaggcctcccgttgggatggctgagaatcatgaaagacagatcctccgctagcctctgtgggtcaagtttctggacaccaagtctctgggaactagtgtttgattttaaatggcatgtggcccttccttgtttcagtgacttagaaaagtaaaagccatttaaaaaagttagcaagattttttatcgacttcccaactgggcttccagccttgttgaatgaaatcatctatctctgattgggcgcaacgaactgcatttctttggacttctgaatccatgtttgtgctttctctggcccgtgaacacctcggcgattctgttagggatgggatgagtgggaggaagccctttgagaanggggagccggccctgtcatgcgcaggttttccactcatctgaggaagagccagggctctgaatttagcctaacactcatcttggctgtgggcttgggaagaatggccattatttacagattgtatttggacatattgggngatacttgaaagaaaaaggactgccgccctactgaatctgancttttatcctac

SEQ ID NO: 11032 - DNA, 743 bp, Homo sapiens
  misc_feature 2, 8, 23, 180, 181, 373, 535, 541, 580, 603, 625, 631, 640,650, 660, 695, 701, 722, 735: n = A,T,C or G
tngacagnaggggtctctgtggnttcaccagcttagcttgagctctggttattttggatcttttctgctttttttaagtaactgagtcatttttaccacacagtccagtttgcatgtatagctaggaaacatgtattgctctagattgggcagtttaagtcattttaaagaaagttattnnatatttgttgccttttaactcatagtcaagcttcagtctttcaaagagaaatgtgtgattttcatttacttgctgatattttgtagtttggagatccttgtgggcattattctaactgatacgtagacacttacttggaaatttttggacattatattaaatgagtgctatctgtgaaattggttatattangtggcttgactaatgttttttctataattgtatatggactgcatttttaaaaaaaccgcatttgcctttatactagattgtaaaaaattatattagaatgcataagacatgtttttccttcatatgctagacttttcctagcatttcgtatttctgtgttgncagtgngtgatttttaaaccggaatttgggttaaaaaaatctggngggatatatgtgagaaaactttnggggttaccttatgaaataaangattgnaagtaaagnttcctgcgcncttataccanattcagtataatacactacttttctgtttcaacanaaaatntaaatagccggatatctgaanactggctggaacncttctgaa

SEQ ID NO: 11033 - DNA, 721 bp, Homo sapiens
  misc_feature 15, 27, 31, 35, 41, 97, 111, 129, 137, 142, 150, 164, 166,167, 178, 180, 181, 182, 194, 207, 208, 217, 218, 224, 239,245, 255, 259, 267, 273, 274, 286, 290, 301, 304, 309, 325,327, 333, 335, 339, 373, 379, 380, 383, 385, 402, 406: n = A,T,C or G
  misc_feature 413, 426, 428, 434, 440, 445, 447, 449, 450, 455, 460, 465,467, 476, 483, 486, 489, 498, 501, 503, 504, 508, 516, 522,525, 528, 534, 536, 539, 543, 552, 559, 560, 567, 570, 586,596, 600, 611, 615, 620, 624, 645, 646, 667, 672, 686: n = A,T,C or G
  misc_feature 694, 697, 702, 705, 706, 713: n = A,T,C or G
gggagagtcaggcanggttaaactgcnggancagnttgccncccctgtccagatcattggctgctttgcctctaccagttggcatacagccgattgntctacatggctttnataattgtttgaggggangagatggnaacantgtggagnctccctctgattgntnntggggaaatgngnnnaagagtgccctnctttgcatacatnntcctggcannaatgcnacagaatgaattttncacgcntttctttccntggncataggtnagctgnnccttcatctgtngcanatgaaatgttntgntcacnctgcattacatgtggncnttcatncnccanagttgctcagctcctacctctgggccagggcatncatttnnatntnccttatcacattccctntctnagcacancctggggaggggntnattgtnctcctnggcancntnnatctnagagnctcancngactgcganctgcttnccntgncaccatgangcngnngacnattgcagnttcatntgnctngtgacncnatnctcnaagctctcnccactannccacacnaancttggagccgcctgangagctccccngganaaggagaaggnattntgctntacnggatacacatctggagtaagnncaaactaaattcacatccctntaaantaaactactgtacnacttcagngtntcacntgnnggcaccngacataaa

SEQ ID NO: 11034 - DNA, 384 bp, Homo sapiens
agtcttggacctctcaggctaaacagcaacagaacaaagtttagaaaatgatggatactatgtctaatgtgaatattaacaaaataagcatgaaataccaagattgttgttttactctgttatcgtcatcattaattacagtgttttgagagtaagaattctccaattactttagaaaggtattaaagttctgatgttgctttcttaactgttttttagacagggtctcactctgtcaccaggctggcctccaatagaacaatcactgttcactgcagcctccacttcccaggctcaggtgattatctcatctcagcctcccaagtagctgggactacaggcatgtgccatcatgccctactaattttttctttttttttttga

SEQ ID NO: 11035 - DNA, 560 bp, Homo sapiens
ggcggctgggcctgaacatgaaggagctgaagctgctgcagaccatcgggaagggggagttcggagacgtgatgctgggcgattaccgagggaacaaagtcgccgtcaagtgcattaagaacgacgccactgcccaggccttcctggctgaagcctcagtcatgacgcaactgcggcatagcaacctggtgcagctcctgggcgtgatcgtggaggagaagggcgggctctacatcgtcactgagtacatggccaaggggagccttgtggactacctgcggtctaggggtcggtcagtgctgggcggagactgtctcctcaagttctcgctagatgtctgcgaggccatggaatacctggagggcaacaatgtcgtgcatcgagacctggctgcccgcaatgtgctggtgtctgaggacaacgtggccaaggtcagcgactttggtctcaccaaggaggcgtccagcacccaggacacgggcaagctgccagtcaagtggacagcccctgaggccctgagagagaagaaattctccactaagtctgagctgtggaggttc

SEQ ID NO: 11036 - DNA, 582 bp, Homo sapiens
aagtttaacatgtacttttattaacaacttaatacaagactgtacactgtaggtgctgaaatcaacccactcctgaaaactgaaaaaccagcatttctataccactttgggctttggttataagtgccatcttctacagcaaaatcacgtcttaagaacaggaaaaacgttccacgggaatggagagattatctatgcataaacagctggggatcatttctagctttacgtgattcactacacgctctggaatgttcagttcccttttctacagtcctaccacgagacatacagcaactaagaacttggccacaggtcctgcctagacacacatcaatatgaaacaaaaaaaatttatataaataagtcaattaaacttcacaaaaactaaagaaacacaagacaaaaatccaacaagcaataaaaactgtacaatattggtcagtcttttatatctgaaaaatgtgtaacttaaaaaaaagttatttatcgtataaaaaaaagtcttttacatctgtgttagctggagtgaaaacttgaagactcagactcagtggaaacagatgaatgtccacctcgctt

SEQ ID NO: 11037 - DNA, 505 bp, Homo sapiens
tccaccgcggtggcggccgctctagaactagtggatcccccgggctgcaggaattcggcacgagcagcacagtccccgaaaagaagacaccgaagagccctgtaggggtgcagcccatactgaatgaacacaccttctgtgctggcatgtctaagtaccaagaagacacctgctatggcgatgcgggcagtgcctttgccgttcacgacctggaggaggacacctggtatgcgactgggatcttaagctttgataagagctgtgctgtggctgagtatggtgtgtatgtgaaggtgacttccatccaggactgggttcagaagaccatagctgagaactaatgcaaggctggccggaagcccttgcctgaaagcaagatttcagcctggaagagggcaaagtggacgggagtggacaggagtggatgcgataagatgtggtttgaagctgatgggtgccagccctgcattgctgagtcaatcaataaagagctttcttttgaccc

SEQ ID NO: 11038 - DNA, 568 bp, Homo sapiens
tccaccgcggtggcggccgctctagaactagtggatcccccgggctgcaggaattcggcacgaggggaagccatcacttaccttgcactgagaaagaagacaaaggccagtatgcacagctttcctccactgctgctgctgctgttctggggtgtggtgtctcacagcttcccagcgactctagaaacacaagagcaagatgtggacttagtccagaaatacctggaaaaatactacaacctgaagaatgatgggaggcaagttgaaaagcggagaaatagtggcccagtggttgaaaaattgaagcaaatgcaggaattctttgggctgaaagtgactgggaaaccagatgctgaaaccctgaaggtgatgaagcagcccacatgtggagtgcctgatgtggctcagtttgtcctcactgaggggaaccctcgctgggagcaaacacatctgacctacaggattgaaaattacacgccagatttgccaagagcagatgtggaccatgccattgagaaagccttccaactctggagtaatgtcacacctctgacattcaccaaggtct

SEQ ID NO: 11039 - DNA, 512 bp, Homo sapiens
cagagatggacagagaactttattttggattgtggatgtggacttttttgtacataaataagaaaaaccaaaatactccaaagatgacttcccctgcctcctactccagtatgacagaggaggatgtaaggccttagccatgatctgcaggggtctgggagtcaggcccggcctattgcttgggtctctctctatttatatatctaagttcacagtgtttcttattcccccctaagcttctagaggctcatggccctgtagttaggcctggctcattctgcacctttccagggaggtggaaggaccctgtgccctccttcccaatcttctttttcaggctcgccaaggcctaggacctatgttgtaattttactttttatttctaaagttgtagtgaagctctcacccataataaaggttgtgaatgttctgtgagtgtcatggagatgggctagggaggggattttacacttcactttccagacccctggtttgggggaagagggtccatg

SEQ ID NO: 11040 - DNA, 763 bp, Homo sapiens
  misc_feature 445, 604, 622, 677, 683: n = A,T,C or G
cagagcaaactttaggttttttattaggcttttgacagtactttctgagtatttgagcaattgatgggtttctctctgataccatcttgccacggggccaaacagcacatatgcattttaaaaatgtaattcaagctctaaggagtatgagtttgtattcagaatgcaatttaaaatctacctacctatctacctctctatacgtatatacagggactactttgaacagatccacataaaggagttggagtggagaacagtttcacaataaataatcgcttctctaaactgtacaaaatcctaccagcaaatcagccactttcatttcctcatgataggtcatcacttttatacctgtaataacttatgaaatacacacagaggatttaacatttggtcaaggccaatgctctgtcatacaccatcttaaatgtctctctacggngccctggacacccactcaaatgccgtttcctatctctctgtgactgggttggggagatgggcagccctcccctgcgcaggcgactttacatggtgggataacatctccacactcacagtaagctcggctcggggggaagagccgcagctgaaaagattntgaactgtcagacgggantaggtgttgcaatttatataaaccagaaatttaccataatttacaaagaaaatgnggtcgngacttattttggagccattcccccaaggaccacatttacctatgaaagcaaatattcaacctataacccctgagctcggg

SEQ ID NO: 11041 - DNA, 51 bp, Homo sapiens
ttctactaccataaaaactatcttacatcacctgaacatcaagtgatatta

SEQ ID NO: 11042 - DNA, 497 bp, Homo sapiens
  misc_feature 440: n = A,T,C or G
gattacgaatttaatacgactcactatagggaatttggccctcgaggccaagaattcggcacgaggaggaacctcagcagcagaagcaggagccgctgggcagcgactccgaaggtgttaactgtctggcctatgatgaagccatcatggctcagcaggaccgaattcagcaagagattgctgtgcagaaccctctggtgtcagagcggctggagctctcggtcctatacaaggagtatgctgaagatgacaacatctatcaacagaagatcaaggacctccacaaaaagtactcgtacatccgcaagaccaggcctgacggcaactgtttctatcgggctttcggattctcccacttggaggcactgctggatgacagcaaggagttgcagcggttcaaggctgtgtctgccaagagcaaggaagacctggtgtcccanggcttcactgaattcacaattgaggatttccacaacacgttcatggacctgattgag

SEQ ID NO: 11043 - DNA, 598 bp, Homo sapiens
tcggcacgaggctctttgccaccaataccatgaagctctgcgtgactgtcctgtctctcctcgtgctagtagctgccttctgctctctagcactctcagcaccaatgggctcagaccctcccaccgcctgctgcttttcttacaccgcgaggaagcttcctcgcaactttgtggtagattactatgagaccagcagcctctgctcccagccagctgtggtattccaaaccaaaagaggcaagcaagtctgcgctgaccccagtgagtcctgggtccaggagtacgtgtatgacctggaactgaactgagctgctcagagacaggaagtcttcagggaaggtcacctgagcctggatgcttctccatgagccgcatctcctccatactcaggactcctctccgcagttcctgtctcttctcttaatgtaatctcttttatgtgctgtattattgtattaggtgttatttccattatttatattagtttagccaaaggataagtgtcccctatggggatggtccactctcactctttctctgctgttgcaaatacatggataacaccgttaattccatgtgttttcataataaaacttta

SEQ ID NO: 11044 - DNA, 656 bp, Homo sapiens
accgcacaaggagaccaaggagtactactcccacttcacctgcgccaccgacaccagtaacatccagtttgtcttcgacgcggtgacagacgtcatcatacagaacaatctcaagtacattggcctttgctgaggagctgggcccggggcccgcctgcctatggtgaaacccacggggtgtcatgccccaacgcgtgctagagaggcccaatccaggggcagaaaacagggggcctaaagaatgtcccccaccccttggcctctgcctccttggccccacatttctgcaaacataaatatttacggatagattgctaggtagatagacacacacacatgcacacacacacatctggagatggcaaaatcctctaaaatgtcgaggtctcttgaagacttgagaagctgtcacaaggtcactacaagcccaacctgccccttcactttgccttcctgagttggccccactccacttgggggtctgcattggattgttagggataggcagcagggctgaggcaaggtaggccaactgcacccctgtcgcctggaggagggccagctcgctgcccgagctctggcctagggaccttgccgctgaccaagagggaggaccagtgcagggtctgtgcaccttccctgctggcctgcacaca

SEQ ID NO: 11045 - DNA, 378 bp, Homo sapiens
cttcttattctttgacattttgtcagctggtttaggctggggagcagtactgactgcagatccggaaggcggaggagctccagatcgctgccattctgttgcttctgcagccagcctccgaatgtactgctcattcactgacaataagatgttctctggtttaatgtcagtgtggatgatacggcacttggtatgtaaataatcaagaccctgtaacacttgctgaataatttttttgacacaaggcagtggaagcccctgataattggatttgatgatccacttgagcagatgatgccccaaaacttcaaataccatgcagatatgtgttccattaactcctgatattttaaagtcatctagtagttgaacaaccat

SEQ ID NO: 11046 - DNA, 366 bp, Homo sapiens
gtaatacgactcactatagggcgaattgggtaccgggccccccctcgaaagcgctcaggaagctgaccttgaagctctccagcacgggcagcaggccttggcggaggtcctcgagcgcgggcttggccttctcgctgagcgtgctcagatgctcggtggccttggcgtggtactcggccagtctggcgccgccgttctccttgagagcctcaaggcgcgcggccaagcgctggcgcagctcgtcgctgtagggggccagatgcgtgcgcagcgcgtccacatgggcgcgcgcgcggtcgcgcatctcctcgcccagtgggctcagcttctcttgcagctcgtgcagcttctggcgcgcgccctctt

SEQ ID NO: 11047 - DNA, 241 bp, Homo sapiens
  misc_feature 40, 190, 233: n = A,T,C or G
tttcaatttcgttaaatgaaattgtattttgcccacggtngcttctgtttgatccctggggacagaggggagcaagggaggggagtggcagggggaggcccaggtgtggggctggagggggtactggcggcacgggaggcagtaggcttgggcaggggaggagtgcgctgcgcctcaggaggcaaaggtnccccagcctgggcaggccctggaccagcccaagctgagcagcnccgcccct

SEQ ID NO: 11048 - DNA, 421 bp, Homo sapiens
  misc_feature 298, 405: n = A,T,C or G
tttacaaaaaaatcaagtttttatttcaaatatttgaatctaatagatcattatttaggtttatactctgtgaatatatatatgatattgtatttaattaatatctgagtaatctcaattaccattttctaggaaggatagagtgtaagagctaaacatttcatgtagaaatattaactttcaaaagttataataccagagttttagagtgaaggagtatttaaaatgtgtctttctttgggagagaatcattttgttctttactaacaataatttgaaaattggtaatttaatatcntgtgaatatgaaaatattatggtatagattagcttctaggagaagttaagtgtagcatgatttcttgaagattaaaaaaacatttaactttttaaagataatatgcntattgaatattatttg

SEQ ID NO: 11049 - DNA, 453 bp, Homo sapiens
  misc_feature 448: n = A,T,C or G
ttggcaggccaaaaccctagtttatttcagcatcagcagtatcttagccatcaaaaaaataaactctaccaagggtgacggaagtctctacagcaaggctaagggctcgccagacgggaaccatcaggggtgcatggtgggcactgccaggcaataagttaggaagcagcagggctggtgtcgggtgtgggccgggcttcatttctgggcaggcatgaggtcgtcgatggcctggccctgctccagccgctgctccatctcgatgagcagcttcactccgtccaccaccatctgcaccagctccacctctgagaagcccaggcggtcagcgttggagacgtcgaagaccccgcccaccgcagccgtgtccacaccgcctgtgcctcgcttctgaagtcgcagccgcttaagcacctccgagaacttctcatgcttgcccaggttgggnagctt

SEQ ID NO: 11050 - DNA, 286 bp, Homo sapiens
aggctaaaaacaaagcaaaaccagttaccactaatcttaagaagataaacattatgaatgaggaaaaagttaacagagtaaataaagcttttgtaaatgtacaaaaggaacttgcacatttcgcaaaaagcatttcacttgaacctctgcagaaagaactgattcctcagcagcgtcatgaaagcaaaccagttaatgttgatgaagctacaagattaatggctctgttgtaatatactggtgatgcatctaattctccacaaagaccaataaattgaatgtttta

SEQ ID NO: 11051 - DNA, 549 bp, Homo sapiens
  misc_feature 549: n = A,T,C or G
ctcatgtgttccatttattttgtctctcaaattttaggaatcttctcctttaattaactcatcaacctctcatggcaagaatttgagaaagtaaatttatactcaggttctaattttaatagggaaggaagaagttacagctcagtgcaccatgaagttgagacagagatggagacacctcagccccacctctctgcaacaggaaagatgattggggagggagcacaggtcagcgtgggaagagggtcatggtggacatgggggtggggtggtctccccaccttcctcacattatgcctacatgaacacagacacatgcaggtgcctttgcaggaaacaaagtccagggttcttccaagtccaccaaagggaagggcaggaacaactcttgcctctcagtcccacacaaggcagctgtctcacactttacaagctgtgagagacacatcagagccctgggcactgtcactgcttgcagcctgagagtagctccctccttttctatctgagctgttcctcctccacatcacagcagcgaccaaagctccn

SEQ ID NO: 11052 - DNA, 658 bp, Homo sapiens
  misc_feature 361, 365, 372, 375, 377, 380, 394, 396, 399, 410, 413, 428,442, 494, 501, 506, 559, 562, 571, 573, 579, 596, 598, 605,628, 632, 638, 642: n = A,T,C or G
ggggtagggtcatgctattgcaaaactccacagggtaccatttatgttgtattccatgtggaaggtgtcctctggagtttggcaatatagcagctgtctgtaaatgatattgaaagcatcctgagttctggagctgcgccgattctattaggctgagaaccccagtttcaagttcatctcttcatttttctctcattccatttcacagcggcttaacagcaggtcctttgtattcgtttctggcccatagagggatctttattcaaaatcacagggttgtctctaaatttctgctaagctaatgaatggtgttagtatgttctcttctccagggcagaggcagagttttttttttttttanttanccaaaancancnttncccaataaatcacntntcnttgtaaaaaanaanagttaactattatanctaaaagataaaangccatggcattcaggcaacgggggattaaaagtacttcaaacctatcagttntgtaaancctancttaagtctgtgggtctaactttctaactaaacttaccttcctttaaaaaatnttngatgtgcananagctanactgaggatctaccagncncagatcnccttatttcaatcaggacctaanattntttgangccngggtttaaaccccttc

SEQ ID NO: 11053 - DNA, 205 bp, Homo sapiens
aaacgtcagctcaggatatggggccaatctctgtgagtccagcatgtacctgtctctccctagtgtcccttcagcctgggctgaccagtgcccgcctctgggcttgaccagttcccaatctcgtcctctgtccccaacttcttaagcacaattgggcttcttccatctccaggttttctgccattcttaaccaaggctgcctctt

SEQ ID NO: 11054 - DNA, 693 bp, Homo sapiens
  misc_feature 1, 29, 149, 168, 169, 172, 189, 207, 238, 261, 328, 362,455, 499, 508, 563, 578, 583, 596, 630, 641, 670, 688, 689: n = A,T,C or G
nattccaaatgaggagtatgatggacagnatattttagtatctcagtaatgtcctagtgtggcggtggttttcaatgtttcttcatggtaaaggtataagcctttcatttgttcaatggatgatgtttcagattttttttttttaaaanatccttcaaggaacacagnncanagagattttcatcgggngcattctctctgcttcgngtgtgacaagttatcttggctgctgaaaaanagtgccctgccccacaccggcanacctttccttcacctcatcagtatgattcagtttctcttatcaattggactctcccaggttccacanaacagtaatattttttgaacaataggtacaatanaaggtcttctgtcatttaacctggtaaaggcagggctggagggggaaaataaatcattaagcccttgagtaacggcagaatatatggctgtanatccatttttaatggttcatttcctttatgggcatataactgcncagctgaanatgaaaggggaaaataaatgaaaattttacttttcgatgccaatgatacattgcnctaaactgatggaanaagtntccaaagtactgnataacatcttgttattatttaatggtttctaaanaaaaaaggtanggggtttccaaagggcctataaaacattnttgtaataaaacctggtnntacc

SEQ ID NO: 11055 - DNA, 718 bp, Homo sapiens
  misc_feature 5, 7, 12, 34, 177, 630, 647, 674, 705, 713: n = A,T,C or G
acagnanggggnaaaagatcctcaggagcacagnaatatgccctgatggaaagtttgccccttgggcaaagagacagccatgggaaccttcagacatagagagagaaggtggcttttctccctacattcctcaaatagctaagatttggccagtgtgttttctaagtcaattctagngtgtttcatcctcacctcttccctctgtggctttgatgatggaagtgtagtcctaacctactgcacagctgggaccccctgcccctagatcccaatactggggatgggaggaccttgcactattcccctcagtccatctatcgaggtctttgcaggaagcatactgggaattgaaacgagagcctaaatgacatctaagaaaggcagtgttcaataccaggtattaggtgaggatgggattctaaggacatcagtgggaggcagggagccaccttcagacctcagcatggaagcttccaagatccagggggaagaggcaacagcactgagagtcataggtagaagaatcatcacagccctgctaaccaggcagctgatgcccctctcccctggctccctgtgtccaaatcctacaggggcatctgttggctgaactcaacctgaagccaaganaaaatgagtggaaagangcacatttatagagctcaggtttctanggctggagaggatctggagggaccacagganaccctgcntaacc

SEQ ID NO: 11056 - DNA, 661 bp, Homo sapiens
  misc_feature 552, 582, 610, 640, 650, 653, 654, 657, 658, 659, 660, 661: n = A,T,C or G
ggggaatcaggaaacaaatcaacaatcaactggaattacaaccaaatctatgtacttctgttgtgagatctttttacttgcaatcctttgcaaaacgtgctgtgcacaatgtagtaagtatgcttgtaataaacaattaaaggagcttttcacgtgtagaagtgcacgcttaatttttgttaaatcatctcaataaatacttataagtgaagccaacatgattttcttaagttttttgaaaatgtgtgtacctataactgctgtgctatttgcaagaggcagtatacacacaaatttgatgatttcattctttaccaaatactatatttagcacattaaatactaagaaatagcactaaaatgggccgggcctggtggctcatgcctgtaatcccagcactttgggaggccgtggcagacggatcacttgaggtccagagtttgagaccaacctggccaacatggtgaaaccccgtctctactaaaaatacaaaaattgctggcctgggtggtggatgcctgtaatcccagctactcgagaagcttgggcangagaatcacttgaactcaggaggcggaggntgcagtgagctgaaatgtacactgcctncagcctgggcataaagcgaactcacctcanaaaaaaaaanaannccnnnnn

SEQ ID NO: 11057 - DNA, 361 bp, Homo sapiens
  misc_feature 1, 14, 16, 18, 25, 53, 59, 65, 75, 77, 79, 84, 88, 92, 105,107, 108, 114, 124, 132, 161, 164, 183, 186, 187, 191, 197,202, 225, 234, 235, 238, 240, 243, 261, 271, 279, 280, 286,290, 313, 315, 318, 335, 340, 342: n = A,T,C or G
ngacaacagaacgntncngctgtgngaacacctgtaatggttccgctgctaanatacanctgacnggtgcggttntnanaaaantacncaangttaccgctgctncnnatcaantgcttaggtncttgcttntacattaccacaccattgtccattttgcnagnaccctacagaccggtcctnggnncganatgacnacacnaatggtgcctttttcaaaaactnactactccnntgngngtncccaagccaggccctatngttctccccntagaggcnnactacntggnctacctgtcttactacaagtcananctntctgtgctacagacgantccangnctaatctcccactttacaa

SEQ ID NO: 11058 - DNA, 87 bp, Homo sapiens
aaagaactaacagatctagtgtttggtagcattttagagggaaaaaaggccatagctcaaatattgctctgatttcagttggctgaa

SEQ ID NO: 11059 - DNA, 781 bp, Homo sapiens
  misc_feature 1, 12, 28, 521, 540, 617, 632, 646, 655, 688, 727, 730, 762,778: n = A,T,C or G
ngggacacaggnaagggccctgacaagnaggatgggactgcagttgtggctgccaggttggagtgcagtggcacgatctcggctcagtgcaacctccgcctcctgagttcaagtgattctcctgcctcagcctccctagtagctgggattacaggacaaggagagggacaaattccttcttggcatccttatggccctgtgacctgctaataaatgctgactctgagttgctactagaatttggtttccttgtggcttcccaggaattggtctcactctgctcactctgtctcccaagctggagtgcagtggtacagtcacggctcactgcagcctccacttcctggactcaagtgatcttctcacttcagccttctgagtagctgggactacagccccctctgcagctcttcatgggggtccactcaagtcagaagccacatctgggtgtgattcagagagctgtttatgcaaaaccagccttgtcaccatcaggcaaggcacctgaattcccaccgcanagagtgctgtggccctgangacttttctgtcaccagccatttccaggtagacccagtgtaatcacaagcatccttgtaagtggcaaagaggcagangagacagcgccaganagcagctgcatganaagatcaanatgttgcttacttttaagttggaaaaaaaggcntgaacctcatatgtgggcggttctaaaactggagggcanganatgatttgaccttcacctcaggggcagctgtnctgcctactgatgganccg

SEQ ID NO: 11060 - DNA, 703 bp, Homo sapiens
  misc_feature 1, 2, 9, 515, 531, 547, 605, 620, 632, 644, 645, 652, 659,668, 670, 673, 676, 686, 687, 690, 696, 697, 698, 701: n = A,T,C or G
nncgacagnaaggggacgtgatccgcttctgctccggcttggattgtagccttgacgaggtctgagcgaccatggaccggccggggttcgtggcagcgctggtgctgctgcattttttatcacctatgaatatgtgaagtggtttttgcatgctgattcatcttcatatttgacacctatgaaacatatgttggctgcctctgctggagaagtggttgcctgcctgattcgagttccatctgaagtggttaagcagagggcacaggtatctgcttctacaagaacatttcagattttctctaacatcttatatgaagagggtatccaagggttgtatcgaggctataaaagcacagttttaagagagattcctttttctttggtccagcttcccttatgggagtccttaaaagccctctggtcctggaggcaggatcatgtggtggattcttggcagtcagcagtctgtggagcttttgcaggtggatttgccgctgcagtcaccacccctctanacgtggcgaaaacaanaattatgctggcaaangctggctccagcactgctgatgggaatgtgctctctgtcctgcatggggtctggcggncacaggggctggcangattatttgcangtgtcttccctnnatggcanccatcanctgggaggntnatnttntggggctatnnccnaccccnnntgntg

SEQ ID NO: 11061 - DNA, 513 bp, Homo sapiens
  misc_feature 481: n = A,T,C or G
tggtctgtcaatgtctgtgggaggaagaagtggctcctcttccccccagggcaggaagaggccctgcggaccgccacggcaacctgccctacgacgtgacctccccagcactctgcgacacacacctgcacccacggaaccagcttgctggcccacccttggagatcacgcaggaagcgggcgagatggtgtttgtgcccagtggctggcaccaccaggtcgacaacctggatgacaccatctccatcaaccacaactgggtcaatggcttcaacctggccaacatgtggcgcttcttgcagcaggagctatgcgccgtgcaggaggaggtcagcgagtggagggactccatgcccgactggcaccaccactgccaggtcatcatgaggtcctgctcgggcatcaactttgaagagttttaccacttcctcaaggtcatcgctgagaagaggctcctggtcctgagggaggcagccgctgnagacggtgctgggttgggtttcgaacaggcag

SEQ ID NO: 11062 - DNA, 526 bp, Homo sapiens
  misc_feature 141: n = A,T,C or G
tccaccgcggtggcggccgctctagactagtggatcccccgggctgcaggaattcggcacgagacctcgactcttagcttgtcggggacggtaaccgggacccggtgtctgctcctgtcgccttcgcctcctaatccctanccactatgcgtgagtgcatctccatccacgttggccaggctggtgtccagattggcaatgcctgctgggagctctactgcctggaacacggcatccagcccgatggccagatgccaagtgacaagaccattgggggaggagatgactccttcaacaccttcttcagtgagacgggcgctggcaagcacgtgccccgggctgtgtttgtagacttggaacccacagtcattgatgaagttcgcactggcacctaccgccagctcttccaccctgagcagctcatcacaggcaaggaagatgctgccaataactatgcccgagggcactacaccattggcaaggagatcattgaccttgtgttggaccgaattcgcaagctggctga

SEQ ID NO: 11063 - DNA, 629 bp, Homo sapiens
tcggcacgagctggtctgctaggcatgtgtgaaatccgctttgtggctctctgtgatttgttccgcttaacgtttttatttgtcttatttacacatgccaaggtggcaacgtgaaaaatgtctctgacgctattttccgactgtaaagctgagcattcgatataagtagctgctccaatctgtttggccatatttgccccctggtcataggacactggcgtctgcctgtgattggagagctctactaatgtactaacatctgtccgcagatcagacttgcagccgaccaagagcattttggtatttggacaaaattcctggatttcacctttccactttttgaggacactgtccagggtctctggtctactgatgtcaaagcaaatcagcacagcatccgaatcagggtaagagagggggcggacattgtcatagtaaggagaacccgaagtgtcccacaggctcaactctattctttgtgtgtcgatttcaaaactggccgtgtaattctcaaacactgtaggaacgtaattctcggggaagcagtccttggcgaagacatggagcagcgcagtttttccacactgactgtctcccaccacaactatcttgcatttcacgttctgatt

SEQ ID NO: 11064 - DNA, 608 bp, Homo sapiens
ttcggcacgagggctgccgcccgccggtgtccgcccgtgtcgcgccggggcaccaaggagccgttggagggtccgggcggaggcccgctcgtgtggaagtcgtcgacgccgccgctcgtccgtcctcccgtccgttctcgctcccggccgccatcatgctggcgctcatctcccgcctgctggactggttccgttcgctcttctggaaggaagagatggagctgacgctcgtggggctgcagtactcgggcaagaccaccttcgtcaatgtcatcgcgtcaggtcaattcagtgaagatatgatacccacagtgggcttcaacatgaggaaggtaactaaaggtaacgtcacaataaagatctgggacataggaggacaaccccgatttcgaagcatgtgggagcggtattgcagaggagtcaatgctattgtttacatgatagatgctgcagatcgtgaaaagatagaagcttcccgaaatgagctacataatcttctagataaaccacagttacaaggaattccagtgctagtgcttggaaacagagagatcttcctaatgccttggatgagaaacagctaattgaaaaaatgaatctgtctgcta

SEQ ID NO: 11065 - DNA, 898 bp, Homo sapiens
  misc_feature 732, 733, 822, 895, 896: n = A,T,C or G
tgcatgtagctgaccagcctaccagatcttttatgcagttcgacatacaaggtgacaccaaggtaagacaaatgaagttccagtttgggtttggtgtaaattctcactagtttcagatagtcccagatcttttccaataggtcatcaaaattccagcggtgatgggcagagatgggtacacagtgaggcaccttatagatgatatccaattcctcaatggagatttggtcaatcttatttaacacatagatacaggggatataaactctgtttccttccaccacatcaatgaggtcatcagctgtagcatcactacgtagagtcacatcggcattatgaatctttgattcagccagaatgctcctcacaagttcagcatccagctcactctggggggcagtggctgtgagattaatgcctcccttgtccttctttctaaagcccaatgttggggggtttgctgttcaagcgaatgccaaagccttccagctcattttcaattatcttcttatgtcccaaaggtttcaggacatccagaacaatcaagatcaagttacaggttcgggccactgcaatgacttgacgacctctacctttcccatccttggcaccttcaatgataccctggagatccaggagctggatctttgcacctttgtatctgatgacaccaggcacagtggtcagagtagtgaattcataggctgccacctcagaatataccccctgcanngttacctagcagtgttgacttccccacagatggaaaaccaacaaatccatttcgagcattcactgtcttggccacatcaaaaccttctnctgggactccaccaccaccaaccctttgaaggtatgagtctcgacgaagcttaacaagacgagccttaagcanncc

SEQ ID NO: 11066 - DNA, 259 bp, Homo sapiens
tctttttgtttcccaacactcaaagctccactctttccctagaaatctgaacacaccatttccagaggggttaccttgttggcacaaactacaaatataatattttccatgtttccatgaggtccaagctcttgcttcatttctgccagccacgcatcaagggcgtcaaaggagtctttctgcccaacatcatagaccagtatcacaccctgtgtgtccttgtaaaactcatttcgaaccttcaaataaaaggacagat

SEQ ID NO: 11067 - DNA, 398 bp, Homo sapiens
cggcacgaggcccaaccccagccgctcggaggccccaaaggaaaaagcacaagaagcgtgagacgccaccattcctggaaaccacagtccacctgctcattctcgtagctttttaaaaaaatgaaagtaaaggaaaaaaaaaaaactgcaaatctaaaaaactttttaaaaaaaaactatttaaaactgtcaaatcctgaccagcaagcccccccccagccccacttccaagtgactccgtgccttgagtgtgtctgcgtgtttacacccgtccctttgctggccgcccccgtgcaagcggcacccctgccctgccctccacaaaattgggttccaagggctgttccaaacaactgccaacgtcactgagggccctgccccagcggccctggccccag

SEQ ID NO: 11068 - DNA, 809 bp, Homo sapiens
  misc_feature 8, 9, 10, 22, 30, 34, 36, 37, 44, 53, 55, 57, 58, 66, 68,87, 88, 99, 618, 709, 719, 731, 733, 756, 764, 766, 768,773, 775, 777, 780, 789, 803, 805, 806, 807, 808: n = A,T,C or G
acgatacnnncttgtcttgttncttttggnccgnanncggcctncggctgcgnanannacgacagnanggggcggctcgggccctgnngtttattcagnaaaacatgtccactgcaattagggaggtaggagtttggagacagaccagaacacttctactgaagaattacttaattaaatgcagaaccaaaaagagtagtgttcaggaaattctttttccactattttttttattttggttaatattaattagcatgatgcatccaaataagaaatatgaagaagtgcctaatatagaactcaatcctatggacaagtttactctttctaatctaattcttggatatactccagtgactaatattacaagcagcatcatgcagaaagtgtctactgatcatctacctgatgtcataattactgaagaatatacaaatgaaaaagaaatgttaacatccagtctctctaagccgagcaactttgtaggtgtggttttcaaagactccatgtcctatgaacttcgtttttttcctgatatgattccagtatcttctatttatatggattcaagagctggctgttcaaaatcatgtgaggctgctcagtactggtcctcangtttcacagttttacaagcatccatagatgctgccattatacagttgaaaaccaatgtttctctttggaagagctggagtcactaagctgntttatggganaaactgctgtgnanaatagatcctttcccgagagtantttaaatncnantatancntntcncctttggtncttttggcattctntnnnnc

SEQ ID NO: 11069 - DNA, 578 bp, Homo sapiens
  misc_feature 577, 578: n = A,T,C or G
ggcacgagtatcagacaatattttattattttttcatagatgttctgccacacaaagaacttggggtgtaaggataaggcaaaagctccaatcccatttttcagttctcctaggatgcacccctcagggagcctggccagagttccgaggcccgtgagcgtcagctgttgctttattttccatcaaagccctctgagaagtgagacctcagcaattccgggagccacatagagacagacttggcaagggaccccctggttctgagccagtagctgccatctggaaattcctcttttagcctctccttagaggtgaatgtgaatgaagcctcccaggcacccgctgaatttctgaggccttgcttaaagctcagaagtggtttaggcatttggaaaatctggttcacatcataaagaacttgatttgaaatgttttctatagaaacaagtgctaagtgtaccgtattatacttgatgttggtcatttctcagtcctatttctcagttctattattttagaacctagtcagttctttaagattataactggtcctacattaaaataatgcttctcgaann

SEQ ID NO: 11070 - DNA, 613 bp, Homo sapiens
  misc_feature 1, 9, 556, 558, 593, 600: n = A,T,C or G
ntagacagnaaggggttgcgtcccatatctggcacccaggaaggacttccctgctcggctggctctcggtttctctgctttcctccggagaaataacagcgtcttccgcgccgcgcatggagcctcccggccgccgcgagtgtccctttccttcctggcgctttcctgggttgcttctggcggccatggtgttgctgctgtactccttctccgatgcctgtgaggagccaccaacatttgaagctatggagctcattggtaaaccaaaaccctactatgagattggtgaacgagtagattataagtgtaaaaaaggatacttctatatacctcctcttgccacccatactatttgtgatcggaatcatacatggctacctgtctcagatgacgcctgttatagagaaacatgtccatatatacgggatcctttaaatggccaagcagtccctgcaaatgggacttacgagtttggttatcagatgcactttatttgtaatgagggttattacttaattggtgaagaaattctatattgtgaacttaaaggatcagnancaatttggagcggtaagcccccaatatgtgaaaangttttgngtacaccacctcc

SEQ ID NO: 11071 - DNA, 536 bp, Homo sapiens
agaggagtctcagaaaggacacggctggctgcttttctcagcgccgaagccgcgccatgctcgtcctcagaagcgccctgactcgggcgctggcctcacggacgctggcgcctcagatgtgctcatcttttgctacgggacccagacaatacgatggaatattctatgaatttcgttcttattaccttaagccctcaaagatgaatgagttcctggaaaattttgagaaaaacgctcatcttcggacagctcactctgaattggttggatactggagtgtagaatttggaggcagaatgaatacagtgtttcatatttggaagtatgataattttgctcatcgaactgaagttcggaaagccttggccaaagataaggaatggcaagaacaattcctcattccaaatttggctctcattgataaacaagagagtgagattacttatctggtaccatggtgcaaattagaaaaacctccaaaagaaggagtctatgaactggccacttttcagatgaaacctggtgggccagctctg

SEQ ID NO: 11072 - DNA, 300 bp, Homo sapiens
gcaccagcaggtagtggcccctgtaagcagggccagagtcgggacaaagagcaggagtgaagcagccaagagacagaggaccaggctggagccagtgggcacgcaggagcctgcctgggaaaagccggggggcaaggctggcatgggaatgaacacctgctggtgacacctctctgagcttcagttcccttaactagaaaaatagaacaggcccggtgcggtggctcatacctgtaatcccagcactttgggaggctgaggcgggtggatcatgaggtcaggagatcaagaccaccctgg

SEQ ID NO: 11073 - DNA, 760 bp, Homo sapiens
  misc_feature 1, 8, 10, 48, 653, 675, 681, 698, 705, 723, 724, 725, 728,731, 737, 739, 748: n = A,T,C or G
nagacagnangggggttctgtatatgaaggtggtgtgttttttctggnatatcacattttcatcagattatccatttaagccaccaaaggttactttccgcaccagaatctatcactgcaacatcaacagtcagggagtcatctgtctggacatccttaaagacaactggagtcccgctttgactatttcaaaggttttgctgtctatttgttcccttttgacagactgcaaccctgcggatcctctggttggaagcatagccactcagtatttgaccaacagagcagaacacgacaggatagccagacagtggaccaagagatacgcaacataattcacataatttgtatgcagtgtgaaggagcagaaggcatcttctcactgtgctgcaaatctttatagcctttacaatacggacttctgtgtatatgttatactgattctactctgcttttatcctttggagcctgggagactccccaaaaaggtaaatgctatcaagagtagaactttgtagctgtagattagttatgtttaaaacgcctacttgcaagtcttgcttctttcggatatcaaaatgtattttgtgatgtactaaggatactggtcctgagtctaccaatattatagtgcattttagcctaattcattntctgtatgaagtataaaagtanctgtanatggctaggaattatgnctttgtntaaaccaatcttttctgnnntgnggntatgcngngggaaaagntttacctttact

SEQ ID NO: 11074 - DNA, 777 bp, Homo sapiens
  misc_feature 11, 13, 15, 16, 39, 50, 666, 671, 677, 719: n = A,T,C or G
gttctaatgcntngnntcatcctttcttcaaatgctgtngttcttttgcngatccctcgattcgaattcggcacgagaccctctctggccacatggaggcagtttcctcagttctgtggtcagatgctgaagaaatctgcagtgcatcttgggaccatacaattagagtgtgggatgttgagtctggcagtcttaagtcaactttgacaggaaataaagtgtttaattgtatttcctattctccactttgtaaacgtttagcatctggaagcacagataggcatatcagactgtgggatccccgaactaaagatggttctttggtgtcgctgtccctaacgtcacatactggttgggtgacatcagtaaaatggtctcctacccatgaacagcagctgatttcaggatctttagataacattgttaagctgtgggatacaagaagttgtaaggctcctctctatgatctggctgctcatgaagacaaagttctgagtgtagactggacagacacagggctacttctgagtggaggagcagaccaataaattgtattcctacagatattcacctaccacttcccatgttggggcatgaaaagtgaacaataatttgactatagagattatttctgtaaatgaaattggtaagagaaccatgaaattncatangatgcngatgcagaaagcaacctttttgaaagtttatataatggtttnacccttcataaccagcttaacctttcactttttcttattttggatttataaataagaa

SEQ ID NO: 11075 - DNA, 845 bp, Homo sapiens
  misc_feature 2, 5, 9, 14, 21, 22, 33, 44, 53, 63, 66, 74, 76, 718, 721,740, 742, 748, 753, 755, 773, 781, 807, 815, 827, 829, 830: n = A,T,C or G
antanttgnccttncgataanncttgtttgttncttttggccgnagcggcctncggctgcganagnacgacagnanggggcttttggttcttacagtagtcggcgtaggccttaggtgggttcgtgcgccttctacctcgctgtttcggttttcctggctcctcggcccttttctcccctgttgcagctgggagcggacgaagcgcgaagctgggattttttactgtctcctgaagaatttaacacaaacatggatatcagaccaaatcatacaatttatatcaacaatatgaatgacaaaattaaaaaggaagaattgaagagatccctatatgccctgttttctcagtttggtcatgtggtggacattgtggctttaaagaccatgaagatgagggggcaggcctttgtcatatttaaggaactgggctcatccacaaatgccttgagacggctacaaggatttccattttatggtaaaccaatgcgaatacagtatgcaaaaacagattcggatataatatcaaaaatgcgtggaacttttgctgacaaagaaaagaaaaaagaaaagaaaaaagccaaaactgtggaacagactgcaacaaccacaacaaaagcctggccagggaactccaaattcagctaatacccaaggaaattcacacaaatcctcagtccctgatacccctccaactttttttattcttattactaccanaanaactatgagatgatgtttncntgctgntaaanantccctggcttaaggaagncctctggnccagggagcatgactttttttgtganttaaaaanatggcagctgancnncaggtccttacaggt

SEQ ID NO: 11076 - DNA, 396 bp, Homo sapiens
tgacactatagaacaagtttgtacaaaaaagcaggctggtaccggtccggaattcccgggatatcgtcgacccacgcgtccggggccatggtggcgctgaagggtgtccccgcactgctgtcccccgagctgctctacgcgctggcgcggatggggcacggggacgagatcgttcttgcggacttgaacttcccggcctcctccatctgccagtgtgggcccatggagatccgtgcagacggcctgggcatcccgcagctcctggaggccgtgctgaagctgctgcccctggacacctatgtggagagtccggctgcagtcatggagctggtgcccagcgacaaggagaggggcctgcagaccccagtgtggacggagtacgagtccatcctacgc

SEQ ID NO: 11077 - DNA, 489 bp, Homo sapiens
tttgtacaaaaaacaggctggtaccggtccggaattcccgggatatcgtcgacccacgcgtccgtgaagtagtacccaattttaccgtctttcatataaatacttgaatctatctttttctatatggtgatgtctcagcatcatttaatgaagactctcattctttgcccagtgatttgtgatgttatctctgtcatattccacatttacatatctaagtggttttattcgtacgctctctattccctgtggcaatatcacattgtttagtatagttttacatgataatgtagtatcaatattcaaaaggataaccaccctgcttttttcttttcctccttctctgcctccttctcctccttcttctttgcaattgtctagcctattcttgaatttttattctttcatatgcatttaagaatcatcttgtcaagttcttcgaaaaaccctactgaaatttttattgaaattgtattgaatttatatgtg

SEQ ID NO: 11078 - DNA, 518 bp, Homo sapiens
  misc_feature 357, 472: n = A,T,C or G
tttgtacaaaaaacaggctggtaccggtccggaattcccgggatatcgtcgacccacgcgtccgcccacgcgtccgaccatatcacctcacatagttttactctttgattatcacacccacctccctcctgcacaccaccacttaccaggttgtctaactccatacaaccactactctgttttccatttataaaattttatcttgccaggcaaaagcctgtaatcccagcactttgggagatggagacaggcggatctcttgaggccaggagttcaagaccagcctggccaacatggcaaaaccctgtctctacaaaaaaatagcttggtgtgatggcacatggtctgtaatcttanctactcaggagactgaggcacgagaattacttgaacctgggagatggaggttgcagtgagccgagatggtgccactgcactccagcctgggtgagagagcaagactctgtcttanaaataaataaataaaataaacaaacaaataaataaaattttatctc

SEQ ID NO: 11079 - DNA, 516 bp, Homo sapiens
  misc_feature 514: n = A,T,C or G
agaaaaaaaaacttctttaatgggaaattttacgattgaaatgatgtttcatcttatagaccacaaacaaatgtttttagacattgaaaagtggttaaagaccaactgcgcccagtcccccaagtgccattttctgagtgcagaatggagggtgacgtcttgagctgatgctgtgtccccagcatcaggttttctgttttccctcttctccctttattccttccttgtccattgccctcaaccttctttttctgtttgctctggcctggttcagtataacatatccatgaactctaatattggccctggtccaggagctgtcctgccatggctagctcacggcttgacagcaatacttcttctccttctccgcccagcatagacttggtcacctttgtctcctttttctcccttgtgtcctcgagggccaggtggcccaggatgacctggtggcccagcagggcccctgtcacctttgggtcctggagtgcccatctctccttttgccccaggngt

SEQ ID NO: 11080 - DNA, 595 bp, Homo sapiens
  misc_feature 409, 456, 483, 508, 525, 581: n = A,T,C or G
aactgatgactctgctgtcttccctccaagggaaaggaaagagaacttactgaatagcaccgttcttctatatgtgattgtcaagtaggacttctgtaatcatactgaaggtaatacattgtaatcatgctgaaggtaatcatctttgccccagctttggatggtgtttctcacccaggctccttcaccaggcgtggttcatgcagacagccatgcagcagtaagcctttcaagggtcaggccctttgttaaatgctcgctgaccagcctgcatggtgcaggaggctggctcacagaaaccgggaagcccaggaggtcccgggggtccaggcactccaggaattcctgccacccctggggggcctcgctcaccgtctcggccatttctgccatagctggcagggcctgngtcacctgggagacctatagctccaggcaaaccgttgggacctcttnctggagggccacgctcccccttttctnccaagtcacctttaggtcccctcanaccaagagcaccagggngccccttaatgccccggaggccacgaattccatctggcctgggaaccattctctcncagagggccggggg

SEQ ID NO: 11081 - DNA, 631 bp, Homo sapiens
gtttgtacaaaaaagcaggctggtaccggtccggaattcccgggatatcgtcgacccacgcgtccgcggttccttttccttgaggcagtagacttttctcccaagaacagcaggagaagccttgccagagcacatagcgtttgagttaattgagaaaagaaaagagttctctagacagagaaggagggacgaacattatagacagaacagcagagtgaagcctggaagttcaagatcgtgtgcccaaaatgtgaggatttgaggcagaatatatcagatgagaatggtaaaggaagtgaccatcctgatatattctgtaatggctgaatcggagtgactacttagaagggaattacagggctaggcatggtggctcacacctgtaatctcagcactttgggaggctgaggagagaggatactttgcggccaagagtttgagacaagtctaggcaacatggcaaaaccccgtctctgctaaaaatacaaaaatcagccgggcgtggtggcgcatacctgtaatcccagctacttgggaggctgaggcaggagaattgcttgaacccgggaggcagaggttgcagtgagctgagatggtgcccagtctgggcgataaagcgaaattccatctc

SEQ ID NO: 11082 - DNA, 463 bp, Homo sapiens
  misc_feature 293, 391, 392: n = A,T,C or G
tactttttatttttattttgggggcttttaacataaaaatacagatgctcccgtcagagtaaggcatcgcaaccttcagttcttccgcagcaccgggagtcgagggggaggcatggagcgcgggaaaaggaatcgagcgagggaaagggatggagcgtgcggcgcccccaccacctcggagccagcggagggcggagggcggcgcaaaagccgctggttggggtggcgagggaggggagacccgggagccgagggtaggttcctgccggtgtttgggtgccacggcgcgcggngctagagcgcagtgtcaggcgcgaggtcctgcagcgccccctcgcgggaatagaactcgtcgatcaccgcctgcggaatgcgcttcagcatctcttgnngggaggatgcgcagcagcttccagcccaagtccagcgactcgacacgttgctgttcttgtatgtgcctgat

SEQ ID NO: 11083 - DNA, 698 bp, Homo sapiens
  misc_feature 387, 476, 535, 625, 659: n = A,T,C or G
atctctgcagtttataatactctacgtatatgaatttaaagcagttaaacaacatttgagattaaattggtaaaaaaaaaattgtaattgaattcagacttcagaaaattgtgaagtaaaaggccatgatggagaaatattaagaatctgtagaattactaaactgtcacagtattattttcctttacaaaagcatctcagtaaaacaaaaactacagaaaacgcaaagtaaaatcagagattttggtttagtactttccctgagtctcttgttttaaaaatcaaagtaaggccagttcaaaattgacccacaggtcttgcctcctccatgctgccatggggagtacatttaagacaagaggctacgcatgttgaggtggtcccagngctttattcaaatgccaatttgcccgtgtcactgccacagggttatctgacccactgctgcatgtgggcttaaagagctgtcaaaattntatcttggcctgctataatataatatgcgagactatataccacaagaagacaaacagtntcacgtattaataaatattacatttctaaatggatctcgacactatatacatcacaatattgtaacataacagaagctacacttttatgnttaaaattcttacataaacacaggttcgcgtcangtcatcttaaactctaatctacatgttacagataaactc

SEQ ID NO: 11084 - DNA, 567 bp, Homo sapiens
  misc_feature 541, 560: n = A,T,C or G
tttgcgtctctgaaaattttaatttgttctgacaacgaaactaacacagcataaggacttaagccctcaagctaggcaagacactgatggcccttggaggacctcggggctgagccacggcagaaccttgacactgtacttgggaaaatcgtggaccactcgctgccgctgcccatggcttatcatgctgaggttgctgcgcaaaccagacaggtagaccttcccatccacagagatcaggatgtggctggctttgacactcctgtgtacatatcccatgtggtggatgtagtcgagggccttcagcaccccctgcaggatgtaagcaatcgccagctcattcatgccatccatgaagtgtgtacagatgagatcttttgcagaaccgtatgccatgaatgatgtgacaacccacagctcattgtctgcaattaaagtggctcgatatggcacgatattgggatggttgagagtttggaacatgcagctcgccctgcaagatgttaccatctcattggaacaagcttctaagttaattctncgtacaggcacgtactctncgtgtgg

SEQ ID NO: 11085 - DNA, 451 bp, Homo sapiens
ctccaataagacacagtagagtctctagccaaagtgattgaggtcccttcatctctgctgtttgttcaatgtaaattagccatcatcctccctgtttgtttttctcatcttcccacatgggctcaacaccatccttaaaaagtgagtagtcacagccagacattaaattactagacaactggatatggttgtacagagcccaaaagtcaacaggatcaaacttagagatcagcggcaggtttgcttgtcaagttttgcttttatcttttttaaaaaaaccagagtgcccatctgttctgtagaggatgtttaatatagtgttctgggttagcaacctcctgattagattctgttttctcctcttcacagggggattaggagtaggggtggtttctggtttgacagtccgccgtcttacatcgatctgctcctgcttttaactctgctcttg

SEQ ID NO: 11086 - DNA, 152 bp, Homo sapiens
  misc_feature 39, 78, 87, 101, 105, 116, 118, 119, 122, 123, 124, 132,135, 141, 142, 143, 150: n = A,T,C or G
gggatctcttccaaaggctcactctcaagcacgactaanagccttctgagcccagcgacttctgaagggccccttgcnaagtaatanggcttctgcctaancctntccctccaccntnngcnnntttcttanctntcctannngccttgncc

SEQ ID NO: 11087 - DNA, 788 bp, Homo sapiens
  misc_feature 10, 626, 687, 719, 758, 761, 769, 770, 774, 780: n = A,T,C or G
aaaaccaagnatatcttacttctctacctacaaccttctttgcataaaatgatctaatgcaatccatgtaaaatgatatcaactatagaataagccagccaattttggaataaggagaggtattaaaatagattgctttgatttaagtctcctgaacggtaggttacattgaggctctcgtcggagcactggccagccggctttccccttcattccatgtgttgtaatgtgttaatatgcccagctgacgtttttgtctgtttcttagtttgacatcaacaacaagatcgagttctgacgctctgcaggggcgatacgcagctcctgaattggaggtaagttcatttccttttcctgtcctgcttcatctcagaagatccatttctcaggagggccttttgtgtttgtgtctttatcagtctgcattccgtgatcctgtttttctgctgaggaaagatttttgtatagaaaaataaatgctggccgggtgtggtggctcacgcctgtaatcccagcactttgggagtccgaggcgggtggatcacctgaggtcaggagttcaagaccagcctggccaacatggtgaaccccatctctactaaaatccaaaattagccaggcatggntgctccacctgtagtcccagctcttggaggctgagacccagaatacttgaacctggggcanagttgcagtgagccaagtctacactgcctcanctggcataagtgccttgctcaaaaaaaaaaacccgggcnttncctaaccnntaanacttgngtgccccc

SEQ ID NO: 11088 - DNA, 712 bp, Homo sapiens
  misc_feature 577: n = A,T,C or G
ggggggcacaacccatttggggtaccctcaccccaaaataaaagcccaagtctacctttgactggtaccaccttttttgtggtttcgttggtgagaaacctttatctttttcatacctttctattctcaatcacttctccaaaagtgtgtctttccagctctgatttactcaaaacacaagcatttctgtttagagattctagcccatgggttatctggctagttattacctctcctgttcacttagttatactttattattgctcacaggctggggaggcagaatgactctgtcaccactaggagccattagggcttcttccctggaggactgcctgcttgctttctggggacactagccctcatttcccttcttggtacagtggggcaaattatttgtattaagcaaacttttatgggaaacaacccgctcccgaaaacggagcccccaagtaaagcacaaccctgaaagattatgaactatgaattgtctctagtagagataaatttctgcaaacatatctcagtcttccctctgtttctctggtgattaagaagttcctttttggtaggaaangattttaaccatagagtaggcatcatggaattcaaccagattctaatacctggtcttctcaagagaatatacagtatagtgggctggacatatggcgatattgatgaattgatactgataaagctggaatttctc

SEQ ID NO: 11089 - DNA, 794 bp, Homo sapiens
  misc_feature 554, 578, 594, 655, 695, 731, 739, 743, 755, 766, 772, 785,787, 789: n = A,T,C or G
acgacagagggatacattgaacatgtattgagagcctaccactgtacttagtgctgggggttggggtggcaaaaaaataagaattagtctcttccctctagaaagaaacttagagtctaataaagaaagatggaaaaataagatgttccatccttgttgtagagttgtagaagtctctgttgggtacatgggtaacaaatgtgaaaaaatataattctgaggaagggagatacaagaaagctttcatttaaggtagttgacacctaagtcttgctctgtggttgacgggtaacaggtgtaagttgttcaagccagagattactagtttggcttcagaagacatttgtcaaggtagaagagtacaatttagaatctgtgtattcatgataataaaagctctggggaaaatggggacaaataaaaaatagaatcctaacagatactactgggtagagcaagaacatatggacagaaagataatgttggcagtctttggatatgtaatctatttaaaaatacaccttctaagtaagtgtcttatagaaaagatagangctgggtgtgatggctcatgccancaatcccagcactttnggaggcagaagcaggaggatcacttgagctcaggagtccagacagcctggcacatacgatncccccctttcacaaaatccaaaattagctggcatggtacnccatgtccgtgttcagcttctcaggggctgacctgnaggatccntganccccgaagtganctctggagccngatccncctgcccccaccngngnaaaag

SEQ ID NO: 11090 - DNA, 926 bp, Homo sapiens
  misc_feature 1, 9, 29, 35, 36, 106, 116, 119, 125, 130, 138, 142, 145,148, 154, 156, 159, 162, 163, 164, 165, 166, 167, 168, 169,170, 171, 172, 173, 174, 175, 176, 177, 178, 179, 180, 181,182, 183, 184, 185, 186, 187, 188, 189, 190, 191, 192: n = A,T,C or G
  misc_feature 193, 194, 195, 196, 197, 198, 199, 200, 201, 202, 203, 204,205, 206, 207, 208, 209, 218, 239, 240, 241, 242, 253, 254,271, 286, 313, 382, 385, 389, 396, 399, 400, 411, 416, 422,427, 428, 436, 437, 439, 460, 471, 491, 495, 497, 499: n = A,T,C or G
  misc_feature 500, 504, 518, 519, 535, 538, 542, 544, 554, 555, 557, 561,563, 566, 567, 581, 584, 599, 601, 642, 657, 668, 669, 670,672, 675, 683, 690, 693, 699, 701, 703, 705, 709, 719, 721,722, 740, 774, 783, 787, 789, 792, 800, 811, 832, 837: n = A,T,C or G
  misc_feature 845, 863, 870, 873, 881, 893, 896, 899, 904, 916: n = A,T,C or G
nacgacagnagggtgcggttgcgagaaangcgacnntaagggtacggctgcatacaatacgacagcaagggtacggtgtgcgagcattacgacagtaagggtaccngctgcatacnagnacgacngtaanggtacggntgcnacnaantactanantgnggnnnnnnnnnnnnnnnnnnnnnnnnnnnnnnnnnnnnnnnnnnnnnnnntcatgggtnctgctgcagagaagactactnnnnggtacggctgnnacattactacagtatgngtactgctgcatagnagacgacttctagggtacggctcgcgngaacacgacattaagggtacggctgctattaagacgtacacaagggttcggctgcgaccaagactaccnatnggtnctgctgngannagacgacatangggtnctgctnccagnngactactnngnggtactgctgcgagatgactncatatgggttnggctgccataagactacacngggntncnnctgnctcagacgactganngggcctttttcacacnatngctncntgtgctaacnnanaagntnctnncccttctaacgctnaancctaagccattgctntncaggccctatcgtggtgttgaaggtggcacagccacacatnaagaaattccccgtntcccatcttgnnngncgngacctgcnactctgnacngtctantntntncganatgcttctcnanntcacctcgccctttcttnataagttccctgccctgatctgctgagagtttanaacaccctntttntntgnttttgcancccccattaangtttaaaactttacttttgcnggcancctgttcnctttgaaaaagcttttcntgctctntcncttgtttnccaatggtttantgnccnccttnattttttttttncaaaaaaaat

SEQ ID NO: 11091 - DNA, 831 bp, Homo sapiens
  misc_feature 635, 642, 657, 666, 671, 680, 709, 714, 731, 752, 757, 763,766, 770, 774, 801, 810, 811, 819, 821, 826, 828, 829, 830: n = A,T,C or G
gggaagctggaatggaaattggctggttgaaacctgtgataggttctcaatatccattggagaaggtggccgaggctcatgaaaatatcattcatggtagtggggctactggtaaaatgattcttctcttatgatgattaattctttcatggatttcctatgtaattagaggtactgtctttcccccagttgtacttaccctatcttttctttaattaacattcgattccatgagcttcttatgtgaaaaaataagatttttctttagagagcagaagcagaagagtaaaatttattgtatagctagcaatatttttttatgccatctgtctcaaatcaaagagtcatcatagtaggaaatagcatgttagttgtcatttggcatgagtgtgcattccagtaattcttaattgatatttgattaattccatacctttgattaaaacatgctagttcaaaataagactgctcagtttccaagggttttcaagcctacttacctttataaaggttctctagtctctgattagccatgactgtattggactttgaacattttctgaactaaaaacctctattctaaactaatctcatttggatgtgaagtcttttgtaaggcaagaataaatatatcnagacatntattagtttctcagnttttccaanattanaaattactnatattggtggctgccatgaccccttgtcnggganatgtacttatcttgatntctatctcaaagtatctcccntgatnatttcnatnatanagtncgtttctgcgggcaaatttgtatagcnccctggaannaaattttntntgttnannna

SEQ ID NO: 11092 - DNA, 732 bp, Homo sapiens
  misc_feature 607, 635, 670, 675, 706, 718, 730: n = A,T,C or G
gggaagattattccattttgttaagattaaaaatgagcagtcaaataattctttctctgagagaagagtgtatggtaggtccattgagggtgtctgttgtatcttaaaatctattcgaaatgtttgggtgaattattgtctaaattgacagatgattgcttttgagctaacaaaatatttctgttagcatagctaaagaatatatgttaaggaatatatgctctttgtaagttttgattgagtagataagatgatacagacacatgaatcaggaaacaaatcaacaatcaactggaattacaaccaaatctatgtacttctgttgtgagatctttttacttgcaatcctttgcaaaacgtgctgtgcacaatgtagtaagtatgcttgtaataaacaattaaaggagcttttcacgtgtagaagtgcacgcttaatttttgttaaatcatctcaataaatacttataagtgaagccaacatgattttcttaagttttttgaaaatgtgtgtacctataactgctgtgctatttgcaagaggcagtatacacacaaatttgatgatttcattctttaccaatactatatttagcacattaatactaanaaatagcactaaatgggccgggcctggnggctcatgcctgtatcccacactttgggaggccgnggcanaccgatccttgagggccagagttgagaccanctggcaaatggngaaaccccgctntc

SEQ ID NO: 11093 - DNA, 547 bp, Homo sapiens
tcagaaagtacctataaaaagtaaaagaccacattttagggggagaaatataaaattatggtgaaaggccacgctgtgaaaagtacttggtttacagtacctgcggtgttctccactggggcctgtccagagaggcagatgacactcacctcatcaactggcaatgaacagcagctgaaaagggtggctgctggactggggactgttcttactcctaagtgaaaccctaccttcctgatactcatggagaacactgcagttacgaacagaccaaaacaaggagctgcaaatgcagaactcactgggcaaaaactgacagatgataccaaagtcgtgaaagtatctcatctcaaaaaagataactacaatctcaaactttcaaaaaatgcagatcttgctcagaataaatcgtaacaatctcaaagtgcatttggatgcagaacgtatatttacgtatataagctctttcttgttctcgagtaagtccagggggaataactgtaggcattcctggaatcactgtcttctgttccattgtgtcatggtt

SEQ ID NO: 11094 - DNA, 364 bp, Homo sapiens
tggtacgcctgcaggtaccggtccggaattcccgggtcgactactactactaaattcgcggccgcgtcgacgatgtattaaggctgggcatggtgactcacgcctataaccccagctccttggaaggccaagacaggcagatcacttgagctcaggagttcgagaccagcctggccaacatggtgaagccctgtctccactacaaatacaaaaaattagctgagtgtgatggtgcacacctataatcccagctagtagggagactgaggcaggagaatcacttgaacatgggaggcagaagttgcagtgagccaaaattgtgccgctgcactccagcctgggtgacagagcgagactccgtctc

SEQ ID NO: 11095 - DNA, 776 bp, Homo sapiens
  misc_feature 556, 667, 670: n = A,T,C or G
ccctacaaaataatttattggaacacacagctacagcactctatgtacaagcacattgacgctcctgactatcctcaactaggggacccttttcttcccccttgccttgcggacctcttctatcaaatctttcaggtactggatctccttggccagggaatccgccctctcttttagagcctcgttcttcttttccagctctttgcactcaccagtaagagcctcctgctccgccctcttcttctggcggtacctagtggctgctgtcttgttttgctccatttttttcagcttcttatccagtttctcaccctttacttttgctgctaccatcttctctccaggaggatcgtaaggtttgggacgggcagacccacagagaacacctggagatgggaggctcctatttggagagcccctggtagaggggctgtgctgaggagaccccagataggactctgggctcatacagatgccactatcattatctgaaggggtgtcttcctcctttatgcactgagggatcatggcaacgtaagcagtgtagtctggcttnctatctccttcagtgatatccacttcactgcccagctctaaactaaaggaatgatctgtagtggaggacaggacccctgcggaaaggtgaagagggttgtagatggtgaanggngcaaacctgctcgggtttttgtaaactttctgggagatgccaatttgtgtcaccgtctggggggggctgctattagtctcctggacttaggggggcaagagatcac

SEQ ID NO: 11096 - DNA, 254 bp, Homo sapiens
tatgacgtcgcatgcacgcgtacgtaagcttggatcctctagagcggccgcctactactactaaattcgcggccgcgtcgacgtttaaatcatactgctaatttttgtaaaaatatttttgagaattccacagatgattttgtattaatattgaaaattggttgatctaactcacttattaacatgttcggggtgtgacctgactgtttatgggtaagatcatgatgcatgtttgcttgaaatgtcaccttact

SEQ ID NO: 11097 - DNA, 571 bp, Homo sapiens
  misc_feature 472, 506: n = A,T,C or G
cagcttattaaggtttttttaataaataaaataaacttaaataacaaaataataaagttcaaaaacaacttaaaatatagtttaatgctgtaaccataggaaaaaagcatgattatttgtgggaagaacattattaaaagccatattcccaaatacgaattatacaaagatagattatgttacttgaaaaaaacttaaagatttctcaattttactttgagaaattataaaatgttattttgtggcaagtaagatgaagtacagtattatcatcaatcactgttgctatcttatatacaagatttttggaaacatccttttagcaataccctttccacttgagcagcattagaaattttgttcttgttaataggtataagcatgttctaatcctgtacttttgttaaattatctattttattgactttcgtaatagatttttttgagaatattctttttttctgattagagntaaagtagattataatttttcactagaaagcatntaaaatgctgctcattttctatagtagtgtggcttgatatctgacaatcctgcagcagcctgtag

SEQ ID NO: 11098 - DNA, 864 bp, Homo sapiens
  misc_feature 3, 12, 26, 597, 646, 664, 674, 684, 754: n = A,T,C or G
ttntggttaaanaaagtttaatgagnctgtaaaataaatacacttccattaaatattaaataaattatttacaacttgaaaaaatactttttaccttcgtgcacctttatatacagaaatagcataaaaagtgacaattgaaagtttaaaaccatcataacaaaaagggtccattgtcttatgatccactggaaagaggaccgactcatcatttatggctatgacttggcagtgactccaatgtgatatcctgtaattttatcttcagttatgctatagcatgtacatttccattctcttgtcgaagtttctttcgttcctcagcttctccttcatatttcctgacgtattgtcttctaagctggactggtataacagcaacagctgtgaggatcacagcagacataaaggcagctatggctgctaatgcaatttttgataaactactgtcaatcatgctgtgagttttcatggacttttccccacaccgttcaccgaaatattcttgctgacatttgcatgttactgcttccaggtgctctatatatttgcattctccgtgaatgcagaaattttgaaattctgcattacatgganttttcttctttctggttcttctattttttccatttttgcctcccttttntctttcttttgggttatnctgaagtatnttcacttttncgtcttgttttggggggggcttaactacctgttcaactctgactgaatcatcgacaatataggccagggnatttgtgggttcgtatcatactctttctgagtagtatagtccgctcccgaggacggtcactactagaaggcattcacttacaggggaaatctactccttgaagacatctc

SEQ ID NO: 11099 - DNA, 188 bp, Homo sapiens
aagaaatatgaagaaagttgctcattcttgtgtctttcagtcactccctcccaaaatggaggatgctcacaagctctatgaaacagtagaaaatgaagcaaaatgttacccgcaggcacttctggagtcacaatataactagaggggagagcatattcattcatctggagctataacatattgtttaa

SEQ ID NO: 11100 - DNA, 471 bp, Homo sapiens
tttgtacaaaaaacaggctggtaccggtccggaattcccgggatatcgtcgacccacgcgtccggtacaaagctctttaggaggtttgttcttttgaaacattttttcagaggttaaaaattaaatttcaaaagaatacctggagtggaaaagagttctcagcagagacaaagaccccgaacacctccaacatgaagcttcttcatgttttcctgttatttctgtgcttccacttaaggttttgcaaggtcacttatacatctcaagaggatctggtggagaaaaagtgcttagcaaaaaaatatactcacctctcctgcgataaagtcttctgccagccatggcagagatgcattgagggcacctgtgtttgtaaactaccgtatcagtgcccaaagaatggcactgcagtgtgtgcaactaacaggagaagcttcccaacatactgtcaacaaaagagtttggaatgtc

SEQ ID NO: 11101 - DNA, 441 bp, Homo sapiens
  misc_feature 441: n = A,T,C or G
aagaggttccagatatatatcttgatttaatcctgatcatccacattaaaattatgaatgtaaaaattacataataggcttttcggctgggaaagaaaagtgtctagcagcatgcacaaagaccatgcattgtcacatcatcaggcgaacaaatggaaaggtaataaataattgctcctaacgcccactttaaaatagtaaaaccaaatggaacagtgaagtgagccggtcttcactgctctgagcaggaagcgtgctagcggccagatggggccacagtcagatgacatggcaacagctggctgggctggatgcgcacagagcccctccttagggttccgctggatgttcacagagatggtcttttcgcacagaggtagctgcagcacgttatttttcaggttcttgctctttaatccgttccaattcagtggtggtatn

SEQ ID NO: 11102 - DNA, 326 bp, Homo sapiens
tcggcacgaggacaaggcttctggagccgtggggcacacctccacgggcaagccccctgcccggtcacccttcccatcacaggatctggcgcgatgctgtgggaactgttgcaggcgttggctctgaagctgctcagagtctgccctcacagcaaaagggaactgctgactgcctggcacttaggaggagctgacagcctggccgtaggtccagggtttaaggctgtgcggtgggtagaacagagaaagccgagatggccacggggtgtggctcacaattcactgttcttggcaggaagggggcagccactcaccattgtcacccc

SEQ ID NO: 11103 - DNA, 513 bp, Homo sapiens
  misc_feature 231, 344, 442, 462, 472, 480, 486: n = A,T,C or G
ctttacacagatttaagccaataatttttagcaaaatgatacaaaactgtcttaaccaagtagaagattggtagttacagtggaatcgtcagggagtacagggcggccaccactggagggagctgaggccctggaaaaggagtctgattctctgcaattctctctctgcttttcttcccagccccgttacaaccgagttcacgtggggggccgcagtgcagccccagtcgntggcagctcttggagtctgtccgtttagtatgtttcccccacgagcgtcgctggggtgagtggcctgggagagctcccggtgttaacatttcgatcctagaccgggggacgtntcactagtaaagccattggtaacagagtagatcagccatgcattgtctgccctttcacagcaataagggagagtttttcattcggtggcacgacagantgaagaccatgggaagccanccgaccaggnttccagtngttgcnttccgttgggaagacgaggcagttttt

SEQ ID NO: 11104 - DNA, 629 bp, Homo sapiens
tggactccaccgcggtggcggccgctctagactagtggatcccccgggctgcaggaattcggcacgaggggaggcgcggtgaggagtcaggcttaaaacttgttggaggggagtaaccagcctgctcctctcgctctcctcctcgtctgcgccgcgtttcacagagaaaattcctgttccaagagaaaataaggcaacatcaatgaaggagagaagagccagccagaaattatccagcaaatctatcatggatcctaatcagaacgtgaaatgcaagatagttgtggtgggagacagtcagtgtggaaaaactgcgctgctccatgtcttcgccaaggactgcttccccgagaattacgttcctacagtgtttgagaattacacggccagttttgaaatcgacacacaaagaatagagttgagcctgtgggacacttcgggttctccttactatgacaatgtccgccccctctcttaccctgattcggatgctgtgctgatttgctttgacatcagtagaccagagaccctggacagtgtcctcaaaaagtggaaaggtgaaatccatgaattttgtccaaataccaaaatgctcttggtcggctgcaagtctgatctgcggacagatg

SEQ ID NO: 11105 - DNA, 523 bp, Homo sapiens
  misc_feature 316: n = A,T,C or G
gcgaattgggtaccgggccccccctcgtgccgggcgtgggcaacgccgacttcaccgacatgcaggtcctggacggcgacgacggcgtcctgcgctccccacggggtgagcccgcgctccgggacatcgtacagttcgtgcccttccgggagctcaagaacgcatcccctgcggcgctggccaagtgcgtgctggccgaggtcccgaagcaggtggtggagtactacagccacagaggcctgcccccgagaagcctgggtgtccctgccggagaggccagcccaggctgcacaccgtgaagatgtggagggcgtanggtgggggcagtgaggaatgggtccgtacagcctctgtctgcaacatgcttggggtcccttaagctccctccgacctcccagaagcctccagtccccaccaggccccactcccagtcctcctgggatcctgctggcttgggcccggctctggggcccccaaggccgaagggtgacaaaatacaggcccccatgcctggccctgcctg

SEQ ID NO: 11106 - DNA, 759 bp, Homo sapiens
  misc_feature 238, 409, 439, 467, 553, 624, 643, 646, 665, 684, 703, 710,727, 730, 733, 736, 745, 754, 756, 759: n = A,T,C or G
cttttggcacaatgttgcaaggaactctatttttgacatgcattaatcttttattttgcacttttatgggtgacagtttttagcataacctttgataaaatacactcaagtgacttggacttagatgcttatccttacgtccttggtaccttttttgtattaacaaacactgcaatttatagattacatttgtaggaagttatgcttttttctggtttttgttttactttcaacctangttataagactgttattctatagctccaacttaaggtgcctttttaattccctacagttttatgggtgttatcagtgctggagaatcatgtagttaatcccattgctcttacaagtatcagcttacttgtatcagcctccctacgcaaggacctatgcactggagccgtangaggctcttcagttgggccccaaggataangctactgatttgatactaaatgaatcancagtggatgtagggatagctgattttaaaacactcggctgggcacagtggctcacacctgtaatcccagcactttgggaggctgangcaggcagatcatgatgtcaggagtttgagaccagcctgccaatatggggaaaccctgtctctacaaaaancaaaaatagctggcatggnggngcgtgcctgagtccaactnctcgggaactgaggcaaanattacttgaacctggaggngaggtgngggagccaaatcgaccntgnctncanctggcgaanaacaaactntnccn

SEQ ID NO: 11107 - DNA, 785 bp, Homo sapiens
  misc_feature 1, 8, 262, 291, 299, 302, 382, 395, 426, 544, 550, 552, 599,611, 630, 693, 721, 724, 746, 778: n = A,T,C or G
nagacagnagggtgctcatggtcctctgggcaacctgacagtgccagcagattctgcagcatcttgactcagttactgcccaagaaccctgacaactccacaagggttttatttttaaaagtctacttcttccctacaatatagaacttccagaaaaggagctgactcccatgaagggcaagcagagccaaaagcaagtactatgcaagtgaaaactactttctaatcaagattttacaaatatatttcttttttttttganacggagtctcgctttgtcccccaggctanagtgcagnggngccatctcggctcactgcaacctccaccccccaggttcaagcaattctgtctcagcctcctgagtagctgggattacagngcccgccactacncctggctaatttttttgtatttttagtaganacgggtttcaccatttgagccagactggtcttgaactcctgaccttgtgatctgcccgcttcagcctcccaaggtgctgggattacaggcatgagccaccgcacggggctgagatttntaaatntntttcaaggaataggaagctgttattcccatgtgttgccttctctaanaacatcagctgngattaaatgtcctttcagnggaaaatttttcactgctccaagtcaaagcagtataactttaacaaatgatttatcctgagtntttattatccaaacctattcctaacgtnttntttggctgctggggggactganttacaggacttgcgcactgctgagggcttatnagacttg

SEQ ID NO: 11108 - DNA, 109 bp, Homo sapiens
ctgggtccgtctcgtcgcgtccgggttgtcactctctccggttgttactctgtagcttcccggctcgcgaaagggaggacctgtctgggtcatggattttgagaatctt

SEQ ID NO: 11109 - DNA, 691 bp, Homo sapiens
  misc_feature 464, 482, 553, 593, 599, 626: n = A,T,C or G
agggggcaaagccttctgacttcacctttgtttgacctatgtatggaacttacttttactttttgccttaaatttttaatgaaatgcaaattttctgtgatggggttctctctctctttttttcggggggtggagtcactaataaatttgcaaatgaagttaaagacaaggcaaccatctggcttatgctatataatacttcatttaaagaagaaaggaaaagcaaatgcacttgcagcttttgaggtctcagcaaaaatgggcatgtgtcttttttgaagtttagaaatatcctaatctatttttatttatctaaaagtaagtgttttccggctgataaggctaaccctacccaggaaaggattgataactaaataaatttcctctgttttcccatgcattgaaattatgttggctgagcatggtggctcacacctgtaatcctagcactttgggaggccgangtgggcggatcacttgangtcaggagttggagaccagcctggccaacgtggtgaatccccgtctctactgaaaacacaaaaattagacnggcatggtggcgcacacctgtaatcccagctacttgggangctgangcaggagaattgcttgacctgggaggnggaggttgcagtgagctaaattgggccaccgactcaaccccggggacagaggaaactccgtctcc

SEQ ID NO: 11110 - DNA, 786 bp, Homo sapiens
  misc_feature 1, 9, 11, 46, 123, 192, 255, 309, 379, 527, 615, 708, 713,737, 738, 781, 784: n = A,T,C or G
nacgacagnangggagtgtgttacctgccgtacagcataatgtgangcaaggtctagctgttccccccggcatacaagcttatagagcagcctcctttgaagatctccaggtggacttcacanagatgccaaagtgtggaggtgttcgagtgtggatcaaggactggaacgtagcctctttgtgcccatggnggaaaggaccccagactgtcgtcctgatcactcccactgctgtgaacgtagagagaatcctancctggatccaccacaaccgtgtaaaacctgcagcgcctgaatcctgggaggcangaccaagtctggacaacccctgcagagtgaccctgaagaagatgacaagccctgctccagtcacacccanaagctgactggtccacgcacagccgaagcgtgaggaagctcattgtgggcttcatttttcttaaattttggacttacagtaagggcttcaactgttcttactcaaactggggactattcccagtgtattcatcaggtcagtgaggtangacagcaaatgaaaacaatctttctgttctatagttattatcaatgtatgggaacgttaaaagagacttgattgtatatgccactcantacatgtatgtagcccaggaaatgactgacctgatgtgtggtataacccatctgaccccctacaccaccagttttgaataaaataaaactggnctttnctagggatccagtgaatattactnnacagaaaaaaggatcccaacagactttaaattgacctggcacntanaa

SEQ ID NO: 11111 - DNA, 766 bp, Homo sapiens
  misc_feature 470, 477, 505, 506, 572, 584, 603, 605, 616, 667, 676, 686,694, 698, 700, 712, 714, 717, 720, 726, 759, 760: n = A,T,C or G
gctatgtggaacatgctgctctaattcagatttaaagagtttcttcctgttaattcgaagctcactgtgcctcttgtttccgagggaagaaggactgattaagtcatctaaatggatgcaatactgaattacaggtcagaagatactgaagattactacacattactgggatgtgatgaactatcttcggttgaacaaatcctggcagaatttaaagtcagagctctggaatgtcacccagacaagcatcctgaaaaccccaaagctgtggagacttttcagaaactgcagaaggcaaaggagattctgaccaatgaagagagtcgagcccgctatgaccactggcgaaggagtcagatgtcgatgccattccagcagtgggaagctttgaatgactcagtgaagacgtcaatgcactgggttgtcagaggtaaaaaagacctgatgctggaagaatctgacaagactcntccaccnagatggaaaatgaggaatgttatgagcnnagagaaagaaagaaagaggagctggcttcaccgcagagaaacggagcagaagaacccagcccctanaaagtcagtctncccccaaattcaaatcttnanggtttgcagangtgaatggtggcaccttcgtttccctggtccagatgctcctcaaactctgnggagttcanaacttgaaantgaaattnttgntncaaaatgagganancanaangccctngctgccacatcggctttttttgtcttaaaaggnngttatg

SEQ ID NO: 11112 - DNA, 781 bp, Homo sapiens
  misc_feature 1, 9, 560, 582, 727, 731, 739, 744, 750, 753, 755, 766, 769,770, 777, 780: n = A,T,C or G
nacgacagnaagggagagccgcccaagggatggcgatggcgtacttggcttggagactggcgcggcgttcgtgtccgaggtcactagtttcccggtagttcagctgcacatgaatagaacagcaatgagagccagtcagaaggactttgaaaattcaatgaatcaagtgaaactcttgaaaaaggatccaggaaacgaagtgaagctaaaactctacgcgctatataagcaggccactgaaggaccttgtaacatgcccaaaccaggtgtatttgacttgatcaacaaggccaaatgggacgcatggaatgcccttggcagcctgcccaaggaagctgccaggcagaactatgtggatttggtgtccagtttgagtccttcattggaatcctctagtcaggtggagcctggaacagacaggaaatcaactgggtttgaaactctggtggtgacctccgaagatggcatcacaaagatcatgttcaaccggcccaaaaagaaaaatgccataaacactgagatgtatcatgaaattatgcgtgcacttaaagctgccagcnaggatgactcaatcatcactgntttaacaggaaatggtgactattacagtagtgggaatgatctgactagcttcctgatattccccctggtggagtagaggagaagccaaaatatgccgtttactgaggaattggggctgtttatagatttcctagccttgattgcngggncatggtcngctgnggcatntcncncctcttggctntcnngccgggntgnt

SEQ ID NO: 11113 - DNA, 648 bp, Homo sapiens
  misc_feature 5, 7, 30, 644, 645, 647: n = A,T,C or G
acagnangggctctcggctttcggctcggnagaggccaaggtgcaacttccttcggtcgtcccgaatccgggttcatccgacaccagccgcctccaccatgccgccgaagttcgaccccaacgagatcaaagtcgtatacctgaggtgcaccggaggtgaagtcggtgccacttctgccctggcccccaagatcggccccctgggtctgtctccaaaaaaagttggtgatgacattgccagggcaacgggtgactggaagggcctgaggattacagtgaaactgaccattcagaacagacaggcccagattgaggtggtgccttctgcctctgccctgatcatcaaagccctcaaggaaccaccaagagacagaaagaaacagaaaaacattaaacacagtgggaatatcacttttgatgagattgtcaacattgctcgacagatgcggcaccgatccttagccagagaactctctggaaccattaaagagatcctggggactgcccagtcagtgggctgtaatgttgatggccgccatcctcatgacatcatcgatgacatcaacagtggtgctgtgggaatgcccagccagttaagcacaaaggaaaacatttcaataaaggatcatttgacaactggtggnnana

SEQ ID NO: 11114 - DNA, 208 bp, Homo sapiens
  misc_feature 2, 15, 18, 21, 22, 27, 29, 48, 49, 54, 56, 75, 81, 102, 108,129, 132, 135, 156, 162, 176, 182, 183, 186, 198, 200, 203,206: n = A,T,C or G
tncggttgcaaaaanacnacnnaaggntncggttgcaaaaaaacaacnnaaggntncggttgcaaaaaaacaacnaaaggntccggttgcaaaaaaacaacnaaaggntccggttgcaaaaaaacaacnaanggntccggttgcaaaaaaacaacnaaaggntccggttgcaaaanaccacnnaanggtaccgcttcnanaanacnac

SEQ ID NO: 11115 - DNA, 219 bp, Homo sapiens
atttaatgaaataatcgctaaacccaagatagtctatatttaaaaaatcccctctaatttgttgtcttgttttgttttggttcaactagaagagtgggccccacagtggggaaaaaaaaaaaaaccccacataatttttttcacataatttttttttatttccgaaaaaaaaatattgggaaaatattggcccgaaattttttttttttaaacctttaa

SEQ ID NO: 11116 - DNA, 417 bp, Homo sapiens
tcagaaatgggagtcgttgcaggaatttcctttggagttgcttgcttccaactgattggaatctttctcgcctactgcctctctcgtgccataacaaataaccagtatgagatagtgtaacccaatgtatctgtgggcctattcctctctacctttaaggacatttagggtcccccctgtgaattagaaagttgcttggctggagaactgacaacactacttactgatagaccaaaaaactacaccagtaggttgattcaatcaagatgtatgtagacctaaaactacaccaataggctgattcaatcaagatccgtgctcgcagtgggctgattcaatcaagatgtatgtttgctatgttctaagtccaccttctatcccattcatgttagatcgttgaaaccctgtatccctctg

SEQ ID NO: 11117 - DNA, 779 bp, Homo sapiens
  misc_feature 8, 10, 547, 613, 632, 649, 670, 692, 732, 734, 737, 742,746, 768, 777: n = A,T,C or G
tagacagnangggcttttcctgtggcagcagccgggctgagaggagcgtggctgtctcctctctccgccatggcgtgtgctcgcccactgatatcggtgtactccgaaaagggggagtcatctggcaaaaatgtcactttgcctgctgtattcaaggctcctattcgaccagatattgtgaactttgttcacaccaacttgcgcaaaaacaacagacagccctatgctgtcagtgaattagcaggtcatcagactagtgctgagtcttggggtactggcagagctgtggctcgaattcccagagttcgaggtggtgggactcaccgctctggccagggtgcttttggaaacatgtgtcgtggaggccgaatgtttgcaccaaccaaaacctggcgccgttggcatcgtagagtgaacacaacccaaaaacgatacgccatctgttctgccctggctgcctcagccctaccagcactggtcatgtctaaaggtcatcgtattgaggaagttcctgaacttcctttggtagttgaagataaagttgaangctacaagaagaccaaagaagctggtttgctccttaagaactaaagcctggatgatatcaaaaagnctatgcctctcacgaaganactgcaaggcaaatganaaccgcgccgtttcagcgcanggcccggcatatcttatgaganaatggatatcaggctcaaaaatcctggatacttgctatgnancanctgantttnactgctctggggctgggacttntctttgatnaa

SEQ ID NO: 11118 - DNA, 563 bp, Homo sapiens
attcggcacgaggggtacagaacccgctctgagccgtgggtctggctcctgtaggggactggctctcttggtgcaccaggggagggggacatatcccagtgaaccccaccttggcgcctgaggcaaaacagggtgggcactgacccacccccaggggcggctgcagaggcagtgcccgcagacaatggccacacctctctccccagggcccggcagtgcccaaggatgggtccggggcctcggggccaatgagcgcctcttcctaggtgctgggattcagtccccaaacacagcgggaggggtccctggggcagatggggctttaccagcgtcgggtggtttagttcgagtcccttttgtggagaaagggagatgaaaactgaccacgtgccaggtgtggccgaagcccccagggagggccacattcggggagcggggggtcggggggagggccaccgactggctctgctgccagcacaggcccctccctggaagtcctcgggagcggagcgcggatcggcacgggctctgggctccccgtggagagaagctgtagtttttac

SEQ ID NO: 11119 - DNA, 506 bp, Homo sapiens
ctaaacaggtgtctgtggagggcacacctgcttagcaggacacggggcccattcctaaccttgggggctcccagtctggtggtggagacatagtaagcaaggggtgacagtgccgtggataagctgtcccgtgtgaaaccaggtaatggacagctcaatgccgctgattggagagcatgtggaagaggacagacagctgatggccgaccttgttgtctccaaaatgagccagctcccgatgccaggaggcacagcgccctcccccctcagaccttgggctccacagattaaatcagcgaaatccccagggcaagcccagctggggcctcagctaggccagccccagccacgcccacctccgcaaggagccctcgccaagctcagtctcctcagccccagagatctggaagcccctcccaacagaggctctccccacaaggccagcagcccctgagcccccagtccggatctccacagcagcaaaggtcaccaggctctccgcagct

SEQ ID NO: 11120 - DNA, 559 bp, Homo sapiens
tcggcacgaggtaaatgtccacgtcaccaacaactccaccaagaccgtcaagaagatcaaagtctctgtgagacagtacgccgacatctgcctcttcagcaccgcccagtacaagtgtcctgtggctcaactcgaacaagatgaccaggtatctcccagctccacattctgtaaggtgtacaccataaccccactgctcagcgacaaccgggagaagcggggtctcgccctggatgggaaactcaagcacgaggacaccaacctggcttccagcaccatcgtgaaggagggtgccaacaaggaggtgctgggaatcctggtgtcctacagggtcaaggtgaagctggtggtgtctcgaggcggggatgtctctgtggagctgccttttgttcttatgcaccccaagccccacgaccacatccccctccccagaccccagtcagccgctccggagacagatgtccctgtggacaccaacctcattgaatttgataccaactatgccacagatgatgacattgtgtttgaggactttgcccggcttcggctgaaggggatg

SEQ ID NO: 11121 - DNA, 598 bp, Homo sapiens
  misc_feature 230: n = A,T,C or G
cggcacgagggaggaaatcccaaaacctaagtctgtggttgcaccgccaggtgctcctaagaaagagcatgtaaatgtagtattcattgggcacgtagatgctggcaagtcaaccattggaggacaaataatgtatttgactggaatggttgacaaaaggacgcttgaaaagtatgaaagagaagctaaagagaaaaacagagaaacttggtacttgtcttgggccttanacacaaatcaggaagaacgagacaagggtaaaacagtagaagtgggtcgtgcctattttgaaaccgaaaagaagcatttcacaattctagatgcccctggccacaagagttttgtcccaaatatgattggtggtgcctctcaagctgatttggctgtgctggtaatctcagccaggaaaggagagtttgaaactggatttgaaaaaggaggacagacaagagaacatgcagtgctgccataaccatgagtgataacactgcggccaacttacttctgacaacgatcggaggaaccgaagagctaaccgcttttttgcaaagaggaaattcacagcaaaagtccacattatgtcagctttctcatattg

SEQ ID NO: 11122 - DNA, 575 bp, Homo sapiens
agcttgcggccgctgtggaagtcctacagccgctgcacggacggcatcatctacgtggtggactcggtggacgtggaccggctggaggaggccaagacggagctgcacaaggtgaccaagttcgccgagaaccagggcacgccgctgctggtcatcgccaacaagcaggacctgcccaagtcgctgccggtggcagagattgagaagcagctggcgctgcacgagcttatcccggccaccacctatcacgtccagccggcgtgcgccatcatcggcgagggcctcaccgagggcatggacaagctctatgagatgatcctgaaacgcaggaagtccctcaagcagaagaagaagcggtaatgcgcccggagcgaccggggagcgagcgagtgcgtcaagaaagaatgaatggatggatggatggttggatggatggatggatggatgagcgagaacccgcgcccgcgaacaaagagcgaaccaaagcgatgcttcgaatttttaaaacggaatctctgcacccaaatgcaggactggtgacttaaggagctgcgaagtctgatttaccggcctac

SEQ ID NO: 11123 - DNA, 523 bp, Homo sapiens
cggcacgaggagatttagcaaaattccaccgtatcttttgccaggctagagacagggagagcagagtaaaaccctcatgctgctgaaatttctaggctgttaggaagcccctcgaattctgtgaaaatgagggtttcttaactcacactgagagcggaaaggggcaaacccttttcataactccctcaagtgtgtgttacctttctttaccagcatggtaagcaacaggacatatcccatcctcggacatgtctgtatgatccaaggtacccaaagtcagacagagtaaactcaagcctggcactggctttctgccgcttcatgtgctttggaaaaagcaggacaagcaatagcagcaggagtccccagcagctggagccgcaagaatgaactgcaaagagggaactgacagcagctgcggctgcaggggcaacgacgataagaaatgttgaattgtgtggtggtgggggacggtgccgtggggaaaacctgcctgctgatgagctacgccaacgacgccttc

SEQ ID NO: 11124 - DNA, 632 bp, Homo sapiens
caagctacttgttctttttgcaggatcccatcgattcgaattcggcacgaggtggaagaaaattttttgctgcttctggttcccagaaaagggagccattttaacagacacatctgtcaaaagaaatgacttgtcgattatttctggctaatttttctttatagcagagtttctcacacctggcgagctgtggcatgcttttaaacagagttcatttccagtaccctccatcagtgcaccctgctttaagaaaatgaacttatgcaaatagacatccacagcgtcggtaaattaaggggtgatcaccaagtttcataatattttccctttataaaaggatttgttggccaggtgcagtggttcatgcctgtaatcccagcagtttgggaggctgaggtgggtggatcacctgaggtcaggagttcgagaccaacctgaccaacatggtgagacccccgtctctactaaaaataaaaaaaaaattagctgggagtggtggtgggcacctgtaatcctagctacttgggaggctgaaccaggagaatctcttgaacctgggaggcagaggttgcagtgagccgagatcgtgccattgcactccaaccagggcaacaagagtgaaactccatctt

SEQ ID NO: 11125 - DNA, 300 bp, Homo sapiens
cgggtccctcaggccgtggacgccctcgggaggggggtgactgtggcttgtgtctggacaggaatgtgtcatttcccacatcttctagagggctgccagctgggaagacagttatcagggcaagctgtgctctgagtttcgggttctgctcctacaaagaacgtgcggtgctgcgggcgagggccccggcacggacaagggccactgcagagtgtgtttctgctcgtcagctgccctgggcagcggatgggctgggcgatgcagctggatgcacatctccttctgtcatgaatgtacagt

SEQ ID NO: 11126 - DNA, 92 bp, Homo sapiens
taatacgactcactatagggaatttggccctcgaggccaagaattcggcacgaggcgcccggccgtagcaccatgcctgcttgtcgcctagg

SEQ ID NO: 11127 - DNA, 55 bp, Homo sapiens
ttaatacgactcactatagggaatttggccctcgaggccaagaattcggcacgag

SEQ ID NO: 11128 - DNA, 118 bp, Homo sapiens
ttaatacgactcactatagggaatttggccctcgaggccaagaattcggcacgaggcctgtcaccacctgcacagcgtgacctcaggggttgcccactttacctttatggtgatgcct

SEQ ID NO: 11129 - DNA, 466 bp, Homo sapiens
taatacgactcactatagggaatttggccctcgaggccaaaaattcggcacgaggctgctataaagttaagtgtccctcaggcagggagagggctcacagagtctcctctgtacgtggccatggccagacaccccagtcccttcaccaccacctgctccccacgccaccaccatttgggtggctgtttttaaaaagtaaagttcttagaggatcataggtctggacactccatccttgccaaacctctacccaaaagtggccttaagcaccggaatgccaattaactagagaccctccagcccccaaggggaggatttgggcagaacctgaggttttgccatccacaatccctcctacagggcctggctcacaaaaagagtgcaacaaatgcttctattccatagctacggcattgctcagtaagttgaggtcaaaaataaaggaatcatacatctcaaaattttg

SEQ ID NO: 11130 - DNA, 114 bp, Homo sapiens
agataaggcaaagaggcacttttggatttctccatctgagcagctctgtgattcattatctgttctagaaagcagcacacgcagttccagcaaaaaaaaaaaaaaaaaaaaagg

SEQ ID NO: 11131 - DNA, 562 bp, Homo sapiens
cccagggtagtggtgggtgctttatttccatgttgggtgcctgggaagtatgtagacggggtacgtgccaagcatcctcgtgcgaccgcgagacccggggagcgggggcttgccggccgtcgcactcatttacccggggacagggagaggctcttctgcgtgtagtggttgtgcagagcctcatgcatcacggagcatgagaagacgttcccctgctgccacctgctcttgtccacggtgagcttgttatagaggaagaaggagccgtcggagtccagcacgggaggcgtggtcttgtagttgttctccggctgcccattgctctcccactccacggcgatgtcgctgggatagaagcctttgaccaggcaggtcaggctgacctggttcttggtcatctcctcccgggatgggggcagggtgtacacctgtggttctcggggctgccctttggctttggagatggttttctcgatgggggctgggaaggctttgttggagaccttgcacttgtaccccttgcattcagccaagtcctgttgcaagacggtgaggacgctga

SEQ ID NO: 11132 - DNA, 583 bp, Homo sapiens
cagctacaacaacccccaccgagccgtggagtatctgctcacgggaattcctgggagccccgagccggaacacggttctgtccaggagagccaggtatcggagcagccggccacggaagcagcaggagagaaccccctggagttcctgcgggaccagccccagttccagaacatgcggcaggtgattcagcagaaccctgcgctgctgcccgccctgctccagcagctgggccaggagaaccctcagcttttacagcaaatcagccggcaccaggagcagttcatccagatgctgaacgagccccctggggagctggcggacatctcagatgtggagggggaggtgggcgccataggagaggaggccccgcagatgaactacatccaggtgacgccgcaggagaaagaagctatagagaggttgaaggccctgggcttcccagagagcctggtcatccaggcctatttcgcgtgtgaaaaaaatgagaacttggctgccaacttcctcctgagtcagaactttgatgacgagtgatgccaggaagccaggccaccgaagcccccaccctacccttattccatg

SEQ ID NO: 11133 - DNA, 548 bp, Homo sapiens
tatgacgtcgcatgcacgcgtacgtaagcttggatcctctagagcggccgcctactactactagcctactactactaaattcgcggccgcgtcgaccaaggaactggatggcgcgaccatctgcatccaggccggtaccaccaccgagctgaatgtgtccgactacttccgcgccaatggcctgaagtacaccccgatcaccttcgacacctccgacgaaagcgccaagtcgctggaatccggtcgttgcgacgtactgacctcggacaaatcccagctgttcgcccagcgcagcaagctggcctcgccgaaggactacgtggttctgcctgaaaccatctccaaggagcctctgggcccagtggtgcgtaacggcgacgaagagtggaccaagatcgttcgttgggtcggctatgcgctgctcaacaccgaagaagccggtatcacttcgaaaaacgtcctggaagaagccaagtcgaccaagaacccggacgttgctcgtctgctgggcgccgacggcgagtacggcaaggacctgaaactgccga

SEQ ID NO: 11134 - DNA, 497 bp, Homo sapiens
cgactcactatagggaagctggtacgcctgcaggtaccggtccggaattcccgggtcgactactactactaaattcgcggccgcgtcgaccttctggaggaatactgttggcgttcaaaagcattgctgtttcaacaatggccaagaacaaattaagagggccgaagtccaggaatgtatttcacatagccagccaaaaaaaactttaaggctaaaaacaaagcaaaaccagttaccactaatcttaagaagataaacattatgaatgaggaaaaagttaacagagtaaataaagcttttgtaaatgtacaaaaggaacttgcacatttcgcaaaaagcatttcacttgaacctctgcagaaagaactgattcctcagcagcgtcatgaaagcaaaccagttaatgttgatgaagctacaagattaatggctctgttgtaatatactggtgatgcatctaattctccacaaagaccaataaattgaatgttttatac

SEQ ID NO: 11135 - DNA, 536 bp, Homo sapiens
tcgcggccgcgtcgacgcccctggctctgctcccccagcctcttgttggatcagaaggtcaaggtggtctattgttgcccgcaacgcaaagggatgtggcagtttcctactaccacttctaccacatggccaaggtgcaccctgagcctgggacctgggacagcttcctggagaagttcatggtcggagaagtgtcctacggatcctggtaccagcacgtgcaggaatggtgggagctgagccgcacccaccctgttctctacctcttctatgaagaacatgaaggagaaccccaaaagggagattcaaaagatcctggagtttgtggggcactccctgccagaggagaccgtggacttcatggttcagcacacgtcgttcaaggagatgaggaagaaccctatgaccaactacaccaccgtcccccaggagttcatggaccacagcatctcccccttcatgaggaaaggcatggctggggactggaagaccaccttcaccgtggcgcagaatgagcgcttcgatgcggactatgc

SEQ ID NO: 11136 - DNA, 479 bp, Homo sapiens
atgtcgttgctaccctggctggcaggcaccgtggtgtgagcggaagagcatgtggtgattggccacacactgagttgcacatattgagaacctaatgcactctgggtctggccagggcttcctcaaatacatgcacagtcatacaagtcatggtcacagtaaagagtacactcagccactgtcacaggcatattccctgcacacacatgcatacttacagactggaatagtggcataaggagttagaaccacagcagacaccattcattccatgtccatatgcatctacttggcaaggtcatagacaattcctccagagacactgagccagtctttgaactgcagcaatcacaaaggctgacattcactgagtgcctactctttgccaatccccgtgctaagcgttttatgtggacttattcattcctcacaatgaggctatgaggaaactgagtcactcacattgagagtaagcacgt

SEQ ID NO: 11137 - DNA, 479 bp, Homo sapiens
tatgacgtcgcatgcacgcgtacgtaagcttggatcctctagagcggccgcctactactactaaattcgcggccgcgtcgacatcactgaatacatggagaatggagatctcaatcagtttctttcccgccacgagccccctaattcttcctccagcgatgtacgcactgtcagttacaccaatctgaagtttatggctacccaaattgcctctggcatgaagtacctttcctctcttaattttgttcaccgagatctggccacacgaaactgtttagtgggtaagaactacacaatcaagatagctgactttggaatgagcaggaacctgtacagtggtgactattaccggatccagggccgggcagtgctccctatccgctggatgtcttgggagagtatcttgctgggcaagttcactacagcaagtgatgtgtgggcctttggggttactttgtgggagactttcaccttttgtc

SEQ ID NO: 11138 - DNA, 649 bp, Homo sapiens
gaagtgccgctggcgctctttgccttgaaccggcagcgcctgtgtgagcggctgcggaagaaccctgctgtgcaggccggctccatcgtggtcctgcagggcggggaggagactcagcgctactgcaccgacaccggggtcctcttccgccaggagtccttctttcactgggcgttcggtgtcactgagccaggctgctatggtgtcatcgatgttgacactgggaagtcgaccctgtttgtgcccaggcttcctgccagccatgccacctggatgggaaagatccattccaaggagcacttcaaggagaagtatgccgtggacgacgtccagtacgtagatgagattgccagcgtcctgacgtcacagaagccctctgtcctcctcactttgcgtggcgtcaacacggacagcggcagtgtctgcagggaggcctcctttgacggcatcagcaagttcgaagtcaacaataccattcttcacccagagatcgttgagtgccgagtgtttaagacggatatggagctggaggttctgcgctataccaataaaatctccagcgaggcccaccgtgaggtaatgaaggctgtaaaagtgggaatgaaagatatgagttggaaagcctcttcgagcactactgctactcccg

SEQ ID NO: 11139 - DNA, 326 bp, Homo sapiens
ttcggcacgaggtttggattgtgtggaaactatgcattttctgctcaaatgctattttaatttattacatttagaaaaaaagttgatttcaataattcatcctgcttgaagattcaaagtcagaagtatactatcatcttgaattttagctgaagaatcctatgagcatgtatgtttctgctgtaaaaacgtacttactgtatggcactcaaaaactatgttaaatgatccactaactttttttttcttggcccatgattaatggaatgtatgtaactaggtagggttcctttcttacatctagaggaagtacagccacccactga

SEQ ID NO: 11140 - DNA, 622 bp, Homo sapiens
  misc_feature 274: n = A,T,C or G
gggggccatctgccactttattttgcccgtcttgtagcatgtgggtctttcgcagcaggaagtgtgttttacaaccagagcccccgccctcctgcagcgcaggcgcagctggctgggctcctgcttcccactctccacctcatccatatttgtcctcgtccctgccagtctcgaaaaggcactctgtcacgtgtacacaggaaagggccctgacaagaggatgggactgcagttgtggctgccaggtctcactctcccttggatggtcggcggngtgggggtggaggccagggctgtagtgcagctcccgcaggtgctggctcagggggagcaggcaggctccggttttcggtaatcctcctggatggggatggtgctgccctcctcctccctggggcagctgtaacgacaaggctctgcaggctccacaggactttctcctttggttgatctatatttccttcgttgatggaggaacagggccccggccagggtgaaaacaaggaacattccagagaagatcacaaggatgcgaataaaatcggagctgcaccaggatcttttgggtggccagtgggtagaagagtcccggcaggcagctgcctgagtcagccagagtctg

SEQ ID NO: 11141 - DNA, 677 bp, Homo sapiens
  misc_feature 17, 599: n = A,T,C or G
attgttataagtcaggnaggaaggagaagttgctccttaaaaacccttgtattatgccaagaccctaatttctgtcttaaaaaagtatgctttacaccttaaagcagcacttttattttgcacattgataatgctgtatgtatactttctttttttccattttattttatttaaaattttttttattttaatagcttttagggtacaattgcattttggttacaatgctgtatgtatacttccatgtagttttcttaatcagtaaaatgatctttcatgttaaagtctctatttgttagttttccctgactgtaattttctttctaccttgtataaatgataaaaatagactctaataaactgagtgtgctctggcatactagttattgacatgtttatattcacaaatataaactccaggctggctgtttttcttggtgaatgttctccaggctggttatttttcttggtgaatgtaatgtactgtctttttagagtaagttactaagctggttactaaatcaggaatattttagttataaaactttagatttttaagaatattggccaggcacggtggctcacacctgtaatcccancacgttgggaggccaaggcgggtggatcacctgagatcgggagttcaagaccagcctggctaacatggtgaaacctgt

SEQ ID NO: 11142 - DNA, 759 bp, Homo sapiens
  misc_feature 6, 30, 36, 37, 42, 47, 48, 52, 61, 63, 70, 71, 78, 83, 106,117, 133, 137, 166, 174, 191, 199, 201, 202, 208, 209, 210,223, 227, 255, 281, 300, 316, 338, 344, 345, 375, 393, 422,431, 435, 437, 439, 440, 441, 452, 460, 479, 487, 492: n = A,T,C or G
  misc_feature 493, 495, 518, 520, 529, 541, 554, 557, 563, 572, 589, 607,608, 620, 639, 650, 660, 667, 677, 684, 711, 746, 748: n = A,T,C or G
gccgtnatactggtcactgctgctacaaancacaanncaacngtgcnnctgngtattagancnaataatnnatctttntgagnaaaaaattaaaacgctgggaatnagataaaaagncaactttttacaatgngggnaaaaatgacaccagatttgcctctgagancgatactnccaaaatggacggatcnaagcactngnnacatcnnnactccttgagcanaaanaacaaaagggccatccgtgctcctaatncgacagggacagtgaccctgaagatntgagccaaccacttcctcnctgccgataatacganctgaagccccacgcagcgtagnagaccnngcctgggtctggatcacccacgctgacttnggcgacgagtgccccaanccagaactgctggccatccgcttcctgantgctgagancgcncngnnnttcaaaacaangtttgganactgctggaaagagatcgnagagaganacaanngngcaggatcaagcaaaagtgatcntnccgaaaagnggcggaaagctngaatctctctcgnganggaagngaccaggtngatgctgaggagaaacngtacagcggctatttatnncttttgctctcnttccttacttttttaaaanatttaccctgncctctttttngggtggnttttttttcnttttcanggacgtttttaaaaactgactcacatncagggggttttttttgttttagctttgccttttananactcaaaaaac

SEQ ID NO: 11143 - DNA, 702 bp, Homo sapiens
  misc_feature 1, 12, 654, 670, 699: n = A,T,C or G
nacaattcaagnatgaaatttgggtggggacgcagccaaaccatatcgggtagcaacaacctagggtcagttttgcaggtggtaaagccatttaccaagatagttgtaggtaaagaagggcagatttattagagaaattgtgaaaatatgttgcagtgggcagctcagcagagaaggggctacctgcaaagaggcaagggctggaggaaagttttatagggtcctgctgaagggtgctacgtgtggaatgaggtcattgtgcccgcaggttgtttgtgattagctgtctctaacaattgttcatacaataattgttcattattgttctcaacttggggctctccccaacctggggacccttccttattgttgcttacttatcaggtctccacataaaggtgtggaaacttcattcattcatatcttcaacacaaattgtaggtagcctgttttttaaaacatttattcaacaaatatttagtccaagccactattacttactaccttctctactattgtatggacttttaactatctctgacactattcactattcttccacattctctattatttatacctatggtaaaatttgccagtttgaccattccaactaatactcacagggaatatatagagtctagaaaaaaaatntacaggtcccttaaangctgccctgcccacaaaaccataacgcangac

SEQ ID NO: 11144 - DNA, 763 bp, Homo sapiens
  misc_feature 485, 572, 603, 610, 619, 622, 626, 649, 691, 696, 697, 724,735, 739, 744, 745, 758, 762: n = A,T,C or G
gggatttgtcatttcttttgtttcatcttttgagtaataagctgcttggaaaagtttctgttctttagctgattttttagctataaaaatgtatttgaaaagctcataaatttcaggattgaaaagataattgaaagtttaaaaaaaacctaattcattgaagtaataaccaaataattttcaatcttgattcaactgtgattcaaatcttacaccatttgcccacttctatgaattttatgtataaaattttttaagagtcagagttttttttcttgattaattggatgtatttcacagaatttccaactgctcacgttagttttcttccttttagagttgatctctctaatgtattagatcttcatgcctttgatagtctctctggaataagtttgcagaaaaaaacttcagcatgtgccaggaacacaacctcaccttgatcagagtattggtacaatcacatttgacgtaccaggaatgcnaaggaagatcatcttaatatgtttattcagaatcttctgtgggaaaagaatgtgagaaacaaggccatcactgcatggaggtcatangctgaagggttggggtcatcaaagacaatcncaccagngatgtcccnggngtcntgagctcttgatctgaggagccncagggctgggaggataccctgagagacaatcgattggcctcnttgcnnaattaaataagattcctaacactgttnagctctggacnaccnaaacnnggcacccttcaanaaana

SEQ ID NO: 11145 - DNA, 594 bp, Homo sapiens
  misc_feature 354: n = A,T,C or G
ggcttctatagaagggataaaccgccaggttgaacctctggaccctccggcaggctctgctcctggtgagcacgtgtttgtgaagggctatgaaaagggccaaccagatgaggagctcaagcccaagaagaaagtcttcgagaagttgcaggctgacttcaaaatttctgaggagtgcatcgcacagtggaagcaaaccaacttcatgaccaagctgggctccatttcctgtaaatcgctgaaaggggggaacattagctagccagcccagcatcttccccccttcttccaccactgagtcatctgctgtctcttcagtctgctccatccatcacccatttacccatctctcangacacggaagcagcgggtttggactctttattcggtgcagaactcggcaaggggcagcttaccctccccagaacccaggatcatcctgtctggctgcagtgagagaccaacccctaacaagggctgggccacagcagggagtccagccctaccttcttcccttggcagctggagaaatctggtttcaatataactcatttaaaaatttatgccacagtccttataattggaaaaatactg

SEQ ID NO: 11146 - DNA, 203 bp, Homo sapiens
agggagggaaagaaggaggaggggagggatagagagagagaaagagaggaaagaaagagaaagaaagaaagaggaaaagagaagaaaggaaagaaaaaagaagaaagaagggagggagggaaagaaggaggaggggagggatagagagagagagaaagagaggaaagaaagagaaagaaagaaagaggaagagaagagagaag

SEQ ID NO: 11147 - DNA, 539 bp, Homo sapiens
tccaccgcggtggcggccgctctagaactagtggatcccccgggctgcaggaattcggcacgaggggtgctgagcgcggcgcactgcctggaggacgcggccgacgggaaggtgcaggttctcctgggcgcgcactccctgtcgcagccggagccctccaagcgcctgtacgacgtgctccgcgcagtgccccacccggacagccagcccgacaccatcgaccacgacctcctgctgctacagctgtcggagaaggccacactgggccctgctgtgcgccccctgccctggcagcgcgtggaccgcgacgtggcaccgggaactctctgcgacgtggccggctggggcatagtcaaccacgcgggccgccgcccggacagcctgcagcacgtgctcttgccagtgctggaccgcgccacctgcaaccggcgcacgcaccacgacggcgccatcaccgagcgcttgatgtgcgcggagagcaatcgccgggacagctgcaagggtgactccgggggcccgctggtgtgcgggggcgtgct

SEQ ID NO: 11148 - DNA, 130 bp, Homo sapiens
tccaccgcggtggcggccgctctagaactagtggatcccccgggctgcaggaattcggcacgagcctgggacctgtcattgccctcctgctctggagacagctttttgcagtggactcatgctatgatgt

SEQ ID NO: 11149 - DNA, 488 bp, Homo sapiens
cggcacgagggaaattgcggtgctttgccacaaactgtatgaagtgatgacaaaactgggtgaccagcacgccgacaaggccttcaccatccaaggagcgcccagtgattcgggtcctctccgcattgcaaagacaccatcaccgcctgaggagccttcacccctcccgagcccgacagcaagtccaaatcatacattagcacctgcgtctcccgcaccagcacggcctcggtcaccttcacagacaaggaaagggcctcctgtcccacctctacctaaagtcaccccgacaaaggaactgcagcaggagaacatcatcagtttctttgaggacaactttgttccagaaatcagtgtgacaacaccttcccagaatgaagtccctgaggtgaagaaagatgagactttgctggatctggactttgatcctttcaagcccgatgtgacacctgcaggttctgctggagtgacccactcacccatgtctc

SEQ ID NO: 11150 - DNA, 551 bp, Homo sapiens
tcacattcactcatttctctatttttaaaagtgcccagattgctcaaagatagcagaagtaggagattaaaaaaaatctggaaccacaaagttagtagtttcagatgatctggggtttggctgtgtgaggggtggcagaatgcaggtaggcgcctcagtcgtatctttctgcagcttccgttctcagctcctcacatgggggaggtagcgcactccgaggtcaactccatgtcaaaggtgagggactcaaactgccctcctgctgagggttcagcaccttcaccattatttccaaactgcatcaatgaatctaaagtgcggggggacatcggcaggtcaatggtattgctgcaggtcgttggtgtcacacagataaacttggtcttcaggtatggggcagcgctacctgggtcagcttcaggatgctcctggctctctggccgacaatactttccgaatgcctcctccttgggaatgtcaggatagagatagaccagtggagacaccaggatattggtagcatccatgatcttatagcccatgatgatttc

SEQ ID NO: 11151 - DNA, 436 bp, Homo sapiens
gaggggattgcacagtttatttccaaacactcagaggatagggggtggcctatgggtccatctgcctcccctccctgcatttggctgaatcaagaacttctcccccctgacccccaagaccctaggctgtgtccaatagagaaggcactgtcaccccccaccctgaggagacctagacaggtgaggagcatggagggtgggggaacagagttcaagtattcacagttcccccatctacacccctggattacactgtgccagagccatgagggaggatccacctctgggattcctagtggtgttgatagtccttctcccacttagaaccctccagatgaactccctactccttttccctgaaataacaaaccaagtcctaagccctgtagtctgggcaaggaggagccttagcaggccactcacccaaggcccccag

SEQ ID NO: 11152 - DNA, 568 bp, Homo sapiens
tatttaggtgacactataggaacagtttgtacaaaaaagcagctggtaccggtccggaattcccgggatatcgtcgacccacgcgtccgcaaacctcaccaaggccagcacataggagagatgagcttcctacagcacaacaaatgtgaatgcagaccaaagaaagatagagcaagacaagaaaaaaaatcagttcgaggaaagggaaaggggcaaaaacgaaagcgcaagaaatcccggtataagtcctggagcgttccctgtgggccttgctcagagcggagaaagcatttgtttgtacaagatccgcagacgtgtaaatgttcctgcaaaaacacagactcgcgttgcaaggcgaggcagcttgagttaaacgaacgtacttgcagatgtgacaagccgaggcggtgagccgggcaggaggaaggagcctccctcagggtttcgggaaccagatctctcaccaggaaagactgatacagaacgatcgatacagaaaccacgctgccgccaccacaccatcaccatcgacagaacagtccttaatccagaaacctgaaatgaagga

SEQ ID NO: 11153 - DNA, 558 bp, Homo sapiens
ctatttaggtgacactataggaacagtttgtacaaaaaacaggctggtaccggtccggaattcccgggatatcgtcgacccacgcgtccgcggacgcgtgggcagagcacacaagcttctaggacaagagccaggaagaaaccaccggaaggaaccatctcactgtgtgtaaacatgacttccaagctggccgtggctctcttggcagccttcctgatttctgcagctctgtgtgaaggtgcagttttgccaaggagtgctaaagaacttagatgtcagtgcataaagacatactccaaacctttccaccccaaatttatcaaagaactgagagtgattgagagtggaccacactgcgccaacacagaaattattgtaaagctttctgatggaagagagctctgtctggaccccaaggaaaactgggtgcagagggttgtggagaagtttttgaagagggctgagaattcataaaaaaattcattctctgtggtatccaagaatcagtgaagatgccagtgaaacttcaagcaaatctacttcaacacttcatgtatt

SEQ ID NO: 11154 - DNA, 83 bp, Homo sapiens
ctatttaggtgacactataggaacagtttgtacaaaaaagcaggctggtaccggtccggaattcccgggatatcgtggaccca

SEQ ID NO: 11155 - DNA, 496 bp, Homo sapiens
  misc_feature 453: n = A,T,C or G
tgacactatagaacaagtttgtacaaaaaacaggctggtaccggtccggaattcccgggatatcgtcgacccacgcgtccgcgtggacctcgcacagcctctcccacaggtaccatgaaggtctccgcggcagccctcgctgtcatcctcattgctactgccctctgcgctcctgcatctgcctccccatattcctcggacaccacaccctgctgctttgcctacattgcccgcccactgccccgtgcccacatcaaggagtatttctacaccagtggcaagtgctccaacccagcagtcgtctttgtcacccgaaagaaccgccaagtgtgtgccaacccagagaagaaatgggttcgggagtacatcaactctttggagatgagctaggatggagagtccttgaacctgaacttacacaaatttgcctgtttctgcttgctcttgtcctancttgggaggcttcccctcactatcctaccccacccgctccttg

SEQ ID NO: 11156 - DNA, 635 bp, Homo sapiens
  misc_feature 453: n = A,T,C or G
gcattcaatgagaactttttatttcaattatccacaaaacaatattacaatactttataaaaatattaagtttaggctaccattattcatttaaaaaagtgtgctagaaggctgtttttgccaacttccttttttggtaagggttaacttccacattaagacactgaagacgaaaagctgttggaaaatatctccaaatttacaaagttgtttttcttggcaatttaaaaatacagaacaatttaaaatgaatacacattaagttagtgttttatccctactatacaattgttattatataaggaactgctccattcagttaaaacctaatgaataccatcaacttttcctgccttactttcctgattggatttagtacataaacgtaattttgtcacccttttgaatatgcttagaaaaattacaatatcatagttcacataaagcccttanaaaatctcatgtcacaagttgttgataagaggaaataatgacagcactcttcttaggaagaccctcttggtagagagtgtcaatactaagcagggtacgtaaacagaaaaaacaaccacaatttttagtaccagaaaccactgcaacttgcatgaagccatctgcacattttaaaaatggtt

SEQ ID NO: 11157 - DNA, 670 bp, Homo sapiens
acgcgtccgggggacctgatgtaccacatccaggacaaaggccgctttgaactctaccgtgccacgttttatgccgctgagataatgtgtggactgcagtttctacacagcaagggcatcatttacagggacctcaaactggacaatgtgctgctggaccgggatggccacatcaagattgccgactttgggatgtgcaaagagaacatattcggggagagccgggccagcaccttctgcggcacccctgactatatcgcccctgagatcctacagggcctgaagtacacattctctgtggactggtggtctttcggggtccttctgtacgagatgctcattggccagtcccccttccatggtgatgatgaggatgaactcttcgagtccatccgtgtggacacgccacattatccccgctggatcaccaaggagtccaaggacatcctggagaagctctttgaaagggaaccaaccaagaggctgggagtgaccggaaacatcaaaatccaccccttcttcaagaccataaactggactctgcttgaaaagcggaggtttgagccacctttcaggcccaaagtgaagtcacccaaagactacagtaactttgacccagagttcctgaacgagaaagcgcgcctctcctacagcgacaagaacctcatcg

SEQ ID NO: 11158 - DNA, 423 bp, Homo sapiens
tgagctgtgggttgtcacatcattcatggcatacggttctgcaaaagatctcatctgtacacacttcatggatggcatgaatgagctggcgattgcttacatcctgcagggggtgctgaaggccctcgactacatccaccacatgggatatgtacacagaatctccagggttatgatgccaagtctgacatctacagtgtgggaatcacagcctgtgaactggccaacggccatgtcccctttaaggatatgcctgccacccagatgctgctagagaaactgaacggcacagtgccctgcctgttggataccagcaccatccccgctgaggagctgaccatgagcccttcgcgctcagtggccaactctggcctgatgacagcctgaccaccacaccccccggccttcaacggtactcgccct

SEQ ID NO: 11159 - DNA, 603 bp, Homo sapiens
ccggcttccaaaagctttattggcaaatatgctctataaaagaatgatcaatcctgttgcctctaagtcaatggaatgaagagctgtgtccagggacacaccacgccgtgctgaaggagactgctgttgtgtccaccttttattcatagacccagtcatgagcacaagacttgtagtcaaccagttcttcaggcttaaaccataggctgatttctttttcagcactttttactgaatcactgccatgaatgatgttcctgccaacctgaatgcagaagtccccacgaatggtgcctggctttgaatctgctggattggtctccccaagcatcactcggcctgtcttcaccacgttcagcccctcccagaccatggccacaaccggccctgagttcatgtacttcaccagcccagggaagaatggtcggtctttcaggtcaatgtagtgctgcttcaggtgttcttcagaggcccggaggaacttcatggccacgaggcggaatcccttctgctcgaagcgcttgatgatctcgcccaccaggccgcgctgcacgccgtccggcttgatggcgatgaaggtgcgcttcagtttggccatggtcc

SEQ ID NO: 11160 - DNA, 555 bp, Homo sapiens
  misc_feature 517: n = A,T,C or G
aaaacacaacaaaataatccttttgttaaaagaatgaccctgggccctcctggccagggcctgagcacatttcagtctgttatgcaggctgagaggccaggctcctccaaggccccatgagctactggttgttgcagccctgtgaggcagaggagctgcctgcctgcttttttctcctcttgttgaggagccggttgttagaggtcttcaggtccttgatcttcacctggtcgtagtctacccgcatagtggccaaggcactggtcatctcctccttgacttcgtcccagtggtctttgtcctcctgcagcactcgggccgtgtggagtggggtctgtggcactaccatcgattggttgatccaggggtggttcatgaactgagtgatggtcagcctctctgtggggtctgtcttcaacaggaggcggatcagctgcttggcatcctcagagacttctgaccactcaggattggggaagcgtactggcccaggcgaatcatcctcttcatccccggngagatggcctggcccgtgttggagtagaagggtgggaa

SEQ ID NO: 11161 - DNA, 163 bp, Homo sapiens
tggtacgcctgcaggtaccggtccggaattcccgggtcgactactactactacaaacgcggccgccgcgacgacaactgcttatcacccctggccaaggacatccatgacaactttggtttcgtggaaggactcatgaccacagtccatgccatcgctgccac

SEQ ID NO: 11162 - DNA, 304 bp, Homo sapiens
tccaccgcggtggcggccgctctagaactagtggatcccccgggctgcaggaattcggcacgagagagccctcgcgtctgggctgcccccgaggttcttgcggacttgaacttcccggcctcctccatctgccagtgtgggcccatggagatccgtgcagacggcctgggcatcccgcagctcctggaggccgtgctgaagctgctgcccctggacacctatgtggagagtccggctgcagtcatggagctggtgcccagcgacaaggagaggggcctgcagaccccagtgtggacggagtacg

SEQ ID NO: 11163 - DNA, 180 bp, Homo sapiens
tccaccgcggtggcggccgctctagaactagtggatcccccgggctgcaggaattcggcacgagcttttgatgacccaccttcaactaaagcagctattgactgggtagatggtaacaaatactccggacatcctatcaaggcttcattcgctactcgccgggcacactttaatcggggt

SEQ ID NO: 11164 - DNA, 657 bp, Homo sapiens
gggtaccgggcccccccgttctgaacaccaccctccatttcattctggaaccgggaaggtacacccaggcatgacaatagcttctctcctcacagaaatttaactgatttcttcattctccatttagcaaggtcatggaagatttggaggaaacattatttgaagaatttgaaaactattcctatgacctagactattactctctggagtctgatttggaggagaaagtccagctgggagttgttcactgggtctccctggtgttatattgtttggcttttgttctgggaattccaggaaatgccatcgtcatttggttcacggggttcaagtggaagaagacagtcaccactctgtggttcctcaatctagccattgcggatttcatttttcttctctttctgcccctgtacatctcctatgtggccatgaatttccactggccctttggcatctggctgtgcaaagccaattccttcactgcccagttgaacatgtttgccagtgtttttttcctgacagtgatcagcctggaccactatatccacttgatccatcctgtcttatctcatcggcatcgaaccctcaagaactctctgattgtcattatattcatctggcttttggcttctctaattggcggtcctgccctgtact

SEQ ID NO: 11165 - DNA, 133 bp, Homo sapiens
tccaccgcggtggcggccgctctagaactagtggatcccccgggctgcaggaattcggcacgagtttacaatgagttgactgaaatcctggtcaggttccagaacaaatgcagtgatatagtttttgcacgga

SEQ ID NO: 11166 - DNA, 473 bp, Homo sapiens
acgcctgcaggtaccggtccggaattcccgggtcgactactactactaaattcgcggccgcgtcgaccttctggaggaatactgttggcgttcaaaagcattgctgtttcaacaatggccaagaacaaattaagagggccgaagtccaggaatgtatttcacatagccagccaaaaaaaactttaaggctaaaaacaaagcaaaaccagttaccactaatcttaagaagataaacattatgaatgaggaaaaagttaacagagtaaataaagcttttgtaaatgtacaaaaggaacttgcacatttcgcaaaaagcatttcacttgaacctctgcagaaagaactgattcctcagcagcgtcatgaaagcaaaccagttaatgttgatgaagctacaagattaatggctctgttgtaatatactggtgatgcatctaattctccacaaagaccaataaattgaatgttttata

SEQ ID NO: 11167 - DNA, 426 bp, Homo sapiens
  misc_feature 20, 386: n = A,T,C or G
ccacacgccttttggacaantgaagtgggtaacctttatttcccttctttttctctttagctcggcttattccaggggtgtgtttcgtcgagatgcacacaagagtgaggttgctcatcggtttaaagatttgggagaagaaaatttcaaagccttggtgttgattgcctttgctcagtatcttcagcagtgtccatttgaagatcatgtaaaattagtgaatgaagtaactgaatttgcaaaaacatgtgttgctgatgagtcagctgaaaattgtgacaaatcacttcataccctttttggagacaaattatgcacagttgcaactcttcgtggaaacctatggtgaaatggctgactgctgtgcaaaaacaaggaacctgagngaaatgaatgcttcttgcagcacaaaggtggacaacccaa

SEQ ID NO: 11168 - DNA, 262 bp, Homo sapiens
tccaccgcggtggcggccgctctagaactagtggatcccccgggctgcaggaattcggcacgaggctaggcagccaggagctctgtccgcaaaaccaaatctgggtgtcagaggccaagaccctggggtgggatcagggaccacccctcacggggcataaggtcagttttcccccagagcccgggtccctgtcccccacagggcaggcggggtccctggagccctggtgtggagcggcgagtcccggggcggtgcctgtctc

SEQ ID NO: 11169 - DNA, 455 bp, Homo sapiens
  misc_feature 435, 444: n = A,T,C or G
gcaccagagttgacttttaatttgtcctaaagccgctgaagcaaaaaccatgataaaacattctgctttcttttcttttacaaccccacgaacgcaaaaaaaaaaaaaacaaaaacaaaacaaaaaaaagaaacaacaacaaaacccaaactatttgtaggaaaaaatggttttgtacatgggatgaaacaatataaattcaaaacttacagataagggttagctctatcactcaactctttaaaaagtttatatgaatatccagtcaaaaccaacacggtattgcccttgaaaatgttaactagacggatttccaaggagaccacaggactgtatactgtcttgggaatgtcctcagaaggctctgtcattgatcagggtaacagttaaaaccccagaggtcctttctttccaaatgggaaaagggggaaagcngagggggcnagaagcttttg

SEQ ID NO: 11170 - DNA, 638 bp, Homo sapiens
tccaccgcggtggcggccgctctagaactagtggatcccccgggctgcaggaattcggcacgagccaatatctacaatcaaccaacaagtcattattaccctcactgtcaacccaacacaggcatgctcataaggaaaggttaaaaaaagtaaaaggaactcggaaaatcttaccccgcctgtttaccaaaaacatcacctctaacatcaccagtattagaggcaccgcctgcccagtgacacatgtttaacggccgcggaaccctaaccgtgcaaaggtagcataatcacttgttccttaattagggacctgtatgaatggctccacgagggttcagctgtctcttacttttaaccagtgaaattgacctgcccgtgaagaggcgggcatgacacagcaagacgagaagaccctatggagctttaatttattaatgcaaacagtacctaacaaacccacaggtcctaaactaccaaacctgcattaaaaatttcggttggggcgacctcggagcagaacccaacctccgagcagtacatgctaagacttcaccagtcaaagcgaactactatactcaattgatccaataacttgaccaacggaacaagttacccttaaggataacagcgcaatccta

SEQ ID NO: 11171 - DNA, 369 bp, Homo sapiens
  misc_feature 10, 15, 22, 37, 40, 42, 44, 46, 50, 54, 72, 78, 88, 105,117, 119, 126, 136, 162, 178, 212, 216, 221, 225, 241, 249,254, 260, 262, 272, 282, 301, 313, 328, 335, 340, 363, 365: n = A,T,C or G
aatcctctcncatgngtggctntaagaacatccttgnccnanangnatangccngctctcttgcttctgacnatctanctgggatggngtgatcctcacaccttnataacctgctangngaagccncgctattatnggaaggagaggaagaagaggagaatncagaagaaccacctcnaggagaggaagaagaaagcctggatctcaggagngacnttccnttcnctcctttttctacccngggggaanactgnaacctnanctgcctgctnctgggctttnctggtgccctcctttccgngggataaggaanattgcgggaagatantaactcntaaantgtattcactgggtttgtttgcncncccc

SEQ ID NO: 11172 - DNA, 754 bp, Homo sapiens
  misc_feature 2, 4, 10, 11, 13, 16, 17, 21, 27, 33, 45, 52, 63, 68, 74,548, 645, 660, 693, 699, 713, 718, 725: n = A,T,C or G
anancttggnntncgnnaaancttgtnttgttncttttggccgancggcctncggctgcgagnaagangacagnaggggttttgagacagagcaatagattgcctccatatcttttaaacattcaggtctcttgtataagaaaaataaccattgtggggtttttgtgcatcttatactaatatgaaacaaacaaaaccccctggatattttatccttagaaagatagaggaagacaggagaagggaatggtcattgtaaattagatagatatattgagtgttagaagattatttaaataattgttcttttgttatttgtactctttgcaaatttatttaaatgcatattcatgtatatcataagtatatattcacatgcatgtctaaatttagtggcatagatctatctcaggggtattaatctttcattcgtgtactgatttgtgttttattttcatttaaaaaattgtggaaccagtggctgggcatggtggctcatgcctgtaatcccagcactttgggaggctgaggcgggtggatcacctganggtcaggagttcgagaccagcctggccaacatggtgaacccccccgtctctactaaaactacaaaaattagctcgcatggtggtagatgcctgtatnccagctactcgggangctgagacaggagaattgcttgaccctggaggnggaggntgcagtgagccganatgcncattgcnctccacctaggcacagaccaaactctgtt

SEQ ID NO: 11173 - DNA, 457 bp, Homo sapiens
tttctccagggctggaaggcttctagaaggttcctcatcaagggaagtgtggctgggggcgccgtctacctggtgtacgaccaggagctgctggggcccagcgacaagagccaggcagccctacagaaggctggggaggtggtcccccccgccatgtaccagttcagccagtacgtgtgtcagcagacaggcctgcagataccccagctcccagcccctccaaagatttactttcccatccgtgactcctggaatgcagggatctaaaagggaaaggaggccgagcacagtggctcacgcctgtaatcccagcactttgggaggctgaggtgggcggatcatctgaagtcaggagttcgagaccagcctgggcaacatggtgaaaccccatctctactaaaaatacaaaaattaaccgtgcgtggtagtgcacacctgtaatcccagctgctgcttg

SEQ ID NO: 11174 - DNA, 724 bp, Homo sapiens
  misc_feature 517, 645, 651, 655, 678, 696, 699: n = A,T,C or G
ggggacttaaataagctaggtgcggaaatatcataagctaggtgcggtagctcacacctgtaatctctccagtttgggaggctgaggcaggtgaattgcttgggcttaggagtttagggccagcctggacactgggcatggtggctcacgcctgtaatcccagcactttgggaggctgaggcaggcagatcacctaaggttgggagttcgagaccatcctgaccaaccccatctctactaaaaatacaaaattagccaggcatggtggtgtatgcctgtaatcccagctactcgggaggctgaggcaggagaatcgcttgaacctgggaggcggaggttgcagtgaaccgagatctcgccattgcactccagcctgggcaacaagagcaaaactccatcccaaaaaaaagaagaccagcctgggcaacatggtgaaacctcatctctacaaaaaaatacaaaaattagctaggcatggtcatgtgtacctgtaatcccagccactccagaggctgangcacaagaattgcttgaaccagggatgtggaggctgcagtgacctgaggttgtgccactacactccagcggggatagagccagactttgtctcaaaacttaaaaaaataaagccctaccctagccagngctacnctgnatcccgtcttggagctgagcagngatactgagaagattcanacnctggcactgggaaccctttataaaa

SEQ ID NO: 11175 - DNA, 660 bp, Homo sapiens
  misc_feature 1, 9, 26, 551, 557, 567, 568, 569, 575, 576, 579, 582, 593,608, 609, 610, 616, 621, 628, 629, 644: n = A,T,C or G
nacgacagnagggaactggaaaactngtagttattcaacaagcaaacaaagtgttggcagagatgtaattttaaagcacaatcccacacactccttgagtattacagctgctccctgtttatttaataatagaactgatgagtagttaatttgagaggaaagctggtgcaggtgtagtgctatttagatgtcatggaggacacatgtgacctctgcagctagctatatggtaaaagcaaaacagaagttaaaatcagccctatgtcaaatctgcatagttttaggcttcagggagtttctctgtatgttgaggcaggaagtttagtagaattccaagggaataagagaggaaccaacatttgtaaattttgccttctatgggggaactcattcaatcatcaggaggactcttcgataggttttatttgctctggtttacctagatgaaaaattgagacccagaatccatgcttttctttgctggttacacattagaatcaccaatgtgacattaaaacacacacacacacacacacacacacacacacacncacacncgtgcacacnnnttaaannggntgntttcaaaaaanaaaaaacaaaaaaannnggggcngggcntgctggnncacacctgtatcccnccccttgggaggccta

SEQ ID NO: 11176 - DNA, 163 bp, Homo sapiens
  misc_feature 141, 153, 154, 155, 156, 157, 158, 159, 160, 161, 162: n = A,T,C or G
gggggtctccagtgaggatgatgctttagcatgtggtgctaaagctaaagctttatttgttttgttttgttttgttttgtttttgagatgtactccagcctgggcaacagagtgaaactccatctcaaaaaaaaaaaaaanttcattttaccnnnnnnnnnnt

SEQ ID NO: 11177 - DNA, 179 bp, Homo sapiens
  misc_feature 6, 9, 17, 20, 25, 43, 48, 56, 87, 88, 90, 95, 96, 99, 101,108, 115, 122, 141, 147, 168, 169, 171: n = A,T,C or G
agggtnccnctgcgagnagnctacnggaagggtcccgtctgcnaaaanacgacatnagggtgcggctgctgagcatcacgcctgaanngnacagnnttntngaagacnacaggangggtgcntcatgcagagtaagacaantcaagnccatccttgccaacatgactnnancctggtct

SEQ ID NO: 11178 - DNA, 331 bp, Homo sapiens
  misc_feature 10, 13, 14, 25, 37, 40, 57, 70, 90, 100, 104, 108, 128, 129,133, 139, 150, 159, 165, 169, 177, 203, 206, 214, 224, 227,235, 236, 237, 238, 246, 267, 271, 294, 300, 308, 317, 319,329: n = A,T,C or G
tagggttctnctnnttagtaagacnacataagggtantgntggggggaagactacanaagggtacggctncgataagactaccttaaggntacagctgcnagantacnactgaaggtttctgcctgcnntcancactantgattggttcngctgcgganaagacnactnaatggtanagctgcgataatacgacttaaggttncantttgttcngaagactacntanaagttacnnnngcttttantactgacattacgtttcgggnttgnttctaagactacttaatggttcntgcgtncctttaanacttctttncngttctgctgntt

SEQ ID NO: 11179 - DNA, 822 bp, Homo sapiens
  misc_feature 2, 3, 9, 10, 11, 12, 13, 14, 15, 19, 31, 42, 44, 51, 61,64, 71, 649, 726, 733, 742, 748, 766, 768, 783, 803, 810: n = A,T,C or G
anncttggnnnnnnntcancttttcttgttncttttggccgnancggcctncggctgcganagnagacagnagggggaactctcaattgttgctggtggaaattcagactggtacagccagtgtggaatgtgatttggcagtttattaaaaagctaaaaacctaaacttacatagcccagcaattgcacccccaggagtctacccaatggaaatgaaaacagtccgtccccacagagacatggacataaatgttcatagcagcattattcagaatagccccaaattgaaaacaatccagatgtccatcaactggtaaatggataagcaaaccatataatggaaaaccattcagcttccaataacttccaagaaactgtagacacatgcagtatcatggttaaacctcaaaaacattatattaagtaaaataggcgaggcatgtattgtatgagtcatatgaaatgtctagaaaaggcaaatttattgagatagaaagcagatcactggttgcttaaggcctagggtaggagtggggattaactgtaaacgggtacaaggtacctgactggggcaatggacatgtggattgtgatgatagttaaattgtacagctctctctattatagttgtacagctctattaattttncacaatcattgaatcatgtctttcagttttatgaggtaatcatagtccatgaagctttttaaaataaaagataggcntgtgtgnggctccctntgtatnccacactttggaggccangngggggatatgaggtnaggagttcaaaccacctgancactggngaaaccttttcc

SEQ ID NO: 11180 - DNA, 279 bp, Homo sapiens
  misc_feature 2, 27, 28, 29, 32, 40, 41, 57, 77, 88, 89, 96, 108, 113,117, 135, 140, 152, 161, 180, 182, 185, 191, 198, 211, 215,221, 226, 251, 257, 262, 264, 268: n = A,T,C or G
tnatacgacagaatggtacatgctgcnnnaanacgacacnncggttctgctgctaanagaccaccgtacgggtacangcttgtgatannacgacantacgggtacggntgctncaanacgacagaagggttcggntgcgncaatacgactgntcggtactnctgctataagacgacatcnanggntcggtntgctttncaacccttcactngtantgcttntcccnagactcttgcgggtacggctgctanaatacnacatncnggtncggctgctttt

SEQ ID NO: 11181 - DNA, 746 bp, Homo sapiens
  misc_feature 1, 4, 6, 646, 652, 666, 676, 677, 680, 682, 698, 715, 718,744: n = A,T,C or G
nagnanataccatattcataattgtgtttgttcctcacatgacaacatgaggaaaatcctgtcctgcactgtttataaagggagtcagaacattcagtactgtactataataaatgcataccataataaacacactgaatctgaaggaagaagagatgaagaatcagactacaagttaaatgatttgcctgaagtcacgcatatagatttctgggacctgaaagtcaatctgtgcctaagaaatcccttttttttaaaaaaaaaattacaattactgaatgaattttgaaacagaggccataaagacttaaaggtgtgggccaggcacggtggctcatgcctgtattcacagcactttgggaggctgaggcaggtgggtcacctgaggtcaggatttcgagaccagcctgaccaacatggtgaaacccccatctctactaaaaatacaaaattagccaggtgtggtggagcacgcctgtaatcctagctacttgggaggctgacgcaggagaatcgcttgaacccagaggtggaggttgcagtgagccgagatcgcgccactgtactccagcctggacaacaaagcgagaccctgtctctaaaaaataaaaaagaagtagtgctaattcttggagaaaaagataanaaactntggaggcccctcantattcagcannaanantgtggcttggaaaaancctggttttttaaaaantancactggctggggttcatgcctgaatncc

SEQ ID NO: 11182 - DNA, 175 bp, Homo sapiens
atactagaaatctttatagaagaaaaacgcctttaaaaatgattgatatcagctgggcatggtggctcacgcctgtaatcccagcactttgggagacagaggtgggtggatcacgaggtcgggagatcaagaccatcctggccaacatggtgaaacctcatctctactaaaatac

SEQ ID NO: 11183 - DNA, 170 bp, Homo sapiens
ttctccatctgtttggggtaggtgttgagcgaggcaaatggatctcgatatttcagatgggcttttgatgcactgttgccaaggaaggctttttctgattttttgacaaatgaatttttgcacactttcattgtctttcggcaacttacacacattgaaaatgagctatt

SEQ ID NO: 11184 - DNA, 666 bp, Homo sapiens
  misc_feature 1, 152, 170, 172, 201, 224, 291, 319, 325, 339, 386, 403,416, 418, 431, 450, 462, 471, 519, 526, 541, 547, 602, 620,635, 640, 648, 656, 657, 659, 661, 664, 665, 666: n = A,T,C or G
natctcagtaatgtcctagtgtggcggtggttttcaatgtttcttcatggtaaaggtataagcctttcatttgttcaatggatgatgtttcagatttttttttttttaaaaaatccttcaaggaacacagttcaaagagattttcatcgggngcattctctctgcttcgngngtgacaagttatcttggctgctgaaaaanagtgccctgccccacaccggcanacctttccttcacctcatcagtatgattcagtttctcttatcaattggactctcccaggttccacanaacagtaatattttttgaacaataggtncaatanaaggtcttctgtcntttaacctggtaaaggcagggctggagggggaaaataaatcattaancctttgagtaacggcanaatatatggctgnanatccatttttaanggttcatttcctttatggncatataactgcncagctgaanatgaaaggggaaaataaatgaaaattttacttttcgatgccaatgatncattgcnctaaactgatggaanaagttntccaaagtactgtataacatcttgttattatttaatgttttctaaaaaaaaaatntagggggtttccaatggnctaataaaaacattntttgnaaataaanccctgttnnantnccnnn

SEQ ID NO: 11185 - DNA, 175 bp, Homo sapiens; identical to SEQ ID NO: 11182

SEQ ID NO: 11186 - DNA, 300 bp, Homo sapiens
cggctggagccgaatgcccaggcccagatgtaccggctgaccctgcgcaccagcaaggagcccgtctcccgtcacctgtgtgagctgctggcacagcagttctgagccctggactctgccccgggggatgtggccggcactgggcagccccttggactgaggcagttttggtggatgggggacctccactggtgacagagaagacaccagggtttgggggatgcctgggactttcctccggccttttgtatttttatttttgttcatctgctgctgtttacattctggggggttaggggg

SEQ ID NO: 11187 - DNA, 374 bp, Homo sapiens
gaagcgcagtgcccagaactcggagccagcccggcccgggggaccctgctggccaaggaggtcgtcagtccggtcttgtcttccagacccggagaccgaagcttccggacgacgaggaaccgcccaacatggcctcggagagtgggaagctttggggtggccggtttgtgggtgcagtggaccccatcatggagaagttcaacgcgtccattgcctacgaccggcacctttgggaggtggatgttcaaggcagcaaagcctacagcaggggcctggagaaggcagggctcctcaccaaggccgagatggaccagatactccatggcctagacaaggtggctgaggagtgggcccagggcaccttcaaactgaac

SEQ ID NO: 11188 - DNA, 483 bp, Homo sapiens
  misc_feature 283: n = A,T,C or G
agtggatcccccgggctgcaggcgtttgcatgaatttgaagacacaggcttgtacacagatgttttacactcacgtttgtagatgaaacagatcactgtgctgtccttcctaggggtgcaggaagtggacagggcggagggtttgaaagaatattgagccaaagcccaggctccctttgggaatcatgttagcccatcagaatgttgaaggattgaagagttctaagcataaaataagtggcattttctgacttcttcctcctcctccttccctgactcacangaagaatgcaatcacccagcaagtcctacctgttacgcaattttttatctcaaaatgccgaacgagaaaactgtccattttctgagacccccagaaaggaaactgaccctcagcagctgcctgattgttacgcgaatctagctttaacggaagcaaattcattattttttaaatgcagtggacttttcaaaaagtttaaa

SEQ ID NO: 11189 - DNA, 647 bp, Homo sapiens
  misc_feature 548: n = A,T,C or G
agcttgcggccgccatcatcctcacctatgatgtgaatcaccggcagagcctggtggagctggaggaccggttcctgggcctgacagacacagccagcaaagactgcctcttcgccatcgtggggaacaaagtggacctcactgaggagggggccttggcgggccaggagaaggaagagtgcagtcccaatatggacgctggggaccgtgtctccccaagggcacctaagcaggtgcagctggaggatgcggtggccctttataaaaagatcctcaagtacaagatgctggatgagcaggatgtgccggccgctgagcaaatgtgctttgagaccagcgccaagaccggctacaatgtggacctcctgtttgagaccctctttgacctggtggtgccaatgatcttacagcagagagctgagaggccgtcacacacagtggatatatccagtcataagccacccaagaggaccagatctgggtgttgtgcctgactttcgagggcctcctggactcagactgtgcatgttgggaaggggtctgaccangcaagctgtgatctgaaaggagcaaggaacagcaaggaattattttccagaatgacacccgcagcagaatgttggagtggaaatgatggctggctatga

SEQ ID NO: 11190 - DNA, 641 bp, Homo sapiens
ttcggcacgatggtaagaataagctagtccagacgctgactaaccaaggttttgaaataagaaataccgaagacctaactgaagaatggttacgtgagaaacttggattttttcactaatgtgaacttctgtgtttctaaagtatttatgtattaacctgaccatactggaatcagacataaatacttatttatgcctaaaaatgcactgttacttacagtttgtttcctgcagtaaagaaaaattcttcatttgtgcaaaatttgaacaaagaggaaatcatcttcatagtaatgaaactttgtaaagtgtttccttatattggtaattgttaggtggactacttttctccagggactttttgcactcttgtgactaatttctataacttatggttcggaatttgttactatttacagacaccattggaaagtggatatattagattgtgagagacaacagttgcctccttttgacaaatactggatattagcagtttatttatgaaaatagcgtattatcacttgtcaaatcattgaaattcatttggggtcaaagacttgagtgacccagtattgagccatgaataatttagtgtaacctgtattacaagtacattgatgaattctgtatcttctttg

SEQ ID NO: 11191 - DNA, 533 bp, Homo sapiens
tcggcacgaggtaaacatacaacacaagctggccttgtgttgctggttcctattcagtatttcctggggattgtttgctttttaagtaaaacacttctgacccatagctcagtatgtctgaattccagaggtcacatcagcatctttctgctttgaaaactctcacagctgtggctgcttcacttagatgcagtgagacacatagttggtgttccgattttcacatccttccatgtatttatcttgaagagataagcacagaagagaaggtgctcactaacagaggtacattactgcaatgttctcttaacagttaaacaagctgtttacagtttaaactgctgaatattatttgagctatttaaagcttattatattttagtatgaactaaatgaaggttaaaacatgcttaagaaaaatgcactgatttctgcattatgtgtacagtattggacaaaggattttattcattttgttgcattattttgaatattgtcttttcattttaataaagttataatacttatttatg

SEQ ID NO: 11192 - DNA, 627 bp, Homo sapiens
aagcttgcggccgccgcgtgtactacgatgaaggggtggccagcagcgacgatgactccagcggagacgagtccgacgatgggacctccggatgcctccgctggtttcagcatcggcgaaatcgccgccgccgaaagccccagcgcaacttactccgcaactttctcgtgcaagccttcgggggctgcttcggtcgatctgagagtccccagcccaaagcctcgcgctctctcaaggtcaagaaggtacccctggcggagaagcgcagacagatgcgcaaagaagccctggagaagcgggcccagaagcgcgcagagaagaaacgcagtaagctcatcgacaaacaactccaggacgaaaagatgggctacatgtgtacgcaccgcctgctgcttctagggagaaaagtggtgccgagcgacactgagggtcgtttccggctggacaggccagcgccagcaaccgtaagctggacaggcaggggcttcagcgtttcctcacttctcattcgttcgccaaaccctcccgcctttacagttgaaaaaccagacacacaggtgctggagaatctggtaaaagcaccattgtgaagcagatgaggatcctgcatgttaatgggtttaatgg

SEQ ID NO: 11193 - DNA, 587 bp, Homo sapiens
tcggcacgagggctggtacgagctacgatgcggcccaagagcgcttcgcctttttgccaaggctctctcgcctccgggtgcctgcttgccgtcgtgcgttggcttctttgctgtccctgcgcaggcgtatctggcgcacgacaccttcaaacagcgcctggacattgtggtgcaatgccgctgatgtctcaatgaacttgcagtcaaagaccaccgcgcaggcccggccctcatccaccgagacctcacgagagcgcaccaggtcgctcttgttgcccacgaggatgatgggcacatcatctgtttgccgtgcacgccgcagctggacccgcagttctgaggccttctcgaagctgcccttgtccgtcactgagtacacaatgacatatgcatcccccatggccatgcagtggccgggcaaccagcggcccccgtcctgctcccaaatgtcgtagaccatgagtgatgcctcttctccgtccactacaatggagcgatcataggtgtgccctgctgcctctgcttcaggcccgtcctccacaccgccgaagatgcgcgccagggcgctcttgcccacgccgggcgcc

SEQ ID NO: 11194 - DNA, 552 bp, Homo sapiens
  misc_feature 451: n = A,T,C or G
actctgtggtcaaggaactgctcgctgagcacagctgcacagtgctgtcagaacggccgatctccagcccaagatgattccagcagtggtcttgctcttactccttttggttgaacaagcagcggccctgggagagcctcagctctgctatatcctggatgccatcctgtttctgtatggaattgtcctcaccctcctctactgtcgactgaagatccaagtgcgaaaggcagctataaccagctatgagaaatcagatggtgtttacacgggcctgagcaccaggaaccaggagacttacgagactctgaagcatgagaaaccaccacagtagctttagaatagatgcggtcatattcttctttggcttctggttcttccagccctcatggttggcatcacatatgcctgcatgccattaacaccagctggccctacccctataatgatncctgtgtcctaaattaatatacacccagtggttcctcctccctgttaaagactaatgctcagatgctgtttacggatatttatattctagtctcactctct

SEQ ID NO: 11195 - DNA, 176 bp, Homo sapiens
  misc_feature 4, 7, 32, 65, 74, 93, 104, 107, 110, 118, 132, 134, 143,149, 153, 154, 158, 163, 172, 175: n = A,T,C or G
gggntcngctgccagtatgacaacccaatgtntccgctgcaccaacgacgtacattattaccctnactgtcagnccacacacagacggtgtcncgtctgcgganaanacnacagaaanggtacggctgccantngacgacttnttggtncggnntgcnagaanacgacagantgnt

SEQ ID NO: 11196 - DNA, 664 bp, Homo sapiens
caagctacttgttctttttgcaggatcccatcgattcgaattcggcacgaggcaaggttgtgacattgtcacttttttgttctagactcttttaaattttctgcatttgcctgaaaagcacccctgtaagaatagatttctcatggctctaaaaattattcccaagaataccttacttggttcaaaagcagactgtttctcttcatttcatctcaaatcagacttctgggcaagatgttctttagagtaagcaaacctacaacctaaaaatctcttcaagaggcatctctggtcttgtgacaagacctcttcaaaaacccacagtaaaactcccctccctccagttggccaccagtctgccaccaaacatgaacaaattctgctgctaatcggtttcccttgtgatctggttcctgaggtcttcggatctgtgcaatgaattatttattgttttattaaaccgacagtggtgtcccagagaggaaccataaataaaatggaaatctggtgctgtgataaagtaataactagcattaatgagacctggttttcctttcagaaagtccagtatacctgtaacaaaggttaaagcaatttatatttaatttgcattctgatgttaacatttaaacagcaattctaacaaaaatgcatcgagtctaat

SEQ ID NO: 11197 - DNA, 814 bp, Homo sapiens
  misc_feature 2, 8, 13, 14, 25, 38, 45, 55, 58, 66, 789, 803, 806, 810,813: n = A,T,C or G
gncctacnatacnncttgcttgttncttttggccgcancggcctncggctgcganagnacgacagnagggtgtcttatgcctgtaatctcagcactttgggatgggaggccaaggtgggcagatcacttgagctcaagagtttgagaccagcctgggcaacatgacaaaaccccatctctacaaaaaatacaaaaattatccaggcatggtggcatgtgcctttagtcccagctatctgggggctgaggcgagaggattacttgagctcaggaggtcaaggctacaatgagccatgatcatgccactgcactctagcctgggtgacagagtgagaacctgtctcaaaatgataataaataaataaataaataaataaaacttatctgcatcagaagataccacctccccacccaacaaaaacatgattgaattgtttgggataatgtattttcaattcatagaaatagacacagaattagtaatacagaaggaactccatatatatatatgtatataaagaaggccaggtgtagtggcccacacgtgtaatcccagcactttgggaggccaaggtgggaggatccttgaggccaggagttccagaccagccttggcaacataatgaagccctctacaaaattacaaaaattagccagacctggtggtgcacatctgtagtcccagctactcaggaggctgaagtgggaggatcacttgacccagagtttgaggctgcagtgatctatgattgcaccctattttcagcctgacacaaacagacccctttntttaaaaaaaaaanaancctnttng

SEQ ID NO: 11198 - DNA, 694 bp, Homo sapiens
  misc_feature 5, 10, 27, 179, 541, 558, 567, 637, 651, 675, 681, 685, 690: n = A,T,C or G
acagnaaggnattcatacctctccaangaccagcttttccccagccagggccctcagccttccctgctgccccagtgattgattgagagagctgttggggtttctctgccaatgacccctgggagagggactttggtagggtcatgataaagtggcgggggtctggtcctgctcagggntttcatccttcctcctctccctcctctgtgactgtggatatggttataaggtggttgcacctgggagccctgacaactggctgcacaaattccaaaagtaaaggtgtcagtccctgtggccttccttggggcttctctgaccacatgtgcccaacttcaataagagaaccaagggaccctcattttctggggtgcttggctctgattcagggctttgcaaggggttagaagctgactgtaaaaatgggaagaggcaacggaagacatttatttctcctttggattttggggagaaccaagccctggtagggaagaggtaagggggatgattcacctccatatttcctaagcaggttgtatanggagccggtggcaggangaaggctgntttcacaaatgacttgtaatgtcgtgattaaaaaaattcctatattcttctgcaaatcaaacgttctttnccaatccaatccanccttggtttattttaaattaaatnttaaantacnatttntact

SEQ ID NO: 11199 - DNA, 541 bp, Homo sapiens
atggcaacatgacagaggaccatgtgatgcacctgctccagaatgctgaccccctgaaggtgtacccgccactgaaggggagcttcccggagaacctgagacaccttaagaacaccatggagaccatagactggaaggtctttgagagctggatgcaccattggctcctgtttgaaatgagcaggcactccttggagcaaaagcccactgacgctccaccgaaagagtcactggaactggaggacccgtcttctgggctgggtgtgaccaagcaggatctgggcccagtccccatgtgagagcagcagaggcggtcttcaacatcctgccagccccacacagctacagctttcttgctcccttcagcccccagcccctcccccatctcccaccctgtacctcatcccatgagaccctggtgcctggctctttcgtcacccttggacaagacaaaccaagtcggaacagcagatagcaatgcagcaaggccctgctgcccaatctccatctgtcaacaggggccgtgaggtcccaggaagtg

SEQ ID NO: 11200 - DNA, 543 bp, Homo sapiens
  misc_feature 5, 7, 422, 447, 453, 486, 488, 495, 500, 501, 505, 509, 515,516, 526, 530, 538, 539, 540, 541: n = A,T,C or G
acagnangggagctttactcattcctcttcctgttgagttttgaatgatttcccattgcctaaggggtgaaatcccaaactctgtgacttagcgttaacctctatcagctctgtccttagccagtgtactaatttaccctgaataactttgttaccccgtctttccctgacttcccaagtaaagaattgtttcttcttcaggttgccatagcagttgatgcggttctgtagtaggcacctgtcacggtgtaaaggtgatgcaccgtgacaggtgctctgcttgtttccttcgtctttgtattcccaatgcttagtgcttttgttgacacatactaggggttcagtaagattaaattgcagtatctgcccaagagaaatgagaacaaatgtccacattaaaacttgtacatgaggctggtggnggggggctcatgccagtaatcccancacttngggaggccaaggcaggagaattacttgaggccnanagttcangaccnncccnagcnacatanngaggccctcntctntacaaaannnnaa

SEQ ID NO: 11201 - DNA, 435 bp, Homo sapiens
  misc_feature 4, 6, 18, 19, 20, 39, 42, 47, 53, 59, 69, 71, 243, 401, 411: n = A,T,C or G
gggngntctaatgcttgnnntgattctccgtctataacnggntaatncttggncctacnaaaaggctangngaattcggcacgagacctgtaccgcctggccactggctgtcaccggcgtgatgagctgccggtgtttgaacgcaacctatgctggactctcccggcagactgcctggatatggtcgccatgcaggaagccgcccagcacctcctcggcacacacgacttcagcgccttccantccgctggcagcccggtgccgagccccgtgcgaacgctgcgccgggtctccgtttccccaggccaagccagccccttggtcacccccgaggagagcaggaagctgcggttctggaacctggagtttgagagccagtctttcctgtatagacaggtacngaggatgacngctgtgctggtggccgtggggctt

SEQ ID NO: 11202 - DNA, 717 bp, Homo sapiens
  misc_feature 529, 560, 641, 672, 676, 677, 691, 706, 712: n = A,T,C or G
aggggactctgatgagggctcagacttgataacacccgtggtgccccatccctataggagctggtgagattgcagcctgctgcctcccctccatcagccacagctattggatttcccacccagaatctttaggtaaatgaggtaagtcctgatttttaaaacttcttttgaatctggaatccaaacacctgagtggaaagagaagcctgctttaaactggacagatgaaactagaacagactcttggagacggctggcaggaagtgaagctcaccttacctgggcttacctcactgggtcaaatcagaattttattttggagggcaggttggctactttggatattatctgtgaatttcctgcatgtctggacttctaatctctgtgaatttaaaagccccctcgtttccctatgcctgggtggcaaaaccattcccctgggttgaattcttctggaacaaataggcagctagagataggtggctctgatatagctcagagaagaagtggttggctaagtagctgttanggctcaaagtacacggtctcgctttctaaanatgtcttctgctggtaatttttctgacttatgagctcatggaaggcaatttgttttaatatgttccagactggaaatggtngaataggcagaacataccatccctggaaaanggcnngcagccaggcggcnaggtttgggaagctnattttncaaac

SEQ ID NO: 11203 - DNA, 488 bp, Homo sapiens
agattacataggaagaacaatcacatcagtaagttatagtttatattaaaggtaattttctgttggctcataacaaatataccagcattcatgatagcatttcagcattttccaaggtaccaagtgtacttattttgttgttgttgttgttgttgtattttagaaggaattcagctctgatgtttttaaagaaaaccagcatctctgatgttgcaacatacgtgtaaaatgggtgttacatctatcctgccatttaaccccacagttaataaagtggctgaaaataatagtagctctggcttggtgcttgacctggttaaatactgtcttaaagctcatacaaaacaaataggcttttccataagtggcctttaagaaaacatggaagacaattcatgtttgacaaatgctgacagggtgaagaaagcccagtgtaaaaatgaatcgcgttttaagtgattcggttaaagagtttgggctcccgtagc

SEQ ID NO: 11204 - DNA, 432 bp, Homo sapiens
tttgtacaaaaaacaggctggtaccggtccggaattcccgggatatcgtcgacccacgcgtccggtgatggcctatgactggtttgtagccatctgtcacccgctatatcattcaccatcatgaacccgtgtttctgtgcctttctagttttgttgtctttttttttctcagtcttttaaactcccagctgcacaacttgattgccttacaagtgacctgcttcaaggatgtggaaattcctaatttcttctgtgacccttctcaactctcccatcttgcatgttgtgacaccttcaccattaacataatcatgtatttccctgctgccatatttggttttcttcccatcttggggacccttttctctttctctaaaattgtttcctccattctgagggtttcttcatcaggtgggaagtataaagccctct

SEQ ID NO: 11205 - DNA, 455 bp, Homo sapiens
tctccgtccctgccccagcaagacaacttagatctccaggagaactgccatccagctttggtgcaatggctgagtgcacaagtgagttgttgccctgggtttctttaatctattcagctagaactttgaaggacaatttcttgcattaataaaggttaagccctgaggggtccctgataacaacctggagaccaggattttatggctcccctcactgatggacaaggaggtctgtgccaaagaagaatccaataagcacatattgagcacttgctgtatatgcagtattgagcactgtaggcaagagggaagaaagagaaggagccatctccatcttgaaggaactcaaagactcaagtgggaacgactgggcactgccaccaccagaaagctgttcgacgagacggtcgagcagggtgctgtgggtgatatggacagcagaagggggagaccaa

SEQ ID NO: 11206 - DNA, 394 bp, Homo sapiens
  misc_feature 104, 197: n = A,T,C or G
gttgatgtgacaaacagcatttattccagactccagtgtccacagatgatggggtggggcggaggtagggcgggggcaggagtgggaccaggggcggggtgagnggggggaatccagtgtcagactctgcagcaagacgtcaggtggggggaccagcaagggaggcgggaggtaaaaatagctccggccagccgacnccctgagccttgtcccaggctgggccttgggcttgggtccaggagctattctggggcctgggagagtcacattccctggagggagggcccctccacccacccaccctccctctccttccctcccggaggcaggcagccacttggggtccctgccttgcccgcagaggaaggaagggagggctgggcaaggagaggga

SEQ ID NO: 11207 - DNA, 635 bp, Homo sapiens
ttttagcaatgacattaacaagattttgccaggttataaaaatgagggctttcttgagaattacttatagtttccgagttgaatggcagagcgcacgtagacacatctgaaggtggatggctgtatctcccagtactggaccgggttgctgaaaagactcacacccgaataagaagcctttttggtgttgtgtccaggtgggcagaagtcacttgatccaactacagagatattgttgttatgaaggtagacaacctggatgtacttatgctctgccagcccaccaggtactctggtaagcttgttgttgtccaagtgaagctccctcagatgaggcgtgttggccagagagccattgtcaacagcagagatgctgttgaaactcaatcccaacttagccaaattattcagtcctttcaggctagctgcatcaactctgctgatttgttgccatcaagatgtaattccgtaagggaaggaggaagaccttgaggaatgctggtgatattgtatcagcaatgcggatgtaggagagcttcttcattccctgaaaagccccattttcaattcctgagctcttaagcgggatggtggcccagtctatgacaattcatctggtcagtccatttaaagta

SEQ ID NO: 11208 - DNA, 516 bp, Homo sapiens
tgacactatagaacaagtttgtacaaaaaacaggctggtaccggtccggaattcccgggatatcgtcgacccacgcgtccggtacattgagctccatagagacagcgccggggcaagtgagagccggacgggcactgggcgactctgtgcctcgctgaggaaaaataactaaacatgggcaaaggagatcctaagaagccgagaggcaaaatgtcatcatatgcattttttgtgcaaacttgtcgggaggagcataagaagaagcacccagatgcttcagtcaacttctcagagttttctaagaagtgctcagagaggtggaagaccatgtctgctaaagagaaaggaaaatttgaagatatggcaaaagcggacaaggcccgttatgaaagagaaatgaaaacctatatccctcccaaaggggagacaaaaaagaagttcaaggatcccaatgcacccaagaagcctccttcggccttcttcctcttctgctctgagtatcgcccaaaaatcaaa

SEQ ID NO: 11209 - DNA, 616 bp, Homo sapiens
  misc_feature 538: n = A,T,C or G
aagtttgtacaaaaaagcagctggtaccggtccggaattcccgggatatcgtcgacccacgcgtccgagctggtgttcctctttattggctcagacgctttcaactgctgtacttttctctctggcttcttgctattggctgggactcaagatggaaacatttatcagctggatgtgaggagtccaagggctccggtacaagtcatccacagatcaggagcaccagttctatccctgctaagtgtcagagatggattcattgctagccaaggtgatggaagctgttttattgtccagcaagacttagactatgtcactgagctcactggggctgactgtgaccctgtgtacaaggtagccacatgggagaagcagatctacacatgctgtcgagacggtcttgtacgacgctaccagctttctgacctctgacttcttggaaagagcagtcccggttagtgaaaaggtttgaccctgatcaacaatgagcagaaacatcatcagtccttcccaaggaccatggcgtttaatgtcttgngcaccccttggaaatacagaaagtcagctgtactggccgtgtggaactctcatcccaagacctactttgaactgagta

SEQ ID NO: 11210 - DNA, 111 bp, Homo sapiens
ggggggcttccctgagggggggggggctccccttccccctttttttttggggccctaaaaaagggtttttaaccccggggccccccccccaaatttttggcctttttaaaa

SEQ ID NO: 11211 - DNA, 753 bp, Homo sapiens
  misc_feature 582, 704: n = A,T,C or G
tttcttgatcaacatttttattttatttttttaggtgaagtagaacacaatagaatggctcaaaaatatcagaatgcactacgcacatcacgagtaaatactgtttggtaaaacttgtttcagttaaatatgtacgtgtccgtgcatgtcatgattaaatatccttcttaccacagtcaccctaaagaaccaaagcttaggactagggacacaaccatgcagaaagagcagggagaccagacactctgggttgagatgatgaatttaatgccgcagccgacacccacattcacactttggctccttcagacaacttgatctttgggactagaatttgtacagagtcaaacaccacatagaagcacgtggccgccacacacaacactcctttttagtgagagggacaagatacctatgtctcatgatcaaagtactcttttattcttaaataaaaatcttaatttgctttgacctccaaaggctctaatcccagtctccaaattcgtctcaagggatgttctcttcatgtggggccggtttaaacagaggctgcctcaccagagcagcctttcagtcctgcangtgtctctaatccatggtatgtacatgtcagtttgtgcaggcagggaacacacatgacagagaactactttggtgtacttggacgggtgtgttcttcactggattttgtgactgcttcatgnatgacgtgccacgtaatctatattttgtggttagccactccgttgattc

SEQ ID NO: 11212 - DNA, 484 bp, Homo sapiens
gccaccacagagcagaataggttaccggaattcattgagacaaactaacaaaactaaacagtcatgcccatttggaagagtcccagttaaccttctaaatagcccagattgtgatgtgaagacagatgattcagttgtaccttgttttatgaaaagacaaacctctagatcagaatgccgagatttggttgtgcctggatctaaaccaagtggaaatgattcctgtgaattaagaaatttaaagtctgttcaaaatagtcatttcaaggaacctctggtgtcagatgaaaagagttctgaacttattattactgattcaataaccctgaagaataaaacggaatcaagtcttctagctaaattagaagaaactaaagagtatcaagaaccagaggttccagagagtaaccagaaacagtggcaatctaagagaaagtcagagtgtattaaccagaatcctgctgcatcttcaaatcactggcag

SEQ ID NO: 11213 - DNA, 513 bp, Homo sapiens
agcgctcaaaaagatgcccaacgtcttccagaatctggtctcttgcaaaagggtcttccgggaattgaagatgttgtgtttttttaagcatgataatgtactctctgcccttgacatactctaacctccacacattgactattttgaagaaatatatgttgtcacagaattgatgcagagtgacctacataaaattatcgtctctcctcaaccactcagctcagatcatgtcaaagtttttctttatcagattttgcgaggtttgaaatatctccattcagctggcattttacatcgagacattaagccagggaatctccttgtgaacagcaactgtgttctaaagatttgtgattttggattggccagagtggaagaattagatgaatcccgtcatatgactcaggaagttgttactcagtattatcgggctccagaaatcctgatgggcagccgtcattacagcaatgctattgacatctggtctgtgggatgtatctttgcagaactact

SEQ ID NO: 11214 - DNA, 577 bp, Homo sapiens
tcggcacgaggtcggtctgaggaaggccgggacatggcgaaccggatcagtgcctttggctaccttgagtgctcagccaagaccaaggagggagtgcgggaggtgtttgagatggccactcgggctggcctccaggtccgcaagaacaagcgtcggaggggctgtcccattctctgagatccccaaggcctttcctacatgccccctcccttcacaggggtacagaaattatccccctacaaccccagcctcctgagggctccatgctgaaggctcccattttcagttccctcctgcccaggactgcattgttttctagccccgaggtggtggcacgggccctccctcccagcgctctgggagccacgcctatgccctgcccttcctcagggcccctggggatcttgccccctttgaccttccccaaaggatggtcacacaccagcactttatacacttctggctccaggaaagtgtctgcagtaggggacccagagtcccaggcccctggagttgttttcggcaggggccttgtctctcactgcatttggtcaggggggcatgaataaaggctaca

SEQ ID NO: 11215 - DNA, 612 bp, Homo sapiens
  misc_feature 3, 550, 566, 569, 572, 575, 576, 586, 600, 610, 611: n = A,T,C or G
agnacgacagaaggggtgcacgtccatgacttgcagagctttggccttgacaacatcaacatgacccactacatccagcacctgtcatttggggaggactatccaggcattgtgaaccccctggaccacaccaatgtcactgcgccccaagcctccatgatgttccagtactttgtgaaggtggtgcccactgtgtacatgaaggtggacggagaggtactgaggacaaatcagttctctgtgaccagacatgagaaggttgccaatgggctgttgggcgaccaaggccttcccggagtcttcgtcctctatgagctctcgcccatgatggtgaagctgacggagaagcacaggtccttcacccacttcctgacaggtgtgtgcgccatcattgggggcatgttcacagtggctggactcatcgattcgctcatctaccactcagcacgagccatccagaagaaaattgatctagggaagacaacgtagtcaccctcggtgcttcctctgtctcctctttctccctggcctgtggttgtcccccagcctntgccaccctccacctnctnggncanncccaccccangatgataatctatngattgattgnna

SEQ ID NO: 11216 - DNA, 660 bp, Homo sapiens
  misc_feature 563, 626, 640: n = A,T,C or G
cacaagctcttttccagcagcttgttaaattccttgacttggagtagcctgactcttgtatggacctctagtgtcttgtcccctctgtgctctcccagtcctccctccctctcttttcattatgtagcttagataccggctccgtctccagcacccttccaagttctgtttttctggggtttttttgagacagagtttcactcttattgcccaggctggagtgcaatggcgcgatcttggctcactgcaacctccacctcccagattcaagcaattctcctcctcagcctcctgagtagctgggattacaggcatgtgctaccatgcccggctaattttgtatttttagtagagacggggtttctccatgttgatcaggctggtcttgaactcccaacctcaggtgggcagatctttggggggctgatgtgggtggattgcttgagcccaggaattcgagaccagcctgggcaacagagcaagacctcgcctctacaaaaaatgtaaaaagttagctgggcgtggtggtgtgtgcttgtaatcccagctgctctggaggctanggtaggaagattgcttgagcccacgagtcaaggctccaggagctatgaccatacatgccgtgncttccagcctgagngcaaagcagagctggctcac

SEQ ID NO: 11217 - DNA, 232 bp, Homo sapiens
  misc_feature 13, 16, 40, 41, 61, 67, 68, 70, 71, 98, 107, 125, 142, 143,148, 156, 160, 162, 164, 165, 177, 192, 195, 205, 209, 218,225: n = A,T,C or G
ggtacggctgctnttnttacgacagatggtacggctgctnntatgaccacagaagggtacngctgcnntnntaccacagaagggtacggctgctattnttaccacanaagggtacggctgctttnttacgacagaaggggtnntcccntctttttnggangncnnggcgggtggccnttttaggtcaggagntcnagacctcctntccnacatggtgnaaccctntctctct

SEQ ID NO: 11218 - DNA, 687 bp, Homo sapiens
  misc_feature 601: n = A,T,C or G
atttttaaatattgtattttcctgttctttgtgaaaacatcaataaatatcgaaacctctctgctctaacacagagggaaacactgcataattaacattaaacaaggcagtatgccttacaagaaagacataaaatgtccaagggatatttagaacattttagttcttaaagcttcaacatgagaaatgttgaccacacactgtgaaatcatttcaataaataacaactgacattcatctttacagttacaaaatagacacacatacatttccctgccgtcacattgatcttactggccattgtcttggattcctcagcctctatcacagtggctgacatgtgatatgtcatcacgaagaaatattaacaaatgactagagaatatctgcaaaccttctatcttcaaattaaatatgaatcaggattgaactaacttgggtttgacctaaaataaacaataaatataatgggagagtgtgcaagtagattcaatcataaccttattttacacataaaatattaacatagaatcttctaaaacaaacaaatgaatgaataaatcaatgaataaatagaagacttctcctaagtgatgctcanacacattaggcgcaatccaggtgggcctctgcaagctggtctctttatacttcttctgatcctgtaagggcaggccttctttagga

SEQ ID NO: 11219 - DNA, 560 bp, Homo sapiens
tgacactatagaacaagtttgtacaaaaaagcagctggtaccggtccggaattcccgggatatcgtcgacccacgcgtccgttggctaagatgaagtgaaaaatgatcaagctattttacatccttttttcatgctgagtgtttgagatctgatgtgtattttacacttacagcacatctcagtttggactagccacatttcaagtgctcagtagccgcgtatggccctatgttggacagcatgcatctaaactaggacttagggaaggggagtctctgatcctcatcctagcaacagccacagttattttttactgggatttttggcatttttacatgtgttagttaatgttactactctgtctccatcacccagtctagtgcctgacacctaacagcaagaatgtaatctgctgtcttaaagcagcacttaactatttgtattattgatgcctaaaccaagaagttctaaatatttatatatatggtatgatgaatggattttttttgtcttcatctattaaaagcaaaaaacaatttcatgtgtatatgatatttat

SEQ ID NO: 11220 - DNA, 602 bp, Homo sapiens
  misc_feature 302, 552, 600: n = A,T,C or G
atatacgaattaaaatttatttcaaactgttttgtacatctttttaaaaaatgaaaattcaaaagtcttagaattaagcaatgagtctttgatatcataaagctgtgtataacaataattaaagtagtggtaacattttacccttgtaaaaatgtcacagaattaaaatctcaacttggatcctcaatgattcaactggtttatcttacacaataagcgtttggtcagtttcaagataaaatttccccagacatgctgtccttaagtccttcctcctcaccatccatcagctcacacattgnggtagctggctgctgtggcgattccacagtggttgttcttgtctttggctatttttacatagccattcgagccccattctggaccccagctgtttttgacgagccaatacttgctgttattcgaatttgctccttcaaagccgtagccaaccaccagaacaccatgatccaggtttttgctgctgcagtctggttcaaaataaatgcctgatttgtagaactggaaggacgaatggcctgcatccatagncacggagatgggccccacagttgcgactgctttcatcagggccttctnct

SEQ ID NO: 11221 - DNA, 416 bp, Homo sapiens
cggcacgaggtggacacaccgactcggctgaggctgccccaggaaccataaggggtgacttcagcgtccacatcagcaggaatgtcatccacgccagcgactccgtggagggggcccagcgggagatccagctgtggttccagagcagtgagctggtgagctgggcagacgggggccagcacagcagcatccacccagcctgaggctcaagctgcccttaccaccccatcccccacgcaggaccaactacctccgtcagcaagaacccaagcccacatccaaacctgcctgtcccaaaccacttacttccctgttcacctctgccccaccccagcccagaggagtttgagccaccaacttcagtgcctttctgtaccccaagccagcacaagattggaccaatcctttttgcacca

SEQ ID NO: 11222 - DNA, 98 bp, Homo sapiens
ctatttaggtgacactatagaaacagtttgtacaaaaaacaggctggtaccggtccggaattcccgggatatcgtcgacccacgcgtccggccactcg

SEQ ID NO: 11223 - DNA, 598 bp, Homo sapiens
  misc_feature 561: n = A,T,C or G
accaacagtagggcagtgcattttatattacaactggtttcttgctctagtaggcttggggatgggtgaagacggacagggctggcgcagaccctttccttctcctctccagcccacagagatctgggcttttacaagacagcctgcttccattcagtagtgtgggaaagttccttcttggcttagcaatacccctgagaccttgttcagtgggctgtgtctctccctgggatgctgggagcaccaagtgtggccgagctagggctgctgacttcctctgggcgcctctgggctgcgagggtctcttacaggaattgaggccctttgctgctccaagaaatgctgaggctgtgggcagaggggtgtacccaaggggactcttgctctgtgtctgacttttggggatccccaggtgggcagggcaggaaggaagcggctcccagcactgcaaaggggcagcagcattacagctcagccttccagacattgtagatccagttgagataggctgagacacttgtgtatactcccctgggtgctcgggccccccgcagccatagncccagcttacgatgcccaccacatgccactggtcagg

SEQ ID NO: 11224 - DNA, 743 bp, Homo sapiens
  misc_feature 512, 622, 623, 700: n = A,T,C or G
tttgcttataaacatcctttattgtacatagacagtggatactgagaatgatcaagtaaatggaattttgaacaggtaaagaggaaacaaagaattaaggtatccctgtggaatagtgcaagaaaggagtgccccacccatagtgttatctacaataggtactccggggaaaggaccccaaggagtcagaccacaaatgtatgaccagcacaattctatgatcaaactctacctctagcaaggcgtctcaacaatcaagttctatttaaatcattcgctcgtgtcttctttcagtcatgatgaaataatgagaatatcataaggaacagaaggtaatgcattggtcaccacccttggagaggctggtgggatgtatctggattagtcctcacggggggtgctattttcctgcatagtcttcattatccagtcaacatagttctttacccgtgtgtagagcccataggtcccacactggggcccccaggacaccaggccagctgcgtagaatntggtcttgtcatttggatcctgtacagcaaaggccccaccactgtcccctttacagctatccatgcccttctctcctccagcacagatcatgtttagagtgaaaacatanngcctctgcatctgcttgtggttttctcactttcacttctttgcattttcttaaaagagcctcaggtaaccttgccgncttgaggcgaaacagacgatctcttcctctctgtccgccccca

SEQ ID NO: 11225 - DNA, 516 bp, Homo sapiens
  misc_feature 449: n = A,T,C or G
tcggcacgaggaccgcgctctacttcctgatccgggcgtttaggttgaagaagcctcagcggaggcgatacggcctcctcgccaacactgaggaccccacggagatggcctcgctggacagcgacgaggagacggtgtttgagtcccggaatctgagatgatgctgagccagggaggcggcccttccagcagccatgagggaaggacaggagatggggcccaccccagtgcccagcaaccccctgctccaccgctcattcccctgctggccccggggctggtctcacccagtgccaacccgagagctccttttggaacctgcacagcccgccgacctgttgccacctgcacccaccgctggaccatgcagcctcgcctcctggatgctgtcccagcctggccgagggtcccaggtgaagactggagggaccccaacagccaccgcccangacgctgaggctcccttgcctgactgtgacttgtgcctctctcctgcccccgtggggacatggcagc

SEQ ID NO: 11226 - DNA, 554 bp, Homo sapiens
  misc_feature 323: n = A,T,C or G
tttgtacaaaaaacaggctggtaccggtccggaattcccgggatatcgtcgacccacgcgtccgaataaagccacctggaaacacgaattctctatggctgcatccagctcaggaaacctcccaaggctatgtaaatagaggactcaggtgcctgtcactttccagccaagcaaatttaaatactgacagacacattttaacagattcagttacttcacagtttggtaaactataatcgcaatttgctccttataacctcttagtaaattattcatctccagtgggggaagactgatgtaatgatctcactttcctaccttangtgtttcatcagtacagacgcctcaccttcccacgcacgcagactcgcagacgccctctgctggaactgacacgcagacattcagcggctccgccgccaatgcaaaactcaaccctaccccaggcagcaatgctatctcagatgcctaccttaatgcctctgaacaaccactctgagcccttctggaagcgctgtcatttcaaccacaacaatactactactccatctaag

SEQ ID NO: 11227 - DNA, 539 bp, Homo sapiens
gtctggctcacctggaggaagaggtccacgacaaggtggttgcccgggacctggttggagccatgttgagcccactgccgcagccacgcccctctgccccccaggtgctggcccaccccttcttttggagcagagccaagcaactccagttcttccaggacgtcagtgactggctggagaaggagtccgagcaggagcccctggtgagggcactggaggcgggaggctgcgcagtggtccgggacaactggcacgagcacatctccatgccgctgcagacagatctgagaaagttccggtcctataaggggacatcagtgcgagacctgctccgtgctgtgaggaacaagaagcaccactacagggagctcccagttgaggtgcgacaggcactcggccaagtccctgatggcttcgtccagtacttcacaaaccgcttcccacggctgctcctccacacgcaccgagccatgaggagctgcgcctctgagagcctcttcctgccctactacccgccagactcagaggccaggaagcca

SEQ ID NO: 11228 - DNA, 454 bp, Homo sapiens
  misc_feature 152, 153, 154, 242, 414, 433, 450: n = A,T,C or G
gtcttttaaaaacatcgtaacattaacacatggccgttcaccgtcccccagcgatgggagctggcctgggccagggtcctccaggatcttcactcattcacagtaacggttctgaccagtcctccaggtcgcacgtggatgcgacaggggtnnngagggaggaggaagtgactgtcccacctctgcaggaccatgggagtgggcaaggtgttctccggggcgcacccctgaacccaggggtnttgcaggacttgggcggcactcagcctctgcttggcgtcacggaccagcagcttggagatgaggtctttggcagcgcaggaagatgtgggcccagtccttgtcggggaactcgtacttgccctcctggatgctctcaaacagcatgttctggcaggcagggcaggcctcgcngcgggtcccagccgcagtngctgccacagcggcccncgaa

SEQ ID NO: 11229 - DNA, 487 bp, Homo sapiens
cggcacgaggcctgacttgaaatctcagcccagtgctgagtctctagtgaactaagctcctacaccatcgggctggacctgcacagtcttgaggccgaccaagagccagggagccagatggtggaggccagcctctccgtacggcacccagagtacaacagacccttgctcgctaacgacctcatgctcatcaagttggacgaatccgtgtccgagtctgacaccatccggagcatcagcattgcttcgcagtgccctaccgcggggaactcttgcctcgtttctggctggggtctgctggcgaacggcagaatgcctaccgtgctgcagtgcgtgaacgtgtcggtggtgtctgaggaggtctgcagtaagctctatgacccgctgtaccaccccagcatgttctgcgccggcggagggcaagaccagaaggactcctgcaacggtgactctggggggcccctgatctgcaacgggtacttgcagg

SEQ ID NO: 11230 - DNA, 455 bp, Homo sapiens
  misc_feature 186, 212, 345, 367, 388, 403, 417, 431, 451: n = A,T,C or G
tttgctactggtgggcttgaaagcagttagtttattagcacaatggttgccaatatgcaatcgattagttttcggctcttctttactggaagctacattgtctatttctcctccaagaccaaccactttaagtttagatctcactaaaaacaccacagaaaaactccagcccagttcaccaaaggntatctttacattcaaatgcagctgtncagaaaagaaaacctcaaagactggatgaatggacgatgtaccatagaggagagagagaggagcgtgtgtctgcacatcttcctgcagatcgcagaggcagtggagtttcttcacagtaaaggactgatgcanagggaccttcaagccatccaanatatcctttacaatggatgangtggtcagggttggngacctttgggttangtgactgcaatggncccaggattaggaagaacanacgg

SEQ ID NO: 11231 - DNA, 469 bp, Homo sapiens
tcacataaacacactcaagtatgagtctttcattttctgaaaacaagaacacaggaaaacaagtccttttccctctcccctcagaaatgtgtgcattttcccaccaggctaacagtggctacctctgcaccacatcactgatttcctgtacacatgacaataagttattaaggacagggtttgtcccgggcacaccagcagctgctgaagaaacctgtagctcctgcaggctgagttccagtttgctcacagcctctcggaaggcaaatttgttgcgagtttgagggatgcagtccacatagcctgagcagtagtcaagcagctggtgtccagtgtctaccagctggctgttgggcacaggttccgtgagtgcactggacagtaggtcagcacattccagcagggcctctttgctgattttgtctgctgagattttactcagcggctgtttggtttttctcagagccac

SEQ ID NO: 11232 - DNA, 809 bp, Homo sapiens
cttagcgtttcttcattatgatttattggtccctccctgtccctcccacccgtcctcacccaccccactgcacccctggaggggaagggtcctgtggagacagcgagggggtccccatcaccccagggcatcaggccgatcggccggtgaccttcctgatccaggacacgtaaggcgccacagcggtggccacgggaggcttgaagatgtcagtgcagaccctggagctgaaggacaggactccggccaacacccggcctttgccacacaccaggggcccgcacgagtcacccttgcagggagcctggtccttggagtcggccgccaggcaaaccatgctgggggagaggctgccgttccagaagcggctgttgttacacatgcgggtgtccagcacttggaggtccagctcccgcagcacccgggacaggcgcccgccctggtgggtcagcccccagccggccatgctgcaccgagtccctgctgccaccacctgacgcttactgggcagggccaacggccggatggtccggcttggcttcactttcccgtccagctgaagcagcgcgatgtcgttctccaggcaaggacgggcttgtagcgagggtgctggatggctgccttgatgtagaaagtgagacccgggctgtcccaggtgtggagccccagcaccagcctcagctggccatccgctgggccaggcagtggggcaccgtcacacccattttggtgaccaagacacccccgcacagttgagccatttatctgcatatgcactgtacggctcccattgggattacttcccgccc

SEQ ID NO: 11233 - DNA, 477 bp, Homo sapiens
  misc_feature 277, 386, 428, 433, 449, 461, 468: n = A,T,C or G
gtagcgggtgggccctggcccagcgtcccctgccagcatcctcgtgggctcacagaccccggcctcggagcccgtctggcacccagagtgaccacaagtccagcagggaggcggcgccgccatcgccgtgtccgtgttttctttttcagccccggagagggtcctgacctgggggcttctccaagcctcactgcgccagctccccgcccgctctcttttctcccaagcaaaaccaaatgcgccccttcacctcgcgtgcccgtgcgaggccgggggnttctttcagagcccgcgggtcctctcatacatggcttctgtttctgccgagagatctgttttccaattatgaagccggtcggtttggtcagactcccgacaaccacgtnccaggtaaccggtgggaaaagtgggcagttccgagggcgcanatttngggtggttggcagggnccccagaggttncgggttnaactgggga

SEQ ID NO: 11234 - DNA, 418 bp, Homo sapiens
gacgggctgccaggtttgtcatagcactcatcaaagtccggtcaacgtctgtgcttcgaatataaacctgttcatgtttataggactcattcaagaattttctatatctctttcttatatactctccaagttcataatgctgctccatgcccagctgggtgagttggccaaatccttgtggccatgaggattcctttatggggtcagtgggaaaggtgtcaatgggacttcggtctccatgccgaaacaccaaagtcacaaacttcaactccttggctagtacacttcggtctagccagaaaaaaagcagaaacaagaagccaaggctaaggcttgctgccctggccaggaggaggggtgcagctctcatgttgaggagagctgtttctggcaggagttaggaggaacgtcgacgcgg

SEQ ID NO: 11235 - DNA, 308 bp, Homo sapiens
  misc_feature 118, 167, 202, 246, 264, 278, 289, 302: n = A,T,C or G
tgtcaccaatcctttgcagataatgtatagtgtgtcacaaggacatcgacctgttattaatgaagaaagtttgccatatgatatacctcaccgagcacgtatgatctctctaataganagtggatgggcacaaaatccagatgaaagaccatctttcttaaaatgtntaatagaacttgaaccagttttgagaacatttgangagataacttttcttgaagctgttattcagctaaagaagacaangttacagagtgttttcangtgccattcagctntgttgacaagnagatgatgggatnaatctt

SEQ ID NO: 11236 - DNA, 466 bp, Homo sapiens
  misc_feature 127, 421: n = A,T,C or G
acattgtctaacaccttttattattgctttgtctcctaggagaatggagaccttgaggaggcaggggagtcttccttgttgagaaatctatgcccagcatccagatgtcccgggagcccatgggtcntgggttgctgccctgtacccagagctcctcaagcgctccttggatctggtgacctggaatgggcactggggggcaggaagcatctgagtggctgtgacttggggcaagcctctgcctcattggtcccttggtcaggtgcaggggtgtggaatgatcctagtggggagacagcagaggactgtgtcaaagcccccctgggaatccccgatccagtagcctccttgggtgggttgcagggttgccggaagcttctcttcttcaggtgtcctgatccacccaagtccttgggtctancaggtgctgccaggattgaagctaagacggtggggcacgcggtca

SEQ ID NO: 11237 - DNA, 509 bp, Homo sapiens
tccaccgcggtggcggccgctctagactagtggatcccccgggctgcaggaattcggcacgagtggcagacagcttttcgcttaacgatgccttagctggctctggaaacccaaaccctcaaggatatccgggtgcatgggggaaccagcctggggcagggggctacccaggggctgcttatcctggggcctacccaggacaagctcctccaggggcctacccaggacaggctcctccaggggcctacccaggacaggctcctcctagtgcctaccccggcccaactgcccctggagcttatcctggcccaactgcccctggagcttatcctggctcaactgcccctggagccttcccagggcaacctggggcacctggggcctaccccagtgctcctggaggctatcctgctgctggcccttatggtgtccccgctggaccactgacggtgccctatgacctgcccttgcctggaggagtcatgccccgcatgctgatcacaatcatg

SEQ ID NO: 11238 - DNA, 507 bp, Homo sapiens
tccaccgcggtggcggccgctctagaactagtggatcccccgggctgcaggaattcggcacgagtcgcaatggcattcctaatgcttaccgaacgaaaaattctaggctatatacaactacgcaaaggccccaacgttgtaggcccctacgggctactacaacccttcgctgacgccataaaactcttcaccaaagagcccctaaaacccgccacatctaccatcaccctctacatcaccgccccgaccttagctctcaccatcgctcttctactatgaacccccctccccatacccaaccccctggtcaacctcaacctaggcctcctatttattctagccacctctagcctagccgtttactcaatcctctgatcagggtgagcatcaaactcaaactacgccctgatcggcgcactgcgagcagtagcccaaacaatctcatatgaagtcaccctagccatcattctactatcaacattactaataagtggctcctttaacctc

SEQ ID NO: 11239 - DNA, 444 bp, Homo sapiens
  misc_feature 195: n = A,T,C or G
tccaccgcggtggcggccgctctagactagtggatcccccgggctgcaggaattcggcacgaggactaaaaggactctacccaagaagagctttgaacagatcagtgccaatataactaagtttaacattcagggccttgtcatcattgggggctttgaggcttacacagggggcctggaactgatggagggcangaagcagtttgatgagctctgcatcccatttgtggtcattcctgctacagtctccaacaatgtccctggctcaaacttcagcgttggggctgacacagcactcaatactatctgcacaacctgtgaccgcatcaagcagtcagcagctggcaccaagcgtcgggtgtttatcattgagactatgggtggctactgtggctacctggctaccatggctggactggcagctggggccgatgctgcctacat

SEQ ID NO: 11240 - DNA, 139 bp, Homo sapiens
  misc_feature 122, 137: n = A,T,C or G
aaattctgtgacagatttttggtcaagttgtttccattaaaaagtactgattttgaaaactaataacttaaaactgccacacacaaaaaaaatggtccacaacattctttccttctgaaggntttacgatgcattgntt

SEQ ID NO: 11241 - DNA, 828 bp, Homo sapiens
  misc_feature 8, 9, 10, 13, 17, 28, 39, 41, 57, 59, 60, 67, 86, 102, 641,649, 667, 678, 736, 749, 762, 769, 777, 782, 783, 790, 795,796, 800, 803, 810, 812, 814, 820, 821: n = A,T,C or G
tttgaccnnncgnaaancttgcttgttncttttggccgnancggcctaggctgcganannagacagnaaggtgttgtctccccgtnaaaccctgcttcaggnagccacaacagggcagctggtgactgggatgtctttgaggctcactgttaccagccccagtatcttggctgcactggtgggcctcacagcctcacaccatcatggaggcactcatggtgcccgggcactcctctgtgcaaccctctgagcctcactttcacatcttcaagttacttcctcatctctttcattttccttcttactgaacttgaagaaaacacctctgctctccaagtgcatgcctcggtgcagggctgggcacctttccctccaggtctaggctgagcctgtccctcgccagcacggtcttgtttttgctccttggagccgatcctggggcggcacaggtgctcctgaaaccacctgtcggaggaggactagtgagggactgggcgtggtcatggctgacttcttggcatttgcccgcctgcctttcagtgtgtcctgtgcgcctcccttgggtggggtctccttgcccctgctcccacagggatgttctccagggtgcaggtaggagaactaaacctttcaaagtgtgntcattggnaaaattttggaaaggggnctgggcgcggnggctcatgcctataatcccacactttgggaggctgaggcagggggatacctgagttangagtgaagaacancctgccacatggnaaacccntcttactnaaaannaaaattnctggnngggnggnagggccngnanccactnntgggagg

SEQ ID NO: 11242 - DNA, 483 bp, Homo sapiens
  misc_feature 3, 4, 10: n = A,T,C or G
agnngacagnagggctgccatggcattatttaatgaaataatttttaaaaatgcttttattttactgtaagccattgaagaaaaattttactcaaagtttaacaagtgtttagttcatgatgaggcatttgcagctgtaagcaatcatattactgtgccatcatttagttttatggaaaatgaaaacgtttacttaaggctgttaaaagtttgttttttaatagtgcctcctaagcaatacaggctaccacttacttttgacatcgagggaaaaagagttactcagattcattcaagctttagttatattgatttctacgatgggtttttcttagcatgtcaagtgattcctgttttatagtgaaggcattactttgagtcaatatcaaagtacatgatcccctcaaccttcaactgtgtttcctgctttgtgaggtgccaacaatagcaagaagggataatttaaattccgctttccatagg
